United States Patent Application Publication US 2018/0126003 A1 - sequence listing, part 186

SEQ ID NO: 331883 - DNA, 2631 bp, Artificial Sequence
  derived and/or modified sequence
atgtgtgagtcgcccccagtccagcccagtgcctcaagaaacacgcctccaggcccagccccagctccagcccctctggacccacctctctcaccttaagacccactggatcgggtaccctcggtcctaggatccaggggccagtgggcaaaggcctggcatgcctgcttcaatctcctccatcttcccaggtccaactctgcttttgtcttgtggctcagaaggtctctttgctgaggggcagggagcatagaaggacttgcggcctggccactcaaggaacatagccatctcacctgcttctctctttccccctctccctctgctcctcttcccattttgacagaactggactcagaggatgccccgccatgctgccgtctggccttgggagagccccctccctatggcgctgcacctatcggtattccccgacctccaccccctcggcctggcatgcattcgccaccgccgcgaccagccccctcacctggcacctgggagagccagcccgccaggtcggtgaggctgggaggaccaggagggggtgctgggggtgctgggggtggccgtgttctcgagtgtcccagcatccgcatcacctccatctctcccacgccggagccgccagcagcgctggaggacaaccctgatgcctggggggacggctctcctagagattaccccccaccagaaggctttgggggctacagagaagcagggggccagggtgggggggccttcttcagcccaagccctggcagcagcagcctgtcctcgtggagcttcttctccgatgcctctgacgaggcagccctgtatgcagcctgcgacgaggtggagtctgagctaaatgaggcggcctcccgctttggcctgggctccccgctgccctcgccccgggcctcccctcggccatggacccccgaagatccctggagcctgtatggtccaagccccggaggccgagggccagaggatagctggctactcctcagtgctcctgggcccaccccagcctccccgcggcctgcctctccatgtggcaagcggcgctattccagctcgggaaccccatcttcagcctccccagctctgtcccgccgtggcagcctgggggaagaggggtctgagccacctccaccacccccattgcctctggcccgggacccgggctcccctggtccctttgactatgtgggggccccaccagctgagagcatccctcagaagacacggcggacttccagcgagcaggcagtggctctgcctcggtctgaggagcctgcctcatgcaatgggaagctgcccttgggagcagaggagtctgtggctcctccaggaggttcccggaaggaggtggctggcatggactacctggcagtgccctccccactcgcttggtccaaggcccggattgggggacacagccctatcttcaggacctctgccctacccccactggactggcctctgcccagccaatatgagcagctggagctgaggatcgaggtacagcctagagcccaccaccgggcccactatgagacagaaggcagccgtggagctgtcaaagctgcccctggcggtcaccccgtagtcaagctcctaggctacagtgagaagccactgaccctacagatgttcatcggcactgcagatgaaaggaacctgcggcctcatgccttctatcaggtgcaccgtatcacaggcaagatggtggccacggccagctatgaagccgtagtcagtggcaccaaggtgttggagatgactctgctgcctgagaacaacatggcggccaacattgactgcgcgggaatcctgaagcttcggaattcagacattgagcttcggaagggtgagacggacatcgggcgcaaaaacacacgtgtacggctggtgttccgggtacacgtgccccagggcggcgggaaggtcgtctcagtacaggcagcatcggtgcccatcgagtgctcccagcgctcagcccaggagctgccccaggtggaggcctacagccccagtgcctgctctgtgagaggaggcgaggaactggtactgactggctccaacttcctgccagactccaaggtggtgttcattgagaggggtcctgatgggaagctgcaatgggaggaggaggccacagtgaaccgactgcagagcaacgaggtgacgctgaccctgactgtccccgagtacagcaacaagagggtttcccggccagtccaggtctacttttatgtctccaatgggcggaggaaacgcagtcctacccagagtttcaggtttctgcctgtgatctgcaaagaggagcccctaccggactcatctctgcggggtttcccttcagcatcggcaaccccctttggcactgacatggacttctcaccacccaggcccccctacccctcctatccccatgaagaccctgcttgcgaaactccttacctatcagaaggcttcggctatggcatgccccctctgtacccccagacggggcccccaccatcctacagaccgggcctgcggatgttccctgagactaggggtaccacagtgagtgagatcattggccgagacctgagtggcttccctgcacctcctggagaagagcctcctgcctga

SEQ ID NO: 331884 - DNA, 2509 bp, Artificial Sequence
  derived and/or modified sequence
atgtgtgagtcgcccccagtccagcccagtgcctcaagaaacacgcctccaggcccagccccagctccagcccctctggacccacctctctcaccttaagacccactggatcgggtaccctcggtcctaggatccaggggccagtgggcaaaggcctggcatgcctgcttcaatctcctccatcttcccaggtccaactctgcttttgtcttgtggctcagaagaactggactcagaggatgccccgccatgctgccgtctggccttgggagagccccctccctatggcgctgcacctatcggtattccccgacctccaccccctcggcctggcatgcattcgccaccgccgcgaccagccccctcacctggcacctgggagagccagcccgccaggtcggtgaggctgggaggaccaggagggggtgctgggggtgctgggggtggccgtgttctcgagtgtcccagcatccgcatcacctccatctctcccacgccggagccgccagcagcgctggaggacaaccctgatgcctggggggacggctctcctagagattaccccccaccagaaggctttgggggctacagagaagcagggggccagggtgggggggccttcttcagcccaagccctggcagcagcagcctgtcctcgtggagcttcttctccgatgcctctgacgaggcagccctgtatgcagcctgcgacgaggtggagtctgagctaaatgaggcggcctcccgctttggcctgggctccccgctgccctcgccccgggcctcccctcggccatggacccccgaagatccctggagcctgtatggtccaagccccggaggccgagggccagaggatagctggctactcctcagtgctcctgggcccaccccagcctccccgcggcctgcctctccatgtggcaagcggcgctattccagctcgggaaccccatcttcagcctccccagctctgtcccgccgtggcagcctgggggaagaggggtctgagccacctccaccacccccattgcctctggcccgggacccgggctcccctggtccctttgactatgtgggggccccaccagctgagagcatccctcagaagacacggcggacttccagcgagcaggcagtggctctgcctcggtctgaggagcctgcctcatgcaatgggaagctgcccttgggagcagaggagtctgtggctcctccaggaggttcccggaaggaggtggctggcatggactacctggcagtgccctccccactcgcttggtccaaggcccggattgggggacacagccctatcttcaggacctctgccctacccccactggactggcctctgcccagccaatatgagcagctggagctgaggatcgaggtacagcctagagcccaccaccgggcccactatgagacagaaggcagccgtggagctgtcaaagctgcccctggcggtcaccccgtagtcaagctcctaggctacagtgagaagccactgaccctacagatgttcatcggcactgcagatgaaaggaacctgcggcctcatgccttctatcaggtgcaccgtatcacaggcaagatggtggccacggccagctatgaagccgtagtcagtggcaccaaggtgttggagatgactctgctgcctgagaacaacatggcggccaacattgactgcgcgggaatcctgaagcttcggaattcagacattgagcttcggaagggtgagacggacatcgggcgcaaaaacacacgtgtacggctggtgttccgggtacacgtgccccagggcggcgggaaggtcgtctcagtacaggcagcatcggtgcccatcgagtgctcccagcgctcagcccaggagctgccccaggtggaggcctacagccccagtgcctgctctgtgagaggaggcgaggaactggtactgactggctccaacttcctgccagactccaaggtggtgttcattgagaggggtcctgatgggaagctgcaatgggaggaggaggccacagtgaaccgactgcagagcaacgaggtgacgctgaccctgactgtccccgagtacagcaacaagagggtttcccggccagtccaggtctacttttatgtctccaatgggcggaggaaacgcagtcctacccagagtttcaggtttctgcctgtgatctgcaaagaggagcccctaccggactcatctctgcggggtttcccttcagcatcggcaaccccctttggcactgacatggacttctcaccacccaggcccccctacccctcctatccccatgaagaccctgcttgcgaaactccttacctatcagaaggcttcggctatggcatgccccctctgtacccccagacggggcccccaccatcctacagaccgggcctgcggatgttccctgagactaggggtaccacagtgagtgagatcattggccgagacctgagtggcttccctgcacctcctggagaagagcctcctgcctga

SEQ ID NO: 331885 - DNA, 856 bp, Artificial Sequence
  derived and/or modified sequence
ctgtttaaccctctctctgctctgggagcggccccttacatggtgtatgtgactccatggatattactggtttatttgtgtgtctactgctgaggagggctccctcagagccctgtggcagttttcccaaagagggtggggacagaggaggccacccctccatgcccagcccagccagtcctcttccttgcactgctctgcagcccagcgctcagcccaggagctgccccaggtggaggcctacagccccagtgcctgctctgtgagaggaggcgaggaactggtactgactggctccaacttcctgccagactccaaggtggtgttcattgagaggggtcctgatgggaagctgcaatgggaggaggaggccacagtgaaccgactgcagagcaacgaggtgacgctgaccctgactgtccccgagtacagcaacaagagggtttcccggccagtccaggtctacttttatgtctccaatgggcggaggaaacgcagtcctacccagagtttcaggtttctgcctgtgatctgcaaagaggagcccctaccggactcatctctgcggggtttcccttcagcatcggcaaccccctttggcactgacatggacttctcaccacccaggcccccctacccctcctatccccatgaagaccctgcttgcgaaactccttacctatcagaaggcttcggctatggcatgccccctctgtacccccagacggggcccccaccatcctacagaccgggcctgcggatgttccctgagactaggggtaccacagtgagtgagatcattggccgagacctgagtggcttccctgcacctcctggagaagagcctcctgcctga

SEQ ID NO: 331886 - DNA, 990 bp, Artificial Sequence
  derived and/or modified sequence
atgtttatcgggactgctgacgaacggaatctcaggccccacgccttctatcaggtgcatcgcatcaccgggaagatggtggcaacagcaagctatgaggcggtggtgtcggggaccaaggtgctcgagatgaccctattgccagagaataatatggcagctaatatcgattgcgcaggaattctcaagctccgcaactccgatattgagctccgcaaaggggagactgatataggaagaaaaaacacacgcgtgcgcctggtcttcagggtccatgttccacagggcggaggcaaggtggtgtcagttcaagctgcatctgtacctatcgaatgctcacagagatcagcccaagaactgcctcaggttgaagcttactctccttcggcgtgctccgtcagaggaggggaggaactcgtgctcaccggatctaactttctgccggactccaaggtggtgttcatcgagcgcggtccggacggcaaattgcaatgggaggaggaagccacagttaaccgtctccagtcaaatgaggtgactctgacactgacggtgccagaatactctaacaaaagggtgagcaggcctgtccaagtatatttttatgtcagcaatggcagaagaaaaagatcccccacacaatccttcagatttttgcctgtgatctgtaaggaagaaccgctccccgatagctcactcagaggctttccgtccgctagcgctactccattcgggaccgacatggacttcagcccgcctcgtccaccatacccaagctatccccacgaggaccctgcatgcgaaaccccatatttgagcgagggcttcggatacggaatgccacctctctatccccaaaccggtccccctccttcatatcgtcctgggttgcgcatgtttcccgagactcgtggcaccacagtgagtgaaattatcgggagagacctctcgggttttccagccccaccaggcgaggagccgcctgcctag

SEQ ID NO: 331887 - DNA, 2175 bp, Artificial Sequence
  derived and/or modified sequence
atgcactcaccacccccacggcctgcacccagcccgggaacttgggaatctcagccagctcgtagcgtgcgcctcggtggcccagggggtggcgctgggggagccggagggggacgggtgcttgagtgtccgtccatccggattacgtccatctcacctactcctgagccccctgcagccttagaagataatcctgacgcatggggtgacggaagccctcgcgattatcccccacctgaagggttcgggggataccgggaggccggagggcagggcggtggagcattcttctctccttctccaggctcctcatccctgagtagctggtctttttttagcgacgcctccgatgaggcagcactttatgccgcttgtgacgaggtggagagtgagctgaatgaggctgcgtctcgattcggattaggcagcccgctacccagtccccgtgcctcaccacgtccctggacgcccgaggatccctggtcactgtacgggccatctccagggggacgcggacccgaagacagttggctcctgctttccgcaccaggccctactccggcttcacccagacctgctagcccctgcggcaagcggaggtattcttcttccggcaccccttctagcgctagccctgcgctgagccggaggggctccctcggagaagagggaagtgagccacccccacccccacctctacctctggcaagagacccgggaagtcctggcccatttgattatgtgggggctcctccagccgaatccatcccccagaagactagaaggacctcgagcgaacaggccgtcgccctgcctcgatcagaagaaccagcgtcctgtaatggtaagctacctctgggggctgaagaatcggtggcccctccaggcggaagcagaaaggaagtcgctggtatggactacctggccgtcccgtctccgctcgcttggtctaaggcgagaattgggggtcattccccaatttttcgcacatctgcgctgcctcctctggattggcctttgcctagccagtacgaacaactggaactgagaattgaggtacaaccccgagcacaccatagagcacactacgagacggaggggtcacgcggtgccgttaaagccgctccaggtggccaccctgtggtcaagttactgggctactcggagaagccattaactttgcagatgtttatcgggacagctgacgaacggaatttgcgcccacacgctttttatcaggtccaccgcatcaccggcaaaatggtcgcgactgccagttatgaggcggttgtgtcaggcactaaggtcctggagatgaccctcctcccggagaataatatggccgcaaacattgactgtgcagggattttaaaactgcgcaactccgacatcgagctgcgcaaaggagagacggatattggacgtaaaaacacaagggtacgactagtgttccgtgtgcatgtgccccaaggcggagggaaggtggtgtccgttcaggcagcttctgttcccatagagtgtagccagcggtcagctcaagaactcccccaggtagaggcatacagcccgagcgcatgctccgtgcgcggtggtgaggaattagttctcaccgggagcaatttcttgccagattccaaggtcgtgtttatcgaaaggggaccagacgggaagctccagtgggaggaagaagccaccgttaatcgcctgcaaagtaatgaagtgacgcttacactgactgttcccgagtactctaacaaacgcgtgtccagacccgtgcaggtgtatttctatgtgagcaacggcaggaggaagcgaagccccactcagtctttccgctttctccccgttatctgcaaagaggagcctctgcctgattcctcccttcgagggttcccatccgcttccgccacgccgtttggaactgacatggatttcagccctcccagacccccatatcccagctatccccacgaggacccagcctgtgagacaccgtatctgtccgaggggtttggttatggtatgccacccctttatccacagacggggccacctccgtcttaccggccaggattaaggatgttccccgagactcgtggcacaacggtatcagagatcataggaagagacttatccggatttccagcacccccaggcgaggagccacctgcttag

SEQ ID NO: 331888 - DNA, 2349 bp, Artificial Sequence
  derived and/or modified sequence
atgcctgctagtattagctcaatctttcctggaccaacgctacttctgagctgcggatcagaagagctggattctgaagatgcccctccctgttgccgtctggctcttggagaacctccaccttacggcgcagctccaatcggcatccccaggccacctcccccaaggcctggcatgcactcgccaccgccacgacctgctccgtctccaggaacctgggaatcccagccagcacggtcggtgagactgggagggccaggcggtggcgcaggaggagctggagggggaagagtgcttgaatgccccagcatacgcatcacctcgatcagtccaacgcctgaaccacccgcagccctggaagacaaccccgatgcatggggggatggaagtccgagagattacccgccacctgagggtttcggtggctacagagaagctgggggacagggaggaggagcctttttctccccaagtcccggatcttcttctctttcgtcatggagcttcttcagtgacgctagcgacgaggccgcactctatgccgcatgcgacgaggttgagagcgagctcaacgaagcggctagtcgctttgggctcggttctcccctgccttctccacgcgcatcgccgaggccttggacccccgaggatccttggagtctctatggtccgagccctggcggacggggaccggaggacagctggctgcttctgagcgcgcctgggccaacacctgcttctcccaggcctgcaagcccatgtggaaagcgtaggtacagttcctctgggaccccatcatctgcatcacctgcactgtctcggcgtggctcactcggcgaagagggatcagagccccctccaccgccaccgttacccctggcgcgtgacccaggaagtcctggcccatttgactacgtgggggctcctcctgctgaaagtataccacaaaagaccaggcgtacatcaagtgaacaggccgtggctctaccacgttctgaggaacccgcaagttgcaatgggaagcttccactaggcgcagaagaatcggtggccccaccaggcggttctcgcaaggaagtggccggaatggattacctggccgttccctctccgctagcctggagtaaggccagaataggcggtcactcccctatcttccgcacatcagccttgccgccactggattggccactgccttcccagtatgagcagttggagcttcgcatcgaggtgcaaccacgggcacaccatagggctcactacgagaccgagggatcaagaggggctgttaaggcagctccaggcggacacccggtggtaaaactgctgggatattccgagaaacctctgacattacaaatgttcataggaaccgccgatgagcgcaacctgaggcctcatgctttctaccaagttcaccgcatcacagggaagatggtggcaacggcttcctacgaggctgttgtgagcggtactaaagttctggagatgacactgctgcctgagaataatatggccgcaaacatcgactgtgcaggcatcctcaaacttcggaattcagacatcgagctgagaaagggggaaactgacataggaaggaaaaatacacgcgtgcgacttgtcttccgcgtgcacgtgccacaggggggaggaaaggtggtatcagtgcaggcagcgtccgtccctattgaatgtagccagagatccgcccaagagctgccacaggtggaggcttactctcctagtgcctgtagcgtcaggggtggggaagagttggtgctcactggcagtaactttctacccgactccaaggtggtgttcatcgaaagaggtccagacggtaagttgcagtgggaggaggaggccactgtgaacagactgcaatccaacgaagtaactctgacgcttaccgtgcctgagtacagcaacaagcgcgtaagtcgtcctgtccaggtatacttctacgttagtaacgggcgtaggaaacgctcccctacacagtcgttccgcttcctgcccgtaatttgtaaagaggaaccccttcccgattcctcgcttagaggttttccatccgcaagcgccacaccttttgggacagatatggacttttccccaccgagaccaccatatccgagttacccgcacgaggacccggcttgcgaaactccttacctgtcagaggggtttggatatggcatgcctcctttgtacccccagaccggtcccccaccaagctacaggcccggactccgcatgtttccagaaacaagaggaaccactgtgagtgaaattattggcagggacctgagtggcttccccgctccccctggcgaggagcccccagcttag

SEQ ID NO: 331889 - DNA, 249 bp, Artificial Sequence
  derived and/or modified sequence
atggacttctctccccctagacctccctacccctcctatccccacgaagaccccgcttgtgaaactccatatctctccgaggggtttggatatggaatgccccctctgtatccgcagacaggacctcccccatcatataggcccggactcagaatgttcccggaaacacgcggaactacagtcagcgaaatcatcggaagggacttatcagggtttccagctccccctggagaagaaccaccggcatag

SEQ ID NO: 331890 - DNA, 417 bp, Artificial Sequence
  derived and/or modified sequence
atggagagattcctgaacagcaaggccagaagactgggcagctgcagccaccccgccttctacctgctgtgcgtgcccgacgaggacaccagctgcagcaccatctacctgcccctgaagagaagagccgaccccgaccagctgttcagcgacctgctgggcggcacccagagactgtggagcaacagattcggcaacgaggagagcttccccggcagagtgagagccctggtggacaccttctgctggatcgccagagccccccccctgggcaaccccctgagactggaggagagaatcgcctggagaatccagagactgaagagcggccagaccgccctgatcgagaagaagaagcagaagatcgaggaggacgtgagacaccagtgccagcagaccacctgcgacagatgctag

SEQ ID NO: 331891 - DNA, 132 bp, Artificial Sequence
  derived and/or modified sequence
atggagagcaccggcagcgtgggcgaggcccccggcggcagacacggccccagaagaggcccccaccccctgggcgccctgctgagatggagaggcggcggcggcagagccctggacccctgctgcccctag

SEQ ID NO: 331892 - DNA, 333 bp, Artificial Sequence
  derived and/or modified sequence
atgagctgccagcagagccagcagcagtgccagcccccccccaagtgcaccccaaaatgtccccctaaatgccccaccccaaaatgccctcccaagtgccctcccaaatgtccacctgttagctcctgctgcagcgtaagctcaggcggttgctgtggctcctctagcggcggcggctgtagcagcggaggcgggggttgttgtctgtcacatcacaggcgccatcgcagtcaccgccacaggttgcaatcctcgggttgttgctcccaaccatctggcggatcaagctgctgcggaggggattctggccaacacagcggcgggtgctgttag

SEQ ID NO: 331893 - protein, 98 aa, Artificial Sequence
  derived and/or modified sequence
MSVRELNRQLRGCGRDEALRLKQRRRTLKNRGYAQACRSKRLQQRRGLEAERARLAAQLDALRAEVARLARERDLYKARCDRLTSSGPGSGDPSHLFL

SEQ ID NO: 331894 - protein, 237 aa, Artificial Sequence
  derived and/or modified sequence
MALPPSPLAMEYVNDFDLMKFEVKREPSEGRPGPPTASLGSTPYSSVPPSPTFSEPGMVGATEGTRPGLEELYWLATLQQQLGAGEALGLSPEEAMELLQGQGPVPVDGPHGYYPGSPEETGAQHVQLAERFSDAALVSMSVRELNRQLRGCGRDEALRLKQRRRTLKNRGYAQACRSKRLQQRRGLEAERARLAAQLDALRAEVARLARERDLYKARCDRLTSSGPGSGDPSHLFL

SEQ ID NO: 331895 - protein, 65 aa, Artificial Sequence
  derived and/or modified sequence
MALPPSPLAMEYVNDFDLMKFEVKREPSEGRPGPPTASLGSTPYSSVPPSPTFSEPGMVGATEGT

SEQ ID NO: 331896 - DNA, 1517 bp, Artificial Sequence
  derived and/or modified sequence
gcctcagagaataaataggagactaagaggacaggcagacaaacaggacgagcctgggggctccaggcctggacggaggaagaagccagctatacggggtttctccatgctggccaagctggtctccaactcctgacctcgtgatccgcctgccttggcctcccaaagtgctggaatttacaggcgtgagccaccacgcccggcctggtcattctttctctccacaatccaatgaggaaactcatctgcccacccaactaccatcataaagtcctcaggtgatttctcaagctatacctccattgggacatctctctccaacctgagaccactggatatcacccacaatgctatatagcacctcaaactcagcatatctatgatgggtgtctgctcagcatccactcgccttttctggtgcactcctcccagcccagctccagaatggccctgccccccagccccctggccatggaatatgtcaatgactttgacttgatgaagtttgaggtaaagcgggaaccctctgagggccgacctggcccccctacagcctcactgggctccacaccttacagctcagtgcctccttcacccaccttcagtgaaccaggcatggtgggggcaaccgagggcacccggccaggcctggaggagctgtactggctggctaccctgcagcagcagctgggggctggggaggcattggggctgagtcctgaagaggccatggagctgctgcagggtcagggcccagtccctgttgatgggccccatggctactacccagggagcccagaggagacaggagcccagcacgtccagctggcagagcggttttccgacgcggcgctggtctcgatgtctgtgcgggagctaaaccggcagctgcggggctgcgggcgcgacgaggcgctgcggctgaagcagaggcgccgcacgctgaagaaccgcggctacgcgcaggcctgtcgctccaagcggctgcagcagcggcgcgggctggaggccgagcgcgcccgcctggccgcccagctggacgcgctgcgggccgaggtggcccgcctggcccgggagcgcgatctctacaaggctcgctgtgaccggctaacctcgagcggccccgggtccggggacccctcccacctcttcctctgagccgttcagagcaccttgtggtgtagtgggggctgggtggggtggctccgcccaggaggcggctgcacggttctctgcatcgttaccagagcgccttctggtcctagccacgccctgtatgaccgcgcaaatatccccaaagcttttgggtcctcaagtcatgcccgaatttagatgctggtcattttctggagaggggtcccctccccttacgaacacagaaacccagcccacatgactagcacgctgagctctgcagggaccagtgccaggcactggggggtggaagtgtggtgacacagtgaatgggaggtggaggagggttgcagctcccacctcagtttagtttttaattcagg

SEQ ID NO: 331897 - DNA, 1976 bp, Artificial Sequence
  derived and/or modified sequence
gagctgagcagaggcaccaggccctgctccatggagccttcagtctcctgggaagctgtgcctgtctggctctggcactgaccacatcctctcggccatttctgaagtgcactcctcccagcccagctccagaatggccctgccccccagccccctggccatggaatatgtcaatgactttgacttgatgaagtttgaggtaaagcgggaaccctctgagggccgacctggcccccctacagcctcactgggctccacaccttacagctcagtgcctccttcacccaccttcagtgaaccaggcatggtgggggcaaccgagggcacccggccaggcctggaggagctgtactggctggctaccctgcagcagcagctgggggctggggaggcattggggctgagtcctgaagaggccatggagctgctgcagggtcagggcccagtccctgttgatgggccccatggctactacccagggagcccagaggagacaggagcccagcacgtccagctggcagagcggttttccgacgcggcgctggtctcgatgtctgtgcgggagctaaaccggcagctgcggggctgcgggcgcgacgaggcgctgcggctgaagcagaggcgccgcacgctgaagaaccgcggctacgcgcaggcctgtcgctccaagcggctgcagcagcggcgcgggctggaggccgagcgcgcccgcctggccgcccagctggacgcgctgcgggccgaggtggcccgcctggcccgggagcgcgatctctacaaggctcgctgtgaccggctaacctcgagcggccccgggtccggggacccctcccacctcttcctctgagccgttcagagcaccttgtggtgtagtgggggctgggtggggtggctccgcccaggaggcggctgcacggttctctgcatcgttaccagagcgccttctggtcctagccacgccctgtatgaccgcgcaaatatccccaaagcttttgggtcctcaagtcatgcccgaatttagatgctggtcattttctggagaggggtcccctccccttacgaacacagaaacccagcccacatgactagcacgctgagctctgcagggaccagtgccaggcactggggggtggaagtgtggtgacacagtgaatgggaggtggaggagggttgcagctcccacctcagtttagtttttaattcagggttttcaacctgtaacacattaaagctgtaattagcaatgaggctgtattttcattctgaagcttgtaacctccccattttagcactacagaattttcaagatttcaatatccaacaactagatagattaggacctctatccgagatgctttttccctgcccaaccctgtggccttcagggctcagagcagcaaaggcctgaagagtgagctctgggggttgttggtgtgggttgggagagagctgtgtgcagaagtctggaaacctgggtcctagtcccagctcttccatgggatccccctgtcaccctgagcaaatcagttgcttcctggacttgtgttacttcatctaattctcatgtggattggacgacttctgctccctttccagttctggcatctccccagtatggaagtcccggtggtctccccaagaagtccccaagacaatctcgccaaaggcacctcctatcctgctgcagtttcccagctgcagcctaggcaggggatgcacagcccaggcgaggaagcctggcttctctgtgagcacatacgtgggtcctcggcagctccctccaggctgtctgggcctccagacctgcacagggtgctcctgccacctcccacctctctgagggctgaggtgagacttctcctgggatgacaatttgctgagagagtgcagcttttgtgaattaaacttgaagtccaggcagaattctaatgcaataagctaaatgttcttgcaatttaagaagtgttcattcttta

SEQ ID NO: 331898 - DNA, 737 bp, Artificial Sequence
  derived and/or modified sequence
gggggtgtgtacgccatgagggggaggaagccgagaagcacctcccactgaagccggcggtaaccgccccacgcgagaccacccaccagccaggagcggtcgcaggacccgcagcggcgcgaggccttgtttacaccgactgccgccactgcgttggccaaccgctcctccgtcacgcgcttcgctcgtcacgcatctcgcggcttcctggccggcgggctgcaaacgtcacacgacggccccgcccccttggccagccaactggacagcggagcacgatgattgataggccaataagatatgcaaatgatctccttaccttattggttggaggcctcaggaccacagatgacctcagagagctggccctttaagaatgccctttgggctctgtgcccacagccccctggagctgagcagaggcaccaggccctgctccatggagccttcagtctcctgggaagctgtgcctgtctggctctggcactgaccacatcctctcggccatttctgaagtgcactcctcccagcccagctccagaatggccctgccccccagccccctggccatggaatatgtcaatgactttgacttgatgaagtttgaggtaaagcgggaaccctctgagggccgacctggcccccctacagcctcactgggctccacaccttacagctcagtgcctccttcacccaccttcagtgaaccaggcatggtgggggcaaccgagggcacc

SEQ ID NO: 331899 - DNA, 2103 bp, Artificial Sequence
  derived and/or modified sequence
cgccgggggtgtgtacgccatgagggggaggaagccgagaagcacctcccactgaagccggcggtaaccgccccacgcgagaccacccaccagccaggagcggtcgcaggacccgcagcggcgcgaggccttgtttacaccgactgccgccactgcgttggccaaccgctcctccgtcacgcgcttcgctcgtcacgcatctcgcggcttcctggccggcgggctgcaaacgtcacacgacggccccgcccccttggccagccaactggacagcggagcacgatgattgataggtgcactcctcccagcccagctccagaatggccctgccccccagccccctggccatggaatatgtcaatgactttgacttgatgaagtttgaggtaaagcgggaaccctctgagggccgacctggcccccctacagcctcactgggctccacaccttacagctcagtgcctccttcacccaccttcagtgaaccaggcatggtgggggcaaccgagggcacccggccaggcctggaggagctgtactggctggctaccctgcagcagcagctgggggctggggaggcattggggctgagtcctgaagaggccatggagctgctgcagggtcagggcccagtccctgttgatgggccccatggctactacccagggagcccagaggagacaggagcccagcacgtccagctggcagagcggttttccgacgcggcgctggtctcgatgtctgtgcgggagctaaaccggcagctgcggggctgcgggcgcgacgaggcgctgcggctgaagcagaggcgccgcacgctgaagaaccgcggctacgcgcaggcctgtcgctccaagcggctgcagcagcggcgcgggctggaggccgagcgcgcccgcctggccgcccagctggacgcgctgcgggccgaggtggcccgcctggcccgggagcgcgatctctacaaggctcgctgtgaccggctaacctcgagcggccccgggtccggggacccctcccacctcttcctctgagccgttcagagcaccttgtggtgtagtgggggctgggtggggtggctccgcccaggaggcggctgcacggttctctgcatcgttaccagagcgccttctggtcctagccacgccctgtatgaccgcgcaaatatccccaaagcttttgggtcctcaagtcatgcccgaatttagatgctggtcattttctggagaggggtcccctccccttacgaacacagaaacccagcccacatgactagcacgctgagctctgcagggaccagtgccaggcactggggggtggaagtgtggtgacacagtgaatgggaggtggaggagggttgcagctcccacctcagtttagtttttaattcagggttttcaacctgtaacacattaaagctgtaattagcaatgaggctgtattttcattctgaagcttgtaacctccccattttagcactacagaattttcaagatttcaatatccaacaactagatagattaggacctctatccgagatgctttttccctgcccaaccctgtggccttcagggctcagagcagcaaaggcctgaagagtgagctctgggggttgttggtgtgggttgggagagagctgtgtgcagaagtctggaaacctgggtcctagtcccagctcttccatgggatccccctgtcaccctgagcaaatcagttgcttcctggacttgtgttacttcatctaattctcatgtggattggacgacttctgctccctttccagttctggcatctccccagtatggaagtcccggtggtctccccaagaagtccccaagacaatctcgccaaaggcacctcctatcctgctgcagtttcccagctgcagcctaggcaggggatgcacagcccaggcgaggaagcctggcttctctgtgagcacatacgtgggtcctcggcagctccctccaggctgtctgggcctccagacctgcacagggtgctcctgccacctcccacctctctgagggctgaggtgagacttctcctgggatgacaatttgctgagagagtgcagcttttgtgaattaaacttgaagtcca

SEQ ID NO: 331900 - DNA, 714 bp, Artificial Sequence
  derived and/or modified sequence
atggctctgccacccagcccactggctatggaatatgttaatgatttcgacctgatgaaattcgaggtcaagagagagccatccgaaggccgtccgggtccccccacagcttccctgggatccacaccatatagttcggtgccaccttctcctacattcagcgagcctggaatggtgggtgccaccgagggtacgcgtcccggcctggaagagctttattggctcgccaccctccagcaacagttaggggccggcgaagctctaggcctgtcacctgaggaagctatggagctcctgcaagggcaggggcccgttcctgtggacggcccacacggatattaccccggctccccagaggagacaggagcccagcatgtgcagttagccgagcgtttctctgatgcggctctggtgagcatgtcagttcgcgagctgaaccggcagcttcgggggtgcggtagggacgaggctctgcgattgaagcagcgacgccggacacttaagaatcggggatatgcacaggcttgtagatctaaacgtctccagcaaaggcggggcttagaggccgagcgagctaggctcgctgcccagctggacgcactgcgggcagaggtcgcccggctggcccgagagcgcgacctctataaagcacggtgtgacagactcacttcctccggacctggttccggcgatccctcacacctgtttctatag

SEQ ID NO: 331901 - DNA, 714 bp, Artificial Sequence
  derived and/or modified sequence
atggccctacctccatctccactcgctatggaatacgtgaatgattttgacctgatgaagttcgaggtcaaaagagaaccatcagagggtcggccgggaccccccacagccagcctcggctcaaccccgtacagtagtgtccctccgtccccgacgttttccgaaccgggtatggtgggagcaaccgaaggaaccagaccagggctagaggagctctattggctggccacactgcagcagcagctgggggcaggggaagcactaggcttgagtccggaagaagccatggagctgcttcagggacagggccccgttccggtggatgggccccacgggtactatccaggaagtccagaagagacgggagcccaacacgtgcagctggccgagaggtttagcgatgccgctctggtcagtatgtctgtccgggagctgaaccgccaactgcgggggtgcggacgcgatgaggctttacggctgaaacaacgtcgcagaacactgaagaatcggggttacgcacaggcttgccggtcgaaaagactccagcagcggcgcgggcttgaggccgaacgcgcaagattggcagcccagctggacgcacttagagccgaagttgccagactggctcgggagcgggatctatataaggcccgctgcgacaggctcacgtcgtctgggcccggttccggcgacccgtcacacttgtttctatag

SEQ ID NO: 331902 - DNA, 198 bp, Artificial Sequence
  derived and/or modified sequence
atggcccttcctccttcccccctggctatggaatacgtgaatgacttcgatctgatgaagttcgaagttaaacgagagcctagtgagggaaggccggggccaccgacggcttctttgggcagcactccttattcttccgtgcctccgtctcctacctttagtgagcctgggatggtgggggcaacagaaggaacgtag

SEQ ID NO: 331903 - DNA, 714 bp, Artificial Sequence
  derived and/or modified sequence
atggcactgccccccagccctttggccatggagtacgtcaatgattttgacttgatgaaattcgaggtgaagcgggaaccgagtgaagggcggcctggccctcccacagcttcactcggcagcactccatatagctctgtccctccgtcccctaccttctcagaacccggtatggtaggggccaccgagggcacgagacctgggcttgaagaactgtactggctcgccaccctacagcagcaactgggggcaggggaagccttagggctcagtcccgaggaagcaatggaactgctgcaaggtcagggtcctgtgcctgttgacgggccacacggctattacccgggctcaccggaagaaactggtgctcaacacgtacaacttgctgagaggttttccgacgctgccttggtgtcaatgagcgtgcgcgagctgaaccgacagctgcggggctgtggtcgtgatgaagctctccgactgaaacagagaaggcgcacgctgaagaatcgcgggtatgctcaagcctgtagatcaaaaaggctgcagcagcggcgcggactggaggcagagcgggcgaggcttgccgctcagctggatgctcttcgcgccgaagtggcccgcttggcccgcgaacgggatctgtacaaagcccgttgtgacaggcttacaagtagtggacctgggtccggtgatccctctcatcttttcttgtag

SEQ ID NO: 331904 - DNA, 714 bp, Artificial Sequence
  derived and/or modified sequence
atggccctgccccccagccccctggccatggagtatgtgaatgactttgacctgatgaagtttgaggtgaagcgggagcccagcgagggccggcccggccccccaacagccagcctgggcagcaccccctacagctctgtgccccccagccccaccttcagcgagcccggcatggtgggcgccacagagggcaccaggcctggcctggaggagctgtactggctggccaccctgcagcagcagctgggcgctggggaggccctgggcctgagccctgaggaggccatggagctgctgcagggccagggccctgtgcctgtggatggcccccacggctactacccaggcagccctgaggagactggagcccagcacgtgcagctggccgagcgcttcagtgatgctgccctggtgtccatgtctgtgcgggagctgaaccggcagctgcggggctgcggcagagatgaggccctgcggctgaagcagaggaggaggaccctgaagaacagaggctacgcccaggcctgccgcagcaagaggctgcagcagaggcggggcctggaggccgagcgggcccggctggccgcccagctggatgccctgcgggcagaggtggcccggctggcccgggagcgggacctgtacaaggcccgctgtgaccggctgaccagcagcggccctggcagcggggaccccagccacctgttcctgtag

SEQ ID NO: 331905 - DNA, 198 bp, Artificial Sequence
  derived and/or modified sequence
atggccctgccccccagccccctggccatggagtatgtgaatgactttgacctgatgaagtttgaggtgaagcgggagcccagcgagggccggcccggccccccaacagccagcctgggcagcaccccctacagctctgtgccccccagccccaccttcagcgagcccggcatggtgggcgccacagagggcacctag

SEQ ID NO: 331906 - DNA, 714 bp, Artificial Sequence
  derived and/or modified sequence
atggccctgccccccagccccctggccatggagtacgtgaacgactttgacttgatgaaattcgaagtgaaacgagagccctctgagggcaggcccgggccgcccaccgccagcctgggatcaaccccttattctagtgtacctccaagcccaactttttccgaacccggtatggtgggcgcaaccgaggggactagacccggactggaggaactttattggttggcaacactccagcaacaattgggagccggggaagcgctggggttgtcccccgaggaggccatggaactcctgcagggccagggcccagttcctgtcgacggaccccatggttactaccctggtagccccgaagagacaggcgctcagcacgtgcagctagccgaaagattcagcgatgctgccctggtgtcaatgtcagtcagggagctcaatcggcagttgaggggctgtggcagggacgaagccctccgtctgaagcaaaggcgcagaaccctcaaaaaccgcgggtacgcccaggcttgcagatccaaacgcctccaacaaaggagggggctggaggccgagcgggctcggttggccgcacaactggatgctctgcgagcggaggttgcaagactggctcgagaacgggacctttacaaagcaaggtgcgataggttgacctcctcaggaccagggagtggcgacccctcccatctgtttctttag

SEQ ID NO: 331907 - DNA, 714 bp, Artificial Sequence
  derived and/or modified sequence
atggccctgccccccagccccctggccatggagtacgtgaacgactttgacttgatgaaatttgaggtgaagagagagccctctgagggcagacctggtccgcctactgctagcctaggatctactccttactcaagcgtgcccccaagccccaccttctcagagcccggtatggtcggcgcaaccgaaggaacccggcctggcctggaggagctttattggcttgccacgctccagcagcagctgggtgcaggcgaggcactgggactgtcgcctgaagaagccatggagctgctgcaaggacagggacccgtccccgtggatggcccccacgggtactaccccgggtcacctgaagagactggggctcaacacgtgcagctggcagaaaggttctccgacgccgcactagttagcatgtcagtgcgcgagctgaaccggcagctgaggggatgtgggcgggacgaggccctaagactgaagcagagaaggcgaaccttgaagaaccgagggtatgcccaggcatgcaggtcaaagagactccagcagaggcggggactggaggctgagcgagcccgactcgcagcacaactcgatgccctgcgggccgaggtcgcccgtctggccagagagcgggacctgtataaagcgcgatgcgaccggctgacctccagcggccccggttccggggatccatcccacctctttctgtag

SEQ ID NO: 331908 - DNA, 198 bp, Artificial Sequence
  derived and/or modified sequence
atggccctgccccccagccccctggccatggagtacgtgaacgacttcgaccttatgaaatttgaggtgaaacgcgagccaagtgaaggacgaccagggccgcccacagcaagtctcggatcaactccctactctagcgtcccaccaagtccaaccttctctgagcctggcatggtgggtgccaccgaagggacctag

SEQ ID NO: 331909 - DNA, 714 bp, Artificial Sequence
  derived and/or modified sequence
atggccctgccccccagccccctggccatggagtacgtgaacgactttgacttgatgaaattcgaagtaaagcgggagccgtcagaaggcaggcctggcccaccaacagcgagcctgggtagcaccccctactcttcggtccccccaagtcccacattttccgagcccgggatggtaggcgccacggaaggcactcggcctggcctcgaggaactgtattggctggccactctgcaacagcagcttggcgctggcgaagcacttgggttatctcccgaggaagcgatggagcttttacagggccagggacccgtccctgtggacggacctcacggctattatccaggttctcccgaagaaacaggcgctcagcacgttcagctggccgagagattttcggatgccgccctagtaagcatgagcgtacgggagcttaataggcagctgcggggatgtgggcgcgacgaagctttgcggttaaaacaacggcggcgtactcttaaaaacagaggttacgcacaggcctgtcgatccaaacggctccagcagcgtaggggtctggaggctgaaagggcacgtcttgcagctcagcttgatgcgctcagagccgaggtcgcacgacttgcgcgtgaaagagatctgtataaggcacgctgcgatcgccttacaagttctggccccggatccggtgatccctcccacctgtttctctag

SEQ ID NO: 331910 - DNA, 714 bp, Artificial Sequence
  derived and/or modified sequence
atggccttgcccccatcacctctagctatggaatatgtgaatgatttcgacttgatgaagttcgaggtgaagagggagccgtccgagggaagacctggcccacccactgcctcacttggctccaccccctatagttcagttcctcctagccctacttttagcgaaccgggtatggtgggtgccacagaggggacgagacctgggcttgaggagctgtactggctggctactctccagcagcagctcggtgcgggagaggccctcggactgtctcccgaagaagcaatggagctgcttcagggtcagggccctgtccccgtcgatgggcctcacggctactacccgggaagtccggaagaaacaggcgcacaacacgtgcagctcgctgagaggttttcagatgccgcactcgtctctatgagtgtcagagaactaaataggcaactgagagggtgcgggagagacgaagcactgagacttaaacagagaaggagaaccttaaagaaccgtggatatgcccaggcctgccggtccaaacgactccagcagcgacgtggactcgaggcagaacgtgctcggctggcagcacagctagacgcgctccgagctgaagtggccaggctagcccgtgagcgggacctgtataaggctcgttgcgaccggctgacgagcagcggccctggctctggtgatccatcccacctgtttttgtag

SEQ ID NO: 331911 - DNA, 714 bp, Artificial Sequence
  derived and/or modified sequence
atggccctacctccttcacccctggccatggaatatgtgaacgacttcgatttgatgaaattcgaggtaaagcgagaaccttcagagggcaggcctggtcctccaaccgccagcctgggctcaaccccatattctagtgtaccgccttctcccacgttcagcgagcccggaatggttggagctaccgagggaacgcggccaggtttggaggaattgtactggttagcgacactgcaacagcagttgggagccggagaagctctcgggcttagtccggaagaggccatggaactcctgcagggccaaggcccagtgccagtggacggccctcacggatattaccccggaagcccggaggagaccggcgctcagcacgtccagctcgcggagcggttttcggatgctgccttggtaagcatgagcgtgcgtgagctcaaccggcagttaagagggtgtggtcgcgatgaggcactgaggctgaaacagcgacggagaacattaaagaaccgcggatacgcccaagcctgcaggagcaaacggctgcagcaacgcagggggctggaggctgagcgtgctcgcctggccgctcagctagatgcgctgagggcggaggtcgctagattagctcgcgagcgtgacctctacaaggccaggtgtgatagactcacaagcagtgggccaggctctggggaccctagtcatctgttcctctag

SEQ ID NO: 331912 - DNA, 198 bp, Artificial Sequence
  derived and/or modified sequence
atggctctgcccccttctccccttgctatggagtatgtgaatgacttcgatctgatgaagtttgaagttaaaagagagccatccgagggccgtccaggaccacctactgcctcactgggctctacaccctattcgagcgttcctccctctccaacatttagcgaacccggaatggtcggcgctaccgaaggaacttag

SEQ ID NO: 331913 - DNA, 714 bp, Artificial Sequence
  derived and/or modified sequence
atggccctccctccatctccgttggctatggagtacgtaaatgactttgatctgatgaagtttgaagtgaagcgagaaccctctgagggaaggcccggaccccctactgcatcccttggaagtaccccttactcttccgtccccccttctccaaccttcagtgagcctgggatggtgggcgcaacagaggggacacggcctggccttgaagagttatactggctggctaccctgcaacaacagctaggtgctggggaagccctgggtctttctcctgaagaagccatggagctcctgcagggccagggtcccgtgcctgttgacggtccccacggctattatccgggttcccctgaagagaccggagcgcagcacgtgcagctggcggagcggttctccgatgcagctcttgtgagcatgtccgtccgtgagctgaataggcagttacgaggttgtggaagggacgaggccctgcggttgaaacagcgcaggcggacactgaagaacagaggctacgcccaagcctgcagatccaaacgtttgcaacagaggagaggactggaggctgaacgcgctcgcctggcagctcagcttgatgccctacgggcagaagtcgccagactagcgcgtgagcgagatctctataaagccaggtgtgaccggttaacaagttcaggacctggaagcggcgaccccagccacctctttctatag

SEQ ID NO: 331914 - DNA, 714 bp, Artificial Sequence
  derived and/or modified sequence
atggccctgccccccagccccctggccatggagtacgtgaacgacttcgacctgatgaagttcgaggtgaagagagagcccagcgagggcagacccggcccccccaccgccagcctgggcagcaccccctacagcagcgtgccccccagccccaccttcagcgagcccggcatggtgggcgccaccgagggcaccagacccggcctggaggagctgtactggctggccaccctgcagcagcagctgggcgccggcgaggccctgggcctgagccccgaggaggccatggagctgctgcagggccagggccccgtgcccgtggacggcccccacggctactaccccggcagccccgaggagaccggcgcccagcacgtgcagctggccgagagattcagcgacgccgccctggtgagcatgagcgtgagagagctgaacagacagctgagaggctgcggcagagacgaggccctgagactgaagcagagaagaagaaccctgaagaacagaggctacgcccaggcctgcagaagcaagagactgcagcagagaagaggcctggaggccgagagagccagactggccgcccagctggacgccctgagagccgaggtggccagactggccagagagagagacctgtacaaggccagatgcgacagactgaccagcagcggccccggcagcggcgaccccagccacctgttcctgtag

SEQ ID NO: 331915 - DNA, 198 bp, Artificial Sequence
  derived and/or modified sequence
atggccctgccccccagccccctggccatggagtacgtgaacgacttcgacctgatgaagttcgaggtgaagagagagcccagcgagggcagacccggcccccccaccgccagcctgggcagcaccccctacagcagcgtgccccccagccccaccttcagcgagcccggcatggtgggcgccaccgagggcacctag

SEQ ID NO: 331916 - DNA, 297 bp, Artificial Sequence
  derived and/or modified sequence
atgtccgtaagagaactcaaccggcagctcagagggtgcggcagggatgaggccctgcggcttaaacaacgccgccggacactgaagaaccgagggtacgcgcaggcctgcagaagcaagaggttgcagcagcgccgtgggctcgaggcagagagagcccgccttgccgcacaattggatgctctcagggcagaagtggctagactggccagagaaagggacctctacaaggcccgctgcgatcggttaacatcatcaggtcccggctctggagatcccagtcacctcttcttgtag

SEQ ID NO: 331917 - DNA, 297 bp, Artificial Sequence
  derived and/or modified sequence
atgtcggtccgagagctgaatcgccagctgcgtggatgcggaagagacgaggctcttaggctgaaacagcgacgaagaactctgaaaaatagaggatacgcgcaggcttgccgtagcaagcgccttcagcaacggcggggtctcgaagcagagagggcgcgactggccgcccagctggatgccctccgagcagaagtggcaagactggcccgagagagagacctgtacaaggctagatgcgaccggctgacctctagcggtcccgggagtggcgacccgtcccacctttttttatag

SEQ ID NO: 331918 - DNA, 297 bp, Artificial Sequence
  derived and/or modified sequence
atgtctgtgcgggagctgaaccggcagctgcggggctgcggcagagatgaggccctgcggctgaagcagaggaggaggaccctgaagaacagaggctacgcccaggcctgccgcagcaagaggctgcagcagaggcggggcctggaggccgagcgggcccggctggccgcccagctggatgccctgcgggcagaggtggcccggctggcccgggagcgggacctgtacaaggcccgctgtgaccggctgaccagcagcggccctggcagcggggaccccagccacctgttcctgtag

SEQ ID NO: 331919 - DNA, 297 bp, Artificial Sequence
  derived and/or modified sequence
atgagcgtgcgggagctgaaccggcagctgcggggctgcggccgggacgaagctctgcggctgaagcagagacgacgcactctcaaaaatcgcggctatgcccaagcttgcagatccaagcggctccaacaacgaagaggcctggaggccgaaagggcccggctggcagcacaactggatgcgctcagagctgaagttgcccggttagcaagagaacgggacttgtacaaggcccgctgcgacaggctcactagtagtggcccaggttctggcgacccttctcacctctttctgtag

SEQ ID NO: 331920 - DNA, 297 bp, Artificial Sequence
  derived and/or modified sequence
atgagcgtgcgggagctgaaccggcagctgcggggctgcggccgggatgaggcactgagactgaagcagcggagaaggacattgaagaaccggggctacgcgcaggcttgccgtagtaaacgtctgcaacagaggcgaggcctggaagccgagcgggcgagactcgcggcccagttggacgctctgagggctgaagtggctagattggccagggaaagggatctttacaaggcacgctgtgaccggttgacctcctccggcccaggtagcggagacccttcacacctttttctctag

SEQ ID NO: 331921 - DNA, 810 bp, Artificial Sequence
  derived and/or modified sequence
ggagggttgggggctgtctgggtgcgggtccactggacacacccgggcctggagctggatgccggggatcccagagacgagcccggggtttaggtgcgcgacgggctcgcctgaccgtggccggccctgcaccgtggggcgcccgcctgactggagcaacggtcagctggggggcccggggagcgtcggggcctggggcgggctctggaccgaaacagactgcgtggaagggcgagccttccggtgaagctggcagagcggttttccgacgcggcgctggtctcgatgtctgtgcgggagctaaaccggcagctgcggggctgcgggcgcgacgaggcgctgcggctgaagcagaggcgccgcacgctgaagaaccgcggctacgcgcaggcctgtcgctccaagcggctgcagcagcggcgcgggctggaggccgagcgcgcccgcctggccgcccagctggacgcgctgcgggccgaggtggcccgcctggcccgggagcgcgatctctacaaggctcgctgtgaccggctaacctcgagcggccccgggtccggggacccctcccacctcttcctctgagccgttcagagcaccttgtggtgtagtgggggctgggtggggtggctccgcccaggaggcggctgcacggttctctgcatcgttaccagagcgccttctggtcctagccacgccctgtatgaccgcgcaaatatccccaaagcttttgggtcctcaagtcatgcccgaatttagatgctggtcattttctggagaggggtcccctccccttacgaacacagaaaccca

SEQ ID NO: 331922 - DNA, 788 bp, Artificial Sequence
  derived and/or modified sequence
ccaaatcctgtgagggtcaccgggttgcaggcttcaggacagggaaacgcagcgcgttggagggttgggggctgtctgggtgcgggtccactggacacacccgggcctggagctggatgccggggatcccagagacgagcccggggtttaggtgcgcgacgggctcgcctgaccgtggccggccctgcaccgtggggcgcccgcctgactggagcaacgctggcagagcggttttccgacgcggcgctggtctcgatgtctgtgcgggagctaaaccggcagctgcggggctgcgggcgcgacgaggcgctgcggctgaagcagaggcgccgcacgctgaagaaccgcggctacgcgcaggcctgtcgctccaagcggctgcagcagcggcgcgggctggaggccgagcgcgcccgcctggccgcccagctggacgcgctgcgggccgaggtggcccgcctggcccgggagcgcgatctctacaaggctcgctgtgaccggctaacctcgagcggccccgggtccggggacccctcccacctcttcctctgagccgttcagagcaccttgtggtgtagtgggggctgggtggggtggctccgcccaggaggcggctgcacggttctctgcatcgttaccagagcgccttctggtcctagccacgccctgtatgaccgcgcaaatatccccaaagcttttgggtcctcaagtcatgcccgaatttagatgctggtcattttctggagaggggtcccctccccttacgaacacagaaacccagcccacat

SEQ ID NO: 331923 - DNA, 297 bp, Artificial Sequence
  derived and/or modified sequence
atgtccgtccgcgagttaaaccgccaattgcgtggctgcggacgcgacgaagccctaaggctcaagcagcgaaggcgcactctgaaaaataggggatacgcacaggcttgccgctcaaaacgccttcagcagcgacgcggattagaagctgaaagggcgaggttagccgctcagctggatgctctgcgcgcagaggtcgctcgcctcgccagggagcgggatctgtataaggcccgttgcgacaggctgacgtcctctgggccaggctctggcgatcctagccacttgtttctatag

SEQ ID NO: 331924 - DNA, 297 bp, Artificial Sequence
  derived and/or modified sequence
atgtccgtcagagaattgaataggcagctgagaggatgtgggagagacgaggcattgcgcttgaagcagagaaggaggacgctaaaaaatcgcggttatgctcaagcttgtagaagcaaacgactgcagcagcggaggggactggaggccgagagggcaaggctcgcggctcagttagatgcccttcgcgcagaggtggctaggctcgccagagagagggatctgtataaggctaggtgtgacaggcttacgagcagtgggccaggctcaggcgaccctagccacctctttctgtag

SEQ ID NO: 331925 - DNA, 297 bp, Artificial Sequence
  derived and/or modified sequence
atgagcgtgagagagctgaacagacagctgagaggctgcggcagagacgaggccctgagactgaagcagagaagaagaaccctgaagaacagaggctacgcccaggcctgcagaagcaagagactgcagcagagaagaggcctggaggccgagagagccagactggccgcccagctggacgccctgagagccgaggtggccagactggccagagagagagacctgtacaaggccagatgcgacagactgaccagcagcggccccggcagcggcgaccccagccacctgttcctgtag

SEQ ID NO: 331926 - protein, 393 aa, Artificial Sequence
  derived and/or modified sequence
MIFTFMTRKSCCSKQVQRKYWRNCQKLTATGSAPFPLALQRFSVVWDACSEALIMFDKDNLDDMGYIVENDVIMHALTKQLEAVSDRVTVLYRSKAIRYTWPCPFPMADSSPWVHITLGDGSTFQTKLLIGADGHNSGVRQAVGIQNVSWNYDQSAVVATLHLSEATENNVAWQRFLPSGPIALLPLSDTLSSLVWSTSHEHAAELVSMDEEKFVDAVNSAFWSDADHTDFIDTAGAMLQYAVSLLKPTKVSARQLPPSVARVDAKSRVLFPLGLGHAAEYVRPRVALIGDAAHRVHPLAGQGVNMGFGDISSLAHHLSTAAFNGKDLGSVSHLTGYETERQRHNTALLAATDLLKRLYSTSASPLVLLRTWGLQATNAVSPLKEQIMAFASK

SEQ ID NO: 331927 - protein, 262 aa, Artificial Sequence
  derived and/or modified sequence
MIFTFMTRKSCCSKQVQRKYWRNCQKLTATGSAPFPLALQRFSVVWDACSEALIMFDKDNLDDMGYIVENDVIMHALTKQLEAVSDRVTVLYRSKAIRYTWPCPFPMADSSPWVHITLGDGSTFQTKLLIGADGHNSGVRQAVGIQNVSWNYDQSAVVATLHLSEATENNVAWQRFLPSGPIALLPLSDTLSSLVWSTSHEHAAELVSMDEEKFVDAVNSAFWSDADHTDFIDTAGAMLQYAVSLLKPTKVSARQLPPSVAR

SEQ ID NO: 331928 - protein, 391 aa, Artificial Sequence
  derived and/or modified sequence
MIFTFMTRKSCCSKQVQRKYWRNCQKLTATGSAPFPLALQRFSVVWDACSEALIMFDKDNLDDMGYIVENDVIMHALTKQLEAVSDRVTVLYRSKAIRYTWPCPFPMADSSPWVHITLGDGSTFQTKLLIGADGHNSGVRQAVGIQNVSWNYDQSAVVATLHLSEATENNVAWQRFLPSGPIALLPLSDTLSSLVWSTSHEHAAELVSMDEEKFVDAVNSAFWSDADHTDFIDTAGAMLQYAVSLLKPTKVSARQLPPSVARVDAKSRVLFPLGLGHAAEYVRPRVALIGDAAHRVHPLAGQGVNMGFGDISSLAHHLSTAAFNGKDLGSVSHLTGYETERQRHNTALLAATDLLKRLYSTSASPLVLLRTWGLQATNAVSPLKIMAFASK

SEQ ID NO: 331929 - DNA, 1182 bp, Artificial Sequence
  derived and/or modified sequence
atgatcttcaccttcatgaccagaaagagctgctgcagcaagcaggtgcagagaaagtactggagaaactgccagaagctgaccgccaccggcagcgcccccttccccctggccctgcagagattcagcgtggtgtgggacgcctgcagcgaggccctgatcatgttcgacaaggacaacctggacgacatgggctacatcgtggagaacgacgtgatcatgcacgccctgaccaagcagctggaggccgtgagcgacagagtgaccgtgctgtacagaagcaaggccatcagatacacctggccctgccccttccccatggccgacagcagcccctgggtgcacatcaccctgggcgacggcagcaccttccagaccaagctgctgatcggcgccgacggccacaacagcggcgtgagacaggccgtgggcatccagaacgtgagctggaactacgaccagagcgccgtggtggccaccctgcacctgagcgaggccaccgagaacaacgtggcctggcagagattcctgcccagcggccccatcgccctgctgcccctgagcgacaccctgagcagcctggtgtggagcaccagccacgagcacgccgccgagctggtgagcatggacgaggagaagttcgtggacgccgtgaacagcgccttctggagcgacgccgaccacaccgacttcatcgacaccgccggcgccatgctgcagtacgccgtgagcctgctgaagcccaccaaggtgagcgccagacagctgccccccagcgtggccagagtggacgccaagagcagagtgctgttccccctgggcctgggccacgccgccgagtacgtgagacccagagtggccctgatcggcgacgccgcccacagagtgcaccccctggccggccagggcgtgaacatgggcttcggcgacatcagcagcctggcccaccacctgagcaccgccgccttcaacggcaaggacctgggcagcgtgagccacctgaccggctacgagaccgagagacagagacacaacaccgccctgctggccgccaccgacctgctgaagagactgtacagcaccagcgccagccccctggtgctgctgagaacctggggcctgcaggccaccaacgccgtgagccccctgaaggagcagatcatggccttcgccagcaagtag

SEQ ID NO: 331930 - DNA, 789 bp, Artificial Sequence
  derived and/or modified sequence
atgatcttcaccttcatgaccagaaagagctgctgcagcaagcaggtgcagagaaagtactggagaaactgccagaagctgaccgccaccggcagcgcccccttccccctggccctgcagagattcagcgtggtgtgggacgcctgcagcgaggccctgatcatgttcgacaaggacaacctggacgacatgggctacatcgtggagaacgacgtgatcatgcacgccctgaccaagcagctggaggccgtgagcgacagagtgaccgtgctgtacagaagcaaggccatcagatacacctggccctgccccttccccatggccgacagcagcccctgggtgcacatcaccctgggcgacggcagcaccttccagaccaagctgctgatcggcgccgacggccacaacagcggcgtgagacaggccgtgggcatccagaacgtgagctggaactacgaccagagcgccgtggtggccaccctgcacctgagcgaggccaccgagaacaacgtggcctggcagagattcctgcccagcggccccatcgccctgctgcccctgagcgacaccctgagcagcctggtgtggagcaccagccacgagcacgccgccgagctggtgagcatggacgaggagaagttcgtggacgccgtgaacagcgccttctggagcgacgccgaccacaccgacttcatcgacaccgccggcgccatgctgcagtacgccgtgagcctgctgaagcccaccaaggtgagcgccagacagctgccccccagcgtggccagatag

SEQ ID NO: 331931 - DNA, 1176 bp, Artificial Sequence
  derived and/or modified sequence
atgatcttcaccttcatgaccagaaagagctgctgcagcaagcaggtgcagagaaagtactggagaaactgccagaagctgaccgccaccggcagcgcccccttccccctggccctgcagagattcagcgtggtgtgggacgcctgcagcgaggccctgatcatgttcgacaaggacaacctggacgacatgggctacatcgtggagaacgacgtgatcatgcacgccctgaccaagcagctggaggccgtgagcgacagagtgaccgtgctgtacagaagcaaggccatcagatacacctggccctgccccttccccatggccgacagcagcccctgggtgcacatcaccctgggcgacggcagcaccttccagaccaagctgctgatcggcgccgacggccacaacagcggcgtgagacaggccgtgggcatccagaacgtgagctggaactacgaccagagcgccgtggtggccaccctgcacctgagcgaggccaccgagaacaacgtggcctggcagagattcctgcccagcggccccatcgccctgctgcccctgagcgacaccctgagcagcctggtgtggagcaccagccacgagcacgccgccgagctggtgagcatggacgaggagaagttcgtggacgccgtgaacagcgccttctggagcgacgccgaccacaccgacttcatcgacaccgccggcgccatgctgcagtacgccgtgagcctgctgaagcccaccaaggtgagcgccagacagctgccccccagcgtggccagagtggacgccaagagcagagtgctgttccccctgggcctgggccacgccgccgagtacgtgagacccagagtggccctgatcggcgacgccgcccacagagtgcaccccctggccggccagggcgtgaacatgggcttcggcgacatcagcagcctggcccaccacctgagcaccgccgccttcaacggcaaggacctgggcagcgtgagccacctgaccggctacgagaccgagagacagagacacaacaccgccctgctggccgccaccgacctgctgaagagactgtacagcaccagcgccagccccctggtgctgctgagaacctggggcctgcaggccaccaacgccgtgagccccctgaagatcatggccttcgccagcaagtag

SEQ ID NO: 331932 - DNA, 1182 bp, Artificial Sequence
  derived and/or modified sequence
atgatattcaccttcatgacccgcaagtcctgctgcagtaaacaggtgcagcggaagtattggcggaactgccaaaaactcacagcaacaggaagcgcgccatttcccctcgccctgcagcgattttctgttgtgtgggatgcgtgcagtgaggccctgatcatgttcgataaggacaacctggacgatatggggtacatcgtggagaacgatgtgatcatgcacgctcttacaaagcagctggaagctgtttctgatcgtgtaaccgtgctgtaccgatccaaggctattagatacacttggccttgcccatttcctatggctgactccagcccctgggtgcacatcactctcggcgatgggtcaacctttcaaactaaactactcatcggggccgatggtcacaactccggggtgaggcaggcggtgggaattcagaatgtgtcctggaactacgaccagtctgctgtagtggccaccctgcatttatcggaagctactgagaataacgtggcctggcagcggtttttaccctcgggcccaattgctctgctcccgctcagcgataccctatctagcctcgtctggtctacaagccatgagcacgccgcagagctggttagcatggacgaagagaaattcgtggatgccgttaattccgctttctggtcggacgccgatcatacagatttcattgatacagccggggccatgctccagtatgctgtgagcctgctgaagcccacaaaggtgtcagcaaggcagctccctcccagtgtagcacgggttgacgcaaagtcccgcgtcttattccccctgggtttagggcacgccgctgagtacgtgaggccgagggtcgccttgattggcgatgctgcccacagagtgcaccctctcgcaggacagggtgtgaatatggggtttggcgatatctccagcttagcccatcacctgagtacagcggctttcaatggcaaagatctcggctcagtatcacatcttactggttacgaaactgagcggcagagacacaatacagctctgctggctgctacagatctgttaaaacggctttacagtacctctgcctctccactcgtgctcctgcgaacctggggactgcaggctacgaatgccgtgtctcccctaaaagaacaaattatggcctttgcaagtaagtag

SEQ ID NO: 331933 - DNA, 789 bp, Artificial Sequence
  derived and/or modified sequence
atgatatttacttttatgacccggaagtcttgttgtagcaagcaggtacagaggaagtactggaggaattgtcaaaagctgaccgctacaggtagcgctccttttcccttggccctgcagcgcttctccgtggtatgggacgcctgcagcgaggcactgatcatgttcgataaggacaatctcgacgatatggggtacattgtcgagaatgacgttattatgcacgccctcaccaagcagctcgaggccgtgagcgacagggtgaccgtcttataccggagcaaggcaatccggtacacctggccttgccctttccccatggcagattcatccccttgggtccatattacattgggggacggctcaaccttccagactaagctgttaattggcgctgatggtcacaactccggcgtgaggcaagccgtcggtatacagaacgtgagctggaactatgatcagtccgccgtggtggctacgctgcacctgtccgaggccactgagaacaatgtcgcctggcagcgatttctcccctcaggtccaattgcactgttacccctctctgatacgctttcttccctagtgtggagcactagccatgaacacgcagctgagctggtttccatggatgaagaaaagtttgttgatgccgtcaacagcgccttttggagcgacgccgatcacaccgacttcatcgatacagccggtgctatgctgcagtacgctgtcagtttgcttaaaccaactaaagtgtccgcgagacagctgccgccttctgtggctcgttag

SEQ ID NO: 331934 - DNA, 1176 bp, Artificial Sequence
  derived and/or modified sequence
atgatctttacttttatgactcgtaagtcctgctgttctaaacaggtgcagagaaaatactggcgtaactgtcaaaaactgactgctacagggtccgcaccatttccactggctctgcagcgattcagcgttgtttgggatgcttgctcagaggctcttatcatgtttgataaggacaacctcgacgacatgggatatatcgtggagaacgacgtgatcatgcacgctctgacaaaacagctggaagccgtgagtgaccgagtgaccgtgctatatcgatccaaggcaattaggtacacgtggccatgccctttcccaatggcagatagtagtccctgggtccacattaccctcggagacggtagcaccttccaaaccaaactgctgatcggagcagacggtcataatagtggggtgcgacaggcagtcggtatacagaacgtgagctggaactacgatcaatctgcagtggtcgctaccctacacctgtccgaagccaccgagaataatgttgcatggcagcgattcctgccgagcgggccgatcgctttgttgcccttgtccgataccctgagctcactggtatggagcacttcacacgagcacgcagcagaactggtatctatggatgaagagaagttcgtggatgctgttaattcagccttttggagtgacgctgatcataccgattttattgatacagccggtgcaatgctccagtatgccgtgtctctgttgaagccgaccaaagtcagcgctcgacagctccctccctctgtcgcaagggtggacgctaagtcaagagtgctcttcccactgggcctcgggcatgcagcggagtacgtcaggccgagggttgcactaataggagacgctgcccaccgggttcacccactggccggccaaggcgtgaatatgggcttcggggacatctctagcctggcccaccacctgtccacagctgccttcaacggtaaggatctgggcagtgtcagccacctgacaggctacgagacagagagacaaaggcataacacagctctgctggccgccacggatcttcttaaacgcctgtattctactagtgcctcgcctctggtgttactccgaacatggggtctacaagccaccaatgctgtttcacctctcaagataatggccttcgcgtctaagtag

SEQ ID NO: 331935 - DNA, 1182 bp, Artificial Sequence
  derived and/or modified sequence
atgatcttcaccttcatgaccaggaagagctgctgcagcaagcaggtgcagaggaagtactggaggaactgccagaagctgacagccaccggcagcgcccccttccccctggccctgcagcgcttctctgtggtgtgggatgcctgcagcgaggccctgatcatgtttgacaaggacaacctggatgacatgggctacatcgtggagaatgatgtgatcatgcacgccctgaccaagcagctggaggccgtgtctgacagagtgacagtgctgtaccgcagcaaggccatccgctacacctggccctgccccttccccatggctgacagcagcccctgggtgcacatcaccctgggagatggcagcaccttccagaccaagctgctgattggagcagatggccacaacagcggcgtgcggcaggccgtgggcatccagaatgtgtcctggaactatgaccagagcgctgtggtggccaccctgcacctgtctgaggccacagagaacaacgtggcctggcagcgcttcctgcccagcggccccatcgccctgctgcccctgagtgacaccctgagcagcctggtgtggagcaccagccatgagcacgccgctgagctggtgtccatggatgaggagaagtttgtggatgctgtgaacagcgccttctggagcgatgctgaccacacagacttcatcgacacagctggggccatgctgcagtatgctgtgtccctgctgaagcccaccaaggtgtctgcccggcagctgcccccatctgtggcccgggtggatgccaagagccgggtgctcttccccctgggcctgggccacgccgcagaatatgtgcggccccgggtggccctgattggagatgctgcccaccgggtgcaccccctggccggccagggcgtgaacatgggctttggagacatcagcagcctggcccaccacctgagcacagctgccttcaacgggaaggacctgggctctgtgagccacctgaccggctatgaaacagagcggcagaggcacaacacagccctgctggccgccacagacctgctgaagaggctgtacagcaccagcgccagccccctggtgctgctgcggacctggggcctgcaggccaccaatgctgtgagccccctgaaggagcagatcatggcctttgccagcaagtag

SEQ ID NO: 331936 - DNA, 789 bp, Artificial Sequence
  derived and/or modified sequence
atgatcttcaccttcatgaccaggaagagctgctgcagcaagcaggtgcagaggaagtactggaggaactgccagaagctgacagccaccggcagcgcccccttccccctggccctgcagcgcttctctgtggtgtgggatgcctgcagcgaggccctgatcatgtttgacaaggacaacctggatgacatgggctacatcgtggagaatgatgtgatcatgcacgccctgaccaagcagctggaggccgtgtctgacagagtgacagtgctgtaccgcagcaaggccatccgctacacctggccctgccccttccccatggctgacagcagcccctgggtgcacatcaccctgggagatggcagcaccttccagaccaagctgctgattggagcagatggccacaacagcggcgtgcggcaggccgtgggcatccagaatgtgtcctggaactatgaccagagcgctgtggtggccaccctgcacctgtctgaggccacagagaacaacgtggcctggcagcgcttcctgcccagcggccccatcgccctgctgcccctgagtgacaccctgagcagcctggtgtggagcaccagccatgagcacgccgctgagctggtgtccatggatgaggagaagtttgtggatgctgtgaacagcgccttctggagcgatgctgaccacacagacttcatcgacacagctggggccatgctgcagtatgctgtgtccctgctgaagcccaccaaggtgtctgcccggcagctgcccccatctgtggccaggtag

SEQ ID NO: 331937 - DNA, 1176 bp, Artificial Sequence
  derived and/or modified sequence
atgatcttcaccttcatgaccaggaagagctgctgcagcaagcaggtgcagaggaagtactggaggaactgccagaagctgacagccaccggcagcgcccccttccccctggccctgcagcgcttctctgtggtgtgggatgcctgcagcgaggccctgatcatgtttgacaaggacaacctggatgacatgggctacatcgtggagaatgatgtgatcatgcacgccctgaccaagcagctggaggccgtgtctgacagagtgacagtgctgtaccgcagcaaggccatccgctacacctggccctgccccttccccatggctgacagcagcccctgggtgcacatcaccctgggagatggcagcaccttccagaccaagctgctgattggagcagatggccacaacagcggcgtgcggcaggccgtgggcatccagaatgtgtcctggaactatgaccagagcgctgtggtggccaccctgcacctgtctgaggccacagagaacaacgtggcctggcagcgcttcctgcccagcggccccatcgccctgctgcccctgagtgacaccctgagcagcctggtgtggagcaccagccatgagcacgccgctgagctggtgtccatggatgaggagaagtttgtggatgctgtgaacagcgccttctggagcgatgctgaccacacagacttcatcgacacagctggggccatgctgcagtatgctgtgtccctgctgaagcccaccaaggtgtctgcccggcagctgcccccatctgtggcccgggtggatgccaagagccgggtgctcttccccctgggcctgggccacgccgcagaatatgtgcggccccgggtggccctgattggagatgctgcccaccgggtgcaccccctggccggccagggcgtgaacatgggctttggagacatcagcagcctggcccaccacctgagcacagctgccttcaacgggaaggacctgggctctgtgagccacctgaccggctatgaaacagagcggcagaggcacaacacagccctgctggccgccacagacctgctgaagaggctgtacagcaccagcgccagccccctggtgctgctgcggacctggggcctgcaggccaccaatgctgtgagccccctgaagatcatggcctttgccagcaagtag

SEQ ID NO: 331938 - DNA, 1182 bp, Artificial Sequence
  derived and/or modified sequence
atgatcttcaccttcatgacccggaagagctgctgcagcaagcaggtgcaaaggaagtactggaggaattgtcagaagcttacggcgacaggctcggcccctttccctttggctctgcagaggtttagcgtggtgtgggatgcctgttctgaagccctgatcatgttcgacaaggataaccttgacgatatgggctatatcgtggaaaacgacgtgatcatgcatgctttgaccaagcagctggaggcagtgagtgaccgagtcacagtcctctaccgttctaaagcaatcagatacacatggccttgtccctttccgatggcggattcctctccatgggtgcacataaccttaggggacgggtcgaccttccagaccaagctgctgatcggcgccgacggccataactcaggggtccgacaagccgtgggcatccagaatgtctcctggaactatgatcagtccgccgtggttgccaccctgcacctatccgaggctaccgagaacaatgtcgcatggcagcgctttctccccagcgggcccatcgctctgctaccattgtccgataccctgagttcgttggtttggtctacttcccacgagcatgctgcagagctcgtgtccatggatgaggagaagtttgtggacgccgtcaactccgctttctggtcagatgctgatcacactgacttcattgataccgccggggccatgctgcagtatgccgtgtctctgctcaagccgaccaaagtgagcgccagacagctgccacccagcgtcgcccgagtagacgccaaaagtcgcgtgctgtttcctctgggcctggggcacgccgcagagtatgtaagacctagagtggccctgattggggatgctgctcatcgcgtccaccccctagctggacagggtgtgaacatgggtttcggtgatatcagttctctggcgcatcatctctcgactgcggctttcaacggcaaggacctcggatcagtaagccatctcaccggatacgagacagaaagacagagacataacacagctcttttggctgccacggacttgctgaagagactctactcaacctcagccagccctttagtcctcttaaggacatgggggttacaagcaacgaatgcagtgagccccctgaaagagcagataatggcattcgcctctaaatag

SEQ ID NO: 331939 - DNA, 789 bp, Artificial Sequence
  derived and/or modified sequence
atgatcttcaccttcatgacccggaagagctgctgcagcaagcaggtgcagcgcaaatactggcgtaattgccagaaactgacggctaccggctccgcacccttccctctcgcactccagaggtttagtgtggtttgggatgcatgcagcgaagctctcatcatgtttgacaaggataacttggacgacatgggctacatcgtagagaatgacgtcataatgcacgctttaacaaagcagctggaggccgtttctgaccgggtgacagttttgtatcggtccaaagctattagatatacttggccatgccctttcccaatggccgactctagtccgtgggtccatatcacactgggtgatggttccacattccagaccaagttactgataggggccgacggacacaactccggggtgcgccaagctgtggggattcaaaacgtgtcgtggaactacgaccagagtgctgtagtggccaccctccatttgagcgaggcaaccgaaaataacgttgcctggcagagattcctgccttcaggccccatcgccctcctccctctgtccgatacgctgagctcgctggtgtggtcgacttcccacgagcatgccgccgaactcgtctccatggatgaggaaaaattcgtcgacgctgttaactctgctttttggtcagatgccgaccacactgacttcatcgataccgctggtgctatgctgcagtatgccgtcagcttattgaaacccactaaggtttccgcccggcagttgccacccagtgtggcccgatag

SEQ ID NO: 331940 - DNA, 1176 bp, Artificial Sequence
  derived and/or modified sequence
atgatcttcaccttcatgacccggaagagctgctgcagcaagcaggtgcagaggaaatactggcgcaattgccagaagctgaccgccacaggtagtgctcccttccccctggctctgcagaggttctccgtggtgtgggacgcttgctcagaagcccttatcatgttcgacaaggacaatctggacgatatggggtacatagtggaaaacgacgtcattatgcatgctctgacgaaacagttggaagcggtttctgaccgtgtgacagtgttatatcgctccaaagccattcgctacacttggccatgcccttttcccatggcagactctagcccctgggtccatatcaccctgggagacgggtctacttttcagactaaactgctgatcggggccgatggccacaattctggggtgaggcaggccgtcgggatccagaatgtgagttggaactacgaccagtcggcagttgtggcgactttgcatttgtcagaagccacggaaaacaatgtggcctggcagcggttcctgccatcggggccaattgctctcctacccttgtccgacactctatcctcactagtgtggagcacctcacacgaacacgctgcagagttggtcagcatggacgaagaaaaatttgtggacgcagtaaatagcgctttctggtcggacgctgaccataccgattttattgatacagcgggagcgatgttgcagtatgcagtttccctgttgaagccaacaaaagtgtctgcaagacagctgcctccctcagtggccagggtagacgcgaaaagtcgtgttcttttccctcttggtttgggccatgccgcagagtatgttcgcccacgcgtggcactgataggcgatgcagcccatagggtgcatcccctggccggtcaaggtgtgaatatgggctttggagatataagcagcttggctcatcacctgagcactgctgcttttaacgggaaggatctcggtagcgtgagtcatctaacaggctatgagactgagcggcagcggcataacaccgccctgctcgcagcaactgacctgctgaagagattatacagtacctccgcgagccctttggtcctgttgcgaacatggggcctccaggctacgaatgctgtgagcccactgaagattatggcctttgctagcaagtag

SEQ ID NO: 331941 - DNA, 1182 bp, Artificial Sequence
  derived and/or modified sequence
atgatatttacattcatgacacgaaaatcctgttgcagtaagcaggtgcaacgaaagtactggagaaactgccagaaacttaccgccaccggatcagccccattcccactggctctccaacgcttttctgtagtctgggacgcctgcagcgaggccctgatcatgttcgacaaagacaacctggacgacatgggctacatcgtggagaatgacgtcataatgcacgcactcacgaagcagttagaggccgtctctgatagagtgaccgtcctgtatcgctctaaagccatacggtacacatggccatgtcctttccctatggcagactccagcccgtgggtgcacatcacactgggtgatgggagcacgttccagactaaactcctcatcggggctgacgggcacaatagtggggtccgacaggccgtgggcatccagaacgtctcttggaattacgatcagtccgcagtagttgccaccctgcacctgtccgaagctacagagaacaacgtggcgtggcaacgattccttccaagtggtccaatcgcactgcttcccttgagcgacacgctgagctctcttgtttggtctacatcacatgagcacgcagccgagctcgtgtctatggacgaggagaaatttgtggatgctgtcaacagtgcattctggtcggacgctgaccacaccgactttatcgatactgccggagctatgttgcagtacgctgtgagcctgctcaagccaaccaaggtctctgcgcgacagctgcccccttctgttgccagggtggatgcgaaatctcgggtcctcttcccacttggtctcggacacgctgctgagtacgtgcgcccaagggtggcactgattggcgacgccgcacaccgagttcatccgttagctgggcagggagtgaatatgggattcggggacatcagctctttagcacatcatctcagtacagctgcattcaatggtaaagacctgggctccgtgagccacttaacgggatatgagaccgaaagacagcggcataacactgccttattggcagctacagacctgctgaagaggctgtatagtacgtctgcatcccccctggttctattgcggacctgggggctgcaggctaccaacgccgtatcaccactgaaggagcaaataatggcgtttgcatcgaaatag

SEQ ID NO: 331942 - DNA, 789 bp, Artificial Sequence
  derived and/or modified sequence
atgatttttacctttatgacccggaagtcctgctgttcgaaacaggtgcagcgtaagtactggcgcaattgccagaaactgacggctacgggttccgcgccatttcctctcgccttgcagagattcagtgtagtctgggatgcttgctcagaggcactgatcatgtttgacaaggataacttggacgatatggggtatatcgttgaaaacgatgtgattatgcacgccctgacgaaacaattggaggccgtgtcggaccgggtgaccgtcttgtaccggtcaaaggccatccgctacacatggccctgccctttcccaatggctgatagcagcccatgggtgcatatcactctgggcgatgggagcacctttcagactaagttgcttattggagctgatgggcataatagcggtgtccggcaggccgttggaatccagaacgtttcctggaactatgatcagtctgccgtcgtcgcgacattacatctcagtgaggccaccgagaataacgtggcttggcagcggttcctgcctagtgggccaattgcactgctgcccctcagcgacacactgtcatccctggtctggtcaacgtctcacgagcatgccgcagagctggttagcatggatgaggagaaattcgttgatgcagtgaacagcgccttctggagcgatgctgaccacactgacttcatcgacaccgccggtgccatgttgcagtatgctgtgtcccttctaaaacctactaaggtgtctgctagacagctccctccttctgtcgcgagatag

SEQ ID NO: 331943 - DNA, 1176 bp, Artificial Sequence
  derived and/or modified sequence
atgattttcaccttcatgacgcgaaaaagctgctgctccaagcaggtgcagcgcaaatactggcgcaactgccaaaagctgactgcaacaggatccgcccctttcccactcgcccttcaaagattctcagtggtgtgggacgcttgctccgaagccctgataatgttcgacaaggataatctagacgatatgggatacatcgtcgaaaacgacgtcataatgcacgccttgaccaagcagctcgaagccgtcagcgacagagttaccgtgctatacaggtcaaaagcaatcagatacacgtggccctgcccttttcctatggccgactccagcccctgggtgcacattaccttaggggacggcagcacctttcagaccaagctcctgattggagcagacggtcacaatagcggagttagacaggcagttggcattcagaacgtgtcttggaattatgatcagtcagcggtagtcgcgacactgcacctcagcgaagccacagagaacaacgtcgcgtggcagaggttcctaccatctggacctattgcgctgttgcccctgagtgataccctttctagcctcgtgtggagcacaagccacgaacacgctgcagagcttgtgagcatggatgaagaaaagtttgtggatgctgttaactctgctttttggtccgatgcggaccacaccgacttcatcgatacagcaggggctatgttgcaatatgcagtgtccctcttaaaaccaacaaaagtgtctgcaaggcagcttccaccgagcgtggcaagagtggacgctaaaagccgtgttctgtttcctttgggcctcgggcatgctgccgagtacgtgcggccaagggtggccttgatcggcgacgctgcacatagggtgcaccccttagcaggccagggcgtgaatatggggtttggtgatataagttctcttgcacatcacctgagtactgccgcatttaacggcaaggacctgggatcagtgagtcatctcaccgggtacgaaaccgaaaggcagcgccacaatactgctctgctggccgcaacagaccttctgaaacgtctttactcgaccagcgcgtctcccctggttctcctgcgaacatggggtctgcaggccaccaacgccgtgagcccactaaagattatggcctttgcatccaagtag

SEQ ID NO: 331944 - DNA, 1135 bp, Artificial Sequence
  derived and/or modified sequence
gtgcgacggcgcaggtctgcaccatggcggcccggcttgtcagccgatgcggggctgtgcgtgcagctccccacagcggcccgctggtgtcctggcgcaggtggtccggcgcctcaacagacaccgtgtatgacgtggtggtgtcgggtggaggcctggtgggcgctgccatggcctgtgccttgggatatgatattcactttcatgacaagaaaatcctgttgctcgaagcaggtccaaagaaagtactggagaaattgtcagaaacttacagcaacagggtcagctccatttcccctggctctgcaacgcttctcagtagttttggtgcctgggaccatatctgcaacatgagatacagagcctttcggcgaatgcaggtgcccctttatcttttcaattttgtcaagatgtcttggtctgtcttaagatatcggagtccactttctccaagtgttctgtgaatgtaggaggaatcagacaaggttcacattcagtccgaggaagtggggagaagcattcccaggagaattttcttctcattttatattttcctaccagagaggctgacaaattgtgattttctgctctgtcacttgggaaagcaatattgtttctgattggagtgatgtttccctcttggttttaatgcagactttccttttgtgtttccaggtgtgggacgcctgctcagaggccctgataatgtttgataaggataatttagatgacatgggctatatcgtggagaatgatgtcatcatgcatgctctcactaagcagttggaggctgtgtctggtgaggcccccatcttccaccttgcattcattgggaagtgaactgcttaggacttactggaagaaaggatctcttttacaatattcagtgtccaccataaagaaatcctctgatggccgggattacaggcgtaagccactgtgctggccctctattatttaaatcgctttgttgacagtatgactgactgacatacaaaaagctgtaaatgatgtatacaggctgatgtttttggagatagtgttttgttttgttttgagacaaggtcttgctttgtcctccttggctggggtgcagtggcttaacaatcctctcacctcagcctcctgactaact

SEQ ID NO: 331945 - DNA, 441 bp, Artificial Sequence
  derived and/or modified sequence
atggccgccagactggtgagcagatgcggcgccgtgagagccgccccccacagcggccccctggtgagctggagaagatggagcggcgccagcaccgacaccgtgtacgacgtggtggtgagcggcggcggcctggtgggcgccgccatggcctgcgccctgggctacgacatccacttccacgacaagaagatcctgctgctggaggccggccccaagaaggtgctggagaagctgagcgagacctacagcaacagagtgagcagcatcagccccggcagcgccaccctgctgagcagcttcggcgcctgggaccacatctgcaacatgagatacagagccttcagaagaatgcaggtgcccctgtacctgttcaacttcgtgaagatgagctggagcgtgctgagatacagaagccccctgagccccagcgtgctgtag

SEQ ID NO: 331946 - DNA, 441 bp, Artificial Sequence
  derived and/or modified sequence
atggctgcaaggctggtctcacggtgtggtgctgtcagagcagctccccattcggggcctctggtgtcatggagacggtggtccggtgcttctacggacaccgtgtatgacgtagtcgtgagcggtggaggactggtaggtgctgccatggcctgcgccctgggctacgatatccacttccacgataaaaaaatcctgctgctggaggcaggacccaagaaagtgcttgagaagcttagtgagacctattctaacagagtgtcatcaatttccccagggtcggcgacacttttaagtagcttcggagcgtgggatcatatctgtaacatgcggtatcgcgcgttccgaagaatgcaggttccgctgtacctgttcaacttcgtcaaaatgtcctggtccgtattgagataccgctcccccctttccccctctgtgctctag

SEQ ID NO: 331947 - DNA, 441 bp, Artificial Sequence
  derived and/or modified sequence
atggccgcccggctggtgagccgctgtggggctgtgcgggccgccccccacagcggccccctggtgtcctggaggcgctggagcggggccagcacagacacagtgtatgatgtggtggtgtctgggggcggcctggtgggcgccgccatggcctgtgccctgggctatgacatccacttccatgacaagaagatcctgctgctggaggccggccccaagaaggtgctggagaagctgtctgagacctacagcaacagagtgagcagcatcagccctggcagcgccaccctgctgagcagctttggagcctgggaccacatctgcaacatgagataccgggccttccggaggatgcaggtgcccctgtacctgttcaactttgtgaagatgtcctggagcgtgctgcgctaccgcagccccctgagccccagcgtgctgtag

SEQ ID NO: 331948 - DNA, 441 bp, Artificial Sequence
  derived and/or modified sequence
atggccgcccggctggtgagccggtgcggcgccgtgcgggccgccccccactccggccctttagtgagttggcgcagatggtctggagcatcaaccgacacggtctacgatgtggtggtctccgggggaggactcgtcggtgcagcaatggcctgcgccctcggctacgacatacatttccatgacaagaagatcctgctgctggaagcaggtccgaaaaaagtacttgagaaactgtcggagacctattctaacagggtttcctcgatttccccgggcagcgccactcttcttagctctttcggggcttgggatcacatctgcaatatgaggtatagggcctttagacgcatgcaggtccctctatacctgtttaatttcgtcaaaatgagctggtccgtgttgcggtaccggagcccgctaagtcccagcgtcctgtag

SEQ ID NO: 331949 - DNA, 441 bp, Artificial Sequence
  derived and/or modified sequence
atggctgctcggctcgtttccagatgtggagccgttagggcagccccacattctggcccacttgtgtcctggagacgttggtccggtgctagtaccgataccgtgtacgatgtggttgtatcgggcggtggtctcgtgggagcagcaatggcatgcgctctagggtatgatatccatttccacgataaaaaaatcctgctcttagaggctggcccaaaaaaagtcctggagaagttgagcgaaacctactctaatagagtttcttccatatctccaggatcggcgacattgctgtccagttttggcgcttgggatcatatttgcaatatgagatatagagcttttcggcgtatgcaggtgcctctttatctgttcaacttcgtgaaaatgtcgtggtccgttcttcgctaccggagccctctgagtccatctgtcctgtag

SEQ ID NO: 331950 - protein, 2096 aa, Artificial Sequence
  derived and/or modified sequence
MAEVTVPRVYVVFGIHCIMAKASSDVQVSGFHRKIQHVKNELCHMLSLEEVAPVLQQTLLQDNLLGRVHFDQFKEALILILSRTLSNEEHFQEPDCSLEAQPKYVRGGKRYGRRSLPEFQESVEEFPEVTVIEPLDEEARPSHIPAGDCSEHWKTQRSEEYEAEGQLRFWNPDDLNASQSGSSPPQDWIEEKLQEVCEDLGITRDGHLNRKKLVSICEQYGLQNVDGEMLEEVFHNLDPDGTMSVEDFFYGLFKNGKSLTPSASTPYRQLKRHLSMQSFDESGRRTTTSSAMTSTIGFRVFSCLDDGMGHASVERILDTWQEEGIENSQEILKALDFSLDGNINLTELTLALENELLVTKNSIHQAALASFKAEIRHLLERVDQVVREKEKLRSDLDKAEKLKSLMASEVDDHHAAIERRNEYNLRKLDEEYKERIAALKNELRKEREQILQQAGKQRLELEQEIEKAKTEENYIRDRLALSLKENSRLENELLENAEKLAEYENLTNKLQRNLENVLAEKFGDLDPSSAEFFLQEERLTQMRNEYERQCRVLQDQVDELQSELEEYRAQGRVLRLPLKNSPSEEVEANSGGIEPEHGLGSEECNPLNMSIEAELVIEQMKEQHHRDICCLRLELEDKVRHYEKQLDETVVSCKKAQENMKQRHENETHTLEKQISDLKNEIAELQGQAAVLKEAHHEATCRHEEEKKQLQVKLEEEKTHLQEKLRLQHEMELKARLTQAQASFEREREGLQSSAWTEEKVRGLTQELEQFHQEQLTSLVEKHTLEKEELRKELLEKHQRELQEGREKMETECNRRTSQIEAQFQSDCQKVTERCESALQSLEGRYRQELKDLQEQQREEKSQWEFEKDELTQECAEAQELLKETLKREKTTSLVLTQEREMLEKTYKEHLNSMVVERQQLLQDLEDLRNVSETQQSLLSDQILELKSSHKRELREREEVLCQAGASEQLASQRLERLEMEHDQERQEMMSKLLAMENIHKATCETADRERAEMSTEISRLQSKIKEMQQATSPLSMLQSGCQVIGEEEVEGDGALSLLQQGEQLLEENGDVLLSLQRAHEQAVKENVKMATEISRLQQRLQKLEPGLVMSSCLDEPATEFFGNTAEQTEQFLQQNRTKQVEGVTRRHVLSDLEDDEVRDLGSTGTSSVQRQEVKIEESEASVEGFSELENSEETRTESWELKNQISQLQEQLMMLCADCDRASEKKQDLLFDVSVLKKKLKMLERIPEASPKYKLLYEDVSRENDCLQEELRMMETRYDEALENNKELTAEVFRLQDELKKMEEVTETFLSLEKSYDEVKIENEGLNVLVLRLQGKIEKLQESVVQRCDCCLWEASLENLEIEPDGNILQLNQTLEECVPRVRSVHHVIEECKQENQYLEGNTQLLEKVKAHEIAWLHGTIQTHQERPRVQNQVILEENTTLLGFQDKHFQHQATIAELELEKTKLQELTRKLKERVTILVKQKDVLSHGEKEEELKAMMHDLQITCSEMQQKVELLRYESEKLQQENSILRNEITTLNEEDSISNLKLGTLNGSQEEMWQKTETVKQENAAVQKMVENLKKQISELKIKNQQLDLENTELSQKNSQNQEKLQELNQRLTEMLCQKEKEPGNSALEEREQEKFNLKEELERCKVQSSTLVSSLEAELSEVKIQTHIVQQENHLLKDELEKMKQLHRCPDLSDFQQKISSVLSYNEKLLKEKEALSEELNSCVDKLAKSSLLEHRIATMKQEQKSWEHQSASLKSQLVASQEKVQNLEDTVQNVNLQMSRMKSDLRVTQQEKEALKQEVMSLHKQLQNAGGKSWAPEIATHPSGLHNQQKRLSWDKLDHLMNEEQQLLWQENERLQTMVQNTKAELTHSREKVRQLESNLLPKHQKHLNPSGTMNPTEQEKLSLKRECDQFQKEQSPANRKVSQMNSLEQELETIHLENEGLKKKQVKLDEQLMEMQHLRSTATPSPSPHAWDLQLLQQQACPMVPREQFLQLQRQLLQAERINQHLQEELENRTSETNTPQGNQEQLVTVMEERMIEVEQKLKLVKRLLQEKVNQLKEQVSLPGHLCSPTSHSSFNSSFTSLYCH

SEQ ID NO: 331951 - DNA, 6291 bp, Artificial Sequence
  derived and/or modified sequence
atggccgaggttaccgtgcctagagtgtatgtcgtatttggcatccattgtatcatggccaaagcatcgtcagatgtccaggtgtcgggatttcaccggaaaattcaacatgtgaagaacgaactgtgtcacatgctgtccctggaggaagtcgccccagttctccaacaaaccctgctccaggataatttgctgggtcgtgtgcattttgatcagttcaaggaggctcttatcctgatcctgtctcgtaccctgagcaatgaagagcatttccaggaacctgactgttcactggaagcccaaccaaaatacgtgcggggagggaaaagatatgggcggcgctccctgcccgaatttcaggagagcgtggaggagttcccagaagtgacggtgatagaacctttggacgaagaggcacggccctcacacatccccgccggcgactgttctgaacattggaagactcaacgcagtgaggagtacgaagccgagggtcagctccggttctggaaccctgacgacctgaacgcgtcacagtccggcagctctcctccccaggactggatcgaggagaaactgcaggaggtgtgtgaggacctcggaatcacaagggacggccatttaaatcgcaagaaactcgttagtatctgcgaacaatacggactgcaaaatgttgatggagaaatgctggaggaggtattccataacctagaccccgacgggaccatgtctgtggaggactttttttatgggcttttcaagaacggcaaaagtctcaccccatcagcctctaccccatatcgccaactgaaacggcacctgtcaatgcagagttttgatgaatctggcaggagaactaccaccagcagcgccatgacgtctactattggattccgagtgttctcttgccttgatgacggtatgggacacgccagcgtggagcgcattctagatacctggcaagaggaggggatcgaaaattcccaggaaattctcaaggcacttgatttttctctcgatggtaacattaacttgaccgagctgacccttgccttggaaaacgagttgcttgtcaccaagaactcaatccatcaggctgccttagcgagttttaaagccgagattcgccatctgttggaacgtgtcgaccaggtggtaagagaaaaagagaaactgaggtcagatctggataaagctgaaaagctgaaatcactgatggcctctgaagttgacgatcaccatgccgccatcgaaagacgcaatgaatataacctgaggaagctcgacgaggaatacaaggaaaggatcgcagcgctgaagaatgagcttcgcaaggaaagggagcagattctccagcaggccggcaagcaacgcctcgaattggagcaagagattgagaaggctaagaccgaggagaactacattcgggacaggctggcactctcactcaaagagaatagcaggctggagaacgaactactcgagaatgctgagaaactagcagaatatgagaacctgacaaataaacttcagcggaatttagaaaatgtgttggccgagaagttcggcgacctcgatccctcctccgctgagttttttctccaggaggagcgcctgacccagatgcggaacgagtacgagcggcagtgccgggttctgcaagaccaagtggacgaacttcagagcgagctggaagaatacagagctcaggggcgagtcctgagactcccactgaagaattcacccagcgaggaggtagaggccaacagcggtggcatagaaccggaacacggactcggcagcgaggaatgtaatcctcttaatatgagcattgaagctgaattggtgatcgaacagatgaaggaacagcatcatcgtgatatctgctgtctgaggctggaactggaagataaagtgaggcactacgaaaagcagctggatgagacagttgttagttgtaaaaaggcacaggagaatatgaagcagcgacacgaaaatgagactcatactctggaaaaacagataagcgaccttaaaaatgaaatcgcagagctccagggccaggctgcggttcttaaggaagcccatcacgaggcaacttgccgccacgaggaagagaaaaagcagctgcaagtgaaattagaagaagagaagacacacttgcaagagaaactgaggctccaacacgagatggagctcaaagccagattaacacaggcgcaggccagctttgagagggagcgtgaagggcttcaaagcagcgcttggaccgaggagaaggtgcgaggcctcacacaggagctcgaacagtttcatcaggagcagctgacatccctggtcgagaagcacacactggagaaggaggagcttcgcaaggagctgctggaaaagcaccagcgcgaactacaggaagggagagagaagatggaaactgaatgcaacagaagaactagccagatcgaagcgcaatttcagtccgattgccagaaggtgaccgaaaggtgcgagagtgcacttcagagcttggagggacgttaccgccaagagctaaaagatctacaggagcagcagcgcgaggagaagtcgcagtgggaatttgaaaaggacgaattaacccaggaatgtgctgaggctcaggagcttctgaaagagacacttaagcgcgagaagaccacctcacttgtactaactcaggaacgggagatgctagagaaaacctacaaagagcatctgaatagcatggtggttgaacgacagcagctgctccaagacctcgaagatctacgaaacgtcagtgaaacacagcagtctctgttgtccgatcagattctggaacttaaaagttcccacaaacgcgaactccgcgagagagaggaggtgctgtgccaggccggggcctcagagcagttagctagccagagattggagcgcctagagatggagcacgaccaagaacgacaagagatgatgagtaagctactggccatggaaaatattcacaaagcaacttgcgagacagctgaccgcgaaagggccgaaatgtcaacggagattagccgtctccagagcaagataaaggagatgcagcaggcaaccagccccttgtcgatgttgcaaagtggatgccaagtgattggcgaggaggaagttgagggggatggtgccctttctctactccagcagggggagcagttactggaggaaaacggggatgtcctgctgtccctgcagcgagctcacgaacaggccgttaaggagaatgtgaagatggccacagagatttctaggctgcagcaacggctccagaagctggagccaggactggttatgtcctcctgcctcgatgaaccggctaccgaattcttcgggaacactgcggaacagacagaacagttcctccagcagaacaggacgaagcaagtcgaaggcgtgactaggcggcacgtgctgtctgatctggaggatgatgaagtacgtgacctggggtccactgggacatcgtcggtacagcgccaagaagtgaagatcgaggagagcgaggcttccgtagaagggtttagcgaacttgagaactctgaagagactagaacagagagctgggaactgaaaaaccagataagccagctgcaggagcagttgatgatgctctgtgcagattgcgaccgtgcttccgagaagaagcaggatcttctcttcgacgtgtcagtcctcaagaagaaattgaagatgttggaacgcattcccgaagcttccccaaagtataaactgctctatgaggacgtgagccgtgagaacgattgcctgcaggaagaactccgcatgatggaaactagatacgatgaggccctcgagaacaacaaggaactgactgcagaagtatttagactgcaggatgagctgaaaaagatggaggaggtgacagaaaccttcttaagcctggagaagtcttacgacgaagtgaagatcgagaacgagggtcttaacgttttggtactgaggttgcagggtaaaattgagaaattacaggagtctgtggtacaaagatgcgactgttgtctttgggaggcaagcctcgagaatctggaaattgagcccgatggtaatattcttcagctgaatcaaacactcgaggagtgtgtcccaagagttagatctgttcaccatgtcatcgaggagtgcaaacaggaaaaccagtatctggaaggaaacacgcagctactggagaaagttaaggcacacgagatagcctggcttcacggcacgatccagacgcatcaggaacgacccagagttcagaatcaggtcattctagaggaaaatacaaccctgcttggattccaggataagcacttccagcaccaggctaccattgccgagttagagctggaaaagaccaagcttcaggagctgactcgaaagcttaaggagcgcgtgactattctggtgaagcagaaggacgtgctgagtcatggtgagaaagaggaggagctcaaggctatgatgcacgatctccagatcacatgctcagagatgcagcagaaagtagagctgctgcggtatgaatccgagaagcttcaacaggagaactctatcttgcggaacgaaatcaccaccttgaacgaagaggacagtatttctaatttgaaacttggcacactcaatggatctcaagaagaaatgtggcagaagacagaaacagtcaagcaggagaacgctgcagtccagaaaatggtggaaaacttaaaaaaacagatttcggagttgaagattaaaaaccaacagctggatttggagaacacggagctgagtcaaaaaaactcccaaaatcaagaaaaattgcaggagctgaaccaacgactgaccgaaatgctttgccagaaagagaaggaaccaggcaattcagctctggaagagagagagcaggaaaaatttaatttgaaggaagagctggagaggtgtaaagtgcagtccagtactcttgtaagcagtctcgaagccgagctctctgaggtcaagatccagacacatatcgtgcaacaggaaaatcacctgctgaaggatgaactggagaaaatgaagcagctccacaggtgccccgatctgagtgattttcagcagaagatctcctccgtgctgtcctataatgaaaagctgctgaaggagaaagaagccctgtctgaagagctgaattcatgcgtggacaaactagcgaaatcatccctgcttgaacaccgaatagctacaatgaagcaggagcagaagtcctgggagcatcagtctgcaagtctgaagtcgcaacttgtggcgagtcaggaaaaggtccagaatctggaagatactgttcagaacgtaaacctgcagatgagtaggatgaaatcagatttgagagtgacacaacaggagaaagaagctcttaagcaggaggttatgtccctgcacaaacagctgcagaatgctggaggaaagtcttgggcacccgagatcgcgacccacccttccggtcttcacaaccaacagaagcggctttcttgggacaaacttgaccacctgatgaatgaagagcagcagctgctttggcaagagaatgaacgactgcagacaatggttcagaacacaaaggctgagctaactcacagtagagaaaaggttcgccaactcgaaagtaatctcttacctaagcatcagaaacacctgaatccatcaggcacaatgaatcctactgagcaagaaaaactctctctgaagcgggaatgcgatcaattccaaaaggaacagtccccagctaacaggaaagtctctcaaatgaatagcttggagcaggaattggagactatccacttggaaaatgaaggattgaagaaaaaacaggtaaagttggatgaacagcttatggagatgcaacacctgagatcgacggctacccccagcccctccccacacgcctgggacttgcagctgctgcaacagcaggcgtgtcctatggtgccccgagagcaattcctgcagctccaaagacaattactccaggcagagcgtatcaatcagcacctacaggaagaattggaaaatagaactagtgagaccaacaccccgcagggtaatcaggaacagctcgtgaccgttatggaggagagaatgattgaggtagagcagaagttgaaacttgtaaagcgactgctgcaagagaaggtgaatcagctaaaagagcaagtctccctcccgggacacctgtgctcaccgacctctcatagttccttcaatagctcctttaccagtctttactgccactag

SEQ ID NO: 331952 - DNA, 6291 bp, Artificial Sequence
  derived and/or modified sequence
atggccgaggtgacagtgccccgggtgtatgtggtgtttggcatccactgcatcatggccaaggccagcagtgatgtgcaggtgtctggcttccacaggaagatccagcacgtgaagaatgagctgtgccacatgctgagcctggaggaggtggcccctgtgctgcagcagaccctgctgcaggacaacctgctgggccgggtgcactttgaccagttcaaggaggccctgatcctgatcctgagcaggaccctgagcaatgaggagcacttccaggagccagactgcagcctggaggcccagcccaagtatgtgcggggcggcaagagatatggaagaagaagcctgcctgagttccaggagagcgtggaggagttccctgaggtgaccgtcatcgagcccctggatgaggaggcccggcccagccacatcccagctggggactgcagcgagcactggaagacccagaggtctgaggagtatgaagctgagggccagctgcgcttctggaacccagatgacctgaatgccagccagagcggcagcagccccccccaggactggattgaggagaagctgcaggaggtgtgtgaggacctgggcatcaccagagatggccacctgaacaggaagaagctggtgtccatctgtgagcagtatggcctgcagaatgtggatggagagatgctggaggaggtgttccacaacctggaccctgatggcaccatgtctgtggaggacttcttctacggcctcttcaagaatggcaagagcctgacccccagcgccagcaccccctaccggcagctgaagaggcacctgtccatgcagagctttgatgagagcggccgccgcaccaccaccagcagcgccatgaccagcaccatcggcttccgggtcttcagctgcctggatgatggcatgggccacgcctctgtggagcgcatcctggacacctggcaggaggagggcatcgagaacagccaggagatcctgaaggccctggacttcagcctggatggcaacatcaacctgacagagctgaccctggccctggagaatgagctgctggtgaccaagaacagcatccaccaggccgccctggccagcttcaaggccgagatccgccacctgctggagcgggtggaccaggtggtgcgggagaaggagaagctgcggagtgacctggacaaggccgagaagctgaagagcctgatggccagcgaggtggatgaccaccacgccgccattgaaagaagaaatgagtacaacctgaggaagctggatgaggagtacaaggagagaattgctgccctgaagaatgagctgaggaaggagcgggagcagatcctgcagcaggccggcaagcagaggctggagctggagcaggagattgagaaggccaagacagaggagaactacatccgggaccggctggccctgagcctgaaggagaacagccggctggagaatgagctgctggagaatgctgagaagctggccgagtatgagaacctgaccaacaagctgcagaggaacctggagaatgtgctggccgagaagtttggagacctggaccccagcagcgctgagttcttcctgcaggaggagcggctgacccagatgagaaatgaatatgaaaggcagtgccgggtgctgcaggaccaggtggatgagctgcagagcgagctggaggagtaccgggcccagggccgggtgctgcggctgcccctgaagaacagccccagcgaggaggtggaggccaacagcggcggcatcgagcctgagcacggcctgggcagcgaggagtgcaaccccctgaacatgagcattgaagctgagctggtgattgagcagatgaaggagcagcaccaccgggacatctgctgcctgcggctggagctggaggacaaggtgcgccactatgagaagcagctggatgaaacagtggtgtcctgcaagaaggcccaggagaacatgaagcagagacatgaaaatgagacccacaccctggagaagcagatcagtgacctgaagaatgaaattgctgagctgcagggccaggccgctgtgctgaaggaggcccaccacgaggccacctgcagacatgaggaggagaagaagcagctgcaggtgaagctggaggaggagaagacccacctgcaggagaagctgcggctgcagcacgagatggagctgaaggcccggctgacccaggcccaggccagctttgagcgggagcgggagggcctgcagagcagcgcctggacagaggagaaggtgcggggcctgacccaggagctggagcagttccaccaggagcagctgaccagcctggtggagaagcacaccctggagaaggaggagctgaggaaggagctgctggagaagcaccagcgggagctgcaggagggccgggagaagatggagacagagtgcaacagaaggaccagccagatcgaggcccagttccagagcgactgccagaaggtgacagagcgctgtgagagcgccctgcagagcctggagggccgctaccggcaggagctgaaggacctgcaggagcagcagcgggaggagaagagccagtgggagtttgagaaggatgagctgacccaggagtgtgccgaggcccaggagctgctgaaggagaccctgaagcgggagaagaccaccagcctggtgctgacccaggagcgggagatgctggagaagacctacaaggagcacctgaacagcatggtggtggagcggcagcagctgctgcaggacctggaggacctgagaaatgtgtctgagacccagcagagcctgctgagtgaccagatcctggagctgaagagcagccacaagcgggagctgcgggagcgggaggaggtgctgtgccaggccggggccagcgagcagctggccagccagaggctggagcggctggagatggagcatgaccaggagcggcaggagatgatgagcaagctgctggccatggagaacatccacaaggccacctgtgaaacagctgaccgggagcgggcagagatgagcacagagatcagccggctgcagagcaagatcaaggagatgcagcaggccaccagccccctgtccatgctgcagagcggctgccaggtgattggagaggaggaggtggagggagatggagccctgagcctgctgcagcagggcgagcagctgctggaggagaatggagatgtgctgctgagcctgcagagggcccacgagcaggccgtgaaggaaaatgtgaagatggccacagagatcagccggctgcagcagaggctgcagaagctggagcccggcctggtgatgagcagctgcctggatgagcccgccacagagttcttcggcaacacagctgagcagacagagcagttcctgcagcagaacagaaccaagcaggtggagggcgtgacccggcggcacgtgctgagtgacctggaggatgatgaggtgcgggacctgggcagcacaggcaccagctctgtgcagaggcaggaggtgaagattgaggagagcgaggcctctgtggagggcttcagcgagctggagaacagcgaggagaccaggacagagagctgggagctgaagaaccagatcagccagctgcaggagcagctgatgatgctgtgtgccgactgtgaccgggccagcgagaagaagcaggacctgctgtttgatgtgtctgtgctgaagaagaagctgaagatgctggagcgcatccctgaggccagccccaagtacaagctgctgtatgaagatgtgtcccgggagaatgactgcctgcaggaggagctgaggatgatggagaccaggtatgatgaggccctggagaacaacaaggagctgacagctgaggtgttccggctgcaggatgagctgaagaagatggaggaggtgacagagaccttcctgagcctggagaagagctatgatgaggtgaagattgaaaatgaaggcctgaatgtgctggtgctgcggctgcagggcaagattgagaagctgcaggagagcgtggtgcagagatgtgactgctgcctgtgggaggccagcctggagaacctggagattgaaccagatggcaacatcctgcagctgaaccagaccctggaggagtgtgtgccccgggtgcgctctgtgcaccacgtgattgaggagtgcaagcaggagaaccagtacctggagggcaacacccagctgctggagaaggtgaaggcccatgaaattgcctggctgcacggcaccatccagacccaccaggagcggccccgggtgcagaaccaggtgatcctggaggagaacaccaccctgctgggcttccaggacaagcacttccagcaccaggccaccatcgccgagctggagctggagaagaccaagctgcaggagctgaccaggaagctgaaggagcgggtgaccatcctggtgaagcagaaggatgtgctgagccacggggagaaggaggaggagctgaaggccatgatgcatgacctgcagatcacctgcagcgagatgcagcagaaggtggagctgctgcgctatgagagcgagaagctgcagcaggagaacagcatcctgagaaatgagatcaccaccctgaatgaggaggacagcatcagcaacctgaagctgggcaccctgaatggcagccaggaggagatgtggcagaagacagagaccgtgaagcaggagaatgctgctgtgcagaagatggtggagaacctgaagaagcagatcagcgagctgaagatcaagaaccagcagctggacctggagaacacagagctgagccagaagaacagccagaaccaggagaagctgcaggagctgaaccagaggctgacagagatgctgtgccagaaggagaaggagcccggcaacagcgccctggaggagcgggagcaggagaagttcaacctgaaggaggagctggagcgctgcaaggtgcagagcagcaccctggtgagcagcctggaggccgagctgtctgaggtgaagatccagacccacatcgtgcagcaggagaaccacctgctgaaggatgagctggagaagatgaagcagctgcaccgctgcccagacctgagtgacttccagcagaagatcagctctgtgctgagctacaatgagaagctgctgaaggagaaggaggccctgtctgaggagctgaacagctgtgtggacaagctggccaagagcagcctgctggagcaccgcatcgccaccatgaagcaggagcagaagtcctgggagcaccagagcgccagcctgaagagccagctggtggccagccaggagaaggtgcagaacctggaggacacagtgcagaatgtgaacctgcagatgagcaggatgaagagtgacctgcgggtgacccagcaggagaaggaggccctgaagcaggaggtgatgagcctgcacaagcagctgcagaatgccggcggcaagtcctgggcccctgagatcgccacccaccccagcggcctgcacaaccagcagaagaggctgtcctgggacaagctggaccacctgatgaatgaggagcagcagctgctgtggcaggagaatgaaaggctgcagaccatggtgcagaacaccaaggccgagctgacccacagccgggagaaggtgcggcagctggagagcaacctgctgcccaagcaccagaagcacctgaaccccagcggcaccatgaaccccacagagcaggagaagctgagcctgaagagagaatgtgaccagttccagaaggagcagagccctgccaacaggaaggtgtcccagatgaacagcctggagcaggagctggagaccatccacctggagaatgaaggcctgaagaagaagcaggtgaagctggatgagcagctgatggagatgcagcacctgcggagcacagccacccccagccccagcccccacgcctgggacctgcagctgctgcagcagcaggcctgccccatggtgccccgggagcagttcctgcagctgcagaggcagctgctgcaggccgagcgcatcaaccagcacctgcaggaggagctggagaacagaaccagcgagaccaacaccccccagggcaaccaggagcagctggtgacagtgatggaggagaggatgattgaggtggagcagaagctgaagctggtgaagaggctgctgcaggagaaggtgaaccagctgaaggagcaggtgtccctgcccggccacctgtgcagccccaccagccacagcagcttcaacagcagcttcaccagcctgtactgccactag

SEQ ID NO: 331953 - DNA, 6291 bp, Artificial Sequence
  derived and/or modified sequence
atggccgaggtgaccgtgccccgggtgtacgtggtgttcggcatccactgcattatggcgaaggcatccagcgatgtgcaggtatccggctttcacagaaagatccagcacgtcaagaacgagctgtgccatatgctgtccttggaagaggtagctcccgtgctgcagcagacccttctacaggataacctgctcggaagggtccatttcgaccaattcaaagaggcattgatcctcatcttgtctcggacactgtctaacgaggagcactttcaggagcccgattgtagccttgaagcacaaccaaaatatgtacgaggagggaaacgctacgggagacggagcttgcctgaattccaggaaagcgtcgaggaatttccggaagtgacagtgattgagccgctggacgaggaggctaggccaagccatattcccgccggagactgcagcgaacactggaaaacgcagcgttcggaagagtacgaagcagaaggccaactgaggttctggaatccagatgatctgaacgccagccaaagtgggtctagccctcctcaggactggatcgaagagaagttgcaagaagtatgtgaggatctgggcattaccagagacgggcacctgaatcgaaagaagctggtatcaatatgtgagcagtatgggctgcagaatgttgatggcgagatgctcgaggaggtttttcataacctcgatcctgatggcaccatgtcagttgaggattttttctacgggctgttcaagaacggaaaatcactgacaccctccgcatcaacaccttacaggcagttgaagcggcatctcagcatgcagagctttgacgaatcaggcaggcgtactaccacatcaagcgcaatgacctccacgattggctttagggtcttctcatgtctggacgacggaatgggacacgcatcagtcgagcggatcctcgacacatggcaagaagaaggtatcgagaactcacaggagattctgaaggccctggatttctcgctggatggtaatattaatctgaccgagctgacattggctctcgagaatgagctgttagtgacaaagaattcaatccatcaggctgccctggcctcattcaaagctgaaattaggcatctcctggaacgggtcgaccaggttgtacgggagaaagagaagctaagatcagaccttgacaaagcagaaaaactcaaaagtctgatggccagcgaagtcgacgaccaccacgccgccattgagagaagaaacgaatacaatttgcgcaaactcgatgaggaatacaaggaacggatcgccgctttgaagaatgaactgcgcaaggagagagagcaaattttgcagcaggccgggaaacagcgccttgagctggaacaggaaatagagaaggctaagaccgaggaaaactacattcgcgaccggctggcactctcactcaaggaaaacagtaggcttgagaatgagctcctggaaaatgctgagaagctggcagaatacgagaacctgactaataaactccagcgcaatctcgagaacgtcctcgccgagaagtttggggatctcgatccgagctcagcagaattcttcctgcaggaggaaagacttactcagatgaggaatgagtatgagcgccaatgtcgggtgttgcaagatcaggtggacgaactgcagagcgagctggaggagtaccgagcccagggcagggtcctgagactgcccctgaaaaattcaccttcggaggaagttgaagcgaattccggaggcatagagcccgaacatggcctcggaagcgaagaatgcaaccccctcaacatgtccattgaagcagaactggtcatagaacagatgaaagaacagcaccatagagacatttgttgtctgcgtttagagctcgaggataaggtgaggcattatgagaagcaactcgatgagacggtggtttcatgtaagaaggcccaagagaacatgaagcaaaggcacgaaaatgaaacacacaccttagagaagcaaatttctgacctcaagaacgagatagctgagcttcaaggccaagctgctgtgttgaaagaggcccaccacgaggcaacgtgtcgacacgaggaagagaagaaacagctgcaagttaaactcgaagaggagaagactcatcttcaggaaaagttgcggctccagcacgaaatggagttgaaggccaggttaacccaggcccaggcttctttcgagagggaaagggagggtctacagtcaagcgcatggacagaagagaaggttagggggttgacacaagagctggagcaatttcatcaagaacagctcacaagtctcgtcgagaaacatactctcgaaaaggaggagctgcgcaaagaactgcttgagaaacaccaaagggaattacaggaaggaagggagaaaatggagaccgagtgtaatagaaggacctcccagatagaggcccagttccaatcagattgtcagaaggtgaccgagaggtgtgaatctgcactccagagtctggaaggtaggtatagacaggaactgaaagatctgcaggagcagcagcgagaagagaaaagtcagtgggaattcgagaaagatgagctcacgcaggagtgcgccgaggcacaagagttacttaaagaaacactgaaaagagagaagacaaccagcctagtcctgacacaggagagagagatgttagaaaagacctataaggagcaccttaattctatggtggtggaacgtcaacagctgctgcaggacctggaggacctgcggaacgtgtccgagactcagcagtcacttctgagtgatcagatcctcgaactgaaatcaagccacaaacgagaactacgagaacgggaggaggtgctgtgtcaggctggtgcctcagagcagctggcaagccagcgattagaaagacttgaaatggagcatgaccaagagagacaagagatgatgtctaaactcttagccatggagaacatccataaggcgacctgcgaaacagcagaccgcgaacgcgcagagatgtccactgaaatctctcgattacaatcgaagattaaagagatgcaacaagcaacctccccattgtcgatgcttcagagcgggtgccaggtgattggagaagaggaagttgagggcgatggggctctctctcttcttcagcagggcgagcaattgctcgaagaaaacggagacgtcctgttgagtctgcagagggctcatgagcaggccgtgaaagaaaacgtgaagatggctaccgagatttccagactgcaacaaaggcttcagaaattggagcctggtctagtaatgagcagctgcctggacgaaccagcaaccgaattcttcgggaacactgcagaacagactgaacaattcctacagcagaacagaaccaagcaagtagagggtgtgacacgcagacatgtgctgtcagacttagaggacgacgaggtaagagacctggggtccacaggcacttccagcgtccaaaggcaggaagtcaagatcgaggaaagtgaggcttcagtcgagggcttctccgaattggagaattctgaagagacccgcaccgaaagttgggaattgaaaaaccagatctcccagctccaggaacagctcatgatgctgtgtgccgattgcgatcgagcctctgaaaagaagcaggaccttttattcgacgtctctgtcctaaaaaagaaattgaagatgctcgagcgcattccggaggcttctccgaaatacaaattattatatgaagacgtgagcagggaaaatgactgtttacaggaggagctccgtatgatggagacccggtatgacgaggctctagaaaataacaaggagctaacagccgaagtttttcggctccaggacgaactcaagaaaatggaggaggtgaccgaaacatttctgagcctcgaaaagagttacgatgaggtgaaaatagagaatgaaggcctgaacgtcctcgttttgcggctgcagggcaaaatagagaaactgcaggaatccgtagtccagagatgcgattgctgcctttgggaagcatcgctggagaatctggaaatagagcccgacggtaacatcctgcagctgaaccagacactcgaggagtgtgtgcctcgcgtgcggtctgtgcaccacgtgatagaggaatgcaaacaagaaaaccagtatctggaagggaatactcaactcttggaaaaagttaaggcccatgaaattgcttggctacacgggactattcagacccaccaagaaagaccacgagttcagaaccaggtcatcttagaggagaacacgactcttctcggtttccaggataaacactttcagcaccaggccaccatcgccgaacttgagctagaaaagacaaagctccaagagctgacccgcaagcttaaggagagagtgactattctagtgaaacagaaagatgtgctgagccacggcgagaaagaggaagaactgaaggctatgatgcatgatttgcagatcacatgcagcgagatgcagcagaaggtcgagctacttagatatgagtccgagaagctgcagcaagagaattctatactgcggaatgaaatcactacgctgaatgaggaggattcaatttccaatctgaagcttggcaccctcaacggcagccaagaggagatgtggcaaaaaacagagactgtgaagcaggaaaacgcagcagtacagaaaatggtggagaatctgaaaaaacagattagcgaactgaagataaaaaaccagcagctagacctcgagaatacagagctctctcaaaagaacagtcagaatcaggagaagctgcaggagctgaatcagcgattgactgaaatgttgtgtcagaaagaaaaagagccgggcaatagcgccttagaagaacgtgagcaggaaaagtttaacctgaaggaggagctcgagcgctgcaaggtgcagtcctctactctcgtcagcagtttagaggccgaactgagcgaagtcaagattcaaacacacatagtccaacaggagaatcatttgctcaaggacgaactggaaaagatgaagcagttgcaccgttgccccgatttgtcggacttccagcaaaaaatatcctcggtattgtcctataatgaaaaactcctcaaggagaaagaggcactatcagaggaactgaactcgtgcgtagataaactcgcgaagtctagtcttttggagcacaggattgccaccatgaagcaggagcagaaatcctgggagcatcagagcgcctcactcaaatcacagctggtcgcatcccaagagaaagtgcagaacttagaagatactgtgcagaacgtcaatttgcagatgagccgcatgaaatctgaccttcgggtcacccagcaggagaaagaagctttaaagcaggaagtcatgtcgctgcataaacagctgcaaaacgctggaggcaaatcatgggctcctgagatcgctacgcacccttccggacttcataatcaacagaagaggctgagctgggataaactggatcatctaatgaacgaggagcagcagctgttgtggcaggagaatgaacgcctccagacgatggttcaaaacactaaagccgagctcactcacagcagagagaaggtgaggcaactcgaatctaatctgttgcctaagcatcaaaaacatctgaacccttcaggaactatgaatcccactgaacaggaaaagctgtcactgaaacgggaatgtgatcagtttcagaaagagcagtcaccagccaataggaaagtgagccagatgaattcactggaacaggaactcgaaactatccacctggagaatgaaggtttgaagaagaaacaggtcaagttggacgagcagctgatggagatgcagcatcttagaagcactgcaacaccttctccgagcccccacgcctgggacctgcaactgctgcagcagcaagcctgcccaatggtgccacgagagcaatttttacagctgcagaggcagcttctgcaggcggagagaatcaatcagcacctgcaggaggaactggagaatcgcacatccgagaccaacaccccccagggtaatcaggagcagctggttacagtgatggaagaacgtatgattgaggtggaacaaaaactaaaacttgtcaaaagactgttacaggagaaagtgaatcaactgaaagagcaggtttctctcccgggtcacttgtgctccccgacgtcacacagcagtttcaattcaagcttcacaagcctctattgtcactag

SEQ ID NO: 331954 - DNA, 6290 bp, Artificial Sequence
  derived and/or modified sequence
atggcagaagtgaccgtgccccgagtgtatgtggtctttggcatccattgcatcatggcaaaggcatcaagtgatgtccaagtgtcaggtttccatcgcaaaatacagcatgtgaagaacgagctgtgtcatatgttgtccctagaggaggtcgcacccgtcttgcagcagacgctcctgcaggacaacctactagggagggtgcactttgatcaattcaaggaagccttgatcctcattctgtcgcgcaccctgtctaacgaggagcatttccaggagcccgactgttcacttgaggcccagccgaagtatgtgagggggggtaaacggtacggaaggcggtccctacccgagttccaagaatcagtagaggaattccctgaggtgactgtcatcgagcctttagacgaagaggcccgaccaagtcacatccccgcaggtgactgttctgagcactggaaaacccagagatctgaggagtacgaggccgagggccagttgcggttttggaaccccgatgatctgaacgcttcccaatccggaagttctccaccacaggattggatcgaggagaagttgcaggaggtctgcgaggatctgggcatcacccgcgacggacatctgaatcgcaaaaaattagtgtccatatgcgaacagtacggacttcagaacgtggacggagagatgttggaagaagtcttccataatttggatcccgatggaacaatgtctgttgaagactttttctacggtttattcaaaaatggaaagagcctgaccccgagtgcatcaactccgtatcgccagctcaaaaggcacctgagcatgcagtcattcgacgagtctggcaggcggacaaccacctccagcgccatgacgagtacgatcggattcagagtgtttagctgtcttgacgacgggatgggacatgcttcagtcgagagaatcttggacacatggcaagaagaagggattgaaaatagccaggaaatactaaaggctctcgatttctcattagatggcaacattaacctgaccgaactgacactagcgctggaaaacgaactgctggtcaccaaaaactccattcatcaggcggctctcgctagttttaaagccgaaatcaggcacctacttgaacgcgttgatcaggtagtgagggagaaggagaagctacggtccgacttagataaagccgagaaactcaaaagcctcatggccagtgaggttgatgaccaccatgcagccatagaacggagaaacgaatacaatctgcggaaactcgatgaggaatacaaagaaagaattgctgccttgaaaaatgaacttaggaaagaaagggagcaaatcctacagcaagctggcaaacagcggcttgaactggaacaggagatcgagaaggccaaaaccgaagagaactacattcgagataggttggccttgtccctcaaagagaatagcagattagaaaatgagttgctcgagaatgccgaaaaactggccgaatatgaaaatttgacaaataagctgcagcgcaacttggaaaacgtcctcgctgagaagtttggtgatctggaccctagttccgccgaattcttccttcaggaagagagactcacccagatgaggaacgaatacgaaaggcagtgtcgtgtgttacaggaccaagtggacgagttgcagtcagagctggaggaatacagagcccaaggaagagttctccgcttgcctcttaaaaactcgccatctgaagaagttgaggccaattccgggggaattgaaccggagcacggcctcggtagcgaagaatgcaaccctctgaatatgagcattgaagccgagctggttatcgaacagatgaaagaacagcaccatagggacatatgctgtctgcgcttggagttggaagataaagtgagacattatgaaaagcagctagatgagactgtcgtctcctgcaagaaggcccaggagaatatgaagcaacgccatgaaaacgagacccatacactggagaaacagatctcggacttaaagaacgagattgccgaattacagggtcaggctgcagtcctcaaggaggcgcatcacgaagcaacttgccgacacgaggaagagaagaagcaactgcaagtgaagctggaagaagaaaagacgcatctgcaggaaaaattgcggctccagcatgagatggaactaaaggctcgtctgactcaagcacaggcctcatttgaaagagaacgcgaggggttacagtcatcagcatggactgaagaaaaggtgcgcggacttacacaggaactggagcagttccaccaggagcagctaacctcactggtggagaaacacacactcgagaaggaagagctgcgtaaggagctgctcgagaagcatcagagggagctccaggaggggcgagagaagatggagacggagtgtaataggaggacctcacaaatcgaagctcagtttcagagcgactgccagaaggtgaccgagcggtgcgagtcagccctccagtctttggagggcaggtacaggcaggagttgaaagatctgcaggagcagcagcgcgaagagaagagccagtgggagtttgagaaggacgagctgacccaggagtgcgcggaagcccaggaactcctgaaggaaacactgaaacgggagaagacgacttctctggtactcactcaggaacgggaaatgctcgagaagacatacaaggaacacctgaatagcatggtggtcgagaggcagcaactgttgcaggacctggaagatttgagaaatgtctccgaaactcagcaatccctcctgtcagaccagattctagagctcaagtcctctcacaagagagagctacgggaacgagaagaagtgctgtgccaggcaggagcaagcgaacagctcgcgagccagcggctggagagactcgaaatggagcatgatcaggagcgtcaggaaatgatgtctaaactgctcgccatggagaatatccacaaggccacctgcgagaccgcagaccgcgagcgcgctgaaatgagcaccgagatctcgagactgcaaagcaagatcaaggagatgcagcaggccactagtccactgagcatgcttcagtctgggtgccaagtcatcggggaggaagaggttgagggcgatggcgctctgtccctgttgcagcagggagaacagcttttggaagagaatggtgacgtacttctctctcttcaaagagcccacgaacaggctgtgaaggagaacgtcaaaatggcaacggagatcagcagactgcagcagcgattacagaaactggaacccggtctggttatgagttcatgtcttgacgagccagctacagaattcttcgggaacaccgccgagcagaccgagcagttcctgcagcagaaccgaaccaaacaagtcgagggggtgacccggcgtcatgttttatccgacctggaggatgacgaagttcgcgacttgggttcaaccggtacctcaagcgtccagcgtcaggaggtgaagatagaggagtccgaagctagtgtggaaggattctctgagctggaaaactcagaggagactaggacggagagttgggagctcaaaaatcaaatctcccagctacaggagcagctcatgatgctctgcgctgattgcgatagggccagtgaaaaaaaacaggatctgctatttgacgtttcagtactgaaaaagaaactgaaaatgctcgaacggatcccagaggcgagcccaaagtacaaactactgtacgaggacgtgtcacgtgaaaacgattgtctgcaagaggagttaaggatgatggagactagatacgacgaggccctcgagaacaacaaggaattgaccgccgaagtcttcaggttgcaagatgaattgaagaagatggaagaggtcacagaaactttcctatcccttgaaaaatcatatgatgaagtcaaaatcgagaatgaaggtctgaacgtcttggttctgagacttcagggcaaaatcgaaaagctccaggagtcggtggtccaaagatgcgattgctgcttgtgggaagcatcgctggagaatctcgaaattgaacctgacgggaatattttacagctcaaccagacactggaggaatgtgtgccgagggtaaggtctgtgcatcatgtgattgaagagtgcaagcaagaaaatcaatatctcgaaggaaacacccagctactcgagaaggtgaaagcacacgagatagcatggctgcacggtaccattcagacccatcaggagaggcctcgcgttcagaatcaggtgatactggaggagaacacaacacttctgggatttcaagataaacactttcagcaccaggccaccatcgctgaattagagctggaaaagaccaaactgcaagagttgacgcggaaattgaaggagagagtgaccatactggtcaagcagaaggacgtactctcccatggcgaaaaggaggaagaactgaaagctatgatgcacgatctgcagattacgtgtagcgaaatgcagcagaaagtcgaactactgaggtatgaatccgaaaagctccagcaggagaacagcatcttgagaaatgagatcactactctgaatgaggaagactcaatctctaacctgaagttgggcaccctgaacggcagccaggaagagatgtggcagaagacggagacagtgaaacaggagaacgcagcagtgcagaaaatggttgagaacctgaagaagcaaataagcgaactgaagatcaaaaaccaacagttggatttagagaataccgaactttctcagaagaactcacagaatcaggagaagttgcaggaactgaaccaaaggttgaccgaaatgttgtgtcagaaagaaaaagagccaggcaactcagcactcgaagagcgggagcaggaaaaattcaacttaaaggaagagctcgagcggtgcaaggtgcagtcctctactctggtgagctcattggaagcggagctctcggaggtgaagattcaaacacatatcgtgcagcaggaaaatcatctgctcaaagatgagctggagaagatgaaacaactccatcgctgccccgatctgtcagatttccagcagaagatatcatcggtcttgagttataatgagaaactgcttaaggaaaaagaagccctgtccgaagaattaaacagctgcgttgataagttggctaagagtagcctcctggagcatcgcatcgccaccatgaagcaggaacaaaagtcctgggagcatcagtccgcaagcctgaagtctcagctggtggccagccaagagaaagtacagaatctcgaagacacagtccagaatgtgaatctgcagatgtctaggatgaagtccgatctgagggttacgcagcaggagaaggaggccctgaagcaggaagtgatgtccctgcacaagcaactgcaaaacgcagggggtaagtcctgggctccggaaattgcgacacacccatccgggctccataatcagcaaaagagattgtcctgggacaaactcgatcaccttatgaatgaggaacagcaactgttatggcaggaaaacgagcggctccagactatggtgcagaatactaaggccgaactcactcattctcgagagaaggttaggcagcttgagtctaacctgctacccaagcaccagaaacacctgaatcccagtggcaccatgaacccaaccgaacaggaaaaattatcccttaagcgggaatgcgaccaattccagaaggaacagagccccgcaaatcgcaaggtgtctcagatgaacagcctagaacaggagctggaaactatccatctggaaaatgagggactcaaaaaaaaacaggtgaagctcgatgaacagctgatggagatgcagcacctaagatcaaccgccactccatccccctctcctcatgcatgggatctccagctgctgcaacagcaggcctgcccgatggtcccacgggagcagttcttgcagctccagcggcagttactccaggcggaaaggattaatcagcacctccaggaggaattggaaaaccggaccagtgaaaccaacaccccacagggcaaccaggaacagttggtgacagttatggaagagcgcatgattgaggtagagcagaaacttaagttagtaaagcggttgcttcaggaaaaagttaatcaacttaaggagcaagttagcttgcctggccatttgtgttcaccgacatcacattctagtttcaactcatcatttacttcactctactgtcatta

SEQ ID NO: 331955 - DNA, 6330 bp, Artificial Sequence
  derived and/or modified sequence
atggctgaggtcaccgtcccaagggtgtatgtcgtgtttggcatccattgcatcatggcgaaggcatcttcagatgtgcaggtttcaggctttcatcggaaaatccagcacgttaaaaatgaactttgccacatgttgagcttggaggaggtggccccagtgctgcagcagacattacttcaggacaacctcttgggcagggtacattttgaccaatttaaagaagcattaatactcatcttgtccagaactctgtcaaatgaagaacactttcaagaaccagactgctcactagaagctcagcccaaatatgttagaggtgggaagcgttacggacgaaggtccttgcccgagttccaagagtccgtggaggagtttcctgaagtgacggtgattgagccactggatgaagaagcgcggccttcacacatcccagccggtgactgcagtgagcactggaagacgcaacgcagtgaggagtatgaagcggaaggccagttaaggttttggaacccagatgacttgaatgcttcacagagtggatcttcccctccccaagactggatagaagagaaactgcaagaagtttgtgaagatttggggatcacccgtgatggtcacctgaaccggaagaagctggtctccatctgtgagcagtatggtttacagaatgtggatggagagatgctcgaggaagtattccataatcttgatcctgacggtacaatgagtgtagaagattttttctatggtttgtttaaaaatggaaaatctcttacaccatcagcatctactccatatagacaactaaaaaggcacctttccatgcagtctttcgatgagagtggacgacgtaccacaacctcatcagcaatgacaagtaccattggctttcgggtcttctcctgcctggatgatgggatgggccatgcatctgtggagagaatactggacacctggcaggaagagggcattgagaacagccaggagatcctgaaggccttggatttcagcctcgatggaaacatcaatttgacagaattaacactggcccttgaaaatgaacttttggttaccaagaacagcattcaccaggcggctctggccagctttaaggctgaaatccggcatttgttggaacgagttgatcaggtggtcagagaaaaagagaagctacggtcagatctggacaaggccgagaagctcaagtctttaatggcctcggaggtggatgatcaccatgcggccatagagcggcggaatgagtacaacctcaggaaactggatgaagagtacaaggagcgaatagcagccttaaaaaatgaactccgaaaagagagagagcagatcctgcagcaggcaggcaagcagcgtttagaacttgaacaggaaattgaaaaggcaaaaacagaagagaactatatccgggaccgccttgccctctctttaaaggaaaacagtcgtctggaaaatgagcttctagaaaatgcagagaagttggcagaatatgagaatctgacaaacaaacttcagagaaatttggaaaatgtgttagcagaaaagtttggtgacctcgatcctagcagtgctgagttcttcctgcaagaagagagactgacacagatgagaaatgaatatgagcggcagtgcagggtactacaagaccaagtagatgaactccagtctgagctggaagaatatcgtgcacaaggcagagtgctcaggcttccgttgaagaactcaccgtcagaagaagttgaggctaacagcggtggcattgagcccgaacacgggctcggttctgaagaatgcaatccattgaatatgagcattgaggcagagctggtcattgaacagatgaaagaacaacatcacagggacatatgttgcctcagactggagctcgaagataaagtgcgccattatgaaaagcagctggacgaaaccgtggtcagctgcaagaaggcacaggagaacatgaagcaaaggcatgagaacgaaacgcacaccttagaaaaacaaataagtgaccttaaaaatgaaattgctgaacttcaggggcaagcagcagtgctcaaggaggcacatcatgaggccacttgcaggcatgaggaggagaaaaaacaactgcaagtgaagcttgaggaggaaaagactcacctgcaggagaagctgaggctgcaacatgagatggagctcaaggctagactgacacaggctcaagcaagctttgagcgggagagggaaggccttcagagtagcgcctggacagaagagaaggtgagaggcttgactcaggaactagagcagtttcaccaggagcagctgacaagcctggtggagaaacacactcttgagaaagaggagttaagaaaagagctcttggaaaagcaccaaagggagcttcaggagggaagggaaaaaatggaaacagagtgtaatagaagaacctctcaaatagaagcccagtttcagtctgattgtcagaaagtcactgagaggtgtgaaagcgctctgcaaagcctggaggggcgctaccgccaagagctgaaggacctccaggaacagcagcgtgaggagaaatcccagtgggaatttgagaaggacgagctcacccaggagtgtgcggaagcccaggagctgctgaaagagactcttaagagagagaaaacaacttctctggtcctgacccaggagagagagatgctggagaaaacatacaaagaacatttgaacagcatggtcgtcgagagacagcagctactccaagacctggaagacctaagaaatgtatctgaaacccagcaaagcctgctgtctgaccagatacttgagctgaagagcagtcacaaaagggaactgagggagcgtgaggaggtcctgtgccaggcaggggcttcggagcagctggccagccagcggctggaaagactagaaatggaacatgaccaggaaaggcaggaaatgatgtccaagcttctagccatggagaacattcacaaagcgacctgtgagacagcagatcgagaaagagccgagatgagcacagaaatctccagacttcagagtaaaataaaggaaatgcagcaggcaacatctcctctctcaatgcttcagagtggttgccaggtgataggagaggaggaggtggaaggagatggagccctgtccctgcttcagcaaggggagcagctgttggaagaaaatggggacgtcctcttaagcctgcagagagctcatgaacaggcagtgaaggaaaatgtgaaaatggctactgaaatttctagattgcaacagaggctacaaaagttagagccagggttagtaatgtcttcttgtttggatgagccagctactgagttttttggaaatactgcggaacaaacagagcagtttttacagcaaaaccgaacgaagcaagtagaaggtgtgaccaggcggcatgtcctaagtgacctggaagatgatgaggtccgggacctgggaagtacagggacgagctctgttcagagacaggaagtcaaaatagaggagtctgaagcttcagtagagggtttttctgagcttgaaaacagtgaagagaccaggactgaatcctgggagctgaagaatcagattagtcagcttcaggaacagctaatgatgttatgtgcggactgtgatcgagcttctgaaaagaaacaggacctactttttgatgtttctgtgctaaaaaagaaactgaagatgcttgagagaatccctgaggcttctcccaaatataagctgttgtatgaagatgtgagccgagaaaatgactgccttcaggaagagctgagaatgatggagacacgctacgatgaggcactagaaaataacaaagaactcactgcagaggttttcaggttgcaggatgagctgaagaaaatggaggaagtcactgaaacattcctcagcctggaaaagagttacgatgaggtcaaaatagaaaatgaggggctgaatgttctggttttgagacttcaaggcaagattgagaagcttcaggaaagcgtggtccagcggtgtgactgctgcttatgggaagccagtttagagaacctggaaatcgaacctgatggaaatatactccagctcaatcagacactggaagagtgtgtgcccagggttaggagtgtacatcatgtcatagaggaatgtaagcaagaaaaccagtaccttgaggggaacacacagctcttggaaaaagtaaaagcacatgaaattgcctggttacatggaacaattcagacacatcaagaaaggccaagagtacagaatcaagttatactggaggaaaacactactctcctaggctttcaagacaaacattttcagcatcaggccaccatagcagagttagaactggagaaaacaaagttacaggagctgactaggaagttgaaggagagagtcactattttagttaagcaaaaagatgtactttctcacggagaaaaggaggaagagctgaaggcaatgatgcatgacttgcagatcacgtgcagtgagatgcagcaaaaagttgaacttctgagatatgaatctgaaaagcttcaacaggaaaattctattttgagaaatgaaattactactttaaatgaagaagatagcatttctaacctgaaattagggacattaaatggatctcaggaagaaatgtggcaaaaaacggaaactgtaaaacaagaaaatgctgcagttcagaagatggttgaaaatttaaagaaacagatttcagaattaaaaatcaaaaaccaacaattggatttggaaaatacagaacttagccaaaagaactctcaaaaccaggaaaaactgcaagaacttaatcaacgtctaacagaaatgctatgccagaaggaaaaagagccaggaaacagtgcattggaggaacgggaacaagagaagtttaatctgaaagaagaactggaacgttgtaaagtgcagtcctccactttagtgtcttctctggaggcggagctctctgaagttaaaatacagacccatattgtgcaacaggaaaaccaccttctcaaagatgaactggagaaaatgaaacagctgcacagatgtcccgatctctctgacttccagcaaaaaatctctagtgttctaagctacaacgaaaaactgctgaaagaaaaggaagctctgagtgaggaattaaatagctgtgtcgataagttggcaaaatcaagtcttttagagcatagaattgcgacgatgaagcaggaacagaaatcctgggaacatcagagtgcgagcttaaagtcacagctggtggcttctcaggaaaaggttcagaatttagaagacaccgtgcagaatgtaaacctgcaaatgtcccggatgaaatctgacctacgagtgactcagcaggaaaaggaggctttaaaacaagaagtgatgtctttacataagcaacttcagaatgctggtggcaagagctgggccccagagatagctactcatccatcagggctccataaccagcagaaaaggctgtcctgggacaagttggatcatctgatgaatgaggaacagcagctgctttggcaagagaatgagaggctccagaccatggtacagaacaccaaagccgaactcacgcactcccgggagaaggtccgtcagttggaatccaatcttcttcccaagcaccaaaaacatctaaacccatcaggtaccatgaatcccacagagcaagaaaaattgagcttaaagagagagtgtgatcagtttcagaaagaacaatctcctgctaacaggaaggtcagtcagatgaattcccttgaacaagaattagaaacaattcatttggaaaatgaaggcctgaaaaagaaacaagtaaaactggatgagcagctcatggagatgcagcacctgaggtccactgcgacgcctagcccgtcccctcatgcttgggatttgcagctgctccagcagcaagcctgtccgatggtgcccagggagcagtttctgcagcttcaacgccagctgctgcaggcagaaaggataaaccagcacctgcaggaggaacttgaaaacaggacctccgaaaccaacacaccacagggaaaccaggaacaactggtaactgtcatggaggaacgaatgatagaagttgaacagaaactgaaactagtgaaaaggcttcttcaagagaaagtgaatcagctcaaagaacaagtgagcctacccggtcatctctgttcacccacctcacattccagctttaactccagttttacatccctttattgccattaactcgttaacttatgttgtctaataaaggcaaattctatt

SEQ ID NO: 331956 - DNA, 6291 bp, Artificial Sequence
  derived and/or modified sequence
atggccgaggtgaccgtgcccagagtgtacgtggtgttcggcatccactgcatcatggccaaggccagcagcgacgtgcaggtgagcggcttccacagaaagatccagcacgtgaagaacgagctgtgccacatgctgagcctggaggaggtggcccccgtgctgcagcagaccctgctgcaggacaacctgctgggcagagtgcacttcgaccagttcaaggaggccctgatcctgatcctgagcagaaccctgagcaacgaggagcacttccaggagcccgactgcagcctggaggcccagcccaagtacgtgagaggcggcaagagatacggcagaagaagcctgcccgagttccaggagagcgtggaggagttccccgaggtgaccgtgatcgagcccctggacgaggaggccagacccagccacatccccgccggcgactgcagcgagcactggaagacccagagaagcgaggagtacgaggccgagggccagctgagattctggaaccccgacgacctgaacgccagccagagcggcagcagccccccccaggactggatcgaggagaagctgcaggaggtgtgcgaggacctgggcatcaccagagacggccacctgaacagaaagaagctggtgagcatctgcgagcagtacggcctgcagaacgtggacggcgagatgctggaggaggtgttccacaacctggaccccgacggcaccatgagcgtggaggacttcttctacggcctgttcaagaacggcaagagcctgacccccagcgccagcaccccctacagacagctgaagagacacctgagcatgcagagcttcgacgagagcggcagaagaaccaccaccagcagcgccatgaccagcaccatcggcttcagagtgttcagctgcctggacgacggcatgggccacgccagcgtggagagaatcctggacacctggcaggaggagggcatcgagaacagccaggagatcctgaaggccctggacttcagcctggacggcaacatcaacctgaccgagctgaccctggccctggagaacgagctgctggtgaccaagaacagcatccaccaggccgccctggccagcttcaaggccgagatcagacacctgctggagagagtggaccaggtggtgagagagaaggagaagctgagaagcgacctggacaaggccgagaagctgaagagcctgatggccagcgaggtggacgaccaccacgccgccatcgagagaagaaacgagtacaacctgagaaagctggacgaggagtacaaggagagaatcgccgccctgaagaacgagctgagaaaggagagagagcagatcctgcagcaggccggcaagcagagactggagctggagcaggagatcgagaaggccaagaccgaggagaactacatcagagacagactggccctgagcctgaaggagaacagcagactggagaacgagctgctggagaacgccgagaagctggccgagtacgagaacctgaccaacaagctgcagagaaacctggagaacgtgctggccgagaagttcggcgacctggaccccagcagcgccgagttcttcctgcaggaggagagactgacccagatgagaaacgagtacgagagacagtgcagagtgctgcaggaccaggtggacgagctgcagagcgagctggaggagtacagagcccagggcagagtgctgagactgcccctgaagaacagccccagcgaggaggtggaggccaacagcggcggcatcgagcccgagcacggcctgggcagcgaggagtgcaaccccctgaacatgagcatcgaggccgagctggtgatcgagcagatgaaggagcagcaccacagagacatctgctgcctgagactggagctggaggacaaggtgagacactacgagaagcagctggacgagaccgtggtgagctgcaagaaggcccaggagaacatgaagcagagacacgagaacgagacccacaccctggagaagcagatcagcgacctgaagaacgagatcgccgagctgcagggccaggccgccgtgctgaaggaggcccaccacgaggccacctgcagacacgaggaggagaagaagcagctgcaggtgaagctggaggaggagaagacccacctgcaggagaagctgagactgcagcacgagatggagctgaaggccagactgacccaggcccaggccagcttcgagagagagagagagggcctgcagagcagcgcctggaccgaggagaaggtgagaggcctgacccaggagctggagcagttccaccaggagcagctgaccagcctggtggagaagcacaccctggagaaggaggagctgagaaaggagctgctggagaagcaccagagagagctgcaggagggcagagagaagatggagaccgagtgcaacagaagaaccagccagatcgaggcccagttccagagcgactgccagaaggtgaccgagagatgcgagagcgccctgcagagcctggagggcagatacagacaggagctgaaggacctgcaggagcagcagagagaggagaagagccagtgggagttcgagaaggacgagctgacccaggagtgcgccgaggcccaggagctgctgaaggagaccctgaagagagagaagaccaccagcctggtgctgacccaggagagagagatgctggagaagacctacaaggagcacctgaacagcatggtggtggagagacagcagctgctgcaggacctggaggacctgagaaacgtgagcgagacccagcagagcctgctgagcgaccagatcctggagctgaagagcagccacaagagagagctgagagagagagaggaggtgctgtgccaggccggcgccagcgagcagctggccagccagagactggagagactggagatggagcacgaccaggagagacaggagatgatgagcaagctgctggccatggagaacatccacaaggccacctgcgagaccgccgacagagagagagccgagatgagcaccgagatcagcagactgcagagcaagatcaaggagatgcagcaggccaccagccccctgagcatgctgcagagcggctgccaggtgatcggcgaggaggaggtggagggcgacggcgccctgagcctgctgcagcagggcgagcagctgctggaggagaacggcgacgtgctgctgagcctgcagagagcccacgagcaggccgtgaaggagaacgtgaagatggccaccgagatcagcagactgcagcagagactgcagaagctggagcccggcctggtgatgagcagctgcctggacgagcccgccaccgagttcttcggcaacaccgccgagcagaccgagcagttcctgcagcagaacagaaccaagcaggtggagggcgtgaccagaagacacgtgctgagcgacctggaggacgacgaggtgagagacctgggcagcaccggcaccagcagcgtgcagagacaggaggtgaagatcgaggagagcgaggccagcgtggagggcttcagcgagctggagaacagcgaggagaccagaaccgagagctgggagctgaagaaccagatcagccagctgcaggagcagctgatgatgctgtgcgccgactgcgacagagccagcgagaagaagcaggacctgctgttcgacgtgagcgtgctgaagaagaagctgaagatgctggagagaatccccgaggccagccccaagtacaagctgctgtacgaggacgtgagcagagagaacgactgcctgcaggaggagctgagaatgatggagaccagatacgacgaggccctggagaacaacaaggagctgaccgccgaggtgttcagactgcaggacgagctgaagaagatggaggaggtgaccgagaccttcctgagcctggagaagagctacgacgaggtgaagatcgagaacgagggcctgaacgtgctggtgctgagactgcagggcaagatcgagaagctgcaggagagcgtggtgcagagatgcgactgctgcctgtgggaggccagcctggagaacctggagatcgagcccgacggcaacatcctgcagctgaaccagaccctggaggagtgcgtgcccagagtgagaagcgtgcaccacgtgatcgaggagtgcaagcaggagaaccagtacctggagggcaacacccagctgctggagaaggtgaaggcccacgagatcgcctggctgcacggcaccatccagacccaccaggagagacccagagtgcagaaccaggtgatcctggaggagaacaccaccctgctgggcttccaggacaagcacttccagcaccaggccaccatcgccgagctggagctggagaagaccaagctgcaggagctgaccagaaagctgaaggagagagtgaccatcctggtgaagcagaaggacgtgctgagccacggcgagaaggaggaggagctgaaggccatgatgcacgacctgcagatcacctgcagcgagatgcagcagaaggtggagctgctgagatacgagagcgagaagctgcagcaggagaacagcatcctgagaaacgagatcaccaccctgaacgaggaggacagcatcagcaacctgaagctgggcaccctgaacggcagccaggaggagatgtggcagaagaccgagaccgtgaagcaggagaacgccgccgtgcagaagatggtggagaacctgaagaagcagatcagcgagctgaagatcaagaaccagcagctggacctggagaacaccgagctgagccagaagaacagccagaaccaggagaagctgcaggagctgaaccagagactgaccgagatgctgtgccagaaggagaaggagcccggcaacagcgccctggaggagagagagcaggagaagttcaacctgaaggaggagctggagagatgcaaggtgcagagcagcaccctggtgagcagcctggaggccgagctgagcgaggtgaagatccagacccacatcgtgcagcaggagaaccacctgctgaaggacgagctggagaagatgaagcagctgcacagatgccccgacctgagcgacttccagcagaagatcagcagcgtgctgagctacaacgagaagctgctgaaggagaaggaggccctgagcgaggagctgaacagctgcgtggacaagctggccaagagcagcctgctggagcacagaatcgccaccatgaagcaggagcagaagagctgggagcaccagagcgccagcctgaagagccagctggtggccagccaggagaaggtgcagaacctggaggacaccgtgcagaacgtgaacctgcagatgagcagaatgaagagcgacctgagagtgacccagcaggagaaggaggccctgaagcaggaggtgatgagcctgcacaagcagctgcagaacgccggcggcaagagctgggcccccgagatcgccacccaccccagcggcctgcacaaccagcagaagagactgagctgggacaagctggaccacctgatgaacgaggagcagcagctgctgtggcaggagaacgagagactgcagaccatggtgcagaacaccaaggccgagctgacccacagcagagagaaggtgagacagctggagagcaacctgctgcccaagcaccagaagcacctgaaccccagcggcaccatgaaccccaccgagcaggagaagctgagcctgaagagagagtgcgaccagttccagaaggagcagagccccgccaacagaaaggtgagccagatgaacagcctggagcaggagctggagaccatccacctggagaacgagggcctgaagaagaagcaggtgaagctggacgagcagctgatggagatgcagcacctgagaagcaccgccacccccagccccagcccccacgcctgggacctgcagctgctgcagcagcaggcctgccccatggtgcccagagagcagttcctgcagctgcagagacagctgctgcaggccgagagaatcaaccagcacctgcaggaggagctggagaacagaaccagcgagaccaacaccccccagggcaaccaggagcagctggtgaccgtgatggaggagagaatgatcgaggtggagcagaagctgaagctggtgaagagactgctgcaggagaaggtgaaccagctgaaggagcaggtgagcctgcccggccacctgtgcagccccaccagccacagcagcttcaacagcagcttcaccagcctgtactgccactag

SEQ ID NO: 331957 - protein, 1276 aa, Artificial Sequence
  derived and/or modified sequence
MDEVEQDQHEARLKELFDSFDTTGTGSLGQEELTDLCHMLSLEEVAPVLQQTLLQDNLLGRVHFDQFKEALILILSRTLSNEEHFQEPDCSLEAQPKYVRGGKRYGRRSLPEFQESVEEFPEVTVIEPLDEEARPSHIPAGDCSEHWKTQRSEEYEAEGQLRFWNPDDLNASQSGSSPPQDWIEEKLQEVCEDLGITRDGHLNRKKLVSICEQYGLQNVDGEMLEEVFHNLDPDGTMSVEDFFYGLFKNGKSLTPSASTPYRQLKRHLSMQSFDESGRRTTTSSAMTSTIGFRVFSCLDDGMGHASVERILDTWQEEGIENSQEILKALDFSLDGNINLTELTLALENELLVTKNSIHQAALASFKAEIRHLLERVDQVVREKEKLRSDLDKAEKLKSLMASEVDDHHAAIERRNEYNLRKLDEEYKERIAALKNELRKEREQILQQAGKQRLELEQEIEKAKTEENYIRDRLALSLKENSRLENELLENAEKLAEYENLTNKLQRNLENVLAEKFGDLDPSSAEFFLQEERLTQMRNEYERQCRVLQDQVDELQSELEEYRAQGRVLRLPLKNSPSEEVEANSGGIEPEHGLGSEECNPLNMSIEAELVIEQMKEQHHRDICCLRLELEDKVRHYEKQLDETVVSCKKAQENMKQRHENETHTLEKQISDLKNEIAELQGQAAVLKEAHHEATCRHEEEKKQLQVKLEEEKTHLQEKLRLQHEMELKARLTQAQASFEREREGLQSSAWTEEKVRGLTQELEQFHQEQLTSLVEKHTLEKEELRKELLEKHQRELQEGRYESEKLQQENSILRNEITTLNEEDSISNLKLGTLNGSQEEMWQKTETVKQENAAVQKMVENLKKQISELKIKNQQLDLENTELSQKNSQNQEKLQELNQRLTEMLCQKEKEPGNSALEEREQEKFNLKEELERCKVQSSTLVSSLEAELSEVKIQTHIVQQENHLLKDELEKMKQLHRCPDLSDFQQKISSVLSYNEKLLKEKEALSEELNSCVDKLAKSSLLEHRIATMKQEQKSWEHQSASLKSQLVASQEKVQNLEDTVQNVNLQMSRMKSDLRVTQQEKEALKQEVMSLHKQLQNAGGKSWAPEIATHPSGLHNQQKRLSWDKLDHLMNEEQQLLWQENERLQTMVQNTKAELTHSREKVRQLESNLLPKHQKHLNPSGTMNPTEQEKLSLKRECDQFQKEQSPANRKVSQMNSLEQELETIHLENEGLKKKQVKLDEQLMENSVVGSSREGCSSLPEIVCEDAAPEVHCDA

SEQ ID NO: 331958 - DNA, 3831 bp, Artificial Sequence
  derived and/or modified sequence
atggacgaggtggagcaggaccagcacgaggccagactgaaggagctgttcgacagcttcgacaccaccggcaccggcagcctgggccaggaggagctgaccgacctgtgccacatgctgagcctggaggaggtggcccccgtgctgcagcagaccctgctgcaggacaacctgctgggcagagtgcacttcgaccagttcaaggaggccctgatcctgatcctgagcagaaccctgagcaacgaggagcacttccaggagcccgactgcagcctggaggcccagcccaagtacgtgagaggcggcaagagatacggcagaagaagcctgcccgagttccaggagagcgtggaggagttccccgaggtgaccgtgatcgagcccctggacgaggaggccagacccagccacatccccgccggcgactgcagcgagcactggaagacccagagaagcgaggagtacgaggccgagggccagctgagattctggaaccccgacgacctgaacgccagccagagcggcagcagccccccccaggactggatcgaggagaagctgcaggaggtgtgcgaggacctgggcatcaccagagacggccacctgaacagaaagaagctggtgagcatctgcgagcagtacggcctgcagaacgtggacggcgagatgctggaggaggtgttccacaacctggaccccgacggcaccatgagcgtggaggacttcttctacggcctgttcaagaacggcaagagcctgacccccagcgccagcaccccctacagacagctgaagagacacctgagcatgcagagcttcgacgagagcggcagaagaaccaccaccagcagcgccatgaccagcaccatcggcttcagagtgttcagctgcctggacgacggcatgggccacgccagcgtggagagaatcctggacacctggcaggaggagggcatcgagaacagccaggagatcctgaaggccctggacttcagcctggacggcaacatcaacctgaccgagctgaccctggccctggagaacgagctgctggtgaccaagaacagcatccaccaggccgccctggccagcttcaaggccgagatcagacacctgctggagagagtggaccaggtggtgagagagaaggagaagctgagaagcgacctggacaaggccgagaagctgaagagcctgatggccagcgaggtggacgaccaccacgccgccatcgagagaagaaacgagtacaacctgagaaagctggacgaggagtacaaggagagaatcgccgccctgaagaacgagctgagaaaggagagagagcagatcctgcagcaggccggcaagcagagactggagctggagcaggagatcgagaaggccaagaccgaggagaactacatcagagacagactggccctgagcctgaaggagaacagcagactggagaacgagctgctggagaacgccgagaagctggccgagtacgagaacctgaccaacaagctgcagagaaacctggagaacgtgctggccgagaagttcggcgacctggaccccagcagcgccgagttcttcctgcaggaggagagactgacccagatgagaaacgagtacgagagacagtgcagagtgctgcaggaccaggtggacgagctgcagagcgagctggaggagtacagagcccagggcagagtgctgagactgcccctgaagaacagccccagcgaggaggtggaggccaacagcggcggcatcgagcccgagcacggcctgggcagcgaggagtgcaaccccctgaacatgagcatcgaggccgagctggtgatcgagcagatgaaggagcagcaccacagagacatctgctgcctgagactggagctggaggacaaggtgagacactacgagaagcagctggacgagaccgtggtgagctgcaagaaggcccaggagaacatgaagcagagacacgagaacgagacccacaccctggagaagcagatcagcgacctgaagaacgagatcgccgagctgcagggccaggccgccgtgctgaaggaggcccaccacgaggccacctgcagacacgaggaggagaagaagcagctgcaggtgaagctggaggaggagaagacccacctgcaggagaagctgagactgcagcacgagatggagctgaaggccagactgacccaggcccaggccagcttcgagagagagagagagggcctgcagagcagcgcctggaccgaggagaaggtgagaggcctgacccaggagctggagcagttccaccaggagcagctgaccagcctggtggagaagcacaccctggagaaggaggagctgagaaaggagctgctggagaagcaccagagagagctgcaggagggcagatacgagagcgagaagctgcagcaggagaacagcatcctgagaaacgagatcaccaccctgaacgaggaggacagcatcagcaacctgaagctgggcaccctgaacggcagccaggaggagatgtggcagaagaccgagaccgtgaagcaggagaacgccgccgtgcagaagatggtggagaacctgaagaagcagatcagcgagctgaagatcaagaaccagcagctggacctggagaacaccgagctgagccagaagaacagccagaaccaggagaagctgcaggagctgaaccagagactgaccgagatgctgtgccagaaggagaaggagcccggcaacagcgccctggaggagagagagcaggagaagttcaacctgaaggaggagctggagagatgcaaggtgcagagcagcaccctggtgagcagcctggaggccgagctgagcgaggtgaagatccagacccacatcgtgcagcaggagaaccacctgctgaaggacgagctggagaagatgaagcagctgcacagatgccccgacctgagcgacttccagcagaagatcagcagcgtgctgagctacaacgagaagctgctgaaggagaaggaggccctgagcgaggagctgaacagctgcgtggacaagctggccaagagcagcctgctggagcacagaatcgccaccatgaagcaggagcagaagagctgggagcaccagagcgccagcctgaagagccagctggtggccagccaggagaaggtgcagaacctggaggacaccgtgcagaacgtgaacctgcagatgagcagaatgaagagcgacctgagagtgacccagcaggagaaggaggccctgaagcaggaggtgatgagcctgcacaagcagctgcagaacgccggcggcaagagctgggcccccgagatcgccacccaccccagcggcctgcacaaccagcagaagagactgagctgggacaagctggaccacctgatgaacgaggagcagcagctgctgtggcaggagaacgagagactgcagaccatggtgcagaacaccaaggccgagctgacccacagcagagagaaggtgagacagctggagagcaacctgctgcccaagcaccagaagcacctgaaccccagcggcaccatgaaccccaccgagcaggagaagctgagcctgaagagagagtgcgaccagttccagaaggagcagagccccgccaacagaaaggtgagccagatgaacagcctggagcaggagctggagaccatccacctggagaacgagggcctgaagaagaagcaggtgaagctggacgagcagctgatggagaacagcgtggtgggcagcagcagagagggctgcagcagcctgcccgagatcgtgtgcgaggacgccgcccccgaggtgcactgcgacgcctag

SEQ ID NO: 331959 - DNA, 3831 bp, Artificial Sequence
  derived and/or modified sequence
atggatgaagtcgagcaggaccagcacgaggccaggctgaaagagctgttcgactccttcgatacaaccggtacaggatctctcgggcaggaggagttgaccgatttatgccacatgctgagcctggaagaagttgctcccgtgctgcaacagactttgttgcaggataatctgctgggccgggtccacttcgatcagtttaaagaggccctcatactgattctgtctcgaactctatctaatgaagagcattttcaggagccagattgcagcctcgaagctcagcccaaatacgtgaggggaggtaagcgctacggacgccggagcctgcccgagtttcaggaatctgtcgaagaatttcctgaggtcactgtaattgagcccctggacgaggaggcccggcctagccacatcccagctggcgattgctctgaacactggaagacacagagaagcgaagagtacgaagccgaaggtcagctgaggttttggaacccagacgacctcaacgcctcccagtcgggatcctcccccccccaggactggatcgaggaaaaacttcaggaggtgtgtgaggatctcggcataaccagagatgggcacctgaatcggaaaaagctagtctctatctgcgagcagtatgggctccagaatgttgacggggaaatgctcgaggaggtcttccacaacctcgacccagatgggaccatgtccgtggaggattttttttacgggttgttcaagaacggtaagtccctgaccccgtccgcaagcacaccctaccgtcagctcaagcgccatctttcaatgcagtcctttgacgaatcagggcgacggacaacaacttccagcgctatgacaagcacaattgggtttcgggtgttctcatgcctggacgacggcatgggccatgcgagtgtagagcgcattcttgatacctggcaggaagagggaatcgaaaatagccaggagattctcaaagcattagacttctcactcgatggcaatattaacttaaccgagctgacacttgcattggagaacgaactgttagttacaaagaatagtatccaccaagcagctcttgccagctttaaggccgaaatcagacacttacttgagagggtggaccaggtggtaagggagaaggaaaagcttaggagcgatctagacaaggccgagaagctgaaatcactgatggcaagtgaagtggatgatcatcacgctgccattgagcgcaggaacgaatataatctacggaagctagatgaagaatacaaggaacggatcgccgctctgaagaacgagctccgcaaggaacgggagcagatattgcagcaggccggcaaacagaggctggagctggagcaggagattgagaaggctaagactgaggaaaattacattcgggatcgcctagcactgtctttaaaggaaaattcccgtctggagaacgaactccttgagaacgcggaaaagctcgcagagtacgagaacctgaccaacaagctgcagcgcaatctcgagaatgtgctggccgagaagtttggggacttagaccctagctcagctgagttcttcctgcaagaggagagactaactcagatgaggaatgagtatgaacggcagtgtagagtactgcaagatcaggtggacgaactgcagtcagagctggaagaataccgggctcaaggacgcgtattgagacttcccctcaaaaactccccatccgaggaagtagaggccaactctggtgggatcgagccagaacatggtcttgggtctgaggagtgtaacccgttaaacatgagcattgaagctgagctcgttatagaacagatgaaagagcagcaccaccgtgacatttgctgcctgaggctggagctagaagataaggtgaggcactatgagaaacagcttgacgagacagttgtgagctgtaagaaagctcaggaaaatatgaagcagcgccacgagaacgaaacacacaccctggagaaacagatctcagatctgaaaaatgaaatcgcagaactgcagggtcaggcagcagtcctgaaagaggcccaccatgaagctacatgccgccacgaggaggagaagaaacagctccaggtgaaactcgaagaagagaaaacccatctgcaggagaaactccggctgcagcacgaaatggagttaaaagcccgactcacgcaggcgcaagctagctttgagagggaacgagaagggcttcagtccagcgcatggaccgaggagaaggtacggggcctcacccaagaactggagcagtttcaccaggagcagctgacctctctggttgagaagcacaccttggagaaggaggaactcaggaaagaactgctggagaaacatcagagagaactgcaagagggacgatacgaaagcgagaaactgcaacaggagaattccatcttgcgaaacgagataaccactcttaatgaggaggacagtatctccaatctgaagctagggaccttgaacggttctcaggaagaaatgtggcaaaagacagagacagtgaaacaggagaacgcagcagtgcagaaaatggtggagaacctaaagaagcagatcagcgaactgaaaattaaaaatcagcaactcgacctggagaacaccgagttgtcacagaagaactcccaaaatcaggaaaagctacaggaactgaatcaacggctgacagagatgctttgccaaaaagagaaagaacccggcaatagcgcactcgaggagagggagcaggagaaattcaacttgaaggaggagcttgagcgatgcaaagtgcagagcagcacactggtttctagcctggaagcagaactgtctgaggtcaagatccaaacgcacatcgtgcaacaggagaatcatctcctgaaggacgaactggaaaagatgaaacagctgcacaggtgccctgacctgtccgattttcaacaaaaaatctccagtgtgctgagctataatgaaaagctgctcaaggagaaggaagctctctcagaagagctgaactcttgcgtggacaaactggccaagtcctcattgctcgaacatcggatcgcaaccatgaagcaggagcaaaaatcctgggaacatcagtctgcgagcctgaaatctcagctggttgcctcccaggagaaggtccaaaacctggaagataccgtacagaatgtgaacttgcagatgagcaggatgaaaagtgacttgagggtaacacagcaggaaaaggaggccctgaaacaagaggtcatgagtctgcacaagcaattacagaacgccggcggcaaaagttgggccccagagattgccacccatcccagtggacttcacaaccagcagaaaaggttaagttgggataagctggatcacctgatgaatgaagaacagcagctgctttggcaggaaaacgagagactgcagactatggtgcaaaatactaaagccgaactcacccacagccgggaaaaggtgagacagctggaatcgaatcttctgcccaaacaccagaagcacctcaacccgagcggaactatgaatcccacagagcaggagaagttaagtttgaaaagggagtgcgatcagtttcaaaaagagcagagtccagctaacaggaaagtcagccaaatgaactctctagagcaagagctcgaaaccattcacttggagaacgagggcctcaagaaaaagcaggtgaagctcgatgagcagttaatggaaaattctgttgtgggttccagcagagaaggctgcagtagtctgcccgagatcgtatgcgaggacgctgcccccgaggttcattgcgacgcctag

SEQ ID NO: 331960 - DNA, 3831 bp, Artificial Sequence
  derived and/or modified sequence
atggatgaggtggagcaggaccagcacgaggcccggctgaaggagctgtttgacagctttgacaccactggaacaggcagcctgggccaggaggagctgacagacctgtgccacatgctgagcctggaggaggtggcccctgtgctgcagcagaccctgctgcaggacaacctgctgggccgggtgcactttgaccagttcaaggaggccctgatcctgatcctgagcaggaccctgagcaatgaggagcacttccaggagccagactgcagcctggaggcccagcccaagtatgtgcggggcggcaagagatatggaagaagaagcctgcctgagttccaggagagcgtggaggagttccctgaggtgaccgtcatcgagcccctggatgaggaggcccggcccagccacatcccagctggggactgcagcgagcactggaagacccagaggtctgaggagtatgaagctgagggccagctgcgcttctggaacccagatgacctgaatgccagccagagcggcagcagccccccccaggactggattgaggagaagctgcaggaggtgtgtgaggacctgggcatcaccagagatggccacctgaacaggaagaagctggtgtccatctgtgagcagtatggcctgcagaatgtggatggagagatgctggaggaggtgttccacaacctggaccctgatggcaccatgtctgtggaggacttcttctacggcctcttcaagaatggcaagagcctgacccccagcgccagcaccccctaccggcagctgaagaggcacctgtccatgcagagctttgatgagagcggccgccgcaccaccaccagcagcgccatgaccagcaccatcggcttccgggtcttcagctgcctggatgatggcatgggccacgcctctgtggagcgcatcctggacacctggcaggaggagggcatcgagaacagccaggagatcctgaaggccctggacttcagcctggatggcaacatcaacctgacagagctgaccctggccctggagaatgagctgctggtgaccaagaacagcatccaccaggccgccctggccagcttcaaggccgagatccgccacctgctggagcgggtggaccaggtggtgcgggagaaggagaagctgcggagtgacctggacaaggccgagaagctgaagagcctgatggccagcgaggtggatgaccaccacgccgccattgaaagaagaaatgagtacaacctgaggaagctggatgaggagtacaaggagagaattgctgccctgaagaatgagctgaggaaggagcgggagcagatcctgcagcaggccggcaagcagaggctggagctggagcaggagattgagaaggccaagacagaggagaactacatccgggaccggctggccctgagcctgaaggagaacagccggctggagaatgagctgctggagaatgctgagaagctggccgagtatgagaacctgaccaacaagctgcagaggaacctggagaatgtgctggccgagaagtttggagacctggaccccagcagcgctgagttcttcctgcaggaggagcggctgacccagatgagaaatgaatatgaaaggcagtgccgggtgctgcaggaccaggtggatgagctgcagagcgagctggaggagtaccgggcccagggccgggtgctgcggctgcccctgaagaacagccccagcgaggaggtggaggccaacagcggcggcatcgagcctgagcacggcctgggcagcgaggagtgcaaccccctgaacatgagcattgaagctgagctggtgattgagcagatgaaggagcagcaccaccgggacatctgctgcctgcggctggagctggaggacaaggtgcgccactatgagaagcagctggatgaaacagtggtgtcctgcaagaaggcccaggagaacatgaagcagagacatgaaaatgagacccacaccctggagaagcagatcagtgacctgaagaatgaaattgctgagctgcagggccaggccgctgtgctgaaggaggcccaccacgaggccacctgcagacatgaggaggagaagaagcagctgcaggtgaagctggaggaggagaagacccacctgcaggagaagctgcggctgcagcacgagatggagctgaaggcccggctgacccaggcccaggccagctttgagcgggagcgggagggcctgcagagcagcgcctggacagaggagaaggtgcggggcctgacccaggagctggagcagttccaccaggagcagctgaccagcctggtggagaagcacaccctggagaaggaggagctgaggaaggagctgctggagaagcaccagcgggagctgcaggagggccgctatgaaagtgagaagctgcagcaggagaacagcatcctgagaaatgagatcaccaccctgaatgaagaagattccatcagcaacctgaagctgggcaccctgaatggcagccaggaggagatgtggcagaagacagaaacagtgaagcaggagaatgctgctgtgcagaagatggtggagaacctgaagaagcagatcagcgagctgaagatcaagaaccagcagctggacctggagaacacagagctgagccagaagaacagccagaaccaggagaagctgcaggagctgaaccagaggctgacagagatgctgtgccagaaggagaaggagcccggcaacagcgccctggaggagcgggagcaggagaagttcaacctgaaggaggagctggagcgctgcaaggtgcagagcagcaccctggtgagcagcctggaggccgagctgtctgaggtgaagatccagacccacatcgtgcagcaggagaaccacctgctgaaggatgagctggagaagatgaagcagctgcaccgctgcccagacctgagtgacttccagcagaagatcagctctgtgctgagctacaatgagaagctgctgaaggagaaggaggccctgtctgaggagctgaacagctgtgtggacaagctggccaagagcagcctgctggagcacagaattgccaccatgaagcaggagcagaagtcctgggagcaccagagcgccagcctgaagagccagctggtggccagccaggagaaggtgcagaacctggaggacacagtgcagaatgtgaacctgcagatgagcaggatgaagagtgacctgcgggtgacccagcaggagaaggaggccctgaagcaggaggtgatgagcctgcacaagcagctgcagaatgctgggggcaagtcctgggcccctgagatcgccacccaccccagcggcctgcacaaccagcagaagaggctgtcctgggacaagctggaccacctgatgaatgaggagcagcagctgctgtggcaggagaatgaaaggctgcagaccatggtgcagaacaccaaggccgagctgacccacagccgggagaaggtgcggcagctggagagcaacctgctgcccaagcaccagaagcacctgaaccccagcggcaccatgaaccccacagagcaggagaagctgagcctgaagcgggagtgtgaccagttccagaaggagcagagccctgccaacaggaaggtgtcccagatgaacagcctggagcaggagctggagaccatccacctggagaatgaaggcctgaagaagaagcaggtgaagctggatgagcagctgatggagaacagcgtggtgggcagcagccgggagggctgcagcagcctgcctgagatcgtgtgtgaagatgctgcccctgaggtgcactgtgatgcctag

SEQ ID NO: 331961 - DNA, 8215 bp, Artificial Sequence
  derived and/or modified sequence
ccgagccgggagccgagcgcgctgggcgcggccgtcccgctgccgccgccaagcccggagtgcgccagcggccatggttcccgcggcggcgccgggcgcctgagccccgggacgcaagcgctggaggcgggctgccggctgtgcgggcgctccggagagaccgacagaaggtgagcactgtgggctatgggatggatgaggtggagcaggaccagcatgaggcccgactcaaggagctgtttgacagttttgacacgacgggcacagggtccctggggcaggaggaactcaccgacctttgccacatgttgagcttggaggaggtggccccagtgctgcagcagacattacttcaggacaacctcttgggcagggtacattttgaccaatttaaagaagcattaatactcatcttgtccagaactctgtcaaatgaagaacactttcaagaaccagactgctcactagaagctcagcccaaatatgttagaggtgggaagcgttacggacgaaggtccttgcccgagttccaagagtccgtggaggagtttcctgaagtgacggtgattgagccactggatgaagaagcgcggccttcacacatcccagccggtgactgcagtgagcactggaagacgcaacgcagtgaggagtatgaagcggaaggccagttaaggttttggaacccagatgacttgaatgcttcacagagtggatcttcccctccccaagactggatagaagagaaactgcaagaagtttgtgaagatttggggatcacccgtgatggtcacctgaaccggaagaagctggtctccatctgtgagcagtatggtttacagaatgtggatggagagatgctcgaggaagtattccataatcttgatcctgacggtacaatgagtgtagaagattttttctatggtttgtttaaaaatggaaaatctcttacaccatcagcatctactccatatagacaactaaaaaggcacctttccatgcagtctttcgatgagagtggacgacgtaccacaacctcatcagcaatgacaagtaccattggctttcgggtcttctcctgcctggatgatgggatgggccatgcatctgtggagagaatactggacacctggcaggaagagggcattgagaacagccaggagatcctgaaggccttggatttcagcctcgatggaaacatcaatttgacagaattaacactggcccttgaaaatgaacttttggttaccaagaacagcattcaccaggcggctctggccagctttaaggctgaaatccggcatttgttggaacgagttgatcaggtggtcagagaaaaagagaagctacggtcagatctggacaaggccgagaagctcaagtctttaatggcctcggaggtggatgatcaccatgcggccatagagcggcggaatgagtacaacctcaggaaactggatgaagagtacaaggagcgaatagcagccttaaaaaatgaactccgaaaagagagagagcagatcctgcagcaggcaggcaagcagcgtttagaacttgaacaggaaattgaaaaggcaaaaacagaagagaactatatccgggaccgccttgccctctctttaaaggaaaacagtcgtctggaaaatgagcttctagaaaatgcagagaagttggcagaatatgagaatctgacaaacaaacttcagagaaatttggaaaatgtgttagcagaaaagtttggtgacctcgatcctagcagtgctgagttcttcctgcaagaagagagactgacacagatgagaaatgaatatgagcggcagtgcagggtactacaagaccaagtagatgaactccagtctgagctggaagaatatcgtgcacaaggcagagtgctcaggcttccgttgaagaactcaccgtcagaagaagttgaggctaacagcggtggcattgagcccgaacacgggctcggttctgaagaatgcaatccattgaatatgagcattgaggcagagctggtcattgaacagatgaaagaacaacatcacagggacatatgttgcctcagactggagctcgaagataaagtgcgccattatgaaaagcagctggacgaaaccgtggtcagctgcaagaaggcacaggagaacatgaagcaaaggcatgagaacgaaacgcacaccttagaaaaacaaataagtgaccttaaaaatgaaattgctgaacttcaggggcaagcagcagtgctcaaggaggcacatcatgaggccacttgcaggcatgaggaggagaaaaaacaactgcaagtgaagcttgaggaggaaaagactcacctgcaggagaagctgaggctgcaacatgagatggagctcaaggctagactgacacaggctcaagcaagctttgagcgggagagggaaggccttcagagtagcgcctggacagaagagaaggtgagaggcttgactcaggaactagagcagtttcaccaggagcagctgacaagcctggtggagaaacacactcttgagaaagaggagttaagaaaagagctcttggaaaagcaccaaagggagcttcaggagggaagatatgaatctgaaaagcttcaacaggaaaattctattttgagaaatgaaattactactttaaatgaagaagatagcatttctaacctgaaattagggacattaaatggatctcaggaagaaatgtggcaaaaaacggaaactgtaaaacaagaaaatgctgcagttcagaagatggttgaaaatttaaagaaacagatttcagaattaaaaatcaaaaaccaacaattggatttggaaaatacagaacttagccaaaagaactctcaaaaccaggaaaaactgcaagaacttaatcaacgtctaacagaaatgctatgccagaaggaaaaagagccaggaaacagtgcattggaggaacgggaacaagagaagtttaatctgaaagaagaactggaacgttgtaaagtgcagtcctccactttagtgtcttctctggaggcggagctctctgaagttaaaatacagacccatattgtgcaacaggaaaaccaccttctcaaagatgaactggagaaaatgaaacagctgcacagatgtcccgatctctctgacttccagcaaaaaatctctagtgttctaagctacaacgaaaaactgctgaaagaaaaggaagctctgagtgaggaattaaatagctgtgtcgataagttggcaaaatcaagtcttttagagcatagaattgcgacgatgaagcaggaacagaaatcctgggaacatcagagtgcgagcttaaagtcacagctggtggcttctcaggaaaaggttcagaatttagaagacaccgtgcagaatgtaaacctgcaaatgtcccggatgaaatctgacctacgagtgactcagcaggaaaaggaggctttaaaacaagaagtgatgtctttacataagcaacttcagaatgctggtggcaagagctgggccccagagatagctactcatccatcagggctccataaccagcagaaaaggctgtcctgggacaagttggatcatctgatgaatgaggaacagcagctgctttggcaagagaatgagaggctccagaccatggtacagaacaccaaagccgaactcacgcactcccgggagaaggtccgtcagttggaatccaatcttcttcccaagcaccaaaaacatctaaacccatcaggtaccatgaatcccacagagcaagaaaaattgagcttaaagagagagtgtgatcagtttcagaaagaacaatctcctgctaacaggaaggtcagtcagatgaattcccttgaacaagaattagaaacaattcatttggaaaatgaaggcctgaaaaagaaacaagtaaaactggatgagcagctcatggagaactcagtggttggaagtagcagagaagggtgcagttctctgcctgagatagtgtgtgaagatgcagcacctgaggtccactgcgacgcctagcccgtcccctcatgcttgggatttgcagctgctccagcagcaagcctgtccgatggtgcccagggagcagtttctgcagcttcaacgccagctgctgcaggcagaaaggataaaccagcacctgcaggaggaacttgaaaacaggacctccgaaaccaacacaccacagggaaaccaggaacaactggtaactgtcatggaggaacgaatgatagaagttgaacagaaactgaaactagtgaaaaggcttcttcaagagaaagtgaatcagctcaaagaacaactctgcaagaacactaaggcagacgcaatggtgaaggacttgtatgttgaaaatgcccagttgttgaaagctctggaagtgactgaacagcgacagaaaacagcagagaagaaaaattacctcctggaggagaagattgccagcctcagtaatatagttaggaatctgacaccagcgccattgacttctacacctcctttgaggtcatagccaaaccaaagggtacactcatatttgtgcactttactgaaatagatgaacatttcagtaggttctcaacttaaaattaagcctaacctaaaactgccagcaacacaactggagtttccatttatcataattagtttttctaaatagacccttatgggagtttgaaaataaatactcacatatttcactacttaaattattcccaagatttgaatttattttaaaattttaatagccaccaagaatgtggacatatgaaaattcaagaacctaaaaaataccagttttgaatgagtttttgtggttttggttttttttttaattattacaaatctatgtgtaaaatctagatatttgaagtttgagatctgatgagaatggttgttataaactttattttaaaaccaaatttaggtgttcttacatatttaaatactggaaagtcattataatagttttggttctttgaattggtagacaattagtagagtataattggttaggaggcagggcttattaagtggttattaaccgctgacatcagacaaacccaaatctgtagaattctaaccttctaacacctgtgacagtattaccactcttcttgtattatagatttagaactgatttactcaattgcactcttaactaatgttaaaagcttacttgctttaaacagccttttcttctttctcttaaaagtttcatttggggagctggtcttctaagaaacggataaagccacataattaaagcagttgaactatagggaaagcactgaacaaaccactttggagtaaatagctactcttagaaaagagggataagcagaccatgtaggttttctgtctctcaaatcttagagttcataaatttacttgaggttgcctcaagaactcagggaacaatactgtaaactgtcttcctgaactactgtagggcctctctaagaatttgaaatgtataaaccatgtgacctcatttatttgtcttatatatttacagccatactagaatttttatttctacgtttttagtaaatttaatattctgggggaaaaaaggccttgattttagggttaaaaacctgacttatagaagagtttatttaatataggtcaaaattttctgtgtttcttattccttctatacctcaaatctgattctaagaatttcttactgtgataatcattggcatgccacctgaggtcaaggagtgccaaataggactttccactcatgctcaagatcaaaactttatagaacagtcaacattttagattcggtaaccttttttttcttccaattataatctctgctagccacttccgccagcagttggtggaagacttactaggtgcagggcactttccaagttcatcacaacaacctgcttgttttcatgagacaataatccgaaaagttcgctttgatatattcctggagggccaagcccatctatttacaaaaggtgaacagcaaaatcaagcactgctttatgggcaggaacacaagagaaagcaaactgcccaagaagtcatcatgtcagaaactcaatctcaacaaaataatttccatcagggaacttcagggtttcttgggggcttatgagtctcaccggtcaacccaggaggcctcactacaagagccttgacaaggcactgttttttgtgggactgggagttcacactgatgaagcaaacctttgaatttttgcacagctcttgtcagaaagccctgagttccccctggataaagagttaattttaatccttccctataattatacttcaaaatatttgacatctgctattatgccttctttagatctttcttctgtggtgcagacatttctagtaagtgtttgactacttgtatggcattagctttcacagaaaattgtttcacttaaaactgtggattggcctaggctaaggacaaaaataaactaagtacctgtagtgtatttatgtgatatgtgtcaagttactcaaagttattgctgttggaactgaacaataatatttcccagatagctggccttagcatgtgatcacggttgttgtatttttaatttttgtcttttacagtatgagaggtgtaggttaatttgtttatttcctataaatttgtatttatgtgtatataaaatgtacaatgaatgtaaatatgactttctggaaagtttagactacatttagaatctctattcaaaatcaaaatgctgctcaaatgaatttaaccaacatctaggtgcttaatttctcattttatcccacttatgagattgggaaaaagatcaatatgagaaataccatacagataccttaaatgtatgcatttgtgcaacaatttttgagaaggtgagtggcaatttataatttagttggcaatttataatagaacttatagcttttaaaagaccttttaaagacattaaatgtaaacttaaaaatgtttagatcttgtttcaaactttacaatagcattcttcaaaatattaagttatatattttataggcatttagttgcttattaaaagcactgattttcaaactttttgatttaagaacaattatttaagatcgtctcagaagatgggatcttcgtttcaagaaaagggaatcaagtttgcctttgagataatacgttacactaagaaaaggaaaatgtggatagtaaaacccacctctctcatcctattgtactctcttctgctttttagaagcctgcacttaagcttagatttgtgaagggagagtagaaggggagaagtagaaccacagtgttttatttatttttctaaaactcttactaaatccagattttttaaactgttttaaatgtgaattcttcccagaaatttcaatgcattgcatatttagccttcggcatatttttcatgaatagatcatgaagtcataggcttccaaggcataggaagagatcttgcaggtctagtattttaataatgcactattacccagggcagatattatgagaaactgtttcttctctaagggtttatggcagactttgcttttttaacatgtgagaaatgaattttttattttgtgatttatgtgatttcttttgctgagtgaaggaaaggagaaattgttgctattgtcagcatcttaaaggtatttccagtcaaggcaaggctaagtgctttgtgatagtattaagcaagtcatgttttgaatggattacctgtagtgactcattggaatgatataattatacaagtaatgccaaaaaccaagtcaaagcctaattaaccaaagcactcatttaaaaatcatcatgtttggacctatctggacctctcagcactgtaaaatagttttggttttgtggcatatgaatagctgtttaacaaatcaaagttagctttttgcttctcagcttttttgggcaatacaagttaagttcttaatggggagacattatcatggcatgacttaagggaacattggtttgtgaaggaaaaacagattatctaaagccatctctatgtttctgttcagataaagattaatgagttctgtgtttatatcagctttgtatatttcatcttagccattctatcctagaaagattttaatgtgagcttaagatgtaaataaataattttgcaaacatgccttttgttttctatataccctgaccttttaataaagtttcagtgtatttatca

SEQ ID NO: 331962 - DNA, 3831 bp, Artificial Sequence
  derived and/or modified sequence
atggacgaggtggagcaggaccagcacgaggcccggctgaaggagctgtttgacagcttcgatacaaccgggaccgggtctcttggccaggaagagctgacggatctgtgtcatatgctgtctctagaggaggtagcccctgtcttgcagcagactctcctgcaggacaaccttcttggcagagtgcacttcgaccagttcaaggaggccctgattttgatactttctagaacgttaagcaacgaggaacacttccaagagcctgactgcagtctcgaagcacagcctaagtatgttcgcggggggaagcgctatggtcggaggagcctgcccgagttccaggagagtgttgaggagttccccgaggttacagtaattgagcccctcgacgaggaagccaggcctagccacattcccgccggcgattgttccgagcactggaaaactcagcgcagcgaggaatacgaagcggaagggcagctgaggttttggaacccagacgatctgaacgcaagccagtccggctctagtcccccccaagattggatcgaggagaagcttcaagaggtatgcgaggacctgggcatcacgagagatgggcatctaaacaggaaaaaacttgtgtctatttgcgaacagtacgggcttcaaaacgtcgacggggaaatgttagaagaagtgtttcacaatctggacccagacggaacaatgagtgtcgaagacttcttctacgggctctttaagaacggcaagagcctgaccccgagcgcctctaccccatatcgccaacttaagcggcacctgagcatgcaaagttttgacgagtctggaagacggaccaccacatcttccgccatgacttctacaataggcttccgcgtgttttcttgtttggatgatggcatgggccatgcatctgtggaaagaatactggatacctggcaggaggaaggaatcgagaatagccaggagatcctgaaagccctggatttttcactggatggaaacatcaatctgacagaactaacactggcgttggagaatgagctcttggtgaccaaaaacagcattcaccaggccgccctggcatccttcaaggccgaaattaggcacttactcgagcgcgtcgaccaggtagtgcgagagaaggagaagctgcgatcagacttagataaagcggagaagctcaagagcctgatggcatctgaggtagatgatcatcatgccgcaattgagcgacgtaacgagtacaatctgagaaaactagacgaggaatacaaggagaggattgcagcattaaagaatgaattaaggaaagaacgcgaacagatcctccaacaggccggtaagcagcgactagaattagaacaggagattgaaaaagcgaaaacagaggaaaattacatcagagatcggctggctctgtcgctgaaagagaactcaaggcttgagaacgagctgcttgagaatgccgaaaaattggccgaatatgagaacctaaccaataagttgcagcggaatttagagaacgtacttgcagagaagtttggcgacttggatccgagtagtgctgaattctttttgcaggaagaaagattgacacagatgcgaaacgagtacgagaggcagtgccgcgtcctccaagaccaagttgatgagctgcaatcggaattggaagagtaccgtgctcagggacgagtcctgagattacctctcaaaaatagtccttctgaagaagtagaggccaacagtggcggaatagaacccgaacatggtttggggagcgaagagtgcaaccctcttaacatgtcaattgaagccgagctcgtgatcgaacaaatgaaagaacagcaccatagggatatctgttgcctgaggctggagctggaagacaaggtgcggcattatgagaaacagctggatgagacagtggtatcttgtaaaaaagcccaggagaatatgaagcagcggcacgagaatgaaactcacaccctcgaaaaacagatttcagacttgaagaatgaaattgccgagctgcagggtcaagctgccgtcctcaaggaggcgcatcatgaagccacatgtcgccatgaagaggagaagaaacagctccaggttaagttggaagaagagaagactcatctccaagaaaaactccgcctccagcacgagatggagcttaaagcacggctcacacaggcacaagcctcctttgaaagggagagggagggcttgcagagcagtgcatggaccgaagagaaagtgaggggcctgactcaggagctggagcagtttcaccaggagcagctgactagcctcgttgaaaaacatacgctcgagaaagaggagctccggaaagagctgcttgaaaaacaccagagggagctccaggagggtcgctacgaatcagaaaagctgcagcaggagaactccatattacgtaacgaaattacaaccctgaatgaggaggacagtatttctaaccttaaactgggcaccttgaatggcagccaggaggagatgtggcagaagacagaaacagtgaaacaggagaacgctgctgtccagaagatggtggaaaaccttaaaaagcagattagtgaacttaagataaagaatcagcaactggatctggagaatacggaactttctcaaaaaaatagccagaatcaagaaaagttacaagagctgaatcagagactcactgagatgctttgtcaaaaggaaaaggaaccaggcaactcagccttggaagagcgggagcaggagaagtttaatctgaaagaagagctggagcggtgtaaagtgcagtcctccacactggtgtcctcactggaagcagagctcagtgaggtgaaaattcagactcacatagtacaacaggaaaaccacctattgaaggacgagttggagaaaatgaagcaactccaccggtgcccggacctgagtgattttcagcaaaaaatctcaagtgtgctgagttacaacgaaaaactccttaaggagaaggaggccttgtcagaggagctaaacagctgcgtcgacaagctggctaagtccagcttactggagcaccgcatcgccacaatgaagcaagagcagaaatcctgggaacaccagagtgcatcactaaaatcccagcttgttgcttctcaggaaaaggtgcagaacctggaggacacagtccagaatgtgaacctgcagatgtcaaggatgaagagcgacctacgggttacccagcaggaaaaggaagctcttaaacaggaggttatgtcccttcacaaacagttacagaatgctggcggtaagagctgggccccagaaatcgcgacccacccgtcaggcctccacaaccagcagaaaagactcagctgggacaagttagatcatctgatgaacgaggaacagcagctcttgtggcaggaaaacgagaggctgcagacgatggttcagaatacaaaagcagagctcactcattcaagggaaaaagtcaggcagctggagtccaatctgcttccgaagcaccagaaacacctcaacccttcaggcacaatgaaccctactgagcaggagaaactcagtctgaagagggagtgtgaccagtttcagaaagaacagtctccagctaataggaaagtcagccagatgaactctctggagcaagaattagagaccattcatttggagaacgagggcttgaaaaagaaacaggttaagttggacgaacaattgatggaaaactctgtcgtgggatcaagtagggaaggctgctcgtcactgcccgagatcgtttgcgaagatgccgcacctgaggtgcattgcgacgcgtag

SEQ ID NO: 331963 - DNA, 3831 bp, Artificial Sequence
  derived and/or modified sequence
atggacgaggtggaacaggaccaacacgaagccaggctgaaagagctgtttgactcttttgatacaaccggcacagggagccttggccaagaggagctcacagacttgtgccacatgttgtcacttgaagaagttgctcctgtacttcaacagacactgcttcaggataatctcctgggacgcgttcatttcgatcagtttaaggaggctctgattctcattctgtcgcgcacccttagtaatgaagagcattttcaagagcccgattgttcactcgaggcacagcccaagtatgtccgaggcggtaagcgatacggcagacgtagtctgccggaatttcaggagtccgtcgaggagtttccagaggtgaccgtaatcgagcctttggacgaagaggcaagaccaagccacatccccgcaggggattgttccgagcactggaagacccaacgtagtgaggaatacgaggccgaaggccagctccgcttttggaatcctgatgacctgaatgctagccagagcggctccagccccccacaggattggatcgaggagaagctgcaagaggtgtgcgaggatctgggaataacaagggacgggcatcttaataggaagaaattggtcagcatttgtgagcaatacggccttcaaaacgtggatggtgagatgctcgaggaggtcttccacaacctggacccagacggcaccatgtcggtcgaggattttttctacggactttttaaaaatggtaaatctctgactccttcggcatcgactccttataggcagctcaagaggcacctcagcatgcagtcattcgatgaatcagggaggaggacgaccacctcttccgctatgacttccacaattgggttcagggtgttttcctgccttgatgatggcatgggccatgcaagcgtagagcgcattctggatacttggcaggaagaaggcattgagaatagccaggagatactgaaggcgcttgacttctcccttgacggaaacattaatttgacagaactgactcttgccttagagaatgaactgctggtaactaagaatagtattcaccaggcagccctcgccagtttcaaggcagagatccgtcaccttcttgagcgagttgaccaggtcgtgcgagaaaaggagaagctgcgatctgacttggacaaggccgaaaagctcaagtccctaatggctagtgaagtggatgaccaccacgccgcaattgaacgacgcaatgagtacaacctacgaaagctggacgaagaatataaggagagaattgctgctctgaaaaacgaactacgcaaagaaagggaacagatattgcagcaagcagggaagcagcgcctggagttggagcaggaaatcgagaaggcaaaaaccgaggagaactacatcagagaccgcttggcgctgagcttaaaggagaattccagactggagaatgaactgttggaaaatgccgagaagctggccgaatacgaaaatttaactaacaagcttcagcgcaacctcgaaaatgtgctggccgagaagtttggcgatttggatccatcttctgccgagttttttctgcaagaggaaaggctgacgcaaatgaggaacgagtatgagagacagtgcagggtgttgcaggaccaggtcgacgaactacagtcagagcttgaggaatacagagcgcaggggagagtcctccgactcccactcaaaaatagtcctagtgaagaggtggaggcaaactcaggcggaattgagcccgagcatggcctgggatctgaggagtgcaatcccctcaatatgagcattgaggctgagctcgtgatagaacagatgaaagagcaacatcatcgtgacatctgttgcttgagattggaactcgaagataaagtacgccactatgagaagcagctcgatgagactgtcgtgagttgcaagaaggctcaggaaaacatgaagcagcgacatgagaatgagacacatactctggaaaaacaaatttccgatttaaagaatgaaattgcagagttgcaggggcaagctgcagttctgaaagaggctcaccatgaagccacctgccgacacgaggaagagaagaagcagttgcaggtgaagctggaggaagaaaaaacacatctgcaggagaaattgagactgcaacatgagatggaactcaaagcacgactcacacaagcacaggcatcgttcgaacgcgaaagagaaggcttgcagtcctctgcttggactgaggaaaaagtgagagggctgacacaggagttagaacaattccaccaggaacagctgaccagcttggtggagaaacacactctcgaaaaagaagaactgcgcaaagagctgctggagaaacaccagcgagaactgcaggaaggacggtacgagtctgaaaagctccagcaggagaacagcattctgcgaaatgagataaccacacttaatgaggaagatagcatttccaatttaaaactcggcaccttaaacggttcacaggaagaaatgtggcagaaaactgagacagtgaagcaggaaaacgccgctgtgcaaaaaatggtagagaacctgaaaaagcaaatctcagaactcaagattaaaaatcagcagttggatctagagaacacggaactgagtcagaaaaactcccagaatcaagaaaaactacaggaattgaaccagcggttgaccgaaatgttatgtcaaaaggagaaagagccagggaacagtgccctggaagagagggaacaggaaaagtttaacttgaaggaggaacttgaacgatgtaaagttcagagcagcaccctggtgagctctctcgaggccgagctctccgaggtgaagatccagacacatatcgttcaacaggagaaccacttgctaaaagacgagctcgaaaaaatgaagcaactccaccggtgtccagacctgtctgatttccagcagaaaatctcatccgtgttatcctacaacgagaagctattgaaggagaaggaagcactgtcagaggagttaaactcttgtgtggacaagcttgctaaaagtagtttgttggagcaccgaatcgcgacaatgaagcaggagcagaaatcatgggaacaccaatcggcctcccttaagtctcaattggtcgctagccaggagaaagtccagaatttggaagacaccgtgcagaacgtgaatctgcagatgagcagaatgaaatcggatctacgcgtgacacagcaagagaaggaagcgctgaagcaggaagtgatgtcactgcataagcaactgcagaacgctggcggaaagagttgggcaccggaaatcgccacccatcccagcgggctccacaatcagcaaaagcgactgtcctgggacaagctcgaccacctcatgaatgaggagcagcagctgctgtggcaggagaacgagcgtcttcagaccatggtgcagaatactaaggctgagttaactcactcgcgggagaaggtgcgtcagcttgaatctaatctgttaccaaagcatcagaaacatctcaatcctagtggcacaatgaatcctacggaacaggagaaactgtcactgaagagagagtgcgaccagtttcagaaagagcagtcccccgctaatcgaaaggttagtcagatgaattctctcgagcaggaattggaaacaatccacctggaaaacgaagggcttaaaaaaaagcaggtaaagctcgatgaacagctgatggaaaattctgtcgtgggttcatccagggaagggtgcagcagcctccccgagatcgtgtgtgaagatgctgccccagaggtgcactgcgatgcttag

SEQ ID NO: 331964 - protein, 212 aa, Artificial Sequence
  derived and/or modified sequence
PPPPPPVPPPPTGATPPPPPPLPAGGAQGSSHDESSMSGLAAAIAGAKLRRVQRPEDASGGSSPSGTSKSDANRASSGGGGGGLMEEMNKLLAKRRKAASQSDKPAEKKEDESQMEDPSTSPSPGTRAASQPPNSSEAGRKPWERSNSVEKPVSSILSRMKPAGSVNDMALDAFDLDRMKQEILEEVVRELHKVKEEIIDAIRQELSGISTT

SEQ ID NO: 331965 - DNA, 639 bp, Artificial Sequence
  derived and/or modified sequence
ccccccccccccccccccgtgccccccccccccaccggcgccaccccccccccccccccccccctgcccgccggcggcgcccagggcagcagccacgacgagagcagcatgagcggcctggccgccgccatcgccggcgccaagctgagaagagtgcagagacccgaggacgccagcggcggcagcagccccagcggcaccagcaagagcgacgccaacagagccagcagcggcggcggcggcggcggcctgatggaggagatgaacaagctgctggccaagagaagaaaggccgccagccagagcgacaagcccgccgagaagaaggaggacgagagccagatggaggaccccagcaccagccccagccccggcaccagagccgccagccagccccccaacagcagcgaggccggcagaaagccctgggagagaagcaacagcgtggagaagcccgtgagcagcatcctgagcagaatgaagcccgccggcagcgtgaacgacatggccctggacgccttcgacctggacagaatgaagcaggagatcctggaggaggtggtgagagagctgcacaaggtgaaggaggagatcatcgacgccatcagacaggagctgagcggcatcagcaccacctag

SEQ ID NO: 331966 - DNA, 1119 bp, Artificial Sequence
  derived and/or modified sequence
ccgccccccccacccccagtcccacctccacccactggggctaccccacctcccccacccccactgccagccggaggagcccaggggtccagccacgacgagagctccatgtcaggactggccgctgccatagctggggccaagctgagaagagtccaacggccagaagacgcatctggaggctccagtcccagtgggacctcaaagtccgatgccaaccgggcaagcagcgggggtggcggaggaggcctcatggaggaaatgaacaaactgctggccaagaggagaaaagcagcctcccagtcagacaagccagccgagaagaaggaagatgaaagccaaatggaagatcctagtacctccccctctccggggacccgagcagccagccagccacctaactcctcagaggctggccggaagccctgggagcggagcaactcggtggagaagcctgtgtcctcgattctgtccaggatgaagcctgctgggagcgtgaatgacatggccctggatgccttcgacttggaccggatgaagcaggagatcctagaggaggtggtgagagagctccacaaggtgaaggaggagatcatcgacgccatcaggcaggagctgagtgggatcagcaccacgtaaggggccggcctcgctgcgctgattcgtcgagcccatccggcgacagaggacagccagaagcccagccagccccagactccagtgcaccagagcacgcacaggagcctgggcgcgctgctgtgaaacgtcctgacctgtgatcacacatgacagtgaggaaaccaagtgcaactcctgggtttttttagattctgcctgacacggaacaccaggtctgctcgtcttttttgtgttttatatttgcttatttaaggtacatttctttgggtttctagagacgcccctaagtcacctgcttcattagacggtttccaggttttctcccaggtgacgctgttagcgcctcagctggcggtgacagccggcccagcgtggcgccaccacacaccgcagagctgtccaggcacagctccgtccccagcgctcatggtgttgaaactgtctgtcatgcaccacggtgtctgtgtccacacagtaata

SEQ ID NO: 331967 - DNA, 639 bp, Artificial Sequence
  derived and/or modified sequence
cctcctcccccgcccccagtgccgccccctcctaccggagcgacaccgcctcccccccctcctctccccgctgggggcgcacaagggagttcccatgatgagtcatccatgagtggtctcgccgctgctattgctggtgccaaactgcgaagagttcaaaggcccgaagatgctagcgggggttcctctccttctggcactagcaaatcggatgccaatcgagccagctccgggggtggcggtgggggcctgatggaagaaatgaataagctccttgcgaagaggcggaaggccgcctctcagtctgataagcctgcggaaaaaaaggaggacgaatcacaaatggaggacccttcaactagcccctcaccgggaaccagggcagcaagccagccgcctaactcatccgaggctggccggaaaccatgggaaaggtctaacagcgtcgaaaagccagtgagcagcattctgagtcgtatgaagcctgcgggatccgtcaatgatatggcgctcgacgcttttgatctcgaccggatgaaacaagaaatcctcgaagaggtcgtaagggaacttcacaaagtgaaagaagaaatcatcgacgctatccgtcaggagctgagcgggatcagcacgacgtag

SEQ ID NO: 331968 - DNA, 639 bp, Artificial Sequence
  derived and/or modified sequence
cctcctcctcctcctcctgtgcccccaccacccaccggggccaccccacctcctcctccacccctgcctgctgggggcgcccagggcagcagccatgatgagagctccatgagcggcctggccgccgccatcgccggggccaagctgcggcgggtgcagaggccagaagatgccagcggcggcagcagccccagcggcaccagcaagagtgatgccaacagagccagcagcggcggcggcggcggcggcctgatggaggagatgaacaagctgctggccaagaggaggaaggccgccagccagagcgacaagccagctgagaagaaggaggatgagagccagatggaggaccccagcaccagccccagccctggcacccgggccgccagccagccccccaacagcagcgaggccggcaggaagccctgggagaggagcaacagcgtggagaagcctgtgagcagcatcctgagcaggatgaagccagctggctctgtgaatgacatggccctggatgcctttgacctggacaggatgaagcaggagatcctggaggaggtggtgcgggagctgcacaaggtgaaggaggagatcattgatgccatccggcaggagctgagcggcatcagcaccacctag

SEQ ID NO: 331969 - DNA, 639 bp, Artificial Sequence
  derived and/or modified sequence
ccccccccccccccccccgtgccccccccccccaccggcgccaccccgcccccacctcccccattacccgctgggggggcacaaggctcatcccacgacgaaagctcaatgagtggactcgctgctgcgattgctggtgctaagttaaggcgcgtgcagaggcccgaggatgcatcagggggttctagtccctctggtaccagtaaatccgatgccaacagagccagtagcggtggtggcggcggaggtctgatggaagaaatgaacaaactgctggctaaaagaaggaaggctgcctctcaaagtgataaaccagcggagaagaaagaggatgaaagccagatggaggacccatctaccagcccttcaccaggaactcgagccgcttcccaacctcctaactcctccgaagctggacggaaaccatgggagaggtccaacagtgtggaaaagcctgtgtcttccattctttcccggatgaagccagcaggtagtgtcaacgatatggccctcgatgctttcgacctggatcggatgaaacaggagatactggaagaggtggtccgtgagttacacaaggtaaaggaggaaattatagatgctatccggcaggagttgtcaggcatttctaccacctag

SEQ ID NO: 331970 - DNA, 639 bp, Artificial Sequence
  derived and/or modified sequence
ccgcctcctcccccacccgtgcccccaccaccaacgggcgctactcctcctccaccccctccactgcccgcaggaggggctcagggctccagccacgacgagtcatcgatgtctgggctcgctgcggcaatagcaggcgctaaattgaggagggtgcagagacccgaggatgccagcggaggctcatccccttccggcacttcaaaaagcgatgctaatcgggcttcctctgggggaggcggtgggggactgatggaggaaatgaataagctcctggctaaacgtcgcaaagccgcatcccagagcgataaaccagcggaaaagaaagaggatgaatctcagatggaagatccttcaacgagcccatcccctggaacccgggcagcatctcagccacctaatagttctgaggctgggaggaagccttgggaacgtagcaactcagtcgaaaagcctgtgagttcaattctgtctcggatgaagcccgctggtagcgttaatgatatggcactagacgcattcgacctcgacagaatgaagcaggagatattagaagaagttgtgagagagctgcacaaagtgaaggaggagattattgacgctatccgccaggagcttagtgggatcagcacgacctag

SEQ ID NO: 331971 - DNA, 261 bp, Artificial Sequence
  derived and/or modified sequence
aagtttgggaactgctggtctacaccatgaggagaaacgctggacccggcctaagaagaggccctccctcctgtctgacaatgagccatgagaagaccatgggaaaaaaaagaggccaccagaaaccctattgccgaggtcctggcaaggaagaaaaggacagaagagctaatttccctacaagaacacgggtctaggaaacagaaaataaaggaagcttccatttcatgggcagagacatctcggcaaataggctgagcc

SEQ ID NO: 331972 - DNA, 1146 bp, Artificial Sequence
  derived and/or modified sequence
atggccaccagcgagcagagcatctgccaggccagagccagcgtgatggtgtacgacgacaccagcaagaagtgggtgcccatcaagcccggccagcagggcttcagcagaatcaacatctaccacaacaccgccagcaacaccttcagagtggtgggcgtgaagctgcaggaccagcaggtggtgatcaactacagcatcgtgaagggcctgaagtacaaccaggccacccccaccttccaccagtggagagacgccagacaggtgtacggcctgaacttcgccagcaaggaggaggccaccaccttcagcaacgccatgctgttcgccctgaacatcatgaacagccaggagggcggccccagcagccagagacaggtgcagaacggccccagccccgacgagatggacatccagagaagacaggtgatggagcagcaccagcagcagagacaggagagcctggagagaagaaccagcgccaccggccccatcctgccccccggccaccccagcagcgccgccagcgcccccgtgagctgcagcggcgcccccagcggcctggccgccgccatcgccggcgccaagctgagaagagtgcagagacccgaggacgccagcggcggcagcagccccagcggcaccagcaagagcgacgccaacagagccagcagcggcggcggcggcggcggcctgatggaggagatgaacaagctgctggccaagagaagaaaggccgccagccagagcgacaagcccgccgagaagaaggaggacgagagccagatggaggaccccagcaccagccccagccccggcaccagagccgccagccagccccccaacagcagcgaggccggcagaaagccctgggagagaagcaacagcgtggagaagcccgtgagcagcatcctgagcagaacccccagcgtggccaagagccccgaggccaagagccccctgcagagccagccccacagcagaatgaagcccgccggcagcgtgaacgacatggccctggacgccttcgacctggacagaatgaagcaggagatcctggaggaggtggtgagagagctgcacaaggtgaaggaggagatcatcgacgccatcagacaggagctgagcggcatcagcaccacctag

SEQ ID NO: 331973 - DNA, 1533 bp, Artificial Sequence
  derived and/or modified sequence
gtggtcctctgatcaacataggctggtgggagtacaggactcgcctcctcagggttccctgtgctgccacttttcagccatggccacaagtgaacagagtatctgccaagcccgggcttccgtgatggtctacgatgacaccagtaagaaatgggtaccaatcaaacctggccagcagggattcagccggatcaacatctaccacaacactgccagcaacaccttcagagtcgttggagtcaagttgcaggatcagcaggttgtgatcaattattcaatcgtgaaagggctgaagtacaatcaggccacgccaaccttccaccagtggcgagatgcccgccaggtctacggcttaaactttgcaagtaaagaagaggcaaccacgttctccaatgcaatgctgtttgccctgaacatcatgaattcccaagaaggaggcccctccagccagcgtcaggtgcagaatggcccctctcctgatgagatggacatccagagaagacaagtgatggagcagcaccagcagcagcgtcaggaatctctagaaagaagaacctcggccacagggcccatcctcccaccaggacatccttcatctgcagccagcgcccccgtctcatgtagtggagctccatcaggactggccgctgccatagctggggccaagctgagaagagtccaacggccagaagacgcatctggaggctccagtcccagtgggacctcaaagtccgatgccaaccgggcaagcagcgggggtggcggaggaggcctcatggaggaaatgaacaaactgctggccaagaggagaaaagcagcctcccagtcagacaagccagccgagaagaaggaagatgaaagccaaatggaagatcctagtacctccccctctccggggacccgagcagccagccagccacctaactcctcagaggctggccggaagccctgggagcggagcaactcggtggagaagcctgtgtcctcgattctgtccagaaccccgtctgtggcaaagagccccgaagctaagagcccccttcagtcgcagcctcactctaggatgaagcctgctgggagcgtgaatgacatggccctggatgccttcgacttggaccggatgaagcaggagatcctagaggaggtggtgagagagctccacaaggtgaaggaggagatcatcgacgccatcaggcaggagctgagtgggatcagcaccacgtaaggggccggcctcgctgcgctgattcgtcgagcccatccggcgacagaggacagccagaagcccagccagccccagactccagtgcaccagagcacgcacaggagcctgggcgcgctgctgtgaaacgtcctgacctgtgatcacacatgacagtgaggaaaccaagtgcaactcctgggtttttttagattctgcctgacacggaacaccaggtctgctcgtcttttttgtgttttatatttgcttatttaaggtacatttctttgggtttctagagacgcccctaagtcacctgcttcattagacgg

SEQ ID NO: 331974 - DNA, 1146 bp, Artificial Sequence
  derived and/or modified sequence
atggcaaccagtgaacagtcaatctgccaggctcgggcatccgtcatggtctacgacgatacatccaagaagtgggtgccaatcaagcctggtcagcagggatttagccgaattaatatctaccacaataccgcatccaacacatttcgggtggtgggggtgaaacttcaggaccagcaggtggtgatcaactactctatagtgaagggcctgaagtacaatcaagccacacctacgttccaccagtggagggatgcacggcaggtttacggcctcaactttgctagcaaagaagaagccactactttttcaaacgcaatgttgttcgctctgaacatcatgaacagtcaggaggggggcccatcgtcacagcggcaggtgcagaatgggccaagtccggacgagatggacattcagcgccggcaggtgatggaacagcaccagcagcagaggcaggaatctttggagcgacggacaagcgcaacgggcccaatcctccctcctggacatcctagttccgcggccagcgctcccgtgagctgctccggcgccccttccgggctcgccgccgcgattgccggcgccaagctgagaagagtccagagacctgaagatgcaagcgggggatcttcgcccagcggcacatcgaagagcgatgcaaaccgggccagcagtggaggcggggggggaggcttgatggaagaaatgaacaagctgttggcgaaaaggagaaaagctgcgagtcagtcggataaaccggccgagaaaaaggaggacgaatcccaaatggaggacccttcgaccagccctagtcctggtactagggcggcatcgcagcctccaaactcctctgaagcaggacgcaagccttgggagagaagcaattccgtggaaaaacctgtgtcatccattcttagtcggaccccatcagtagctaagtccccagaggccaaatctcctttgcagtcgcagcctcacagccggatgaagcccgcaggttcagttaacgacatggctttggacgcctttgacctcgaccggatgaagcaggagatcctagaggaggtggtccgtgaactgcacaaggtgaaggaggaaatcatcgacgccatcagacaggaattgtccgggatcagcacaacctag

SEQ ID NO: 331975 - DNA, 1146 bp, Artificial Sequence
  derived and/or modified sequence
atggccaccagcgagcagagcatctgccaggcccgggcctctgtgatggtgtatgatgacaccagcaagaagtgggtgcccatcaagccaggccagcagggcttcagccgcatcaacatctaccacaacacagccagcaacaccttccgggtggtgggcgtgaagctgcaggaccagcaggtggtgatcaactacagcatcgtgaagggcctgaagtacaaccaggccacccccaccttccaccagtggagagatgcccggcaggtgtatggcctgaactttgccagcaaggaggaggccaccaccttcagcaatgccatgctgtttgccctgaacatcatgaacagccaggagggcggccccagcagccagaggcaggtgcagaatggccccagcccagatgagatggacatccagaggcggcaggtgatggagcagcaccagcagcagaggcaggagagcctggagaggaggaccagcgccaccggccccatcctgcccccaggccaccccagcagcgctgccagcgcccctgtgtcctgcagcggggcccccagcggcctggccgccgccatcgccggggccaagctgcggcgggtgcagaggccagaagatgccagcggcggcagcagccccagcggcaccagcaagagtgatgccaacagagccagcagcggcggcggcggcggcggcctgatggaggagatgaacaagctgctggccaagaggaggaaggccgccagccagagcgacaagccagctgagaagaaggaggatgagagccagatggaggaccccagcaccagccccagccctggcacccgggccgccagccagccccccaacagcagcgaggccggcaggaagccctgggagaggagcaacagcgtggagaagcctgtgagcagcatcctgagcaggacccccagcgtggccaagagccctgaggccaagagccccctgcagagccagccccacagcaggatgaagccagctggctctgtgaatgacatggccctggatgcctttgacctggacaggatgaagcaggagatcctggaggaggtggtgcgggagctgcacaaggtgaaggaggagatcattgatgccatccggcaggagctgagcggcatcagcaccacctag

SEQ ID NO: 331976 - DNA, 1146 bp, Artificial Sequence
  derived and/or modified sequence
atggccaccagcgagcagagcatctgccaggcccgggccagcgtgatggtttacgatgatacctcaaaaaaatgggtgccaataaaaccaggccaacaggggttctcccgaataaatatctatcacaatacagcatctaatacttttagagtcgtcggggtgaaacttcaggaccagcaggttgtgatcaattattccattgtgaaagggttaaagtacaaccaggccacgcctacttttcaccagtggcgagacgcgcggcaagtctatggtttgaatttcgcctccaaagaagaagcaacaacgtttagtaacgcaatgttatttgctttaaatatcatgaattcacaagagggaggtccttcctcccagaggcaagtgcaaaacgggccctcaccagacgaaatggacattcagcgcaggcaggtgatggagcagcaccagcaacagagacaggaaagtctcgagagaagaacgtctgctacaggaccaatcctccctccaggccatccttcgtccgccgccagtgccccggtctcatgctcaggagctccaagtggactggccgccgccatcgccggcgctaaactgagacgcgtgcagaggcccgaggatgcgagcggaggtagtagcccctccggaacctccaagtctgatgccaatcgtgcatcttcaggcggaggtggcggcgggctgatggaggagatgaacaaactgttagctaaaagacggaaagcggccagccagagtgataagcccgcggaaaaaaaggaggatgaaagccaaatggaggatcctagcactagtccttccccaggtacaagggcagcaagccagcctcctaattcttctgaagccgggaggaagccatgggagaggtctaattctgtggaaaagcctgtctcttcaatactgtcacgcacaccctccgttgccaagagtccagaggccaagtcacccctccagtctcagccacactcacgtatgaagcccgcaggcagcgtgaatgatatggctctcgacgcattcgatctcgaccgaatgaagcaagagattttggaggaagttgttcgggagctccacaaagtgaaggaggagattatcgatgctatcagacaggagctgagcggcatcagcactacatag

SEQ ID NO: 331977 - DNA, 1146 bp, Artificial Sequence
  derived and/or modified sequence
atggcaacttcagaacaatccatttgccaagcacgtgctagcgtgatggtgtacgacgacacttcaaaaaagtgggtgcccattaaacctggtcagcagggcttcagtcggataaatatttaccataacactgcttccaacacattccgggttgtgggggtaaaactgcaggatcaacaggtggttatcaattacagcatagtaaaaggactgaagtataatcaggctaccccaacattccatcagtggcgtgacgccagacaagtgtacggcctcaattttgcttcgaaagaggaagctactacatttagcaacgctatgctttttgcactgaacatcatgaacagccaggagggcggaccaagtagccaacgacaggtacagaatggccctagcccagatgagatggacatacagagaagacaagtcatggagcagcaccaacaacagaggcaggagtcgctggaaagacggacctcagccaccggcccaatccttcctccgggacacccatcttcggcagcaagcgctccagtgtcttgttcgggcgctcctagcggcttggccgcagcaatcgcgggagccaaacttagacgggtacagaggcccgaggacgcatccggagggagttcaccatcaggcactagtaaatctgatgccaacagagcaagcagtgggggtggaggtgggggacttatggaagagatgaataagctactcgccaaacgccgtaaagcagctagtcagtctgacaagccagccgagaaaaaagaagatgaatcacagatggaggacccctcgacaagcccttctcccggaacaagggccgcttcccaaccaccgaattctagcgaggcagggaggaagccctgggaacggtccaactccgtggagaaacccgtatcctcaatactgtcacgcacacctagcgtggctaaatcacccgaagcaaagtcacctcttcaaagtcaaccacactcaaggatgaaacccgcaggtagcgtgaacgacatggctttagacgcattcgatcttgatcgcatgaaacaggaaattcttgaagaggtggttcgcgagctgcataaagtgaaggaggagatcatcgatgctatccgtcaagaattaagcggtatctcgacaacatag

SEQ ID NO: 331978 - protein, 227 aa, Artificial Sequence
  derived and/or modified sequence
MNGTIYANECQQIRHPNSKTLGTVTPRKPVLSVSARKIKDNAADWHNLILKWETLNDAGFTTANNIANLKISLLNKDKIELDSSSPASKENEEKVCLEYNEELEKLCEELQATLDGLTKIQVKMEKLSSTTKGICELENYHYGEESKRPPLFHTWPTTHFYEVSHKLLEMYRKELLLKRTVAKELAHTGDPDLTLSYLSMWLHQPYVESDSRLHLESMLLETGHRAL

SEQ ID NO: 331979 - DNA, 684 bp, Artificial Sequence
  derived and/or modified sequence
atgaacggtaccatatatgccaatgagtgtcagcagattcgtcatccaaactcgaaaacgttggggacggtgacacccaggaagcccgtcctcagcgttagcgctagaaagattaaggacaacgccgcagattggcataacctgatactgaagtgggaaaccctcaatgatgcaggctttactaccgcaaacaatatagccaatctgaagattagcctccttaacaaagataagatcgagctggatagttcatctcctgcatctaaagagaacgaggaaaaagtgtgcctggagtacaacgaggagttagagaaactttgcgaagaactgcaggccacactggatggccttaccaagatccaagtgaagatggagaagttatcaagtacaaccaaaggaatatgcgaattggaaaattatcactacggtgaagaatccaagaggccaccccttttccacacgtggccgactacccatttttatgaagtttctcataaactactggagatgtatcgaaaggagcttcttttgaagaggactgtagctaaagaactcgctcacacaggcgatccagacttaactctctcttacctctccatgtggctgcatcaaccatatgtcgagtctgactcaagactccatttagaaagcatgctgctggagacaggacatcgggccctgtag

SEQ ID NO: 331980 - DNA, 684 bp, Artificial Sequence
  derived and/or modified sequence
atgaatggcaccatctatgccaatgaatgccagcagatccgccaccccaacagcaagaccctgggcaccgtgacccccaggaagcctgtgctgtctgtgtctgccaggaagatcaaggacaatgctgctgactggcacaacctgatcctgaagtgggagaccctgaatgatgctggcttcaccacagccaacaacatcgccaacctgaagatcagcctgctgaacaaggacaagattgagctggacagcagcagccctgccagcaaagaaaatgaggagaaggtgtgcctggagtacaatgaggagctggagaagctgtgtgaggagctgcaggccaccctggatggcctgaccaagatccaggtgaagatggagaagctgagcagcaccaccaagggcatctgtgagctggagaactaccactacggggaggagagcaagaggcctcctctcttccacacctggcccaccacccacttctatgaggtgagccacaagctgctggagatgtacaggaaggagctgctgctgaagaggacagtggccaaggagctggcccacactggagaccctgacctgaccctgagctacctgtccatgtggctgcaccagccctacgtggagagtgacagccggctgcacctggagagcatgctgctggagaccggccaccgggccctgtag

SEQ ID NO: 331981 - DNA, 684 bp, Artificial Sequence
  derived and/or modified sequence
atgaacggcaccatctacgccaacgagtgccagcagatccggcacccgaactctaaaactttaggcacggtgaccccacggaaaccagtgttgagcgtgagtgctagaaagattaaagataacgccgccgactggcacaatcttatcctgaaatgggagaccctaaatgatgctggctttactacagcaaataacatcgccaatttaaagatatctctgctgaataaagataagattgagcttgactcaagttcgcctgcaagcaaggagaatgaggaaaaggtgtgtctcgagtataatgaggaactagagaagctctgtgaggagttgcaagcaaccctagatggcctcaccaagattcaggtgaaaatggaaaagctgagctccactactaagggcatatgcgagctggaaaattatcattatggagaagaatcaaagaggccccccctattccacacatggcccacaacacacttctatgaggtgagtcataagcttctagagatgtatcgaaaggagctgctgcttaagcggacagtggctaaggagctggctcacaccggcgaccccgatttgactctgagctatctctctatgtggctgcaccagccatatgttgaatccgactctcgcctgcatcttgagagtatgcttctcgagactgggcatagagctctgtag

SEQ ID NO: 331982 - DNA, 684 bp, Artificial Sequence
  derived and/or modified sequence
atgaacgggactatttacgccaacgaatgtcagcagatccggcatcccaacagcaaaactttggggacagtgacccctcgtaagcccgtcttgtccgtatccgctcgcaagatcaaggataacgcagcagactggcataaccttatcctgaaatgggaaaccctgaatgatgctgggttcaccacagctaataacatagctaaccttaagatatcactactaaataaggataagatagaactcgactcctcttcgcccgcatcaaaggagaatgaggagaaggtctgcctggagtacaatgaggaactggagaagctatgtgaagagcttcaggctaccctggacggcctgacgaagatacaggtgaaaatggagaaactcagcagtactacaaaggggatctgtgagctggagaactatcattatggggaagagtccaagagacccccactgtttcacacttggcctaccacgcatttctacgaggtttcgcataaactactggaaatgtatcggaaagagctgttgttgaagcggaccgtcgccaaggaactcgcacacactggcgacccagatctgactctttcctatctcagcatgtggctgcaccaaccatatgttgaatctgattcaaggcttcacttggagtcaatgctgctggagaccgggcaccgggctctctag

SEQ ID NO: 331983 - DNA, 845 bp, Artificial Sequence
  derived and/or modified sequence
agcctagcccgcaggcccctcgcagcctctgcgagctgctcgggagacagttttgccgagcctccgttttttcacatgtgcagtgacagatgaacgggacgatatacgcaaatgagtgtcagcagatccgacatccaaattcaaagactcttggaactgtaacgcccagaaaacctgtcttatctgtcagtgcaagaaaaattaaggacaatgcggctgattggcacaatttaatcctgaagtgggaaaccctcaatgatgcaggttttaccactgcaaataatattgccaacttgaaaatcagtttattgaataaagacaagatagaactagacagcagcagcccagcctcgaaggaaaatgaagaaaaggtgtgtctggaatataacgaggaactggagaagctgtgtgaggaactgcaggccaccttggatgggttgaccaaaatacaggtgaaaatggaaaagctgtcttcaactaccaagggaatttgtgaactagaaaactaccattatggggaggagagtaaacgaccccctctgttccacacgtggcctacaacccatttctatgaggtttcgcataagctcttggagatgtacaggaaggagctgctcctgaagcgcacggtggccaaggagcttgcccacaccggggatcccgacctcaccctgagctacctgtccatgtggctgcaccagccctatgtggagagcgacagcaggctgcatctggagagcatgctgctggagacaggccaccgagctctctgacgtcctgagacggctgcggacactggctccttccacgtctcaccaggcagacagtctgcctaggacccagtg

SEQ ID NO: 331984 - DNA, 684 bp, Artificial Sequence
  derived and/or modified sequence
atgaacggcaccatctacgccaacgagtgccagcagatcagacaccccaacagcaagaccctgggcaccgtgacccccagaaagcccgtgctgagcgtgagcgccagaaagatcaaggacaacgccgccgactggcacaacctgatcctgaagtgggagaccctgaacgacgccggcttcaccaccgccaacaacatcgccaacctgaagatcagcctgctgaacaaggacaagatcgagctggacagcagcagccccgccagcaaggagaacgaggagaaggtgtgcctggagtacaacgaggagctggagaagctgtgcgaggagctgcaggccaccctggacggcctgaccaagatccaggtgaagatggagaagctgagcagcaccaccaagggcatctgcgagctggagaactaccactacggcgaggagagcaagagaccccccctgttccacacctggcccaccacccacttctacgaggtgagccacaagctgctggagatgtacagaaaggagctgctgctgaagagaaccgtggccaaggagctggcccacaccggcgaccccgacctgaccctgagctacctgagcatgtggctgcaccagccctacgtggagagcgacagcagactgcacctggagagcatgctgctggagaccggccacagagccctgtag

SEQ ID NO: 331985 - protein, 71 aa, Artificial Sequence
  derived and/or modified sequence
MASNNTASIAQARKLVEQLKMEANIDRIKVSKAAADLMAYCEAHAKEDPLLTPVPASENPFREKKFFCAIL

SEQ ID NO: 331986 - protein, 102 aa, Artificial Sequence
  derived and/or modified sequence
MQGKLQPPMEREARDGVPSGKVFLKDLSSTPMASNNTASIAQARKLVEQLKMEANIDRIKVSKAAADLMAYCEAHAKEDPLLTPVPASENPFREKKFFCAIL

SEQ ID NO: 331987 - protein, 110 aa, Artificial Sequence
  derived and/or modified sequence
MVYLQAKTRIPEHRKVTQLIKCWSPDLNPVFLKDLSSTPMASNNTASIAQARKLVEQLKMEANIDRIKVSKAAADLMAYCEAHAKEDPLLTPVPASENPFREKKFFCAIL

SEQ ID NO: 331988 - DNA, 216 bp, Artificial Sequence
  derived and/or modified sequence
atggctagcaacaatacagcttcaattgcgcaggccagaaagttggtagagcagctcaagatggaggccaatattgatagaattaaagtttccaaagcagcggcggacctgatggcttactgtgaagcccacgcaaaagaggacccattattaacccccgtgcccgcttctgagaatccatttcgcgagaagaaattcttttgtgccattttatag

SEQ ID NO: 331989 - DNA, 309 bp, Artificial Sequence
  derived and/or modified sequence
atgcaggggaaattacagccgcctatggaaagagaggcccgtgacggggtgccgtccgggaaggtattcctgaaagacctgtcgtcgacgcccatggcctcaaacaacactgcatccatcgctcaagctcggaaacttgttgaacagctaaagatggaggccaatatagaccgcattaaagtttccaaagctgctgccgacctgatggcatactgtgaggctcacgctaaagaggacccgttgctgacccctgtgcccgcatctgagaacccgttcagagaaaaaaagttcttctgcgccattctgtag

SEQ ID NO: 331990 - DNA, 216 bp, Artificial Sequence
  derived and/or modified sequence
atggcctctaacaacacggcctcaattgcgcaggcaagaaaactggtcgagcagctcaagatggaggctaacatagacagaatcaaagtcagcaaggctgccgcagatctcatggcctactgcgaagcccacgcgaaggaagatccacttctaactcccgtacccgctagtgagaacccatttcgcgaaaagaagttcttttgcgcaatcctgtag

SEQ ID NO: 331991 - DNA, 216 bp, Artificial Sequence
  derived and/or modified sequence
atggcctccaataataccgctagcatcgcacaggctagaaagctggttgaacagctcaagatggaggctaacatcgaccgcattaaagtttcaaaggccgctgcagaccttatggcatactgcgaggctcatgctaaggaggatcctttgctgacccccgtgcccgccagcgagaacccgttccgggagaaaaagtttttctgcgccattctctag

SEQ ID NO: 331992 - DNA, 216 bp, Artificial Sequence
  derived and/or modified sequence
atggcaagcaacaatacagctagcattgctcaggcccggaaattggttgaacagttaaagatggaagctaacattgacagaattaaggtgtcaaaggccgcagcagatcttatggcatattgcgaggcacacgcaaaggaggaccctctgcttacacccgtcccagcatcagagaatccgttcagagaaaagaagttcttctgcgccattctatag

SEQ ID NO: 331993 - DNA, 216 bp, Artificial Sequence
  derived and/or modified sequence
atggccagcaataacacggcatctattgcccaggccagaaagctggtcgagcaacttaagatggaggccaacatcgaccgaatcaaggtgtccaaggctgccgccgatctcatggcttattgcgaggcacatgccaaagaggatccgcttctgactcctgtgccagcctcagaaaatcccttccgggagaagaaatttttttgcgcaatactgtag

SEQ ID NO: 331994 - DNA, 333 bp, Artificial Sequence
  derived and/or modified sequence
atggtatatctgcaggcaaagacgaggatccctgaacaccgcaaggtgacacagctgatcaagtgttggtcccccgacttgaacccagtgttccttaaagatttgtccagtactccaatggcttctaacaataccgcatccatcgcacaggcaagaaagctggtggagcagctgaaaatggaggcgaacattgatcgaattaaagtcagcaaagccgccgccgatttgatggcatattgtgaagctcatgctaaggaagaccccctgctgactccagtccccgcgagcgaaaacccatttcgagagaagaagtttttctgcgcaatcttgtag

SEQ ID NO: 331995 - DNA, 3729 bp, Artificial Sequence
  derived and/or modified sequence
aacaaagggagaagggggattaaagtcaaatcactgtcagcagcccaggagcagacaaaaccaccagagtaagccctgaaatggaaatgagagggaaaagaagcaagccgctaacagctaccaagaagaggaggaagtgggagatgcgctgcttcctgtagaaagaacgttgattgaagacaaagctgggtggggactagtccctgggctgcagccgctgctacacatactcacaacgctgccgccgcgctccgtgggcaactcctactactgctgggctgggctgggctgggctgggctgcgccggagctcgcctgcacagatcagctccggagaggggaaaaccacgctcctcggaccaagcctcgggagctaagtgtttctgaaagatctatccagcactccgatggccagcaacaacaccgccagcatagcacaagccaggaagctggtagagcagcttaagatggaagccaatatcgacaggataaaggtgtccaaggcagctgcagatttgatggcctactgtgaagcacatgccaaggaagaccccctcctgacccctgttccggcttcagaaaacccgtttagggagaagaagtttttctgtgccatcctttaagtctttgagaggggcctgaagagcctccgggctcctgggacattgatgtagagtttttagtgaagtgggcacctttctagtccacggcatttgaagagagcgaggagaaccattctggaaactctaggctatgcatgtttaaagatctggtcccctttatgagaatgcaagccgatccacatcctgacttaagagatctgattctgacgaactgcctggaggaggggaatatataaaaataaaattggtgtcacttcttttctgctatcccccagccccccccccaaaatcctcatgtttctgcttcatattttgaaaaataacaattaaaacagacagctgtactgaggtaagatatgtgtgaccttcttggaatgaatattgtctttagaataccctttgataagctgagctgtcccgtgtagatgcaattcggtttaatggcattgatgtatagtcactgtgcctttctttttctttcttccttctcctctacccctccttccacccctccccattagagtagtgtggagataaggctggactggtctatcagattgaactccaagaatgatcacacaaaatgtttagggagatgttccccgtggtgtatcctcatggtaacaacgacaaaaaatgccggttgtctgtgttctcttttcactattcctaacatgtgtacatgatagctttgattctgcaagtaaaagtaaatcctgtgttgtgactggtgctttcatatatttgtgacaatttttgagtaatattgcatgaaaatgtccctatgttacatccattcagaagttttgttgttttactctaaagctgggaaaggaaatgagagggaaaagaccccggagagggaagaaaatctcagtattttgaaaattgagattacttcagagccttagccacacctaaaatacctcctagttaatagtggtataaatgcctcttcaatacgttttccagaatccaaagcattttggtttatccaggacccagggcagcacagctgtcaccaagcaggagagttaaggattcaccatgagctgggaaatgcttttgccatgagtatgagcaaattccctctttccctgaatcatggacattctagattaaaagaacatttttttgtgctcttaacaagaaaaccatggccctcctttgttcaagtatcagaagaaataaacccacagctccagagaaggtgaccattctcagaactccagctattcactctccagggagaaggacctcaaatcgccactctttgggcggcaggtgcggtccccacggccggctctacgaggaagagttctggctcttttgtccactgagatggtcttggtttttcacttaacaaattttttaatggaatctttgtttttgttctccatcttgtttgttagagtctctcggcctttatttacaaattccttgcaactagagcgctccttccccaagatatggtagtgagagtaatttttcattgtagctgtagtctccatcagtaacagcaggccctggaagacttgatcacctttttctgtgtcattttcagtcaaagagggcctctcttacatcttgtttgctttcaaatccccaaatatcatctccatctcccaattaattttattgtctctttcctctctattcgctttctcctgttttttttttaaaaaaaaagcatgaaaaaggaagagaaaaagtttgatatgccaaggacagattttgaaacagacttggtaaatgttttccttagctccttcatgggcatgctggtgaaagaataaatacatccaattaaagctcatgctggggtcggggagaagaggatactgaaacatttgtgaaatgtatgaatgcacttctgtaaccagatacttctgttcttctgttcaaattgtggggtttttgttacagttaggacgcccatgaagatttaggggtgaaaaaaacagcagagtatttattaaactacagcattgtacaattagcttagtaacactatggaataagctaaaacatatcacagtttttacatgggccaaaacatgaattgagtatgtggtcacatgaaaacacggatgaatgaataaaacactctttggtggtgactgaggcatcattagaaggcccagacgatttccactattcacagcatttccttttctcagaaggactctttatatttccatgtaaatctagatctttggagcaattaagatggaattacaatttctagggagcattttaaggaaaatgttttggctttttcataattttatgtcttacagtatggaattataatacgaaaatctttatatgagttttggcttcttggtatttgtacttattcaggggaaaaagtctttcgattacttatgcctctatagagcttaatttcttgagaaattcaacagtcattttcaccagcataattttatcttaaggaataactaataggaaaagtcagcttaattatttaaggccctagtttctacatataatatattcgatagaaatgaaaatctgccgtggaattaactaataagtagtaacaataaacttcatatttagaatgcaaagtctataaagaataattttacatgatcctcaatatcaactccagtttaaaaagtgttatttttaaaacatttgaaaccaagtactgtttaatttcaatcagaagatgcaaatacatactttgatctatgtttgattttgctaataatatttgaaggagattgcctaccaaggacaaaacaataaatttaaaaatcaaacgatttctccatacgctcatagtcacatatggaattttgagaaaataaagcatgctgtctttaggaatttttatacttctttgtctttcttccttaatatttgcttctagctgctcttggcaatgatgaattgttatgtatgcattaatgttttgcagcccaaaagttgttcacatttttcctatataagatctgtggagtgtgtgtttcaaagagagaactacagaaatgttaaagcaggaaaacctgaatgtgatgtgcacattttcatcccacatggacaatgtatgtgttttaataaatggaattttcagattc

SEQ ID NO: 331996 - DNA, 577 bp, Artificial Sequence
  derived and/or modified sequence
agagcatgcagagccagcaagagcggatggctgaagaattacacgcagtggaaaagcagcaccgtggagctgggtgattcctgagcccaacctgtgcctctggtctaggggcatgcaggggaaattgcaacctccaatggaaagagaagcaagagatggtgtaccttcaggcaaagtgtttctgaaagatctatccagcactccgatggccagcaacaacaccgccagcatagcacaagccaggaagctggtagagcagcttaagatggaagccaatatcgacaggataaaggtgtccaaggcagctgcagatttgatggcctactgtgaagcacatgccaaggaagaccccctcctgacccctgttccggcttcagaaaacccgtttagggagaagaagtttttctgtgccatcctttaagtctttgagaggggcctgaagagcctccgggctcctgggacattgatgtagagtttttagtgaagtgggcacctttctagtccacggcatttgaagagagcgaggagaaccattctggaaactctaggctatgcatgtttaaagatctggtcccct

SEQ ID NO: 331997 - DNA, 569 bp, Artificial Sequence
  derived and/or modified sequence
agtgtcttcctccctcagcttgtgcagctgctttcaggataacctcagacacagctatcatttgccaccagatctgccagtgagcctcaggctttaggaactgaagagtgtttctgaaagatctatccagcactccgatggccagcaacaacaccgccagcatagcacaagccaggaagctggtagagcagcttaagatggaagccaatatcgacaggataaaggtgtccaaggcagctgcagatttgatggcctactgtgaagcacatgccaaggaagaccccctcctgacccctgttccggcttcagaaaacccgtttagggagaagaagtttttctgtgccatcctttaagtctttgagaggggcctgaagagcctccgggctcctgggacattgatgtagagtttttagtgaagtgggcacctttctagtccacggcatttgaagagagcgaggagaaccattctggaaactctaggctatgcatgtttaaagatctggtcccctttatgagaatgcaagccgatccacatcctgacttaagagatctgattctgacgaactgcc

SEQ ID NO: 331998 - DNA, 908 bp, Artificial Sequence
  derived and/or modified sequence
actcacaacgctgccgccgcgctccgtgggcaactcctactactgctgggctgggctgggctgggctgggctgcgccggagctcgcctgcacagatcagctccggagaggggaaaaccacgctcctcggaccaagcctcgggagctaagccagatctgccagtgagcctcaggctttaggaactgaagagggatgatactgtgaagtgttcaggaatgaagtctcgtgatgtctgctacctagtttcaaatggcaggagagacagagggatggggaagcaaaagtgaccattgttaactctaggtggttgtgtttctgaaagatctatccagcactccgatggccagcaacaacaccgccagcatagcacaagccaggaagctggtagagcagcttaagatggaagccaatatcgacaggataaaggtgtccaaggcagctgcagatttgatggcctactgtgaagcacatgccaaggaagaccccctcctgacccctgttccggcttcagaaaacccgtttagggagaagaagtttttctgtgccatcctttaagtctttgagaggggcctgaagagcctccgggctcctgggacattgatgtagagtttttagtgaagtgggcacctttctagtccacggcatttgaagagagcgaggagaaccattctggaaactctaggctatgcatgtttaaagatctggtcccctttatgagaatgcaagccgatccacatcctgacttaagagatctgattctgacgaactgcctggaggaggggaatatataaaaataaaattggtgtcacttcttttctgctatcccccagccccccccccaaaatcctcatgtttctgcttcatattttgaaaaataacaattaaaacagacagctgtactgaggtaa

SEQ ID NO: 331999 - DNA, 3419 bp, Artificial Sequence
  derived and/or modified sequence
gtttttctctctgctttctcaacagccagatctgccagtgagcctcaggctttaggaactgaagagtgtttctgaaagatctatccagcactccgatggccagcaacaacaccgccagcatagcacaagccaggaagctggtagagcagcttaagatggaagccaatatcgacaggataaaggtgtccaaggcagctgcagatttgatggcctactgtgaagcacatgccaaggaagaccccctcctgacccctgttccggcttcagaaaacccgtttagggagaagaagtttttctgtgccatcctttaagtctttgagaggggcctgaagagcctccgggctcctgggacattgatgtagagtttttagtgaagtgggcacctttctagtccacggcatttgaagagagcgaggagaaccattctggaaactctaggctatgcatgtttaaagatctggtcccctttatgagaatgcaagccgatccacatcctgacttaagagatctgattctgacgaactgcctggaggaggggaatatataaaaataaaattggtgtcacttcttttctgctatcccccagccccccccccaaaatcctcatgtttctgcttcatattttgaaaaataacaattaaaacagacagctgtactgaggtaagatatgtgtgaccttcttggaatgaatattgtctttagaataccctttgataagctgagctgtcccgtgtagatgcaattcggtttaatggcattgatgtatagtcactgtgcctttctttttctttcttccttctcctctacccctccttccacccctccccattagagtagtgtggagataaggctggactggtctatcagattgaactccaagaatgatcacacaaaatgtttagggagatgttccccgtggtgtatcctcatggtaacaacgacaaaaaatgccggttgtctgtgttctcttttcactattcctaacatgtgtacatgatagctttgattctgcaagtaaaagtaaatcctgtgttgtgactggtgctttcatatatttgtgacaatttttgagtaatattgcatgaaaatgtccctatgttacatccattcagaagttttgttgttttactctaaagctgggaaaggaaatgagagggaaaagaccccggagagggaagaaaatctcagtattttgaaaattgagattacttcagagccttagccacacctaaaatacctcctagttaatagtggtataaatgcctcttcaatacgttttccagaatccaaagcattttggtttatccaggacccagggcagcacagctgtcaccaagcaggagagttaaggattcaccatgagctgggaaatgcttttgccatgagtatgagcaaattccctctttccctgaatcatggacattctagattaaaagaacatttttttgtgctcttaacaagaaaaccatggccctcctttgttcaagtatcagaagaaataaacccacagctccagagaaggtgaccattctcagaactccagctattcactctccagggagaaggacctcaaatcgccactctttgggcggcaggtgcggtccccacggccggctctacgaggaagagttctggctcttttgtccactgagatggtcttggtttttcacttaacaaattttttaatggaatctttgtttttgttctccatcttgtttgttagagtctctcggcctttatttacaaattccttgcaactagagcgctccttccccaagatatggtagtgagagtaatttttcattgtagctgtagtctccatcagtaacagcaggccctggaagacttgatcacctttttctgtgtcattttcagtcaaagagggcctctcttacatcttgtttgctttcaaatccccaaatatcatctccatctcccaattaattttattgtctctttcctctctattcgctttctcctgttttttttttaaaaaaaaagcatgaaaaaggaagagaaaaagtttgatatgccaaggacagattttgaaacagacttggtaaatgttttccttagctccttcatgggcatgctggtgaaagaataaatacatccaattaaagctcatgctggggtcggggagaagaggatactgaaacatttgtgaaatgtatgaatgcacttctgtaaccagatacttctgttcttctgttcaaattgtggggtttttgttacagttaggacgcccatgaagatttaggggtgaaaaaaacagcagagtatttattaaactacagcattgtacaattagcttagtaacactatggaataagctaaaacatatcacagtttttacatgggccaaaacatgaattgagtatgtggtcacatgaaaacacggatgaatgaataaaacactctttggtggtgactgaggcatcattagaaggcccagacgatttccactattcacagcatttccttttctcagaaggactctttatatttccatgtaaatctagatctttggagcaattaagatggaattacaatttctagggagcattttaaggaaaatgttttggctttttcataattttatgtcttacagtatggaattataatacgaaaatctttatatgagttttggcttcttggtatttgtacttattcaggggaaaaagtctttcgattacttatgcctctatagagcttaatttcttgagaaattcaacagtcattttcaccagcataattttatcttaaggaataactaataggaaaagtcagcttaattatttaaggccctagtttctacatataatatattcgatagaaatgaaaatctgccgtggaattaactaataagtagtaacaataaacttcatatttagaatgcaaagtctataaagaataattttacatgatcctcaatatcaactccagtttaaaaagtgttatttttaaaacatttgaaaccaagtactgtttaatttcaatcagaagatgcaaatacatactttgatctatgtttgattttgctaataatatttgaaggagattgcctaccaaggacaaaacaataaatttaaaaatcaaacgatttctccatacgctcatagtcacatatggaattttgagaaaataaagcatgctgtctttaggaatttttatacttctttgtctttcttccttaatatttgcttctagctgctcttggcaatgatgaattgttatgtatgcattaatgttttgcagcccaaaagttgttcacatttttcctatataagatctgtggagtgtgtgtttcaaagagagaactacagaaatgttaaagcaggaaaacctgaatgtgatgtgcacattttcatcccacatggacaatgtatgtgttttaataaatggaattttcagattca

SEQ ID NO: 332000 - DNA, 2125 bp, Artificial Sequence
  derived and/or modified sequence
acaacgctgccgccgcgctccgtgggcaactcctactactgctgggctgggctgggctgggctgggctgcgccggagctcgcctgcacagatcagctccggagaggggaaaaccacgctcctcggaccaagcctcgggagctaagccagatctgccagtgagcctcaggctttaggaactgaagagtgtttctgaaagatctatccagcactccgatggccagcaacaacaccgccagcatagcacaagccaggaagctggtagagcagcttaagatggaagccaatatcgacaggataaaggtgtccaaggcagctgcagatttgatggcctactgtgaagcacatgccaaggaagaccccctcctgacccctgttccggcttcagaaaacccgtttagggagaagaagtttttctgtgccatcctttaagtctttgagaggggcctgaagagcctccgggctcctgggacattgatgtagagtttttagtgaagtgggcacctttctagtccacggcatttgaagagagcgaggagaaccattctggaaactctaggctatgcatgtttaaagatctggtcccctttatgagaatgcaagccgatccacatcctgacttaagagatctgattctgacgaactgcctggaggaggggaatatataaaaataaaattggtgtcacttcttttctgctatcccccagccccccccccaaaatcctcatgtttctgcttcatattttgaaaaataacaattaaaacagacagctgtactgaggtaagatatgtgtgaccttcttggaatgaatattgtctttagaataccctttgataagctgagctgtcccgtgtagatgcaattcggtttaatggcattgatgtatagtcactgtgcctttctttttctttcttccttctcctctacccctccttccacccctccccattagagtagtgtggagataaggctggactggtctatcagattgaactccaagaatgatcacacaaaatgtttagggagatgttccccgtggtgtatcctcatggtaacaacgacaaaaaatgccggttgtctgtgttctcttttcactattcctaacatgtgtacatgatagctttgattctgcaagtaaaagtaaatcctgtgttgtgactggtgctttcatatatttgtgacaatttttgagtaatattgcatgaaaatgtccctatgttacatccattcagaagttttgttgttttactctaaagctgggaaaggaaatgagagggaaaagaccccggagagggaagaaaatctcagtattttgaaaattgagattacttcagagccttagccacacctaaaatacctcctagttaatagtggtataaatgcctcttcaatacgttttccagaatccaaagcattttggtttatccaggacccagggcagcacagctgtcaccaagcaggagagttaaggattcaccatgagctgggaaatgcttttgccatgagtatgagcaaattccctctttccctgaatcatggacattctagattaaaagaacatttttttgtgctcttaacaagaaaaccatggccctcctttgttcaagtatcagaagaaataaacccacagctccagagaaggtgaccattctcagaactccagctattcactctccagggagaaggacctcaaatcgccactctttgggcggcaggtgcggtccccacggccggctctacgaggaagagttctggctcttttgtccactgagatggtcttggtttttcacttaacaaattttttaatggaatctttgtttttgttctccatcttgtttgttagagtctctcggcctttatttacaaattccttgcaactagagcgctccttccccaagatatggtagtgagagtaatttttcattgtagctgtagtctccatcagtaacagcaggccctggaagacttgatcacctttttctgtgtcattttcagtcaaagagggcctctcttacatcttgtttgctttcaaatccccaaatatcatctccatctcccaattaattttattgtctctttcctctctattcgctttctcctgttttttttttaaaaaaaaagcatg

SEQ ID NO: 332001 - DNA, 573 bp, Artificial Sequence
  derived and/or modified sequence
atgcagagccagcaagagcggatggctgaagaattacacgcagtggaaaagcagcaccgtggagctgggtgattcctgagcccaacctgtgcctctggtctaggggcatgcaggggaaattgcaacctccaatggaaagagaagcaagagatggtgtaccttcaggcaaagacaagaatcccagagcatagaaaagtcacacagctaattaagtgttggagcccggatttgaacccagtgtttctgaaagatctatccagcactccgatggccagcaacaacaccgccagcatagcacaagccaggaagctggtagagcagcttaagatggaagccaatatcgacaggataaaggtgtccaaggcagctgcagatttgatggcctactgtgaagcacatgccaaggaagaccccctcctgacccctgttccggcttcagaaaacccgtttagggagaagaagtttttctgtgccatcctttaagtctttgagaggggcctgaagagcctccgggctcctgggacattgatgtagagtttttagtgaagtgggcacctttctagtccacggcat

SEQ ID NO: 332002 - DNA, 216 bp, Artificial Sequence
  derived and/or modified sequence
atggccagcaacaacacagccagcatcgcccaggccaggaagctggtggagcagctgaagatggaggccaacatcgaccgcatcaaggtgtccaaggctgctgctgacctgatggcctactgtgaggcccacgccaaggaggaccccctgctgacccctgtgcctgccagcgagaaccccttccgggagaagaagttcttctgtgccatcctgtag

SEQ ID NO: 332003 - DNA, 309 bp, Artificial Sequence
  derived and/or modified sequence
atgcagggcaagctgcagccccccatggagcgggaggccagagatggagtgcccagcggcaaggtgttcctgaaggacctgagcagcacccccatggccagcaacaacacagccagcatcgcccaggccaggaagctggtggagcagctgaagatggaggccaacatcgaccgcatcaaggtgtccaaggctgctgctgacctgatggcctactgtgaggcccacgccaaggaggaccccctgctgacccctgtgcctgccagcgagaaccccttccgggagaagaagttcttctgtgccatcctgtag

SEQ ID NO: 332004 - DNA, 333 bp, Artificial Sequence
  derived and/or modified sequence
atggtgtacctgcaggccaagacccgcatccctgagcacaggaaggtgacccagctgatcaagtgctggagcccagacctgaaccctgtgttcctgaaggacctgagcagcacccccatggccagcaacaacacagccagcatcgcccaggccaggaagctggtggagcagctgaagatggaggccaacatcgaccgcatcaaggtgtccaaggctgctgctgacctgatggcctactgtgaggcccacgccaaggaggaccccctgctgacccctgtgcctgccagcgagaaccccttccgggagaagaagttcttctgtgccatcctgtag

SEQ ID NO: 332005 - DNA, 216 bp, Artificial Sequence
  derived and/or modified sequence
atggccagcaacaacaccgccagcatcgcccaggcccggaagctggtcgaacaactgaagatggaagcaaacatagatcgaatcaaagtctctaaagccgctgctgacttgatggcatactgcgaagcccacgccaaggaagacccacttctgactccggtccctgcgtccgagaaccctttcagggagaaaaaatttttttgtgccattctttag

SEQ ID NO: 332006 - DNA, 309 bp, Artificial Sequence
  derived and/or modified sequence
atgcagggcaagctgcagccccccatggagcgggaggcccgggacggggtgccgtccggaaaggtgtttttgaaggacctgtctagcactccaatggcatctaataacaccgcaagtatcgcccaggcacgcaaactggttgagcagctgaaaatggaagctaatattgatcgtattaaagtgagtaaagctgcggcggatctgatggcgtactgcgaagcccatgccaaggaggatcccttattgaccccagttccggcaagcgaaaacccatttagagaaaaaaagtttttctgtgcaatactgtag

SEQ ID NO: 332007 - DNA, 216 bp, Artificial Sequence
  derived and/or modified sequence
atggccagcaacaacaccgccagcatcgcccaggcccggaagctggtcgaacagctcaagatggaggccaacatagacagaataaaagtgtcaaaagccgcagccgacctcatggcatattgtgaggctcacgccaaggaggacccgcttttgactcctgttccagcgagcgagaatccattcagagagaagaagtttttctgtgcgatcctatag

SEQ ID NO: 332008 - DNA, 216 bp, Artificial Sequence
  derived and/or modified sequence
atggccagcaacaacaccgccagcatcgcccaggcccggaagctggttgagcagttgaagatggaagctaacattgaccggatcaaagtgtccaaggccgccgctgacctgatggcctactgcgaggcccacgcaaaggaggaccctcttctgacccccgtgcccgccagcgagaacccttttagagagaagaagtttttttgcgcaatactgtag

SEQ ID NO: 332009 - DNA, 216 bp, Artificial Sequence
  derived and/or modified sequence
atggccagcaacaacaccgccagcatcgcccaggcccggaagctggtcgaacaattgaaaatggaagctaatatcgacaggatcaaagtgtcaaaggcagccgcagatctcatggcctattgcgaagcccacgccaaggaggacccacttctgaccccggtgcccgctagcgaaaaccccttccgcgaaaagaaattcttctgcgctattctgtag

SEQ ID NO: 332010 - DNA, 216 bp, Artificial Sequence
  derived and/or modified sequence
atggccagcaacaacaccgccagcatcgcccaggcccggaagctggtggagcagctgaaaatggaggccaacattgaccggatcaaggtctccaaagccgccgccgacttaatggcctactgcgaggcacacgccaaggaagatcccctgctcacaccggtaccagcttcagagaaccccttccgggagaagaagttcttctgcgccatcctctag

SEQ ID NO: 332011 - DNA, 333 bp, Artificial Sequence
  derived and/or modified sequence
atggtgtacctgcaggccaagacccggatccccgagcaccggaaggtgactcagctcattaaatgctggtccccggacctcaaccccgtgtttctcaaagacctctcaagcacccccatggccagcaataacaccgcatctatcgctcaggcacggaagctagtggaacagttgaagatggaggccaatatagaccgcattaaagtgtcaaaggcggctgccgatcttatggcatattgcgaagcccatgccaaggaagaccccctgcttacccctgtccctgcatccgaaaatccctttagagagaagaaattcttctgcgccatcctatag

SEQ ID NO: 332012 - DNA, 216 bp, Artificial Sequence
  derived and/or modified sequence
atggcatctaataatacagcaagtattgcgcaggctcgcaaactagtggagcagttaaagatggaggccaacattgatcgtataaaggtatctaaggccgcagcagacctgatggcctattgcgaggctcatgcgaaagaagatcctctcctcacgccagttccagcctccgaaaacccatttcgagaaaagaagttcttttgcgcaattttgtag

SEQ ID NO: 332013 - DNA, 309 bp, Artificial Sequence
  derived and/or modified sequence
atgcagggcaagctgcaaccccctatggaacgcgaggcacgggacggtgttcctagcgggaaagtcttcctcaaggacctttcttctactccgatggcctccaacaacacagccagcatcgcgcaggcaaggaagctggtcgagcagctgaaaatggaggctaacatcgacagaatcaaggttagcaaggcggctgccgatctcatggcatactgcgaggctcatgccaaagaggacccactacttacgcccgtgccagccagtgaaaacccattccgtgaaaaaaagtttttttgcgctattctgtag

SEQ ID NO: 332014 - DNA, 216 bp, Artificial Sequence
  derived and/or modified sequence
atggcctctaacaatacagcctcgatcgcccaggcacggaagttggttgagcaactcaagatggaggccaacatcgaccgcattaaagtctcaaaggctgccgcagatcttatggcctactgcgaagcacacgcaaaagaggatccattactgacgcccgtccctgcctctgaaaacccattcagagaaaagaagttcttttgtgccatcctatag

SEQ ID NO: 332015 - DNA, 216 bp, Artificial Sequence
  derived and/or modified sequence
atggccagcaataatacagcctctattgcgcaagccaggaaactcgtagagcagctcaagatggaggccaacatcgatcgcataaaggtgagcaaagccgctgccgacctcatggcgtactgcgaggcccatgccaaggaggatcccctcttgacgcccgtgccggcaagtgagaaccctttcagagaaaaaaagttcttttgcgcgatcctgtag

SEQ ID NO: 332016 - DNA, 216 bp, Artificial Sequence
  derived and/or modified sequence
atggcatccaataatactgcctctatcgcccaagcaagaaagttggttgaacagttaaaaatggaggcaaacatagatcggatcaaagtgtctaaggcggcagccgacctgatggcttactgcgaagcccacgctaaggaggaccctctgctgacacctgtacctgcatccgaaaaccccttccgggaaaaaaagtttttctgcgccatcctatag

SEQ ID NO: 332017 - DNA, 216 bp, Artificial Sequence
  derived and/or modified sequence
atggcctccaacaacacagcaagcatagcccaggcccgaaagctggtagagcagctgaagatggaggcaaatatcgatcgcatcaaagtttctaaagcagctgcagatctgatggcatactgtgaggcccacgcgaaggaggaccctttgcttacgcccgtccctgcgagcgaaaacccttttagggagaagaagttcttttgcgcaatactgtag

SEQ ID NO: 332018 - DNA, 333 bp, Artificial Sequence
  derived and/or modified sequence
atggtttatttgcaggccaagacacgcattccagagcacagaaaggtaacccagttgattaagtgttggtcaccagatctgaacccggtgtttctaaaagacctatcgtccacgccgatggcttcaaacaatacggcttccattgcacaagcgagaaaactggtggagcagctgaagatggaagccaacatagaccgtattaaggttagtaaagcggcagcagatctaatggcctattgtgaggctcatgctaaggaggatcccttgttgacccccgttcccgcatcagaaaatccatttcgcgagaagaagtttttctgtgccattctttag

SEQ ID NO: 332019 - DNA, 216 bp, Artificial Sequence
  derived and/or modified sequence
atggccagcaacaacaccgccagcatcgcccaggccagaaagctggtggagcagctgaagatggaggccaacatcgacagaatcaaggtgagcaaggccgccgccgacctgatggcctactgcgaggcccacgccaaggaggaccccctgctgacccccgtgcccgccagcgagaaccccttcagagagaagaagttcttctgcgccatcctgtag

SEQ ID NO: 332020 - DNA, 309 bp, Artificial Sequence
  derived and/or modified sequence
atgcagggcaagctgcagccccccatggagagagaggccagagacggcgtgcccagcggcaaggtgttcctgaaggacctgagcagcacccccatggccagcaacaacaccgccagcatcgcccaggccagaaagctggtggagcagctgaagatggaggccaacatcgacagaatcaaggtgagcaaggccgccgccgacctgatggcctactgcgaggcccacgccaaggaggaccccctgctgacccccgtgcccgccagcgagaaccccttcagagagaagaagttcttctgcgccatcctgtag

SEQ ID NO: 332021 - DNA, 333 bp, Artificial Sequence
  derived and/or modified sequence
atggtgtacctgcaggccaagaccagaatccccgagcacagaaaggtgacccagctgatcaagtgctggagccccgacctgaaccccgtgttcctgaaggacctgagcagcacccccatggccagcaacaacaccgccagcatcgcccaggccagaaagctggtggagcagctgaagatggaggccaacatcgacagaatcaaggtgagcaaggccgccgccgacctgatggcctactgcgaggcccacgccaaggaggaccccctgctgacccccgtgcccgccagcgagaaccccttcagagagaagaagttcttctgcgccatcctgtag

SEQ ID NO: 332022 - DNA, 569 bp, Artificial Sequence
  derived and/or modified sequence
ttatttgccaagagtttcagagctattaacagaagcctaatacatgttcttggactttgcagaaataatttgttgatccatgcggtttcattgctactgcggaaaacctagaggatcaagacataatgggagcatttttagacaagccaaagatggaaaagcataatgcccaggggcagggtaatgggttgcgatatgggctaagcagcatgcaaggctggcgtgttgaaatggaggatgcacatacggctgtgatcggtttgccaagtggacttgaatcgtggtcattctttgctgtgtatgatgggcatgctggttctcaggttgccaaatactgctgtgagcatttgttagatcacatcaccaataaccaggattttaaagggtctgcaggagcaccttctgtggaaaatgtaaagaatggaatcagaacaggttttctggagattgatgaacacatgagagttatgtcagagaagaaacatggtgcagatagaagtgggtcaacagctgtaggtgtcttaatttctccccaacatacttatttcattaactgtggagactcaaga

SEQ ID NO: 332023 - DNA, 1491 bp, Artificial Sequence
  derived and/or modified sequence
atggccagccccagcggcctgtgcgtgctggtgagactgcccaagctgatctgcggcggcaagaccctgcccagaaccctgctggacatcctggccgacggcaccatcctgaaggtgggcgtgggctgcagcgaggacgccagcaagctgctgcaggactacggcctggtggtgagaggctgcctggacctgagatacctggccatgagacagagaaacaacctgctgtgcaacggcctgagcctgaagagcctggccgagaccgtgctgaacttccccctggacaagagcctgctgctgagatgcagcaactgggacgccgagaccctgaccgaggaccaggtgatctacgccgccagagacgcccagatcagcgtggccctgttcctgcacctgctgggctaccccttcagcagaaacagccccggcgagaagaacgacgaccacagcagctggagaaaggtgctggagaagtgccagggcgtggtggacatccccttcagaagcaagggcatgagcagactgggcgaggaggtgaacggcgaggccaccgagagccagcagaagcccagaaacaagaagagcaagatggacggcatggtgcccggcaaccaccagggcagagaccccagaaagcacaagagaaagcccctgggcgtgggctacagcgccagaaagagccccctgtacgacaactgcttcctgcacgcccccgacggccagcccctgtgcacctgcgacagaagaaaggcccagtggtacctggacaagggcatcggcgagctggtgagcgaggagcccttcgtggtgaagctgagattcgagcccgccggcagacccgagagccccggcgactactacctgatggtgaaggagaacctgtgcgtggtgtgcggcaagagagacagctacatcagaaagaacgtgatcccccacgagtacagaaagcacttccccatcgagatgaaggaccacaacagccacgacgtgctgctgctgtgcaccagctgccacgccatcagcaactactacgacaaccacctgaagcagcagctggccaaggagttccaggcccccatcggcagcgaggagggcctgagactgctggaggaccccgagagaagacaggtgagaagcggcgccagagccctgctgaacgccgagagcctgcccacccagagaaaggaggagctgctgcaggccctgagagagttctacaacaccgacgtggtgaccgaggagatgctgcaggaggccgccagcctggagaccagaatcagcaacgagaactacgtgccccacggcctgaaggtggtgcagtgccacagccagggcggcctgagaagcctgatgcagctggagagcagatggagacagcacttcctggacagcatgcagcccaagcacctgccccagcagtggagcgtggaccacaaccaccagaagctgctgagaaagttcggcgaggacctgcccatccagctgagctag

SEQ ID NO: 332024 - DNA, 345 bp, Artificial Sequence
  derived and/or modified sequence
atggccagccccagcggcctgtgcgtgctggtgagactgcccaagctgatctgcggcggcaagaccctgcccagaaccctgctggacatcctggccgacggcaccatcctgaaggtgggcgtgggctgcagcgaggacgccagcaagctgctgcaggactacggcctggtggtgagaggctgcctggacctgagatacctggccatgagacagagaaacaacctgctgtgcaacggcctgagcctgaagagcctggccgagaccgtgctgaacttccccctggacaagagcctgctgctgagatgcagcaactgggacgccgagaccctgaccgaggaccagtag

SEQ ID NO: 332025 - DNA, 1491 bp, Artificial Sequence
  derived and/or modified sequence
atggcttccccttctgggttgtgcgtgctcgtgcgattaccaaaactaatctgtggtggaaaaaccctgccaaggacactcctggacatcctagccgacgggacaatcctcaaagtgggtgtggggtgctccgaggatgcctctaaacttttacaggattatgggctggtggttcggggctgcctggatctgagatatttggccatgcggcaaaggaataatctactgtgtaacggactctcgctgaaatcgcttgccgagaccgtgctcaactttcctttagataaatctctccttctgaggtgttctaattgggatgcagaaactctgaccgaagatcaggtgatctacgcagctagggacgctcagattagtgtggcgcttttcctgcatctcctcggatatcccttctcaaggaatagccctggtgagaagaacgatgatcacagtagttggagaaaagtgctggaaaagtgtcagggcgttgtagacatccctttcaggagtaaaggaatgtcaaggctgggcgaagaggttaacggagaggctactgagtctcagcagaaacctcgcaacaaaaagtcaaaaatggacgggatggtccccggaaatcaccaaggtcgtgatccccgtaagcacaagaggaaaccgctgggtgtgggatactccgcacgtaagtcaccattatacgacaactgtttcttgcatgctccagacgggcagccactgtgcacctgtgacagacgcaaagcccagtggtatttggataaggggatcggcgagctcgtctcagaagaaccgttcgtagtaaagcttcgtttcgagcccgccggccggcccgaatcaccaggtgattattacctgatggtcaaggagaacctctgcgtcgtatgcggtaaacgtgattcctacattcggaagaacgtgatacctcacgaatatcgaaaacactttcctattgagatgaaagatcacaactctcacgacgtcctgctgctgtgtactagctgccatgccatatccaactactacgacaaccacttgaagcagcagctcgccaaagagttccaggcgcccattgggtcagaagaaggcctgaggctcttggaagacccggagagaagacaggtccgctcgggagcaagagctctgctgaacgcagaatcacttccaacccagaggaaggaagaactgctgcaagcgctgcgggagttctacaacaccgacgttgttactgaagaaatgctgcaggaggctgcatcactggagactcggatcagtaatgaaaattatgttccccacggtctgaaagtagtgcagtgtcacagccagggcggactcagatccttgatgcagcttgagagccgctggcgccagcattttctcgattctatgcagccaaaacacttaccccaacaatggagcgtcgaccataatcatcagaaattgctgcgcaagttcggcgaagacttgcctatccagctttcctag

SEQ ID NO: 332026 - DNA, 1491 bp, Artificial Sequence
  derived and/or modified sequence
atggctagccctagcggattgtgtgtgctggtgcgactaccgaaactgatttgcggaggcaagaccctgcctcgcacgctcttggacatcctcgccgatggaaccatcctgaaagtgggtgtggggtgctctgaggacgcctctaagctactccaggattatggactcgtcgtacgggggtgcctcgacctgcggtacttggccatgcgccaacggaacaatttattgtgtaacgggctatcgctgaagagccttgccgagacagtgttaaactttcctctagacaagagcctgctcctgcggtgcagcaattgggatgcagaaactctgacagaagatcaggtcatctacgccgctagagacgcgcagatatctgtggctttatttttgcacctcctgggctacccgttctcgcggaactcaccaggcgagaaaaatgatgatcacagtagttggcgaaaagtgctggaaaaatgtcaaggggtggtggacattcccttccggtctaaaggaatgtcccgcctgggggaggaggttaacggagaagctaccgaatctcagcagaaacctcgcaacaagaagtccaaaatggatggcatggtccctgggaaccaccagggcagagacccaagaaaacacaagaggaagccattgggcgtcgggtactcagcacgcaaatcccctctctatgacaattgcttcctccatgcccctgacggccagccactgtgtacttgcgacagaagaaaggcacaatggtacctggataagggtattggggaactggtgtcagaagaacctttcgtggtgaagcttaggtttgaaccagctggtcggccagagtctccaggcgactattacttgatggtgaaggaaaacctgtgtgtagtgtgcgggaaacgtgatagctacatccgcaagaatgttatcccccatgagtatcggaagcactttcccatcgagatgaaagaccataactcacacgacgtcttacttctgtgcaccagctgccacgccataagcaactactatgataaccacctcaagcaacaactagcaaaggaatttcaagctccgatagggagtgaggaaggcctccgactgctggaagaccctgaacgtcgccaagtacggtcaggtgccagagccctgcttaacgctgagtccctgcccacgcagcgtaaagaagaattgcttcaggcgctcagagagttctacaatacagacgtggtcacagaggagatgctccaggaagccgcaagcttggagacacgcatttccaacgagaactacgtgcctcacggactcaaagttgtacaatgtcatagtcagggcggactccgatctcttatgcagctggaaagcagatggcgccagcacttcttagactccatgcagccgaaacacctccctcaacaatggagcgtggatcataatcaccagaagctcctcagaaagtttggagaggatctgcctatccaactgagttag

SEQ ID NO: 332027 - DNA, 1491 bp, Artificial Sequence
  derived and/or modified sequence
atggcatccccatccggattatgcgtactagtgcgcctgcccaaactcatttgcggcggcaaaacgctgccccgaactctgctggacatcctagctgatggaacaattctcaaagtgggtgtggggtgctctgaagacgctagcaaattgctgcaggactacggccttgtcgttaggggctgcctggatctgaggtatctcgccatgcgccagagaaacaacctgctttgtaatggcctttcccttaaatctcttgcggagaccgtcctgaacttccctctcgacaagagtctgctgctaaggtgcagtaactgggacgccgagacactcaccgaggaccaggttatatatgccgcaagagatgcccaaatttccgtggctctgttcctccatctgctgggataccctttctcccggaactccccaggtgaaaagaatgatgatcacagcagctggaggaaagtcctggaaaagtgtcagggggtggtcgacattcctttccgatcaaagggcatgtctcggctgggagaagaagtgaacggcgaggctacagagtctcagcagaagcccagaaataagaaatccaagatggacggcatggtgcctgggaaccaccagggtagagatcccaggaaacacaaacgtaaaccgctgggtgtgggttattctgcacgcaaaagtcctttatatgataactgtttcctccacgctccggatggccagcccctgtgcacatgcgacagacggaaagcgcagtggtacttggacaaagggatcggagagttggtttcagaggaacccttcgttgtgaagcttagattcgaaccagcaggtcgcccagagagccccggcgactactacttaatggtcaaggagaacctgtgcgtagtttgcgggaaacgtgactcctacatccgtaagaacgtgatcccacatgaatacagaaaacactttcctatagagatgaaagaccataattcccacgacgtcctcctgttgtgtacctcctgccacgcaatctctaattattatgacaaccacctgaaacagcaactagccaaagagttccaggcccccataggctcagaagaggggttaagattactggaagacccggagagacgacaagtccgctcaggggcaagagctttacttaatgcagagtccctgcctacccaaagaaaagaggaactgctgcaggctctgcgcgagttttacaataccgacgtggtcaccgaggagatgcttcaggaagccgcgtcgctggaaacacggattagtaacgagaactatgtcccacacggactgaaggtggtgcagtgtcattcccagggtgggctgagatccctcatgcagctggagagccgttggagacagcattttctggattccatgcagccaaagcatctaccacagcagtggagcgttgaccacaatcatcagaaattgctgcgtaagttcggggaggacttacccattcagctcagctag

SEQ ID NO: 332028 - DNA, 1491 bp, Artificial Sequence
  derived and/or modified sequence
atggcctcgcctagcggtctgtgcgtactcgtccggcttcccaaactgatctgtggcggcaaaaccctgcccagaaccctgctggacatcctggcggacggcacgatactaaaggtgggagtgggttgcagtgaggacgcctccaagctcctccaagattatgggcttgtagtccgggggtgtttggaccttaggtatctagcaatgaggcagcggaacaatctgctgtgtaacggattgtctcttaaaagcttggcagaaactgttctgaattttccactggataagtctctcctgctgcgttgtagcaattgggacgcagagaccctgactgaagaccaagtcatctacgctgctagagacgctcagatcagtgtggctctgttccttcaccttctcgggtaccccttttcccggaacagcccaggcgagaaaaacgatgatcattcttcgtggagaaaagttctggaaaagtgccaaggtgtggtggacatcccatttagaagtaagggcatgagtaggctgggggaggaggtgaatggagaagctacagaaagccagcagaaaccacgcaataagaagagcaagatggacggcatggtaccagggaaccaccaggggcgtgatcccaggaaacacaagagaaagcctttgggtgttggctacagcgcgagaaagtcgcctctttatgacaactgttttctccacgcccccgatggtcagcccctctgcacgtgcgaccggaggaaggcccaatggtacctggataagggaattggtgagctggtatcagaagaaccattcgtggtgaaactgcgtttcgaaccagctggccggccagaaagtccaggagattattacctgatggtgaaagaaaacctgtgcgtcgtgtgcggcaaaagggacagctatataaggaagaatgttatccctcatgagtatcggaagcactttcccatcgagatgaaggatcacaatagtcatgatgtgttgcttctgtgtacatcctgccacgccattagtaactactatgataatcatctgaaacagcaacttgctaaagagtttcaggcccccataggtagcgaagagggcttacgactgttagaggatccagaacggaggcaggtgcgctctggagcccgtgctctgctgaacgcagagagtttgcctactcaacggaaggaggaacttttgcaagctctgagagagttctacaataccgatgtggtcacggaggaaatgctccaggaagcggcctccctggaaactcgaatttcaaatgagaattacgtgccccacgggctgaaagtggtccagtgtcacagccaggggggactccgatccttgatgcagctggaaagccgatggagacagcatttcctcgacagtatgcaaccaaaacacttgccgcagcagtggtctgtcgaccacaatcaccaaaagctgctgcgaaaattcggagaagatctccctatccagttgtcctag

SEQ ID NO: 332029 - DNA, 345 bp, Artificial Sequence
  derived and/or modified sequence
atggcctctcctagtggcctttgcgttctcgtaaggctgccgaagctcatctgcgggggaaaaacactacctcgcacactgctggatattttagctgatggcactattctgaaagtgggagtagggtgtagcgaagacgcatctaaactcctgcaggattacggcctagttgtgagaggttgcctggatcttagatatctggcaatgcgccagcggaataacttgctgtgcaacggtttgagtttaaaatcactggctgagacagtattgaatttcccgttggataagtctctactgcttcgttgctccaactgggacgcagaaaccctgaccgaggaccagtag

SEQ ID NO: 332030 - DNA, 1491 bp, Artificial Sequence
  derived and/or modified sequence
atggcctccccctctggcctctgtgtcctcgtcaggcttccgaagctgatttgcggagggaagacacttcctcggacactcttagatattctagctgacggcactattctgaaggtgggtgtagggtgcagtgaagacgcttccaagctgctgcaagactacgggctggtggtgcggggttgcctggaccttcgctatctagctatgcgccagaggaacaatcttctctgcaacggactttcccttaaatccttggctgagacagtcctgaactttcccttagataagagtctgctcttaagatgctcaaactgggatgctgagactctgaccgaagatcaggtcatctacgccgcgcgtgacgcgcagatttctgtggcactgtttctccacttgctgggctatccttttagcaggaattccccaggcgagaagaatgacgaccactcatcctggcgcaaagtactcgaaaagtgccagggcgtggtcgacattcctttcaggtccaagggcatgagcagactgggggaagaagtgaacggcgaggccacggagagccagcagaagccaagaaacaaaaagtcgaaaatggacgggatggtgccaggcaaccaccagggtagagacccgcgcaaacacaagcggaagcctctgggagtcgggtatagcgccaggaaaagccccttatacgataactgctttctgcacgcccctgacgggcagccattgtgcacgtgtgatcggagaaaagcccaatggtacctggataagggaattggggaacttgtgagcgaggagccttttgtcgttaagttgaggttcgaaccggctggtcggccggagagccctggtgattactacctgatggtcaaggagaacctgtgtgtggtttgtggcaaaagggactcttatataagaaaaaatgtcatcccgcatgaataccgtaagcactttccaattgagatgaaggaccacaattctcacgacgtactgcttctgtgcacatcatgtcacgcgattagcaattattatgataatcacctgaaacagcaacttgcaaaggagttccaggctcccatcgggagtgaagagggtctgcggctcctggaggatccagagcggcggcaagtccgcagtggggccagggccctgctcaatgctgagagcctgccaacccaaaggaaagaggagctcctccaggcgctgcgcgagttctataacacagacgtcgtaaccgaggaaatgctgcaggaggctgcttcactggaaacgcgaataagcaatgagaattatgtgcctcacggattgaaagttgtgcagtgccactcacagggcggcctgcggagcctcatgcagctggaaagtaggtggcgtcagcatttcctcgacagcatgcagcccaaacacctgccacagcaatggagtgtcgatcacaaccaccagaagctcttacgtaaatttggggaggacctgcctatccagctgtcttag

SEQ ID NO: 332031 - DNA, 1491 bp, Artificial Sequence
  derived and/or modified sequence
atggccagccccagcggcctgtgtgtgctggtgcggctgcccaagctgatctgtggcggcaagaccctgcccaggaccctgctggacatcctggctgatggcaccatcctgaaggtgggcgtgggctgcagtgaagatgccagcaagctgctgcaggactatggcctggtggtgcggggctgcctggacctgcgctacctggccatgaggcagaggaacaacctgctgtgcaatggcctgagcctgaagagcctggccgagaccgtgctgaacttccccctggacaagagcctgctgctgcgctgcagcaactgggatgctgagaccctgacagaggaccaggtgatctatgctgccagagatgcccagatctctgtggccctcttcctgcacctgctgggctaccccttcagcaggaacagccctggagagaagaatgatgaccacagctcctggaggaaggtgctggagaagtgccagggcgtggtggacatccccttccgcagcaagggcatgagccggctgggggaggaggtgaatggagaggccacagagagccagcagaagcccaggaacaagaagagcaagatggatggcatggtgcccggcaaccaccagggccgggaccccaggaagcacaagaggaagcccctgggcgtgggctacagcgccaggaagagccccctgtatgacaactgcttcctgcacgccccagatggccagcccctgtgcacctgtgacaggaggaaggcccagtggtacctggacaagggcattggagagctggtgtctgaggagccctttgtggtgaagctgcgctttgagcctgctggccggcctgagagccctggggactactacctgatggtgaaggagaacctgtgtgtggtgtgtgggaagagggacagctacatcaggaagaatgtcatcccccatgagtacaggaagcacttccccatcgagatgaaggaccacaacagccatgatgtgctgctgctgtgcaccagctgccacgccatcagcaactactatgacaaccacctgaagcagcagctggccaaggagttccaggcccccatcggcagcgaggagggcctgcggctgctggaggaccctgagcggcggcaggtgcgcagcggggcccgggccctgctgaatgctgagagcctgcccacccagaggaaggaggagctgctgcaggccctgcgggagttctacaacacagatgtggtgacagaggagatgctgcaggaggccgccagcctggagacccgcatcagcaatgaaaattatgtgccccacggcctgaaggtggtgcagtgccacagccagggcggcctgcggagcctgatgcagctggagagccgctggaggcagcacttcctggacagcatgcagcccaagcacctgccccagcagtggagcgtggaccacaaccaccagaagctgctgaggaagtttggagaggacctgcccatccagctgtcctag

SEQ ID NO: 332032 - DNA, 345 bp, Artificial Sequence
  derived and/or modified sequence
atggccagccccagcggcctgtgtgtgctggtgcggctgcccaagctgatctgtggcggcaagaccctgcccaggaccctgctggacatcctggctgatggcaccatcctgaaggtgggcgtgggctgcagtgaagatgccagcaagctgctgcaggactatggcctggtggtgcggggctgcctggacctgcgctacctggccatgaggcagaggaacaacctgctgtgcaatggcctgagcctgaagagcctggccgagaccgtgctgaacttccccctggacaagagcctgctgctgcgctgcagcaactgggatgctgagaccctgacagaggaccagtag

SEQ ID NO: 332033 - DNA, 1491 bp, Artificial Sequence
  derived and/or modified sequence
atggccagccccagcggcctgtgcgtgctggtgcggctgcccaagctcatttgtggaggaaaaactctccccagaaccctcctcgatatactggccgatgggacaattctgaaagtgggggtgggctgtagcgaagacgcttctaaattgcttcaggattatggtttagttgttaggggctgtttagaccttagatacctggcaatgcgacagagaaacaatctgttatgcaacggcctgtcattgaaatctctggcagagaccgtactgaatttcccactcgacaagagtctcttgctgcgctgttcgaattgggacgccgagaccctgacggaagaccaggtgatatatgcggccagagacgcccagatctcggtggctctgttcctacacctgttgggttacccttttagtcgcaattcacctggggaaaagaacgacgaccacagttcttggaggaaggtgctggaaaagtgtcagggtgtggttgacatcccatttcggtccaaagggatgagcaggcttggggaggaggtcaacggagaggccacagaaagccagcagaagccccgcaataagaagtcaaaaatggatgggatggttccagggaaccatcaggggcgggaccccagaaaacacaagagaaagcccctgggtgttggatatagtgctagaaaaagcccgctgtatgacaactgctttctgcatgctccagacgggcagccattatgcacctgtgatagaaggaaagcccagtggtacttagataaagggattggcgagcttgtttccgaagaaccattcgtggttaagctgagattcgagcccgctgggcggccggagtcacccggcgactactatttaatggtcaaagagaatctttgtgttgtctgtgggaaacgcgattcttacatacggaagaacgtcattccgcatgagtaccgtaagcactttcctatcgagatgaaagaccacaattcacacgacgtgctcctactatgcaccagttgtcacgcgatctccaattactatgataatcatctgaaacagcagctagcaaaagaattccaggcacctatcggtagcgaagaagggttgcggttgctggaggaccctgaacgccgacaagtgagaagcggagcccgggccctccttaatgctgagagtttgcccacccaaaggaaggaagaattactgcaggcactcagggagttttataacacagacgtcgtgacagaagagatgctacaagaagccgcgtcccttgaaactcggattagcaatgagaattacgtcccacacggcctgaaagtggttcagtgccatagccaggggggactgcgctccctgatgcagctggagtcaagatggagacagcatttcctggactcaatgcagccaaaacacctgccccagcagtggagcgtggatcataaccaccagaagcttctaaggaagttcggggaggatttgccaatccagctctcctag

SEQ ID NO: 332034 - DNA, 1491 bp, Artificial Sequence
  derived and/or modified sequence
atggccagccccagcggcctgtgcgtgctggtgcggctgcccaagctaatttgtggcggtaagacccttcccagaaccctccttgatattcttgctgacggcacgattctcaaggtgggagtgggctgcagtgaagatgcctccaagctgctccaggattacgggctcgtcgtgcgagggtgtctagacctgcggtatcttgcaatgagacagagaaacaatcttctgtgtaacggcctgtcattgaagtcccttgccgagactgttctaaatttccctctagataagagtcttctactgcggtgctctaactgggatgccgaaactctgacagaggatcaggtaatttatgccgccagagatgcccaaatctccgtggcgctcttcctacatctcctggggtacccattttcacggaatagtcctggcgagaagaatgacgaccactcatcctggcggaaagtcctcgaaaaatgtcagggggtggtggatatcccattcaggtcaaaaggtatgagccggcttggagaagaagttaacggggaggcaactgagtcgcagcagaagcctaggaacaagaaatctaagatggatggcatggtgcccgggaatcaccagggtcgagaccccagaaagcacaaaagaaaaccactgggagtggggtacagcgcacgaaaatcaccattatatgataactgcttcctgcatgctccagacggtcagcctctgtgtacctgcgacaggcgaaaggcgcagtggtacttggacaagggcatcggtgaactagtaagcgaagagccatttgttgttaaattaaggtttgaacctgccggccgcccagagagcccaggcgactattacctaatggtgaaagagaacctctgtgtggtgtgcggcaagagggattcctacattcggaaaaacgtgatcccccatgaataccgcaagcacttccctatagagatgaaggaccataacagccatgacgtattgctcctttgtactagttgccacgcgattagcaattattatgacaatcatttgaagcagcaactggcaaaagaattccaggcccctatcggatccgaagaagggctgcgtctgcttgaggaccccgagagacggcaggtgcgctccggagcgcgagccctcctgaacgccgaatctctgccaacccaacgaaaggaggagctcctgcaggctctgcgtgagttttataacactgatgtagtgaccgaggaaatgctgcaggaagctgcgtcactcgagaccagaatctccaacgaaaattacgtgccacacgggttgaaagtcgtgcagtgtcattctcagggtggactgagaagcctgatgcaattggaatccagatggcggcagcactttctcgattctatgcagccgaaacatctgccccagcagtggtccgtcgatcacaatcatcagaagctgctaaggaagttcggggaagacctgccaatccagttaagctag

SEQ ID NO: 332035 - DNA, 1491 bp, Artificial Sequence
  derived and/or modified sequence
atggccagccccagcggcctgtgcgtgctggtgcggctgcccaagttgatttgcggtggcaaaacactgccccgcaccctactggacatcctcgcggacggtaccattctcaaagtaggcgtcggctgctcggaagacgccagcaagcttctccaggattacgggttggtggtccgcgggtgcctggatctgagatatctggcaatgcggcagcgtaacaatctcttatgcaatggattgtccctcaagagcctcgccgagacagtgttgaattttcccctggacaagtctttgctgctgcggtgctcaaattgggacgccgagacccttacagaggatcaggtgatttacgccgcgcgggacgctcaaattagcgtcgctctgtttctgcatttgctcggatatcccttttccaggaacagtcctggagagaaaaacgacgatcactcttcgtggaggaaggtgttggaaaaatgccagggcgtggtggatattccgttcaggtccaaaggcatgagcaggttaggcgaggaagtcaacggagaggcaaccgaaagccaacagaagcctcggaataagaagtccaaaatggatggaatggtacccgggaaccaccagggccgcgacccacgcaagcacaaaaggaagccacttggggtgggctatagtgcacgaaaaagtcccctttacgacaattgttttttgcacgctcccgatggtcagcccctgtgtacatgtgatcggagaaaggcacagtggtacctagacaaggggattggcgaactcgtctctgaggaaccgttcgtggttaaactgaggttcgagcctgctggtaggcctgaatcccctggcgattattatctgatggtaaaagagaatctatgcgttgtctgcgggaaacgggatagttacataaggaagaacgtcatcccacacgagtatagaaaacacttcccaatcgagatgaaggatcacaattcccatgatgtcctgttgctgtgtaccagctgtcatgcgatctctaattattatgataatcacctaaaacaacagcttgcaaaggagttccaagctcccattggcagtgaggaaggacttagacttcttgaggatcccgaacgacgccaagtccggtcaggtgctcgggctctactcaacgctgagtcgctgcctacgcaacgcaaggaggagctccttcaggcgctaagggaattttacaatactgacgtagtcacagaggagatgctccaggaggccgccagcctggaaactcggatatctaatgagaattatgtcccccatgggttgaaagtagtacagtgccattctcaggggggcctccgctctttaatgcagttggagtctcgctggaggcagcattttctggattctatgcagccaaaacatctgccccagcagtggagcgtggaccacaaccaccagaaacttctgcgaaagttcggcgaagatttgcccatccagttgtcttag

SEQ ID NO: 332036 - DNA, 1491 bp, Artificial Sequence
  derived and/or modified sequence
atggccagccccagcggcctgtgcgtgctggtgcggctgcccaagctaatttgtggaggcaagacactgccaagaacactcttagatatcctggctgacggaaccatccttaaagtgggggttggctgctcagaggatgcttcgaagctgctgcaggattatggcctggtcgtgcggggatgtttggatctgaggtatctggccatgcgccagcggaataatctgctgtgtaacggcctgtccctcaaatcgcttgcagagactgtgctgaattttccactcgataaatctctgctgcttcggtgttccaattgggacgccgaaacacttactgaagaccaggttatatacgcagccagagacgcccagatcagtgtagccctctttctgcatctattaggctaccctttctctcggaatagtcccggtgagaagaacgatgaccattcatcgtggcgcaaagttctcgagaagtgccagggcgtggtggatatcccctttaggtctaagggcatgtcaaggctcggagaagaggtgaacggtgaagctacagaatctcagcagaagcctcggaataaaaagtccaaaatggatggcatggtgccaggcaaccatcaaggaagggaccccaggaagcataagagaaagccgctaggagtgggttactctgcaaggaaaagccccctctatgacaattgctttctccatgcaccagacggccagcccctgtgtacctgcgatcggcgaaaggcgcagtggtacctcgataagggtatcggggaattagtgtccgaagagccatttgtggtcaagttacgctttgagcccgctggcagacccgagtcacccggagattactacctgatggtgaaagagaatctgtgtgttgtgtgtggaaaaagggactcatacattaggaagaacgtgatacctcatgaatataggaagcatttcccaatcgagatgaaggaccataactcccacgatgtcttgcttctctgcacgagttgtcatgcaatttccaattattatgacaatcatttgaagcaacagcttgctaaggaatttcaggcacctataggcagtgaggagggactcaggctccttgaggatcctgaaagacggcaggtcagatctggagctagagccttgttaaatgccgaaagccttccaacccagaggaaggaagaactgctgcaggctcttagagaattctataacacggatgtggttaccgaagaaatgttacaggaagccgcgtcattagagactcgtatctccaatgaaaattacgtaccgcacgggctgaaagtggtgcagtgtcactcccagggcggcctgcggtccttaatgcagctggaaagtcgttggcgtcagcactttctcgatagtatgcagccaaagcacttaccccaacagtggtctgtggaccataaccaccagaagcttttacgcaagttcggcgaagatctgccaattcagttgagttag

SEQ ID NO: 332037 - DNA, 345 bp, Artificial Sequence
  derived and/or modified sequence
atggccagccccagcggcctgtgcgtgctggtgcggctgcccaagctgatctgcgggggtaagactctgccccgcaccctcctggatattctggcagacggaacaatcctgaaggtgggcgttggctgttctgaagatgcctctaagcttttgcaagactatggattagtcgtgagaggttgtctcgatttgcgatatctggccatgaggcagaggaataatctcctgtgtaatggcctgagcctgaagagcctggctgaaactgtgctgaactttccccttgacaaatctttactgctccgctgttcgaactgggacgccgagaccttaacggaagaccagtag

SEQ ID NO: 332038 - DNA, 1491 bp, Artificial Sequence
  derived and/or modified sequence
atggccagccccagcggcctgtgcgtgctggtgcggctgcccaagttgatctgcgggggcaaaacacttccaaggacgctcctggatattctcgcagacggaactattctaaaagtgggagtgggatgtagcgaagacgcaagcaaactacttcaggactatggactggttgtccgggggtgcctggacctgagatatttggccatgagacagagaaataacttgttatgtaacggcctcagtcttaaatctctggctgagaccgtgttgaacttcccactcgacaagtccctcttgctgcgttgctccaactgggacgccgagaccctcaccgaggaccaagtcatctacgctgcgcgcgatgcccagatctcagtcgccttgttccttcatctgctcggataccccttcagcaggaattcccctggggagaagaatgatgaccattcctcttggaggaaagtcctcgaaaagtgccagggggtcgtggacattccctttaggtcaaaaggcatgtcccgattgggcgaagaggtcaacggagaagccaccgaatctcagcaaaaaccaaggaacaaaaagtctaagatggatgggatggtgccgggcaatcatcagggccgggaccctaggaaacataagcggaagcccctgggcgtcggatattccgcacggaaaagcccactgtatgacaattgtttcctacacgcgccggatgggcaacccctgtgtacgtgcgacagaaggaaggcccaatggtatttggacaagggcatcggggaactggtgtccgaagaaccctttgtagttaagctgagattcgagccagccggcagacctgagtccccaggcgattattatctgatggtcaaggagaatctgtgcgttgtatgcggaaaacgagatagttatatccgtaagaacgtgattccgcacgagtatcgcaagcactttcctattgagatgaaggatcacaactctcacgatgtactcctgttatgtactagttgtcacgcaatcagcaattattatgacaatcaccttaagcaacagctggctaaagaattccaggcaccgatcgggagtgaggaaggcctgcggctgcttgaagacccggaacggcgacaggttagatctggggctcgagccttattgaacgccgaatctctcccaactcagagaaaggaggaactgcttcaggcgctacgggagttttacaacacagacgtggtgaccgaggagatgctgcaggaggcagccagtctggaaacgcgcatttctaatgaaaactacgttccccacggcttgaaggtggttcagtgtcattcccagggtgggttgcgatcattgatgcaactggagtcgaggtggagacagcacttcctggatagcatgcagcccaaacacctcccccagcagtggtctgtcgaccataatcaccagaaactgctacgtaaatttggagaggacttaccaattcagctatcatag

SEQ ID NO: 332039 - DNA, 1491 bp, Artificial Sequence
  derived and/or modified sequence
atggcctctccctctggactctgtgtcctggttaggctcccaaagttaatttgtggcggaaaaaccttgcccaggacactgctcgatattctggcagatggaacgatccttaaagtaggggtgggctgctcggaggatgccagtaagctccttcaggattacggtttggtggtgagggggtgtctggacctgcggtacctcgcgatgagacagcgaaataatttactgtgcaacgggttgtcactaaagagcctggccgagacagtgctcaatttcccccttgacaagtcactcttgctgcgctgctctaattgggatgctgagaccctcactgaggaccaggtgatttacgcagccagagacgcacagatatctgtggctctcttcctgcatctgcttggatacccgttttcaaggaactcgcctggagaaaaaaatgatgaccacagcagctggcgcaaggttctggaaaaatgtcagggggtcgttgacatcccttttagaagcaagggtatgtcccggctgggagaagaagtgaacggcgaagcgacagaatcgcagcagaaaccgcgaaataagaaaagcaaaatggacggcatggttcccggtaatcaccagggccgagacccacggaaacacaaacggaaaccactgggcgtgggatatagtgccaggaaaagccctctgtacgataattgttttcttcacgcaccggacgggcagcccctgtgcacctgcgaccggcgtaaagcacaatggtatctcgataaagggatcggagagctggtgtctgaagagccattcgttgtgaaactgcgcttcgaacccgctggcagaccggagtctccgggtgactactacctgatggtgaaagaaaacttatgcgttgtgtgcggtaaaagagatagctacattcggaaaaatgtgatcccacatgagtatcgaaaacatttcccaatcgagatgaaggatcacaactcccacgacgtgctgctgttgtgcacttcctgccacgctatttctaactattatgacaatcacctcaaacagcaactggctaaggaatttcaggcccctatcggaagtgaagagggccttcgcctgctggaggatccagagcgtagacaggtcaggtccggtgccagggcgctgctaaacgcagagagtctgcctacacagaggaaagaagaattattacaggcgctgcgcgaattctacaataccgacgtggttactgaagagatgttacaggaagccgcaagcctcgagaccagaatctccaacgagaattatgtgccccacggactgaaagtggtgcaatgtcactcacagggaggtttgcggtctttaatgcaactagaatcgagatggcgacagcactttctcgactcaatgcagccaaagcacctcccacaacagtggtcagtggatcacaaccaccagaaacttctacgcaaattcggagaagacttgcccatacaactaagctag

SEQ ID NO: 332040 - DNA, 1491 bp, Artificial Sequence
  derived and/or modified sequence
atggcctcaccatctggcctttgcgttctcgttcgcctccccaaactcatttgcggaggaaaaaccctgccccgaaccctcctcgatatactcgccgacggaaccatactcaaagtcggcgtgggctgcagcgaagatgcatccaaactactccaggattacggcctggtagttagggggtgcttggaccttagatacctcgccatgcgacagcgaaataaccttctgtgcaatggcctcagtctgaaaagccttgcagagaccgtgctcaattttcctttggataagtcactattgctccgctgcagcaattgggacgctgaaactctgactgaggaccaagtgatctacgccgcaagagacgcccagatctccgtggcactcttcttgcacctgctaggatacccttttagtcgcaactctcccggtgagaaaaatgacgaccacagctcctggcgcaaggttctcgagaagtgtcaaggtgtggtcgacataccttttaggtccaaggggatgtccagactcggagaggaggtcaacggtgaagccaccgagtctcagcagaaaccacggaacaaaaaaagcaaaatggatggaatggtgcccggtaaccatcaggggcgtgaccctaggaagcacaagcgcaaacctcttggcgtcggctactccgcccgtaaatcacccctgtacgataattgtttcctgcacgcgcctgacgggcagcctttgtgtacatgcgatcggagaaaggcacagtggtatcttgacaaagggatcggggaactggtgtccgaggagcctttcgttgtgaaactccgcttcgagcctgccggtcggcctgagagcccaggggactattacctgatggtgaaggagaatttatgtgtcgtgtgtgggaagagagattcatacattaggaagaatgtgatccctcatgagtatcgcaagcacttcccaatcgaaatgaaggaccacaactcacacgatgtacttctgctttgcacatcgtgccacgccatctctaattactacgataatcacttaaagcagcagcttgcgaaagaatttcaggccccaataggaagcgaggagggcttgcgactcttagaggaccctgaaagacggcaagtgaggagtggcgctcgggctctgctaaatgctgaaagcctgcccacccagagaaaagaggagcttctgcaagccctacgtgagttttataacaccgatgttgtcacagaagagatgttgcaggaggctgcatcgctcgagacccggattagcaacgaaaattacgttccccacggattaaaggtggtgcagtgccatagccagggtggactgcggtcattaatgcagctggaaagtagatggcgccaacatttcctggattcaatgcagccaaaacaccttcctcagcagtggagcgtggaccacaaccatcaaaaattgctcagaaagtttggagaggatctgcccattcaactgtcctag

SEQ ID NO: 332041 - DNA, 1491 bp, Artificial Sequence
  derived and/or modified sequence
atggctagcccatctggactttgtgttcttgtgaggctgcccaaactgatctgcggcggaaaaacgctgcctaggactctgttagatatccttgccgatggcactattttgaaagtgggcgttgggtgctctgaggatgcctcaaaactcctgcaggactacggcttagtggttcgcggatgcctggacctgagatacttagctatgaggcagagaaataacttattatgtaacggattatcgcttaagtctctggccgaaactgttctcaactttccgctcgataagagtctattgctgcggtgttccaactgggatgccgaaaccctcaccgaggatcaggtgatttatgcagcccgagatgctcagattagtgtagccttatttttacacctgctgggttaccctttttctcgtaattcacctggcgagaagaatgacgaccactcaagttggagaaaggtattagagaagtgtcagggcgtggtggatataccctttagatctaaagggatgtcacggctcggagaagaggttaacggagaagctacggagagccagcaaaaacccaggaacaagaaaagtaaaatggacggcatggtgcctggtaaccaccaagggcgtgaccctcgtaaacataagcggaagcccttgggcgtcgggtacagcgctagaaaatcacctttatacgacaattgctttttgcatgctccagacggccagcccctttgcacgtgcgacagacgaaaggcccagtggtaccttgataagggcattggtgagttggtatctgaagagccattcgtggtgaagctgaggttcgaacctgcgggacgtccagagtcacctggcgactactatctcatggttaaagaaaatctgtgtgtcgtgtgtgggaaaagggactcatacattaggaagaatgtgattcctcacgaatataggaaacacttcccgattgagatgaaggaccataatagtcatgatgtattgctcctctgtacaagctgtcacgcaatttccaactactacgataatcatctgaaacagcagctggctaaggaattccaggctcctataggatcagaggagggactgaggctgcttgaagatccagagcggagacaggttcgctctggcgcacgcgcactcttgaatgccgagtcactacccacacaaagaaaagaggaactgctgcaggcgctccgtgagttctacaacactgatgttgtgaccgaggagatgttgcaagaggccgcatctttggagacaaggatttccaacgagaactacgtgcctcacggcctgaaagtggtgcaatgtcattctcagggcggtctccggtctctgatgcaactagagagccggtggaggcagcacttcctggacagcatgcagcccaaacacctcccgcagcagtggagtgtggaccacaatcaccagaaattactgaggaagtttggtgaggatctgccaatccaactctcttag

SEQ ID NO: 332042 - DNA, 1491 bp, Artificial Sequence
  derived and/or modified sequence
atggcaagcccttctggactgtgcgtgctggtgagactgcccaaattgatttgcggtggaaaaaccctgccccgaacactgctagacatccttgctgacggaaccatcctgaaggttggcgtgggttgttccgaggatgccagcaaacttcttcaagactatggactggttgtgagggggtgtcttgatctcaggtacctagccatgcgtcagcgaaacaatctgctttgcaacgggctttcattaaagagtctggccgagaccgtacttaatttccccttggataagagtctcctgttgcggtgcagtaattgggacgccgagaccctaaccgaagatcaagttatctacgccgcacgggacgcccaaatctccgtggccctgtttttacaccttctgggctatcccttctcacgaaactcacccggtgaaaagaacgatgatcacagctcatggcgtaaagtgctcgaaaagtgtcagggtgttgtagacatccccttcaggagcaaagggatgtcccgcctcggcgaagaggtgaacggcgaggcaacagagagtcagcagaagcctcggaataagaagtcaaagatggatggcatggtgccaggcaaccatcagggtcgcgaccccaggaagcataagcgaaagccccttggggttggctactctgctcgcaagtcacctctctatgataactgctttctgcatgctcccgatgggcagcccctttgtacctgtgaccggcgaaaggctcaatggtatctcgacaagggcatcggtgagctggtatctgaggaaccttttgtagtgaagctgagattcgagccagctgggagacctgaatcaccaggcgactattatttgatggtcaaagaaaacctttgtgttgtgtgcggaaaaagagactcttacataaggaagaatgtcattccccacgaataccgtaagcattttcctattgaaatgaaagatcacaattcccacgatgtcttactgttgtgcacaagctgccatgcaatcagcaactactacgataaccatctgaagcaacagctggccaaggaattccaggcaccaattggttcagaggaaggcttgcgcttgctggaagatcccgagcgacgccaggtcaggtccggcgcacgtgccctgctgaatgccgaatctctgccaacacagcggaaagaagagctgttgcaggctttgagggagttttacaacacagatgtcgtgacagaagagatgctccaggaggccgcatcgttggagacacgcatatcgaatgagaactacgttccacatgggctgaaggttgtccagtgtcacagccagggtggtctgcggtcactaatgcagttggaatcaaggtggagacagcacttcttggattccatgcagccaaaacatcttcctcagcaatggagcgtggaccacaatcaccaaaagctgctgcgtaaatttggcgaggacctccccattcaacttagttag

SEQ ID NO: 332043 - DNA, 345 bp, Artificial Sequence
  derived and/or modified sequence
atggcctcccctagcggcctctgcgtgctggtgcgcctgcccaagctgatatgcggagggaagaccctgcctaggacgctgctggatattctggctgacgggacaatcctcaaagttggcgtggggtgcagcgaagatgcttcaaaactccttcaagactacggactggtagtgcgcggttgtcttgatctgcgttatttggctatgcggcagcgtaataacctcctctgtaacgggctctcactcaaatctctggctgagaccgtgctcaacttccctctggataaaagtctcctattaaggtgctcaaattgggatgccgagactcttaccgaagatcagtag

SEQ ID NO: 332044 - DNA, 1491 bp, Artificial Sequence
  derived and/or modified sequence
atggctagcccgtctggcttgtgtgtgctcgtccggctgcctaaactgatctgcggcggaaaaacacttccaagaaccctgctggatattctggcggatggaacaatcctcaaggtgggagttggatgtagcgaagatgcgtcaaagttgctgcaggactacggactggtcgttaggggttgtctggacctccggtacctcgccatgagacagagaaacaacctgttatgcaacggactgtctttaaaatcccttgccgagacagtgctgaattttcctctggacaagtctttgctcctgagatgcagcaattgggatgcagagaccctgaccgaagaccaggtgatctacgctgctagggatgctcagatctctgttgctctctttttacacctactgggctatcccttctcccgcaattccccgggtgaaaaaaatgacgatcactcctcttggcggaaggtcctcgagaagtgccagggcgtggttgacatacctttccgatctaagggcatgagccggctgggagaggaagttaacggggaggccacagagagtcaacagaaaccaagaaataagaagagtaaaatggacggaatggtccccggaaatcatcagggccgagatcctcgaaagcataagcggaaacctctgggagtgggctattcggccagaaaatctccactctatgacaattgctttctgcatgcacccgacggccagcccctgtgtacctgcgatcgtcggaaggcccaatggtatcttgacaaaggaatcggtgaactggtatctgaagagccattcgtggtgaaactcagatttgagccggcaggacggcctgagagcccaggggactattacctgatggtcaaggagaacctgtgcgtcgtgtgtgggaagcgcgactcgtacattaggaaaaacgtcatcccacacgaatacaggaaacacttccctattgaaatgaaagatcataactcccatgatgtgctactcctttgtacctcatgccatgccattagcaactactatgacaaccatttgaaacaacaactcgctaaagagtttcaagccccaatcggctcggaagagggccttcgactgctcgaagaccccgagcgaaggcaagttcgtagcggagccagggcccttttaaacgccgaatcgttgcctacacagaggaaagaagagcttctgcaggcgctgagagaattctataacacagatgttgtgactgaggagatgctgcaggaggcagccagcctagagacccggatttccaatgagaactatgtcccccatggcttaaaggtggtgcagtgccactcccaaggaggcctcaggtctttgatgcagctggaatctcggtggcggcagcactttttagactctatgcaaccgaagcacctgccccagcagtggtctgtagatcataaccaccaaaaactcctccggaagttcggcgaagacctcccaattcagctgagttag

SEQ ID NO: 332045 - protein, 176 aa, Artificial Sequence
  derived and/or modified sequence
MNESKPGDSQNLACVFCRKHDDCPNKYGEKKTKEKWNLTVHYYCLLMSSGIWQRGKEEEGVYGFLIEDIRKEVNRASKLKCCVCKKNGASIGCVAPRCKRSYHFPCGLQRECIFQFTGNFASFCWDHRPVQIITSNNYRESLPCTICLEFIEPIPSYNILRSPCCKNAWFHRDCLQ

SEQ ID NO: 332046 - protein, 121 aa, Artificial Sequence
  derived and/or modified sequence
MNESKPGDSQNLACVFCRKHDDCPNKYGEKKTKEKWNLTVHYYCLLMSSGIWQRGKEEEGVYGFLIEDIRKEVNRASKLKCCVCKKNGASIGCVAPRCKRSYHFPCGLQRECIFQFTGNFA

SEQ ID NO: 332047 - protein, 131 aa, Artificial Sequence
  derived and/or modified sequence
MNESKPGDSQNLACVFCRKHDDCPNKYGEKKTKEKWNLTVHYYCLLMSSGIWQRGKEEEGVYGFLIEDIRKEVNRASKLKCCVCKKNGASIGCVAPRCKRSYHFPCGLQRECIFQFTGNFASFCWDHRPVQ

SEQ ID NO: 332048 - protein, 79 aa, Artificial Sequence
  derived and/or modified sequence
MNESKPGDSQNLACVFCRKHDDCPNKYGEKKTKEKWNLTVHYYCLLMSSGIWQRGKEEEGVYGFLIEDIRKEVNRASKL

SEQ ID NO: 332049 - DNA, 531 bp, Artificial Sequence
  derived and/or modified sequence
atgaacgagagcaagcccggcgacagccagaacctggcctgcgtgttctgcagaaagcacgacgactgccccaacaagtacggcgagaagaagaccaaggagaagtggaacctgaccgtgcactactactgcctgctgatgagcagcggcatctggcagagaggcaaggaggaggagggcgtgtacggcttcctgatcgaggacatcagaaaggaggtgaacagagccagcaagctgaagtgctgcgtgtgcaagaagaacggcgccagcatcggctgcgtggcccccagatgcaagagaagctaccacttcccctgcggcctgcagagagagtgcatcttccagttcaccggcaacttcgccagcttctgctgggaccacagacccgtgcagatcatcaccagcaacaactacagagagagcctgccctgcaccatctgcctggagttcatcgagcccatccccagctacaacatcctgagaagcccctgctgcaagaacgcctggttccacagagactgcctgcagtag

SEQ ID NO: 332050 - DNA, 366 bp, Artificial Sequence
  derived and/or modified sequence
atgaacgagagcaagcccggcgacagccagaacctggcctgcgtgttctgcagaaagcacgacgactgccccaacaagtacggcgagaagaagaccaaggagaagtggaacctgaccgtgcactactactgcctgctgatgagcagcggcatctggcagagaggcaaggaggaggagggcgtgtacggcttcctgatcgaggacatcagaaaggaggtgaacagagccagcaagctgaagtgctgcgtgtgcaagaagaacggcgccagcatcggctgcgtggcccccagatgcaagagaagctaccacttcccctgcggcctgcagagagagtgcatcttccagttcaccggcaacttcgcctag

SEQ ID NO: 332051 - DNA, 396 bp, Artificial Sequence
  derived and/or modified sequence
atgaacgagagcaagcccggcgacagccagaacctggcctgcgtgttctgcagaaagcacgacgactgccccaacaagtacggcgagaagaagaccaaggagaagtggaacctgaccgtgcactactactgcctgctgatgagcagcggcatctggcagagaggcaaggaggaggagggcgtgtacggcttcctgatcgaggacatcagaaaggaggtgaacagagccagcaagctgaagtgctgcgtgtgcaagaagaacggcgccagcatcggctgcgtggcccccagatgcaagagaagctaccacttcccctgcggcctgcagagagagtgcatcttccagttcaccggcaacttcgccagcttctgctgggaccacagacccgtgcagtag

SEQ ID NO: 332052 - DNA, 240 bp, Artificial Sequence
  derived and/or modified sequence
atgaacgagagcaagcccggcgacagccagaacctggcctgcgtgttctgcagaaagcacgacgactgccccaacaagtacggcgagaagaagaccaaggagaagtggaacctgaccgtgcactactactgcctgctgatgagcagcggcatctggcagagaggcaaggaggaggagggcgtgtacggcttcctgatcgaggacatcagaaaggaggtgaacagagccagcaagctgtag

SEQ ID NO: 332053 - DNA, 531 bp, Artificial Sequence
  derived and/or modified sequence
atgaatgaatccaaacctggcgatagtcagaacctggcttgcgtgttctgccggaagcacgacgactgcccaaataagtatggggaaaaaaaaactaaagaaaaatggaacctgacggtgcactactactgtctgctcatgtctagcggaatctggcagagggggaaagaagaagagggagtctacggctttctgatcgaagacattcggaaagaggtcaaccgcgcctccaaactgaagtgttgcgtttgtaagaagaacggtgcgagtataggatgtgtcgctcccagatgtaaacggtcataccatttcccatgcggactacaacgtgagtgcatttttcaatttactggtaactttgccagtttctgctgggatcatagacctgtgcagattatcacctccaataattaccgagagagtttgccatgtacaatctgcctggagtttatagagcccataccatcttataacatcctcaggtccccatgctgtaaaaacgcttggtttcaccgggactgcctacagtag

SEQ ID NO: 332054 - DNA, 366 bp, Artificial Sequence
  derived and/or modified sequence
atgaatgagagcaagccgggtgactcccagaatctcgcatgtgtgttctgtagaaagcatgacgactgccctaacaagtatggagagaaaaagacaaaagagaagtggaatctcactgtgcattattactgcctgctcatgagctcgggcatttggcagcgggggaaagaagaggagggcgtgtacggcttcctgatcgaggatatccgaaaagaggtgaaccgcgccagtaaactcaaatgttgtgtgtgtaaaaaaaatggcgcatccatcgggtgtgtggccccacgctgcaagaggagctatcactttccgtgcggtcttcagagggagtgcatctttcaatttacagggaattttgcttag

SEQ ID NO: 332055 - DNA, 396 bp, Artificial Sequence
  derived and/or modified sequence
atgaatgagtccaagcctggagacagccagaacttggcttgcgtcttttgtaggaaacacgatgattgtcctaacaagtatggagaaaaaaaaaccaaggagaagtggaacctgactgtgcattactattgtcttcttatgtccagtggaatttggcaacgggggaaggaagaggagggggtctacggctttctaattgaggacattagaaaagaagtgaaccgggcgagcaaactgaagtgctgtgtatgtaaaaagaacggcgcgagcattggctgcgtggctccccgatgcaagaggtcgtatcatttcccttgtgggctgcagcgggaatgtatattccagttcaccggcaattttgcatctttctgctgggatcatcgccctgtgcaatag

SEQ ID NO: 332056 - DNA, 240 bp, Artificial Sequence
  derived and/or modified sequence
atgaacgagtctaagccaggcgacagtcagaatttggcatgcgtgttttgccgaaagcatgatgattgcccaaacaagtacggcgagaaaaaaaccaaagaaaaatggaacttaactgtacattattactgcctgctcatgagttctggtatttggcagcggggaaaggaagaagagggcgtctacggattcttaattgaggacatccggaaggaagtcaacagggcgtcgaagctgtag

SEQ ID NO: 332057 - DNA, 531 bp, Artificial Sequence
  derived and/or modified sequence
atgaatgaaagcaagccaggggacagccagaacctggcctgtgtgttctgcaggaagcatgatgactgccccaacaagtatggagagaagaagaccaaggagaagtggaacctgactgtgcactactactgcctgctgatgagcagcggcatctggcagaggggcaaggaggaggagggcgtgtatggcttcctgattgaggacatcaggaaggaggtgaacagagccagcaagctgaagtgctgcgtgtgcaagaagaatggagccagcatcggctgtgtggccccccgctgcaagaggagctaccacttcccctgtggcctgcagcgggagtgcatcttccagttcaccggcaactttgccagcttctgctgggaccacaggcctgtgcagatcatcaccagcaacaactaccgggagagcctgccctgcaccatctgcctggagttcatcgagcccatccccagctacaacatcctgcggagcccctgctgcaagaatgcctggttccaccgggactgcctgcagtag

SEQ ID NO: 332058 - DNA, 366 bp, Artificial Sequence
  derived and/or modified sequence
atgaatgaaagcaagccaggggacagccagaacctggcctgtgtgttctgcaggaagcatgatgactgccccaacaagtatggagagaagaagaccaaggagaagtggaacctgactgtgcactactactgcctgctgatgagcagcggcatctggcagaggggcaaggaggaggagggcgtgtatggcttcctgattgaggacatcaggaaggaggtgaacagagccagcaagctgaagtgctgcgtgtgcaagaagaatggagccagcatcggctgtgtggccccccgctgcaagaggagctaccacttcccctgtggcctgcagcgggagtgcatcttccagttcaccggcaactttgcctag

SEQ ID NO: 332059 - DNA, 396 bp, Artificial Sequence
  derived and/or modified sequence
atgaatgaaagcaagccaggggacagccagaacctggcctgtgtgttctgcaggaagcatgatgactgccccaacaagtatggagagaagaagaccaaggagaagtggaacctgactgtgcactactactgcctgctgatgagcagcggcatctggcagaggggcaaggaggaggagggcgtgtatggcttcctgattgaggacatcaggaaggaggtgaacagagccagcaagctgaagtgctgcgtgtgcaagaagaatggagccagcatcggctgtgtggccccccgctgcaagaggagctaccacttcccctgtggcctgcagcgggagtgcatcttccagttcaccggcaactttgccagcttctgctgggaccacaggcctgtgcagtag

SEQ ID NO: 332060 - DNA, 240 bp, Artificial Sequence
  derived and/or modified sequence
atgaatgaaagcaagccaggggacagccagaacctggcctgtgtgttctgcaggaagcatgatgactgccccaacaagtatggagagaagaagaccaaggagaagtggaacctgactgtgcactactactgcctgctgatgagcagcggcatctggcagaggggcaaggaggaggagggcgtgtatggcttcctgattgaggacatcaggaaggaggtgaacagagccagcaagctgtag

SEQ ID NO: 332061 - DNA, 531 bp, Artificial Sequence
  derived and/or modified sequence
atgaacgagagcaagcccggcgacagccagaacctggcctgcgtgttttgccgaaagcacgatgactgccccaacaagtacggtgagaagaaaactaaggagaagtggaacctcactgtgcattactattgcctgcttatgagtagcggcatctggcagagaggcaaggaggaggagggggtctatggattcctaatagaggacattcggaaggaggtgaatagggcctctaaactgaaatgttgtgtatgtaagaagaatggcgcttcaatcgggtgcgtagcgcctaggtgcaaaaggagttatcacttcccgtgcggcctgcagagggaatgtatcttccagttcactggaaactttgcctccttttgttgggatcacagacccgtgcagattatcacctccaataactacagagaatctcttccatgtacgatctgcctggaatttatagagccgatcccttcctacaacatactgaggtccccctgttgcaaaaatgcctggttccatcgtgactgcctgcaatag

SEQ ID NO: 332062 - DNA, 366 bp, Artificial Sequence
  derived and/or modified sequence
atgaacgagagcaagcccggcgacagccagaacctggcctgcgtgttctgccgcaaacacgacgattgccctaacaagtacggagagaagaagaccaaagagaagtggaacttaaccgttcactactattgtctgctcatgtccagcggtatttggcagcgtggaaaggaggaagagggagtgtacggcttcctaatagaggacattagaaaagaggtcaatagagcttctaaacttaaatgttgcgtgtgtaaaaaaaacggggcctctatcggctgcgtggctccccgatgtaaacggtcatatcacttcccctgtggcctgcagagggaatgcatttttcagtttaccggtaattttgcctag

SEQ ID NO: 332063 - DNA, 396 bp, Artificial Sequence
  derived and/or modified sequence
atgaacgagagcaagcccggcgacagccagaacctggcctgcgtgttctgccgcaaacatgatgattgccctaacaagtacggagagaaaaagaccaaagaaaaatggaatcttaccgtgcactattactgtcttcttatgagttccggaatttggcaaaggggcaaggaggaggaaggggtctatggtttcttgattgaggacatccggaaggaagtcaatcgagctagtaagttaaaatgttgcgtgtgtaaaaaaaatggagcctccattggatgtgtagcgcctaggtgtaagcgcagttaccactttccttgcggcctccagagggaatgtattttccagtttaccgggaacttcgcttccttctgctgggatcaccggccagtgcaatag

SEQ ID NO: 332064 - DNA, 240 bp, Artificial Sequence
  derived and/or modified sequence
atgaacgagagcaagcccggcgacagccagaacctggcctgcgtgttttgtagaaagcatgacgattgtccaaataagtatggcgaaaaaaagacgaaagagaagtggaatcttactgttcactactattgcctgttgatgagtagcggaatctggcagcgcgggaaggaagaggagggcgtgtacggattcctaatcgaagatatacggaaggaggtcaaccgagcgagtaagctgtag

SEQ ID NO: 332065 - DNA, 531 bp, Artificial Sequence
  derived and/or modified sequence
atgaacgagagcaaacctggagactcacaaaacctcgcatgcgtcttttgtcgcaaacacgatgattgtccaaataaatacggagagaagaaaactaaagaaaagtggaacctgaccgttcactactattgcttactcatgtcttccggcatttggcagaggggcaaggaggaagagggcgtgtacggttttcttatcgaggatatcagaaaggaagtgaaccgcgctagcaaactgaagtgctgcgtctgcaaaaaaaacggggcatccatcggttgtgtagcaccgagatgcaaaagatcttaccatttcccttgcggactgcagagggaatgcattttccaatttacaggcaattttgcctcattttgttgggaccaccggccagtccagataattacctccaataattatcgtgagtccctgccttgcacaatctgcctggaattcatcgaaccaattccttcctacaacattctgcgaagtccttgttgcaagaacgcttggttccatagagactgtctgcaatag

SEQ ID NO: 332066 - DNA, 366 bp, Artificial Sequence
  derived and/or modified sequence
atgaacgaatcaaagccaggcgactcacagaatctcgcatgtgtgttctgtagaaagcacgacgactgccctaataagtacggcgagaaaaaaactaaggagaagtggaacctgacagtccactactattgcctcctaatgagttcaggtatctggcagcggggtaaggaagaagagggcgtttacggattcctaatcgaagacatccgtaaggaagtgaatcgggcatccaagcttaaatgctgcgtgtgcaaaaagaacggcgcttccatcggctgcgtagcacccagatgtaaaaggtcctaccatttcccctgtggcttgcaacgcgaatgcattttccagtttaccggaaattttgcatag

SEQ ID NO: 332067 - DNA, 396 bp, Artificial Sequence
  derived and/or modified sequence
atgaacgaatctaagcccggagattcccaaaatctggcctgcgtcttctgtcgcaagcacgacgattgtcctaacaagtatggagaaaagaaaaccaaggagaagtggaatttgacagttcactattactgcctgctgatgtcctcaggcatttggcagcgtggtaaggaagaggaaggagtgtacgggtttttaattgaggacattagaaaggaggtgaaccgcgcatcaaaactgaagtgctgcgtgtgtaagaagaatggtgcctccatcggatgcgtggccccacggtgcaaacgtagctatcatttcccttgtggtcttcagcgcgagtgtatcttccagtttactggaaatttcgcttccttttgctgggatcaccgaccagtccaatag

SEQ ID NO: 332068 - DNA, 240 bp, Artificial Sequence
  derived and/or modified sequence
atgaatgagtcaaagcccggagactctcagaatcttgcatgtgtgttttgccgcaaacacgatgattgcccaaacaagtatggcgagaagaagaccaaggaaaagtggaaccttacagtgcattattattgtttactgatgtccagtggcatttggcagcggggtaaagaggaggaaggtgtctatggcttcttgatcgaggacattagaaaagaagttaacagggcttccaaattgtag

SEQ ID NO: 332069 - DNA, 623 bp, Artificial Sequence
  derived and/or modified sequence
gcactaagcacatctacaatcaaggagaggggcaggctttaccttttgaaggaagaagtatgaaagtgtatcactgactgatcaagtagagtaaaatgaatgaaagtaaacctggtgactcacagaaccttgcttgtgttttctgtcgaaaacatgatgactgtcctaataaatacggagaaaagaaaactaaggagaaatggaatctcactgtacattactactgtttgttgatgtcaagtggaatttggcagagaggcaaagaagaagaaggagtttatggttttctaatagaagatatcaggaaggaagtgaatagagcttctaaactgaaatgctgtgtttgcaagaaaaatggtgcttcaattggatgtgttgcaccccgatgtaaacgaagttatcatttcccatgtggacttcagagagaatgtattttccagtttactggcaattttgcgtcattttgttgggaccatcgacctgttcaaataattacatctaataattatagagagtccttaccatgcaccatttgcttggaatttattgagcctattccaagttataacatattacgaagtccttgttgtaagaacgcttggtttcatagagactgtttacag

SEQ ID NO: 332070 - DNA, 565 bp, Artificial Sequence
  derived and/or modified sequence
gaatttgaatcctgtgggccgttgaatgtggctgctcgcggtcggcgtgccccgacgtacagcgggccgggaaaagtggcactgaggctctggaacttctgcccagctctccttgctaaaaaacattcccttcaatttaaaaaatgttcccgactcttaacaccccagttgagaactactgatcttagatgtattaaagtaaaatgaatgaaagtaaacctggtgactcacagaaccttgcttgtgttttctgtcgaaaacatgatgactgtcctaataaatacggagaaaagaaaactaaggagaaatggaatctcactgtacattactactgtttgttgatgtcaagtggaatttggcagagaggcaaagaagaagaaggagtttatggttttctaatagaagatatcaggaaggaagtgaatagagcttctaaactgaaatgctgtgtttgcaagaaaaatggtgcttcaattggatgtgttgcaccccgatgtaaacgaagttatcatttcccatgtggacttcagagagaatgtattttccagtttactggcaattttgc

SEQ ID NO: 332071 - DNA, 537 bp, Artificial Sequence
  derived and/or modified sequence
aatagccaatagttatcttttctgctcctctccctcctcccaccctcctgcgtcagctaaaaaacattcccttcaatttaaaaaatgttcccgactcttaacaccccagttgagaactactgatcttagatgtattaaagtaaaatgaatgaaagtaaacctggtgactcacagaaccttgcttgtgttttctgtcgaaaacatgatgactgtcctaataaatacggagaaaagaaaactaaggagaaatggaatctcactgtacattactactgtttgttgatgtcaagtggaatttggcagagaggcaaagaagaagaaggagtttatggttttctaatagaagatatcaggaaggaagtgaatagagcttctaaactgaaatgctgtgtttgcaagaaaaatggtgcttcaattggatgtgttgcaccccgatgtaaacgaagttatcatttcccatgtggacttcagagagaatgtattttccagtttactggcaattttgcgtcattttgttgggaccatcgacctgttcaa

SEQ ID NO: 332072 - DNA, 411 bp, Artificial Sequence
  derived and/or modified sequence
aagcacatctacaatcaaggagaggggcaggctttaccttttgaaggaagaagtatgaaagtgtatcactgactgatcaagtagagctaaaaaacattcccttcaatttaaaaaatgttcccgactcttaacaccccagttgagaactactgatcttagatgtattaaagtaaaatgaatgaaagtaaacctggtgactcacagaaccttgcttgtgttttctgtcgaaaacatgatgactgtcctaataaatacggagaaaagaaaactaaggagaaatggaatctcactgtacattactactgtttgttgatgtcaagtggaatttggcagagaggcaaagaagaagaaggagtttatggttttctaatagaagatatcaggaaggaagtgaatagagcttctaaactg

SEQ ID NO: 332073 - DNA, 2112 bp, Artificial Sequence
  derived and/or modified sequence
tactgtataaggttctatacctggtagcttccaggtggtagttggtaccagaatgggcgcaaacttagtctcttctccattctgacttcaaacctgggtcactacaatttcttggatcacgaaaactgcattcttccttaaatggtgtcactaagttgtctttctgtttctttctgccatggtcattgtcagcagtgaccccaggccaaagaacagtttttcattcattctcaatacctcgatgagaccatgtgctactctgtgtttccacaactctagtgtgattttgaagttgtatgtttttctgttcctgtctagtgagacagtctctaatctttctggatctcatcattaggtaattcaatgacaagtttaattggggaaaagagagaaggatctagtcccccgaatttgttttgggtcctgtcccagttgtcttctggttagtaggtttttgtgcttaagaatatgttgacttcaggcatttaacaagggacaaaacatctatttttagtgacttaaggaagtggtaggaacagaatctaagtgtagccagatgaaaggtgacttattttgtttagacaggcagaactgtggactaccatgatctgtttcatcaaattattccaaaacaacagatcctttttcaggctttctttttctttttcttttctttctttctttttttcctaaacttccttttggcagatgtggcctcatggatgagctggtacacgacttagcctcagccttggagcagacatctgagcagaataagcttggtgaactgtgggaggagatggcgctgagcccccgacagcagaggcggcagcttcggaaacgccgaggtcggaagcgtcgttctgacttcactcacctggcagagcatacctgctgctacagcgaggcctctgagtcaagtctggatgaggccactaaggactgtcgagaagtggctccggtgaccaattttagtgactctgatgacacaatggtagccaaacgacacccagctctcaatgccattgtcaagagtaagcaacattcttggcatgaatctgactcctttactgaaaatgcaccttgtcgaccactcaggcgcaggcggaaggtgaagcgagtgacatcagaggtggctgctagccttcagcagaagctgaaggtgtcagattggagctatgagagaggctgcaggttcaagtctgctaagaagcagcgtctgtcccgctggaaggagaatactccctggacctcatcaggccacggattgtgtgaatcagcagaaaataggactttcctaagcaaaacaggaaggaaagaaaggatggagtgtgaaacagatgaacaaaaacagggctctgatgagaacatgtcagaatgtgaaaccagcagtgtgtgtagcagcagtgacactgggctctttaccaatgatgaagggcgacaaggtgatgacgaacagagtgattggttctatgaaggagaatgtgtcccaggattcactgtccctaatcttctgcccaagtgggctcctgatcattgttctgaagtagaaagaatggattctggattggataaattttcagattccacattccttttaccttctcggccagctcaaagagggtaccatactcgcttgaatcgtctacctggagctgcagctcgatgcctcagaaaggggcgaagaaggctggttgggaaggtgatacctctcacagttagcttggctcagtggggagataatattccctatgggagttgtgtatcctattaacaatcagaggtgctacagaactccctgaagttaatggagccaactggaatgtgttgggagtttacaagagtgaacattatgtagaatgtgaatggatatacaaataaaagatgaaacgtaattcatatagaagtactgacaaaaaaaaaaaacactgtcattacagtgtctattgcctgtaaacctacaagcctgagctgtgtcttctgtaacttttgattaatgttatgttattattgtgtaagttaaaatactcttggcttctttatgactcctcttgaattcatgaatgcatctttgttctttcctaattttggtctttcatcctagaattcatt

SEQ ID NO: 332074 - DNA, 1458 bp, Artificial Sequence
  derived and/or modified sequence
agagagggaagccccggcggtgagagtcggcccaaaaagcggcggccgttggagatgtggcctcatggatgagctggtacacgacttagcctcagccttggagcagacatctgagcagaataagcttggtgaactgtgggaggagatggcgctgagcccccgacagcagaggcggcagcttcggaaacgccgaggtcggaagcgtcgttctgacttcactcacctggcagagcatacctgctgctacagcgaggcctctgagtcaagtctggatgaggccactaaggactgtcgagaagtggctccggtgaccaattttagtgactctgatgacacaatggtagccaaacgacacccagctctcaatgccattgtcaagagtaagcaacattcttggcatgaatctgactcctttactgaaaatgcaccttgtcgaccactcaggcgcaggcggaaggtgaagcgagtgacatcagaggtggctgctagccttcagcagaagctgaaggtgtcagattggagctatgagagaggctgcaggttcaagtctgctaagaagcagcgtctgtcccgctggaaggagaatactccctggacctcatcaggccacggattgtgtgaatcagcagaaaataggactttcctaagcaaaacaggaaggaaagaaaggatggagtgtgaaacagatgaacaaaaacagggctctgatgagaacatgtcagaatgtgaaaccagcagtgtgtgtagcagcagtgacactgggctctttaccaatgatgaagggcgacaaggtgatgacgaacagagtgattggttctatgaaggagaatgtgtcccaggattcactgtccctaatcttctgcccaagtgggctcctgatcattgttctgaagtagaaagaatggattctggattggataaattttcagattccacattccttttaccttctcggccagctcaaagagggtaccatactcgcttgaatcgtctacctggagctgcagctcgatgcctcagaaaggggcgaagaaggctggttgggaaggtgatacctctcacagttagcttggctcagtggggagataatattccctatgggagttgtgtatcctattaacaatcagaggtgctacagaactccctgaagttaatggagccaactggaatgtgttgggagtttacaagagtgaacattatgtagaatgtgaatggatatacaaataaaagatgaaacgtaattcatatagaagtactgacaaaaaaaaaaaacactgtcattacagtgtctattgcctgtaaacctacaagcctgagctgtgtcttctgtaacttttgattaatgttatgttattattgtgtaagttaaaatactcttggcttctttatgactcctcttgaattcatgaatgcatctttgttctttcctaattttggtctttcatcctagaattcatt

SEQ ID NO: 332075 - DNA, 1344 bp, Artificial Sequence
  derived and/or modified sequence
atggacgagctggtgcacgacctggccagcgccctggagcagaccagcgagcagaacaagctgggcgagctgtgggaggagatggccctgagccccagacagcagagaagacagctgagaaagagaagaggcagaaagagaagaagcgacttcacccacctggccgagcacacctgctgctacagcgaggccagcgagagcagcctggacgaggccaccaaggactgcagagaggtggcccccgtgaccaacttcagcgacagcgacgacaccatggtggccaagagacaccccgccctgaacgccatcgtgaagagcaagcagcacagctggcacgagagcgacagcttcaccgagaacgccccctgcagacccctgagaagaagaagaaaggtgaagagagtgaccagcgaggtggccgccagcctgcagcagaagctgaaggtgagcgactggagctacgagagaggctgcagattcaagagcgccaagaagcagagactgagcagatggaaggagaacaccccctggaccagcagcggccacggcctgtgcgagagcgccgagaacagaaccttcctgagcaagaccggcagaaaggagagaatggagtgcgagaccgacgagcagaagcagggcagcgacgagaacatgagcgagtgcgagaccagcagcgtgtgcagcagcagcgacaccggcctgttcaccaacgacgagggcagacagggcgacgacgagcagagcgactggttctacgagggcgagtgcgtgcccggcttcaccgtgcccaacctgctgcccaagtgggcccccgaccactgcagcgaggtggagagaatggacagcggcctggacaagttcagcgacagcaccttcctgctgcccagcagacccgcccagagaggctaccacaccagactgaacagactgcccggcgccgccgccagatgcctgagaaagggcagaagaagactggtgggcaaggagaccagcatcaacaccctgggcaccgagagaatcagccacatcatcaccctgggcagaaagatcagcggctaccaccagctgggcaaggagaacgagatcagcagcatcccctgcctgcccttcaccccctggatgttcctgcccatgctgctgaccgagggcgtgcaccagcacaccgccctgcccgacagacagatgtacaccggcgaccaccacgtgcacgtgaccagcagaggcagcggcaaccagtggccccagcacctgtgcctggcccccgtgcagttcacctggatgcagtggagccagccccaccagcaccacaagccccccaaccaccccgccctgagcggctggtag

SEQ ID NO: 332076 - DNA, 1056 bp, Artificial Sequence
  derived and/or modified sequence
atggacgagctggtgcacgacctggccagcgccctggagcagaccagcgagcagaacaagctgggcgagctgtgggaggagatggccctgagccccagacagcagagaagacagctgagaaagagaagaggcagaaagagaagaagcgacttcacccacctggccgagcacacctgctgctacagcgaggccagcgagagcagcctggacgaggccaccaaggactgcagagaggtggcccccgtgaccaacttcagcgacagcgacgacaccatggtggccaagagacaccccgccctgaacgccatcgtgaagagcaagcagcacagctggcacgagagcgacagcttcaccgagaacgccccctgcagacccctgagaagaagaagaaaggtgaagagagtgaccagcgaggtggccgccagcctgcagcagaagctgaaggtgagcgactggagctacgagagaggctgcagattcaagagcgccaagaagcagagactgagcagatggaaggagaacaccccctggaccagcagcggccacggcctgtgcgagagcgccgagaacagaaccttcctgagcaagaccggcagaaaggagagaatggagtgcgagaccgacgagcagaagcagggcagcgacgagaacatgagcgagtgcgagaccagcagcgtgtgcagcagcagcgacaccggcctgttcaccaacgacgagggcagacagggcgacgacgagcagagcgactggttctacgagggcgagtgcgtgcccggcttcaccgtgcccaacctgctgcccaagtgggcccccgaccactgcagcgaggtggagagaatggacagcggcctggacaagttcagcgacagcaccttcctgctgcccagcagacccgcccagagaggctaccacaccagactgaacagactgcccggcgccgccgccagatgcctgagaaagggcagaagaagactggtgggcaaggtgatccccctgaccgtgagcctggcccagtggggcgacaacatcccctacggcagctgcgtgagctactag

SEQ ID NO: 332077 - DNA, 1344 bp, Artificial Sequence
  derived and/or modified sequence
atggacgagctggtgcacgacctggcttccgctttggaacagacatcggagcagaacaagcttggggagttatgggaggaaatggccctgagtccgaggcagcaacgtcgacagttgcgaaagcggagaggcagaaaaaggcgatccgacttcacgcacctggccgaacatacatgctgctatagcgaggctagtgaaagttcgctagatgaagcaacgaaggactgtagggaggtcgctcccgtgacgaatttctctgattctgatgacacaatggtcgccaagcgccatcctgccctgaatgcaatagtgaagagtaagcagcactcttggcatgagtccgattccttcacggaaaacgccccttgtcgtcctctccgtagacgccgaaaagtgaagagagtgacctcagaagtcgcagctagccttcagcagaagctgaaagtgtccgattggtcatacgaaagaggctgccgctttaagagcgcaaagaagcagagattaagccggtggaaagaaaacaccccttggacatctagtgggcatggcctgtgcgagagcgcagaaaatcgcacctttttgagtaagaccggccggaaggagcggatggaatgtgaaacggatgagcagaagcagggcagcgatgaaaacatgtctgagtgcgaaacttcttcagtctgttcttcctcagataccggattgttcacaaatgacgaaggtcggcagggggacgacgagcaaagtgactggttctatgagggtgaatgtgtgccaggatttaccgttcctaacctgctgccaaagtgggctcccgaccattgctctgaagtcgaacggatggatagtgggctagacaagttttccgactcaaccttcctgttaccatccagacctgcccaaaggggttatcatacccgcctgaatagattaccaggtgccgcggcccggtgtctacggaagggacggcgccgtttggtcggtaaggagacgtccattaacaccctaggcaccgagcgaattagtcatataattactttgggtcgcaaaatctctggctaccatcaattggggaaagagaacgaaattagtagtatcccgtgtttaccattcactccgtggatgtttctgccaatgttactaacagagggggtgcatcagcatacagctcttcctgaccgtcagatgtacacgggagaccatcacgtgcatgtgacatcacggggctccggcaaccagtggccacagcatttgtgtctggctcctgtacagtttacatggatgcagtggtctcagccacatcagcatcataaaccaccaaaccaccctgcactttcaggctggtag

SEQ ID NO: 332078 - DNA, 1056 bp, Artificial Sequence
  derived and/or modified sequence
atggatgaactcgtccacgacctggccagcgcgctggagcagaccagcgaacagaacaagcttggtgaactgtgggaagagatggctttgagcccaaggcagcagcgcaggcagctgcgcaaacggagagggcggaagaggcgctcagacttcacacacctggccgagcacacatgctgctactccgaggcttcagagagcagtctcgatgaggctacaaaggattgccgggaggtggctcctgtcactaactttagtgacagcgacgacaccatggttgctaaacggcaccctgcactgaacgcgatcgttaagtccaagcagcattcatggcacgaatccgactcatttaccgagaatgcgccctgtcggccgcttcgccgcagacgtaaggtcaaaagggtcactagtgaggttgccgccagtctgcagcaaaaactgaaagtgtccgattggtcctacgaacggggatgccgattcaaatccgccaagaagcagagactgtcccgttggaaagaaaataccccgtggacaagctctgggcacgggctatgcgagagcgcagagaacaggacatttctgagcaagacaggcaggaaggagcgaatggagtgtgagaccgacgagcaaaaacagggttccgacgagaacatgtctgagtgcgaaacatcaagcgtatgctcctcctctgatacagggctgttcacaaatgatgaaggcaggcagggcgacgacgagcaatctgattggttctatgaaggcgagtgtgtccccggcttcacagttcccaacctgctgcccaagtgggcccccgatcattgtagcgaagtcgagcggatggactcaggtttggacaaattctctgactccaccttcctgctgccaagcaggccagcgcagagggggtaccacaccaggttgaatcggctgccaggagccgcagccaggtgcctgcggaaggggcgacggaggctggtggggaaagtaatcccacttacggttagtctagcccaatggggggataacattccatatggaagttgtgtgtcttactag

SEQ ID NO: 332079 - DNA, 1056 bp, Artificial Sequence
  derived and/or modified sequence
atggatgaactcgtgcacgacctggcctctgccctcgagcagacctccgagcagaataaacttggggagttgtgggaagagatggcgctgagtcctcggcagcagcgcaggcagttgcgtaaacgacgggggaggaagcgcagatctgacttcacccacttggccgaacatacatgctgctacagcgaggcttctgagtcctctctggatgaagccaccaaggactgtcgcgaggtcgctcctgtcacgaatttcagtgattcggacgacactatggtcgccaaaagacacccagctcttaatgccattgttaagagcaagcagcatagttggcacgaatccgactcttttacggaaaatgcaccatgtagacctctgcggaggcgccggaaagtaaaacgtgtgaccagcgaggttgctgcatccctgcagcaaaagcttaaagtaagcgactggagctatgaacgtgggtgccggtttaaaagtgctaaaaagcagagactcagtcgctggaaagagaacaccccttggaccagctccgggcatggcctctgtgaatcagctgagaatcgcacatttttgtccaaaactgggcgaaaggagaggatggaatgcgagacagacgagcagaagcaggggtcagacgaaaatatgtcagagtgcgagacctctagtgtctgttccagttcagataccggcctgttcaccaacgacgagggccgccagggcgatgacgaacagtcggactggttctacgaaggtgagtgtgttccggggttcactgtgcctaatcttctcccaaaatgggctccggatcactgctctgaggttgaacgaatggactccggcctggataagttcagcgactctacttttctccttccgtcccgacctgctcagcgggggtatcatacaagactgaacagactgcccggggctgcggcccgttgtttacgaaaggggagaaggcgcctcgttgggaaagttattccactcactgtgtcacttgcacaatggggggacaatatcccatacgggagttgtgtgagctattag

SEQ ID NO: 332080 - DNA, 1344 bp, Artificial Sequence
  derived and/or modified sequence
atggatgagctggtgcatgacctggccagcgccctggagcagaccagcgagcagaacaagctgggggagctgtgggaggagatggccctgagcccccggcagcagaggcggcagctgaggaagaggcggggcaggaagagaagaagtgacttcacccacctggccgagcacacctgctgctacagcgaggccagcgagagcagcctggatgaggccaccaaggactgccgggaggtggcccctgtgaccaacttcagtgacagtgatgacaccatggtggccaagaggcacccagccctgaatgccatcgtgaagagcaagcagcacagctggcatgaaagtgacagcttcacagaaaatgccccctgccggcccctgcggcggcggaggaaggtgaagagggtgaccagcgaggtggccgccagcctgcagcagaagctgaaggtgtctgactggagctatgaaagaggctgccgcttcaagagcgccaagaagcagaggctgagccgctggaaggagaacaccccctggaccagcagcggccacggcctgtgtgagagcgcagaaaatagaaccttcctgagcaagacaggcaggaaggagaggatggagtgtgaaacagatgagcagaagcagggcagtgatgagaacatgtctgaatgtgagaccagctctgtgtgcagcagcagtgacaccggcctcttcaccaatgatgagggccggcagggagatgatgagcagagcgactggttctatgaaggagaatgtgtgcccggcttcaccgtgcccaacctgctgcccaagtgggccccagaccactgcagcgaggtggagaggatggacagcggcctggacaagttcagtgacagcaccttcctgctgcccagcaggcctgcccagaggggctaccacacccggctgaaccggctgcctggagctgctgcccgctgcctgaggaagggcagaagaaggctggtgggcaaggagaccagcatcaacaccctgggcacagagcgcatcagccacatcatcaccctgggcaggaagatcagcggctaccaccagctgggcaaggaaaatgagatcagcagcatcccctgcctgcccttcaccccctggatgttcctgcccatgctgctgacagaaggagtgcaccagcacacagccctgcctgaccggcagatgtacacaggagaccaccacgtgcacgtgaccagccggggcagcggcaaccagtggccccagcacctgtgcctggcccctgtgcagttcacctggatgcagtggagccagccccaccagcaccacaagccacccaaccacccagccctgagcggctggtag

SEQ ID NO: 332081 - DNA, 1056 bp, Artificial Sequence
  derived and/or modified sequence
atggatgagctggtgcatgacctggccagcgccctggagcagaccagcgagcagaacaagctgggggagctgtgggaggagatggccctgagcccccggcagcagaggcggcagctgaggaagaggcggggcaggaagagaagaagtgacttcacccacctggccgagcacacctgctgctacagcgaggccagcgagagcagcctggatgaggccaccaaggactgccgggaggtggcccctgtgaccaacttcagtgacagtgatgacaccatggtggccaagaggcacccagccctgaatgccatcgtgaagagcaagcagcacagctggcatgaaagtgacagcttcacagaaaatgccccctgccggcccctgcggcggcggaggaaggtgaagagggtgaccagcgaggtggccgccagcctgcagcagaagctgaaggtgtctgactggagctatgaaagaggctgccgcttcaagagcgccaagaagcagaggctgagccgctggaaggagaacaccccctggaccagcagcggccacggcctgtgtgagagcgcagaaaatagaaccttcctgagcaagacaggcaggaaggagaggatggagtgtgaaacagatgagcagaagcagggcagtgatgagaacatgtctgaatgtgagaccagctctgtgtgcagcagcagtgacaccggcctcttcaccaatgatgagggccggcagggagatgatgagcagagcgactggttctatgaaggagaatgtgtgcccggcttcaccgtgcccaacctgctgcccaagtgggccccagaccactgcagcgaggtggagaggatggacagcggcctggacaagttcagtgacagcaccttcctgctgcccagcaggcctgcccagaggggctaccacacccggctgaaccggctgcctggagctgctgcccgctgcctgaggaagggcagaagaaggctggtgggcaaggtgatccccctgactgtgtccctggcccagtggggagacaacatcccctacggcagctgtgtgtcctactag

SEQ ID NO: 332082 - DNA, 1344 bp, Artificial Sequence
  derived and/or modified sequence
atggacgagctggtgcacgacctggccagcgccctggagcagacctcagagcagaacaagctgggcgagctatgggaggagatggccctgagcccacggcaacagaggcggcagctcaggaagaggagaggtcgaaagagaagaagcgatttcactcacctggccgaacatacatgttgctactctgaggcgagcgagtcgagcctggacgaagcgactaaggactgccgggaggtggctcctgttactaacttctccgatagcgatgatacaatggtcgccaaacgccatcctgctctcaatgccatcgtcaagtccaagcagcacagctggcacgagtcggactcttttaccgaaaatgcaccatgccggccacttaggcgacgaaggaaagtcaagcgagtgacctcagaggtggcagcatcccttcagcagaagctgaaggtctcagactggtcatacgagcggggctgtcgatttaagtccgcaaaaaaacaaaggctgagcaggtggaaggagaatactccatggacctcaagcggtcacggtctgtgtgaaagcgccgagaataggacgttcctttccaagactggccgcaaagaaagaatggaatgcgaaacagatgagcaaaaacaagggagcgacgagaatatgtcagagtgtgagactagctcagtgtgctctagtagtgatacaggtctgttcaccaatgacgaggggagacaaggcgatgatgaacaaagtgactggttttatgagggtgagtgtgtgccagggtttacggtgccaaacctgctgcctaagtgggcccctgaccactgttccgaagtggagaggatggattcaggtttggacaagttctccgactccacgttcttactccccagtcgtccagcccagagaggctaccacaccagacttaatagactccctggagcagctgcaagatgcctgaggaaaggcaggcgaagactggttgggaaagagaccagtattaacactctggggaccgaaagaataagccacatcattaccctcggtaggaaaatttccggctatcatcaacttgggaaagagaatgagatcagctccataccttgtctgcccttcaccccctggatgtttcttcctatgttgttgacagaaggtgttcaccagcatacagctctccctgaccggcagatgtacacaggggaccaccatgtgcatgtgacctctagaggcagcgggaaccagtggccacaacatttgtgccttgctcccgtgcagttcacatggatgcagtggtctcagccccaccagcatcataagcccccaaaccatccggcactgagcggatggtag

SEQ ID NO: 332083 - DNA, 1056 bp, Artificial Sequence
  derived and/or modified sequence
atggacgagctggtgcacgacctggccagcgccctggagcagacctcggagcagaacaaactcggcgaactgtgggaggagatggccctgtcccccagacagcaacgccgtcagttgcgaaagaggaggggtcggaaacggagatcagatttcacccacctggcagaacacacctgttgttacagtgaggcctcagagtcttcgctcgacgaagcgaccaaggattgcagggaggtggcgcctgtgacgaatttttcagactccgatgacactatggtagccaaaagacacccggcgctcaatgccattgttaaatcgaaacagcacagctggcacgaatctgatagttttaccgagaacgccccatgcagaccactgcgaaggcgccggaaggttaaaagggtaacaagtgaagttgctgcaagcctacagcagaagctgaaagtctccgattggtcatacgagagagggtgcagattcaaatccgccaaaaagcagagattgagtaggtggaaagaaaacaccccatggacttcatcaggacacgggctgtgtgagtccgcagagaaccgtaccttcctgtcaaagacgggaaggaaggagaggatggagtgcgaaaccgacgagcagaaacaaggatcagacgagaacatgtcagagtgcgagacaagttctgtgtgttcctcctctgacaccggtctgttcactaatgatgaaggccgtcaaggcgacgatgaacaaagcgactggttctatgaaggagagtgcgtgcccggcttcaccgtccctaatctgcttcccaagtgggcccctgaccactgttccgaggttgagaggatggactcaggcttggataagtttagcgattctacctttttgttaccaagcagacctgcgcaaagagggtaccacacccgcctgaatcgcctgccgggggcagcagctcgctgtctgcgcaaaggcaggagacggctggttggcaaagttatccctctcaccgtgagcttggctcaatggggggacaatataccctatgggagctgtgtgagctattag

SEQ ID NO: 332084 - DNA, 1056 bp, Artificial Sequence
  derived and/or modified sequence
atggacgagctggtgcacgacctggccagcgccctggagcagaccagtgaacagaacaaactcggagaactttgggaagaaatggcgctgagtccccgccagcagcgccggcaactccggaagcgtagaggtcgcaaacggcggtcagattttacccatctggccgagcatacttgttgctacagtgaggctagtgagagctcactggacgaggccactaaagattgcagggaagtggcgcctgttaccaacttcagtgattctgacgatactatggtggccaagcgacaccctgcccttaatgctatcgtaaagagcaagcaacacagttggcacgagtcagattcgttcaccgagaacgccccctgtagacctctacggcgacgtaggaaggtgaaacgcgttacatccgaagttgcagcatctctgcagcagaaactgaaggtcagtgactggagctacgagaggggttgcagatttaagtccgctaaaaaacagagactatctagatggaaggagaacacaccctggacttcttccgggcatggtctttgtgagtctgccgagaaccgcacctttctgtccaagactggacggaaagagcgcatggagtgtgaaacagacgaacaaaagcaaggtagtgacgagaacatgagtgaatgcgagacgtcttctgtctgctcaagctctgacacaggcttgtttaccaacgacgagggcagacagggcgatgatgaacaaagtgattggttctacgaaggcgaatgcgtgcctggattcaccgtgcctaatctgcttcccaaatgggcgccagaccattgtagtgaagtggagcgaatggacagtggcctggacaaattctccgacagcacctttttgttgccttctagacccgctcaacgagggtaccatacgcggctgaatcggctgccgggggctgccgccaggtgcctgcgtaagggtagaaggagactggtggggaaggtgatccccctgaccgtgtctcttgcccagtggggcgacaatatcccatacggatcatgcgtttcatattag

SEQ ID NO: 332085 - DNA, 1344 bp, Artificial Sequence
  derived and/or modified sequence
atggacgaactcgtgcacgatctggcctccgcactcgagcagacaagcgaacagaacaaacttggtgagctgtgggaggagatggcgctgtcgcctagacagcagcggaggcagctgcgcaagcggagaggcaggaaacgacgcagcgatttcacacatctcgctgaacacacatgctgttactccgaggcctcagagagtagtctggacgaggcaacaaaagactgccgtgaggtagccccagtgaccaactttagcgatagcgacgacacgatggttgcaaagcgccatcctgctctgaacgcaatcgtgaaatcaaagcagcactcatggcatgagagtgactcctttacagagaatgccccatgtcgccctctgcggcgacgaagaaaagtgaaaagagtcacttcagaagttgccgcttctcttcaacagaagctcaaggttagcgattggagttacgaacgaggttgcagatttaagtctgccaagaaacagaggctcagccggtggaaagaaaatactccctggacatctagtgggcatggtctttgtgaatctgccgagaacaggaccttcttaagcaagaccgggcgaaaagagcgtatggagtgcgaaacagatgaacagaaacagggatcagacgagaacatgtcagaatgcgagactagctctgtgtgtagctcttctgataccgggctattcactaatgatgagggcagacaaggagatgatgagcagtccgattggttctacgagggcgagtgtgtgccaggctttacagttcctaacctgctgcctaagtgggcccctgatcattgcagtgaagtcgagagaatggactctgggcttgacaaattcagcgactctaccttcctattgccaagccggccagctcagaggggctaccataccagactgaatcgattgcccggtgccgcagcccgatgtctcagaaaaggtcgacgcaggctcgtcggcaaggaaactagcattaacacccttggaactgagcggattagccacattattacacttggacgcaagatctctgggtaccatcagcttggtaaagaaaacgagatctccagcattccctgtctcccatttactccttggatgttcctccctatgctcctgactgagggggtgcatcagcataccgctctaccagacaggcagatgtacaccggcgaccatcatgtgcatgtgacttctagaggttccggcaatcaatggccacagcatttatgcctagcgccagtccagttcacatggatgcagtggtcacaacctcaccagcaccacaaacctcctaatcaccctgccctttccgggtggtag

SEQ ID NO: 332086 - DNA, 1056 bp, Artificial Sequence
  derived and/or modified sequence
atggacgaattggtgcacgatctggcaagcgccctcgaacaaacaagcgaacagaacaagctaggcgagttgtgggaagagatggccctctcacctaggcagcagcgccgtcaactgcggaaacgaagaggtagaaaacgcagatcagattttacccacttagccgaacacacctgctgttacagcgaggcgagcgaaagtagcctcgacgaagccacaaaggactgtagagaagtggcacctgttactaactttagcgactccgatgataccatggtcgcgaagagacatcctgcactgaacgccatcgtgaaaagtaaacagcattcctggcacgaatctgatagctttacagaaaacgcgccttgcagacccttgcgcagaagacgcaaagtcaagcgggtgacctccgaggtggcagcatcactgcagcagaaactcaaggtcagcgactggtcctacgagagggggtgccgatttaaatccgccaagaaacagcggcttagccggtggaaagaaaatacgccatggacgtcctccggacatggactatgcgagtcagcagagaatcgcaccttcctttccaaaacaggtcgcaaggagcgtatggagtgtgaaaccgatgagcagaagcaggggagtgatgaaaatatgtctgaatgcgagacgtcctccgtgtgctcttctagcgacaccggactttttacgaatgatgaggggaggcagggagacgatgaacagtcagactggttctatgagggcgagtgtgtgccaggattcaccgttcccaacctgctgcccaagtgggccccagatcattgctcggaagtggagcggatggactccgggcttgacaagttctccgatagcaccttcctgctacctagcagacccgctcaaaggggctaccatactagattgaatcgcctgcccggagcagctgcacggtgcctgagaaaaggcagaaggcgtctggtgggaaaggtgattcctctcactgtatcgctcgcccagtggggagacaatattccatacggcagctgcgtctcgtactag

SEQ ID NO: 332087 - DNA, 1056 bp, Artificial Sequence
  derived and/or modified sequence
atggacgagctcgtgcacgacctggcctccgctcttgaacagacctctgagcagaacaagctgggagaactgtgggaagagatggcgcttagtcctcgccagcagcgcagacaattacggaagcgcagaggcagaaaaagacgctcggacttcacccacttagcagaacatacttgttgctactctgaggcgagcgagtcttctttagacgaagcgacaaaggactgtcgggaggttgcccctgtcaccaatttttctgattctgatgatactatggtggccaagagacacccagccctcaacgccatagtcaagagtaaacagcattcctggcacgagagcgattcattcaccgaaaatgcaccctgtcgcccattgcgacggaggaggaaagtgaaaagggtcaccagcgaggtcgcagcctctctgcaacagaaattgaaggtgagtgattggtcttatgagcgcggatgtagattcaagtccgccaagaaacagaggctgagtcggtggaaggagaataccccctggacaagcagcggccatggcctctgtgaaagtgcagagaaccgcacattcctctcgaaaaccgggaggaaggaaaggatggagtgtgaaactgatgagcaaaagcagggcagtgatgaaaacatgtccgaatgcgaaactagcagcgtgtgttcaagttctgacactgggctctttaccaacgacgagggtcggcaaggggacgacgaacagtcagactggttctatgagggcgaatgcgtccccggatttaccgttcctaacctactccctaaatgggccccagaccactgtagcgaggtggaacgaatggattctggacttgacaaattcagcgacagcacatttttgttgccctctcggccagcgcagagagggtaccatactcgcttgaaccgcctccccggtgcagccgctaggtgtctgcgaaagggcaggaggcgcctcgttggaaaggtgattcctctcaccgtttccctcgctcagtggggggacaatattccatatggctcttgcgtcagctactag

SEQ ID NO: 332088 - protein, 99 aa, Artificial Sequence
  derived and/or modified sequence
MTDTRRRVKVYTLNEDRQWDDRGTGHVSSGYVERLKGMSLLVRAESDGSLLLESKINPNTAYQKQQDTLIVWSEAENYDLALSFQEKAGCDEIWEKICQ

SEQ ID NO: 332089 - protein, 150 aa, Artificial Sequence
  derived and/or modified sequence
MTDTRRRVKVYTLNEDRQWDDRGTGHVSSGYVERLKGMSLLVRAESDGSLLLESKINPNTAYQKQQDTLIVWSEAENYDLALSFQEKAGCDEIWEKICQVQGKDPSVDITQDLVDESEEERFDDMSSPGLELPSCELSRLEEIAELVASS

SEQ ID NO: 332090 - DNA, 708 bp, Artificial Sequence
  derived and/or modified sequence
atgttcagcgaggagtgcatcatggacgtgatcggctgcctggagtacgaccccgccctgagccagcccagaaagcacagagagttcctgaccaagaccgccaagttcaaggaggtgatccccatcagcgaccccgagctgaagcagaagatccaccagacctacagagtgcagtacatccaggacatggtgctgcccacccccagcgtgttcgaggagaacatgctgagcaccctgcacagcttcatcttcttcaacaaggtggagatcgtgggcatgctgcaggaggacgagaagttcctgaccgacctgttcgcccagctgaccgacgaggccaccgacgaggagaagagacaggagctggtgaacttcctgaaggagttctgcgccttcagccagaccctgcagccccagaacagagacgccttcttcaagaccctgagcaacatgggcatcctgcccgccctggaggtgatcctgggcatggacgacacccaggtgagaagcgccgccaccgacatcttcagctacctggtggagtacaaccccagcatggtgagagagttcgtgatgcaggaggcccagcagaacgacgacgtgagcaagaagctgaccgagcagaagatcaccagcaaggtgaacatcatctgcaccaacagcaagtacctgtacatcggcagctacaactgcttctactacagcttctag

SEQ ID NO: 332091 - DNA, 300 bp, Artificial Sequence
  derived and/or modified sequence
atgaccgacaccagaagaagagtgaaggtgtacaccctgaacgaggacagacagtgggacgacagaggcaccggccacgtgagcagcggctacgtggagagactgaagggcatgagcctgctggtgagagccgagagcgacggcagcctgctgctggagagcaagatcaaccccaacaccgcctaccagaagcagcaggacaccctgatcgtgtggagcgaggccgagaactacgacctggccctgagcttccaggagaaggccggctgcgacgagatctgggagaagatctgccagtag

SEQ ID NO: 332092 - DNA, 453 bp, Artificial Sequence
  derived and/or modified sequence
atgaccgacaccagaagaagagtgaaggtgtacaccctgaacgaggacagacagtgggacgacagaggcaccggccacgtgagcagcggctacgtggagagactgaagggcatgagcctgctggtgagagccgagagcgacggcagcctgctgctggagagcaagatcaaccccaacaccgcctaccagaagcagcaggacaccctgatcgtgtggagcgaggccgagaactacgacctggccctgagcttccaggagaaggccggctgcgacgagatctgggagaagatctgccaggtgcagggcaaggaccccagcgtggacatcacccaggacctggtggacgagagcgaggaggagagattcgacgacatgagcagccccggcctggagctgcccagctgcgagctgagcagactggaggagatcgccgagctggtggccagcagctag

SEQ ID NO: 332093 - DNA, 708 bp, Artificial Sequence
  derived and/or modified sequence
atgttctcggaagagtgtattatggacgttattggctgtctcgagtacgacccggcactgtcccagcctcgaaaacacagggaattcctgacaaaaacagctaaatttaaggaggtaatccctattagtgaccccgaacttaaacagaagattcaccagacttaccgggtgcagtacatccaagatatggtgctccctaccccaagcgtgttcgaagaaaacatgttatcaaccctgcattcattcatcttttttaataaagtcgagatcgtgggcatgctgcaggaagatgaaaagttcctgactgacctgtttgctcagctgacggatgaggcaaccgatgaagagaaacgccaggagctggtaaacttcttaaaggaattttgcgcgttcagccagacacttcagccgcagaatcgagacgcctttttcaaaaccctgagcaatatgggcattctgcctgccttagaagttattctgggcatggacgacacccaggtgcggtccgccgcaacagatatattttcttatttagtggagtacaacccttcaatggttagagaattcgtgatgcaggaagctcagcagaatgatgacgtcagcaaaaagctcacagagcagaaaataacatctaaagtgaatattatttgcacgaactccaagtacctatacataggatcctacaattgcttctactattctttctag

SEQ ID NO: 332094 - DNA, 300 bp, Artificial Sequence
  derived and/or modified sequence
atgaccgacactagacgtagggttaaagtctacacccttaatgaagatcgccagtgggacgatcgtggcactgggcacgtgagctcaggttacgtggagaggctaaagggtatgagcctgttggtgcgcgccgagtccgacggctctctgctgctggagtctaaaattaaccccaacacagcgtatcaaaagcagcaggacaccctcattgtgtggagtgaggcagaaaactacgacctcgccctctcttttcaagaaaaggccggatgcgatgaaatttgggaaaagatttgtcagtag

SEQ ID NO: 332095 - DNA, 453 bp, Artificial Sequence
  derived and/or modified sequence
atgacagacaccagacgaagggtaaaagtgtacactctgaatgaggaccgccaatgggacgaccggggcaccggccacgttagctcaggttatgtcgaacgtctgaagggcatgtccctcttggtgagggccgaatccgacggatccctgctattagaatccaagatcaaccccaataccgcttaccagaagcagcaggacactttgattgtctggagcgaggccgaaaactacgacctggccctgtcctttcaagagaaggccggctgtgacgaaatctgggagaagatttgtcaggtacagggtaaggatccaagcgtggatattacccaggatttggttgacgagtctgaggaggaacgcttcgacgacatgtcttcaccaggtctggagctccctagctgtgaactgagccgactggaggagatcgctgagctcgtggcctccagctag

SEQ ID NO: 332096 - DNA, 708 bp, Artificial Sequence
  derived and/or modified sequence
atgttttctgaggagtgcatcatggatgtgattggctgcctggagtatgaccctgccctgagccagcccaggaagcaccgggagttcctgaccaagacagccaagttcaaggaggtgatccccatcagtgaccctgagctgaagcagaagatccaccagacctacagagtgcagtacatccaggacatggtgctgcccaccccatctgtgtttgaggagaacatgctgagcaccctgcacagcttcatcttcttcaacaaggtggagatcgtgggcatgctgcaggaggatgagaagttcctgacagacctgtttgcccagctgacagatgaggccacagatgaggagaagaggcaggagctggtgaacttcctgaaggagttctgtgccttcagccagaccctgcagccccagaacagagatgccttcttcaagaccctgagcaacatgggcatcctgcctgccctggaggtgatcctgggcatggatgacacccaggtgcgctctgctgccacagacatcttctcctacctggtggagtacaaccccagcatggtgcgggagtttgtgatgcaggaggcccagcagaatgatgatgtgtccaagaagctgacagagcagaagatcaccagcaaggtgaacatcatctgcaccaacagcaagtacctgtacatcggcagctacaactgcttctactacagcttctag

SEQ ID NO: 332097 - DNA, 300 bp, Artificial Sequence
  derived and/or modified sequence
atgacagacacccggcggcgggtgaaggtgtacaccctgaatgaagatcggcagtgggatgaccggggcaccggccacgtgagcagcggctacgtggagcggctgaagggcatgagcctgctggtgcgggcagagagtgatggcagcctgctgctggagagcaagatcaaccccaacacagcctaccagaagcagcaggacaccctcatcgtgtggagcgaggccgagaactatgacctggccctgtccttccaggagaaggccggctgtgatgagatctgggagaagatctgccagtag

SEQ ID NO: 332098 - DNA, 453 bp, Artificial Sequence
  derived and/or modified sequence
atgacagacacccggcggcgggtgaaggtgtacaccctgaatgaagatcggcagtgggatgaccggggcaccggccacgtgagcagcggctacgtggagcggctgaagggcatgagcctgctggtgcgggcagagagtgatggcagcctgctgctggagagcaagatcaaccccaacacagcctaccagaagcagcaggacaccctcatcgtgtggagcgaggccgagaactatgacctggccctgtccttccaggagaaggccggctgtgatgagatctgggagaagatctgccaggtgcagggcaaggaccccagcgtggacatcacccaggacctggtggatgaaagtgaggaggagagatttgatgacatgagcagccctggcctggagctgcccagctgtgagctgagccggctggaggagattgctgagctggtggccagcagctag

SEQ ID NO: 332099 - DNA, 708 bp, Artificial Sequence
  derived and/or modified sequence
atgttcagcgaggagtgcatcatggacgtgatcggctgcctggagtatgaccccgcactgtctcaacctcggaaacatcgagaatttctgaccaaaactgccaagtttaaagaagtaatacccatctctgatcccgagctcaagcaaaagattcaccagacatatagggtccagtacattcaggatatggttctcccaacgccctctgtgttcgaggagaacatgctgtccaccctccatagcttcatcttttttaataaagtagagatcgtcgggatgcttcaagaggatgagaagtttttgactgatctttttgcccagttgaccgatgaagccacggatgaggagaagaggcaggagctcgtgaactttctcaaagagttctgtgctttttcccaaacactgcaaccgcagaatcgggatgccttcttcaaaaccctttcaaacatgggaatcttgcccgcccttgaagtgattcttgggatggatgatactcaggtcagatctgcagctacagacatcttctcttacttggtcgagtataatccttctatggtgcgcgaattcgtgatgcaagaggctcagcagaacgatgacgtgagtaaaaaacttactgagcaaaaaatcacgtccaaggttaatatcatctgtacgaattcaaagtacctgtacatcggatcatacaactgcttctactatagcttctag

SEQ ID NO: 332100 - DNA, 300 bp, Artificial Sequence
  derived and/or modified sequence
atgaccgacacccggcggcgggtgaaggtgtacaccctgaacgaggatcgacaatgggatgatcggggaaccggacacgtttcttcaggctacgtggagcggctcaagggaatgtccctgttggtgcgtgctgaatctgacggttctctcctgctggagtccaagattaacccaaatacagcgtatcagaaacagcaggacacactgattgtgtggtcagaggccgaaaattacgatctggcgctttcatttcaagagaaagccggatgcgacgaaatatgggaaaaaatttgccagtag

SEQ ID NO: 332101 - DNA, 453 bp, Artificial Sequence
  derived and/or modified sequence
atgaccgacacccggcggcgggtgaaggtgtacaccctgaacgaggacagacagtgggatgatcgggggactggccacgtgtcgagcggctacgtggagcgactcaagggcatgtcactgctcgtccgcgctgagtcagatgggtctctgctgctggagtctaaaatcaatcccaacaccgcttaccagaagcaacaggacacactgatcgtctggagtgaggctgagaattacgatctagcgctgagcttccaggaaaaagccggctgcgatgaaatctgggagaagatctgccaggttcagggcaaagacccatcagtggacattacgcaggacctggtcgatgaatccgaggaggaacggtttgacgatatgtcatcaccgggcctcgaactgccttcatgcgagctcagccgtttggaggagatcgctgagctcgtggcaagcagctag

SEQ ID NO: 332102 - DNA, 1943 bp, Artificial Sequence
  derived and/or modified sequence
gaaaatgagggttatattaaaaagctcctggagctttttcatgtgtgtgaagatttggaaaatattgaaggactgcaccacttgtatgaaattatcaaaggcatctttctcttgaatcgaactgctctttttgaagttatgttctctgaagaatgtataatggacgtcattggatgtttagaatatgatcctgctttatcacaaccacgaaaacacagggaatttctaacaaaaacagccaagtttaaagaagtgattcccatatcagatcctgagctgaaacaaaaaattcatcagacatacagagttcagtatatacaagatatggttctaccaactccttcggtctttgaagaaaacatgttatcaacacttcactcttttatctttttcaataaggtagagattgttggcatgttgcaggaagatgaaaaatttctgacagatttgtttgcacaactaacagatgaagcaacagatgaggaaaaaagacaggaattggttaactttttaaaagaattttgtgcgttttcccaaacgctacagcctcaaaacagagatgcttttttcaagactttgtcaaacatgggcatattaccagctttagaagtcatccttggcatggatgatacacaggtgcgaagtgctgctactgatatattctcatacttggttgaatataatccatccatggtacgagagtttgtcatgcaggaggcacaacagaatgatgatgtaagtaagaagttaacagagcaaaaaataaccagcaaggtaaatattatttgtactaatagtaagtatttatacataggaagctataactgtttttattattcattttaagatttaattgttgctgtttgggaaaagtgtagccataatatcagacagcttattgttcccctaaattggttcctgtctcagtttatcaatttgtcctacagcaactatttatgttcatttaaattgccttttaaaatattcatgtcagtttttttttgttttgttttgttttaattctgaagtcaacttgctatattgtgttttttaaatcatttagtcaatcaattcttgtatctggggaattaagagtaagttacctaggaaaacattgactttagggtagattctcaaaatcgccaagaatgaagaaatgtagcacagtcccttaaaatatgaagggtgctgtttctttactgcctagccatagagaacaagctgttacgttgttcacaaacactcacgttagcatctgagatataccagattttaaagtagtagagaatatatcctggtaatgtgaagggtgcgcctggatcacatagtgcgtgacatgtgagagcactaaatgtgtgtgctctcctttattttaaaataattgaaccaatgattctgattttttcctgcttcccccataacaatttggaagcaactttttacgtaagaatgagtaagaaggacctgctctcaggtccttcttaagggaggaggggaataaagatcccctaaggaaaaaaaaaaaatctgtttagaattccagcctgtggtatttttacgaaataggaaaatagactgtcttactttttgaaaagatcctatttaatgtattgtgatgtcaaaaggaaatggaatgccatgtaactgctatgtttaagtttttatttttatagtgcaggataggtgcaaaaaagcaccagtttgaactgttgtgtcatgtttttcttttataaaatattaacatcggcctcagcaacatagcaagaccctcctttagtacaaaattaatttttaaaacttagatatggtggcatgcacccatagtcccagatactcaggaggatgagaaggaagagtctcttaagaccaggagtttgactctgcagtgagctatgattgctccactgcactccagtctgggtgacgaagccagaccccatctc

SEQ ID NO: 332103 - DNA, 708 bp, Artificial Sequence
  derived and/or modified sequence
atgtttagcgaagaatgcattatggatgtgattggatgtctcgaatacgatcccgcattgagtcagccccgtaaacaccgggagttcctcacaaagacggctaaatttaaagaagtgatcccaatctccgaccccgaactcaagcagaaaatccaccagacatatagggtgcagtacatccaagacatggtgcttccaaccccgtccgtctttgaggagaacatgctatctactctgcattctttcatcttctttaataaagtcgagattgttggcatgttgcaagaagacgaaaaatttctcaccgaccttttcgcccaattgactgatgaagccacggacgaggagaagagacaggaactagtgaattttctgaaggagttttgtgctttttcacagaccctgcagccccagaacagagacgcctttttcaaaaccctgagtaatatgggtatcctgcctgctctcgaggtaatcttgggaatggacgacacccaagtccgttccgctgcgaccgacattttctcctatctcgtggaatacaacccctccatggtccgggaattcgtgatgcaggaggcccagcagaatgatgacgtgtcgaagaaactcaccgagcagaaaatcacctcaaaagttaacatcatctgtacgaactccaaatatctgtatattggctcttataactgtttctactactctttttag

SEQ ID NO: 332104 - DNA, 300 bp, Artificial Sequence
  derived and/or modified sequence
atgaccgatacacgcaggagggtcaaggtgtatacccttaatgaagacagacagtgggacgaccggggtactggccatgtttcctctggatacgttgaacggctgaaaggaatgagcctcctagtgagagccgagtctgatggttctctgctgttggagtctaaaatcaaccctaatacggcctatcagaagcagcaggatacactgattgtctggtccgaagcagagaattatgatcttgcgctgagtttccaggagaaagccggttgtgacgagatctgggagaaaatctgccagtag

SEQ ID NO: 332105 - DNA, 453 bp, Artificial Sequence
  derived and/or modified sequence
atgacggacacccgcaggagagtgaaagtgtataccctgaacgaggacaggcagtgggacgatcgtgggactggccacgtgagctcaggttacgtcgagcggcttaaaggaatgtccctactggtgcgggctgagtccgacggttctctcctgttggaatccaagattaatcctaacacagcctaccaaaagcagcaggacacgctcattgtctggtctgaggccgagaactacgatctggccctgagctttcaggagaaggctgggtgtgacgaaatatgggaaaaaatctgccaggtacaaggcaaagaccccagtgtggacattacacaggatctagtcgacgagagcgaagaggaaaggtttgacgatatgtcctcgcctggcctggaacttcctagctgcgaactatcccggctcgaggaaatcgcggagttagtagccagctcctag

SEQ ID NO: 332106 - DNA, 580 bp, Artificial Sequence
  derived and/or modified sequence
tgaggggcgaaccaagatggcggcggttttggctgtgtgaggaagacggaagagacggcggcggagggaaaccgacttccactagtccgggtcgcttgggcggccgggggccctcagagtctcccgggcagtggtagcagttgcagcaggatcaggcgcctgtcggcttctgacgtttaaaacagggggagcggaagggagccactggccgcggtggcagggccagggcccctttcctgggcgtctactggcggggcccccgccccggttcccgggcggcacgatgaccgacacccggcggcgggtgaaggtgtacacgctcaacgaggaccggcagtgggacgaccggggcaccgggcatgtgtcgtctggctacgtggagcggctgaagggcatgtccctgcttgtcagggctgagagcgacggttctctacttttagagtcgaaaataaatcctaacactgcataccagaaacaacaggacactctgattgtgtggtctgaagcagaaaattatgacttggcccttagctttcaagaaaaagctggatgtgatgaaatttgggagaaaatatgtcag

SEQ ID NO: 332107 - DNA, 534 bp, Artificial Sequence
  derived and/or modified sequence
acacaccgcccagcgctcgcacgacgggcccctttcctgggcgtctactggcggggcccccgccccggttcccgggcggcacgatgaccgacacccggcggcgggtgaaggtgtacacgctcaacgaggaccggcagtgggacgaccggggcaccgggcatgtgtcgtctggctacgtggagcggctgaagggcatgtccctgcttgtcagggctgagagcgacggttctctacttttagagtcgaaaataaatcctaacactgcataccagaaacaacaggacactctgattgtgtggtctgaagcagaaaattatgacttggcccttagctttcaagaaaaagctggatgtgatgaaatttgggagaaaatatgtcaggttcaaggaaaggacccttccgtggacatcactcaggaccttgtggatgaatctgaagaggagcgttttgatgatatgtcatcgccaggcttagaattgccatcttgtgaattaagtcgccttgaagaaattgcagaacttgtggcatcatctt

SEQ ID NO: 332108 - protein, 608 aa, Artificial Sequence
  derived and/or modified sequence
MSQEGDYGRWTISSSDESEEEKPKPDKPSTSSLLCARQGAANEPRYTCSEAQKAAHKRKISPVKFSNTDSVLPPKRQKSGSQEDLGWCLSSSDDELQPEMPQKQAEKVVIKKEKDISAPNDGTAQRTENHGAPACHRLKEEEDEYETSGEGQDIWDMLDKGNPFQFYLTRVSGVKPKYNSGALHIKDILSPLFGTLVSSAQFNYCFDVDWLVKQYPPEFRKKPILLVHGDKREAKAHLHAQAKPYENISLCQAKLDIAFGTHHTKMMLLLYEEGLRVVIHTSNLIHADWHQKTQGIWLSPLYPRIADGTHKSGESPTHFKADLISYLMAYNAPSLKEWIDVIHKHDLSETNVYLIGSTPGRFQGSQKDNWGHFRLKKLLKDHASSMPNAESWPVVGQFSSVGSLGADESKWLCSEFKESMLTLGKESKTPGKSSVPLYLIYPSVENVRTSLEGYPAGGSLPYSIQTAEKQNWLHSYFHKWSAETSGRSNAMPHIKTYMRPSPDFSKIAWFLVTSANLSKAAWGALEKNGTQLMIRSYELGVLFLPSAFGLDSFKVKQKFFAGSQEPMATFPVPYDLPPELYGSKDRPWIWNIPYVKAPDTHGNMWVPS

SEQ ID NO: 332109 - protein, 369 aa, Artificial Sequence
  derived and/or modified sequence
MVISERLRLTSMPRPSLTRTSLSARKMMLLLYEEGLRVVIHTSNLIHADWHQKTQGIWLSPLYPRIADGTHKSGESPTHFKADLISYLMAYNAPSLKEWIDVIHKHDLSETNVYLIGSTPGRFQGSQKDNWGHFRLKKLLKDHASSMPNAESWPVVGQFSSVGSLGADESKWLCSEFKESMLTLGKESKTPGKSSVPLYLIYPSVENVRTSLEGYPAGGSLPYSIQTAEKQNWLHSYFHKWSAETSGRSNAMPHIKTYMRPSPDFSKIAWFLVTSANLSKAAWGALEKNGTQLMIRSYELGVLFLPSAFGLDSFKVKQKFFAGSQEPMATFPVPYDLPPELYGSKDRPWIWNIPYVKAPDTHGNMWVPS

SEQ ID NO: 332110 - protein, 298 aa, Artificial Sequence
  derived and/or modified sequence
MSQEGDYGRWTISSSDESEEEKPKPDKPSTSSLLCARQGAANEPRYTCSEAQKAAHKRKISPVKFSNTDSVLPPKRQKSGSQEDLGWCLSSSDDELQPEMPQKQAEKVVIKKEKDISAPNDGTAQRTENHGAPACHRLKEEEDEYETSGEGQDIWDMLDKGNPFQFYLTRVSGVKPKYNSGALHIKDILSPLFGTLVSSAQFNYCFDVDWLVKQYPPEFRKKPILLVHGDKREAKAHLHAQAKPYENISLCQAKLDIAFGTHHTKMMLLLYEEGLRVVIHTSNLIHADWHQKTQGTHL

SEQ ID NO: 332111 - protein, 146 aa, Artificial Sequence
  derived and/or modified sequence
MSQEGDYGRWTISSSDESEEEKPKPDKPSTSSLLCARQGAANEPRYTCSEAQKAAHKRKISPVKFSNTDSVLPPKRQKSGSQEDLGWCLSSSDDELQPEMPQKQAEKVVIKKEKDISAPNDGTAQRTENHGAPACHRLKEEEDEYE

SEQ ID NO: 332112 - protein, 148 aa, Artificial Sequence
  derived and/or modified sequence
MSQEGDYGRWTISSSDESEEEKPKPDKPSTSSLLCARQGAANEPRYTCSEAQKAAHKRKISPVKFSNTDSVLPPKRQKSGSQEDLGWCLSSSDDELQPEMPQKQAEKVVIKKEKDISAPNDGTAQRTENHGAPACHRLKEEEDEYETS

SEQ ID NO: 332113 - protein, 161 aa, Artificial Sequence
  derived and/or modified sequence
MSQEGDYGRWTISSSDESEEEKPKPDKPSTSSLLCARQGAANEPRYTCSEAQKAAHKRKISPVKFSNTDSVLPPKRQKSGSQEDLGWCLSSSDDELQPEMPQKQAEKVVIKKEKDISAPNDGTAQRTENHGAPACHRLKEEEDEYETSGEGQDIWDMLDKG

SEQ ID NO: 332114 - protein, 151 aa, Artificial Sequence
  derived and/or modified sequence
MSQEGDYGRWTISSSDESEEEKPKPDKPSTSSLLCARQGAANEPRYTCSEAQKAAHKRKISPVKFSNTDSVLPPKRQKSGSQEDLGWCLSSSDDELQPEMPQKQAEKVVIKKEKDISAPNDGTAQRTENHGAPACHRLKEEEDEYETSGEG

SEQ ID NO: 332115 - DNA, 1827 bp, Artificial Sequence
  derived and/or modified sequence
atgagccaggagggcgactacggcagatggaccatcagcagcagcgacgagagcgaggaggagaagcccaagcccgacaagcccagcaccagcagcctgctgtgcgccagacagggcgccgccaacgagcccagatacacctgcagcgaggcccagaaggccgcccacaagagaaagatcagccccgtgaagttcagcaacaccgacagcgtgctgccccccaagagacagaagagcggcagccaggaggacctgggctggtgcctgagcagcagcgacgacgagctgcagcccgagatgccccagaagcaggccgagaaggtggtgatcaagaaggagaaggacatcagcgcccccaacgacggcaccgcccagagaaccgagaaccacggcgcccccgcctgccacagactgaaggaggaggaggacgagtacgagaccagcggcgagggccaggacatctgggacatgctggacaagggcaaccccttccagttctacctgaccagagtgagcggcgtgaagcccaagtacaacagcggcgccctgcacatcaaggacatcctgagccccctgttcggcaccctggtgagcagcgcccagttcaactactgcttcgacgtggactggctggtgaagcagtacccccccgagttcagaaagaagcccatcctgctggtgcacggcgacaagagagaggccaaggcccacctgcacgcccaggccaagccctacgagaacatcagcctgtgccaggccaagctggacatcgccttcggcacccaccacaccaagatgatgctgctgctgtacgaggagggcctgagagtggtgatccacaccagcaacctgatccacgccgactggcaccagaagacccagggcatctggctgagccccctgtaccccagaatcgccgacggcacccacaagagcggcgagagccccacccacttcaaggccgacctgatcagctacctgatggcctacaacgcccccagcctgaaggagtggatcgacgtgatccacaagcacgacctgagcgagaccaacgtgtacctgatcggcagcacccccggcagattccagggcagccagaaggacaactggggccacttcagactgaagaagctgctgaaggaccacgccagcagcatgcccaacgccgagagctggcccgtggtgggccagttcagcagcgtgggcagcctgggcgccgacgagagcaagtggctgtgcagcgagttcaaggagagcatgctgaccctgggcaaggagagcaagacccccggcaagagcagcgtgcccctgtacctgatctaccccagcgtggagaacgtgagaaccagcctggagggctaccccgccggcggcagcctgccctacagcatccagaccgccgagaagcagaactggctgcacagctacttccacaagtggagcgccgagaccagcggcagaagcaacgccatgccccacatcaagacctacatgagacccagccccgacttcagcaagatcgcctggttcctggtgaccagcgccaacctgagcaaggccgcctggggcgccctggagaagaacggcacccagctgatgatcagaagctacgagctgggcgtgctgttcctgcccagcgccttcggcctggacagcttcaaggtgaagcagaagttcttcgccggcagccaggagcccatggccaccttccccgtgccctacgacctgccccccgagctgtacggcagcaaggacagaccctggatctggaacatcccctacgtgaaggcccccgacacccacggcaacatgtgggtgcccagctag

SEQ ID NO: 332116 - DNA, 1827 bp, Artificial Sequence
  derived and/or modified sequence
atgtcacaggaaggagactatggacgctggacaatttcctcttccgacgagagcgaagaggaaaagccgaagcctgacaaaccctccaccagctcgctgctgtgcgcgcgccaaggcgccgccaacgagccgagatatacatgtagcgaggcccaaaaagccgcccacaaacgtaagatatctccagttaagttttcaaacacggactctgtgctgcctcctaaaagacaaaaaagcgggagtcaggaagacttgggctggtgcctttcttcctcggatgatgaactccagcctgaaatgcctcagaagcaagctgagaaggtcgtcatcaaaaaggaaaaagacattagcgcgcccaatgatggtaccgcccagcgtacagaaaatcatggcgccccggcatgtcacaggcttaaagaagaggaggatgaatacgaaacttccggtgagggacaggatatatgggacatgctggataaaggcaatccattccaattttacctcactcgggtatctggagtgaagcctaagtacaattctggagccctccatattaaggacatcctgagtccactttttgggacattggtgtcaagcgcccaatttaactactgctttgacgtggattggctggtcaagcagtaccccccggagtttaggaagaaacctattctgctggtgcacggcgataaacgggaagcgaaggctcacctccatgcccaggccaagccttatgagaatatcagcctttgtcaagccaaactggacattgcctttgggactcatcacacaaagatgatgctactactgtacgaggagggactccgcgtagtgatccataccagtaatctcattcacgcggattggcaccagaaaacccaggggatctggctcagtccattataccccagaatcgcagacggcacgcataagtctggtgagagcccaactcattttaaagctgacttaatatcctacctcatggcctacaacgccccaagccttaaggaatggatagacgtgatccacaaacatgacctgagcgaaaccaatgtttatctgattggcagtactccaggccggttccagggcagccagaaagacaattggggacactttcgcctcaagaagctattaaaggaccacgcttcaagcatgcccaacgccgagtcttggccagtggtgggtcagttctccagcgtggggagccttggggccgatgagtccaaatggttatgttccgagtttaaggagagtatgctgacacttggtaaggaatctaagacccctggaaagtcctcagtcccactgtatttgatctaccctagcgttgaaaatgtaagaacgagtctggaaggctaccctgccggtggatctctcccatattccatccaaacagcggaaaaacagaactggctgcattcgtattttcacaagtggtcagctgagacttcagggcggagcaacgcaatgccccacattaagacctatatgaggcccagcccagacttctccaagatcgcatggttcttagtgaccagcgcgaatctgtcaaaggctgcatggggagcgctggagaaaaatggaacgcaattgatgattaggagttatgaactgggagttctcttcttgccctcagcttttggacttgactccttcaaagtaaagcagaagtttttcgctggttctcaggaacctatggcaacctttccagtcccctatgatctccccccagagctttacggatcaaaagataggccgtggatctggaacattccatatgtgaaagctcccgacacccacggaaacatgtgggtgccctcatag

SEQ ID NO: 332117 - DNA, 1827 bp, Artificial Sequence
  derived and/or modified sequence
atgtcccaggagggtgattacggccgctggacaatttcctcaagcgatgagagcgaagaggaaaagcctaaaccggacaaacctagtaccagttcactattgtgcgcaaggcaaggcgctgccaatgagccaagatacacgtgtagtgaggcccaaaaggccgcccataagagaaagatttcacccgtaaagtttagcaacacagactcggtattgcctcccaaacggcaaaagagcggcagtcaggaggacctgggctggtgtctgtccagttcagatgatgagctgcagcctgagatgcctcagaagcaggccgagaaagtcgtcatcaaaaaagagaaggatattagtgcccccaacgacggaactgcccagagaaccgagaaccacggcgcacctgcctgccatcgcttaaaagaggaggaggatgaatatgagacgtctggtgagggacaggatatttgggatatgctcgataaaggaaatccattccagttctacctgaccagggtgtctggagtgaaaccgaagtacaatagcggcgcccttcatattaaggatatcctgagtcctctattcggcaccctggtcagtagtgctcaattcaactactgtttcgacgtggactggctggtgaagcagtacccccccgaattccgtaaaaagccaatcctgctggtccatggcgataaacgtgaggccaaagctcacctgcatgcgcaggcaaagccctacgagaatatctccttgtgtcaggccaagcttgacattgcctttggaacacaccacaccaaaatgatgcttcttttgtatgaggagggactgagggtcgtcattcacacatccaaccttatccacgcagactggcaccaaaagacacaaggaatctggctttcccctctgtaccccaggatcgccgatgggacccataaaagtggcgagtcccccacacactttaaagcggacctgattagctacctaatggcctacaatgctccttctctcaaagaatggatcgacgtcatccacaaacacgatctgtccgaaacgaacgtgtacctgatagggtctactcccggtcggtttcaaggctcccaaaaggacaactggggccattttcgcctgaagaagttactgaaggaccacgcatctagtatgccaaacgcagaatcctggcccgtggtgggtcagttttcttcggtaggatcattgggggccgacgagtctaaatggctgtgtagcgagtttaaagagtcaatgctcaccctgggaaaggaaagcaaaacaccagggaaatcttcagtaccgctgtacctgatatatccctcagttgagaacgtgaggacctctttagagggttaccccgctggtgggtcactaccgtacagcatccagacagccgagaagcaaaattggctccactcatacttccataaatggtccgcggaaaccagtggcagatcaaacgccatgccacacattaagacctacatgcgtccctcaccagatttttctaagattgcatggttccttgtgacatctgctaacctctcaaaggcggcctggggcgcactggagaaaaatggcacgcagctgatgattcgtagttatgaacttggggtgttgtttttgcctagcgcctttggcctagatagcttcaaagttaaacagaagttttttgcaggatcacaagagccaatggccacctttcctgttccctatgaccttccacctgagctttatgggagcaaagatcgcccgtggatatggaacatcccttatgtgaaagcacccgacacccacggtaacatgtgggtgccttcctag

SEQ ID NO: 332118 - DNA, 1827 bp, Artificial Sequence
  derived and/or modified sequence
atgagccaggagggggactatggccgctggaccatcagcagcagtgatgagagcgaggaggagaagcccaagccagacaagcccagcaccagcagcctgctgtgtgcccggcagggcgccgccaatgagccccgctacacctgcagcgaggcccagaaggccgcccacaagaggaagatcagccctgtgaagttcagcaacacagacagcgtgctgccccccaagaggcagaagagcggcagccaggaggacctgggctggtgcctgagcagcagtgatgatgagctgcagcctgagatgccccagaagcaggccgagaaggtggtgatcaagaaggagaaggacatcagcgccccaaatgatggaacagcccagaggacagagaaccacggggccccagcctgccaccggctgaaggaggaggaggatgaatatgagaccagcggggagggccaggacatctgggacatgctggacaagggcaaccccttccagttctacctgaccagggtgtctggagtgaagcccaagtacaacagcggggccctgcacatcaaggacatcctgagccccctgtttggcaccctggtgtcctctgcccagttcaactactgctttgatgtggactggctggtgaagcagtacccacctgagttcaggaagaagcccatcctgctggtgcacggggacaagcgggaggccaaggcccacctgcacgcccaggccaagccctatgagaacatcagcctgtgccaggccaagctggacatcgccttcggcacccaccacaccaagatgatgctgctgctgtatgaggagggcctgcgggtggtgatccacaccagcaacctgattcatgctgactggcaccagaagacccagggcatctggctgagccccctgtaccccagaattgctgatggcacccacaagagcggggagagccccacccacttcaaggctgacctgatctcctacctgatggcctacaatgcccccagcctgaaggagtggattgatgtgatccacaagcatgacctgtctgagaccaacgtgtacctgattggcagcaccccaggccgcttccagggcagccagaaggacaactggggccacttccggctgaagaagctgctgaaggaccacgccagctccatgcccaatgctgagagctggcctgtggtgggccagttcagctctgtgggcagcctgggcgcagatgagagcaagtggctgtgcagcgagttcaaggagagcatgctgaccctgggcaaggagagcaagacccctgggaagagctctgtgcccctgtacctgatctaccccagcgtggagaatgtgaggaccagcctggagggctacccagctgggggcagcctgccctacagcatccagacagctgagaagcagaactggctgcacagctacttccacaagtggagcgctgagaccagcggccgcagcaatgccatgccccacatcaagacctacatgaggcccagcccagacttcagcaagatcgcctggttcctggtgaccagcgccaacctgagcaaggccgcctggggcgccctggagaagaatggcacccagctgatgatccgctcctatgagctgggcgtgctcttcctgcccagcgccttcggcctggacagcttcaaggtgaagcagaagttctttgctggcagccaggagcccatggccaccttccctgtgccctatgacctgcccccagagctgtatggcagcaaggaccggccctggatctggaacatcccctacgtgaaggccccagacacccacggcaacatgtgggtgcccagctag

SEQ ID NO: 332119 - DNA, 1827 bp, Artificial Sequence
  derived and/or modified sequence
atgagccaggagggcgactacggccggtggaccatcagcagcagcgatgaaagtgaggaggagaagcccaaaccagataagccgtcaaccagctccctcttgtgtgctaggcagggagcagcgaatgagccacgctatacctgctccgaggcccagaaagctgcacataagaggaagatatcacctgtaaagttctctaacaccgactcagtgttgccgcccaagaggcagaagtcaggttcgcaagaggaccttgggtggtgcctctcttcttccgatgacgaactgcagcccgagatgccccagaaacaggctgagaaagtggtgataaagaaggaaaaagatatttccgcacctaacgacggtaccgcacagagaacagaaaaccacggggccccggcgtgtcaccgactgaaagaggaggaggacgagtacgaaaccagtggggagggacaggacatctgggacatgctggacaagggaaacccattccagttctatctgaccagggtgtcaggggtgaagcccaagtataactctggcgccctgcatatcaaggacattctgtcacctctttttggaactttggtgtcttccgcccagtttaattattgcttcgacgtagattggcttgtgaaacaatatccacctgaattcaggaagaaacctatcttgcttgtacacggtgacaagcgggaagccaaggcacacctccacgcacaagcgaagccctacgaaaacatttcactgtgccaggctaaactggatattgctttcggcacacaccacactaagatgatgttacttttgtatgaggaggggcttagggtagtgatccataccagtaacttgatccatgccgattggcatcagaagactcaaggcatttggctttcgcctctctatccccgaatcgctgacggaactcataagagcggcgagtctccaacacactttaaagctgacttaatcagctatctgatggcttataacgcaccttccctgaaagagtggatcgatgtcattcataaacacgatctgagtgagacgaacgtctatctgatcgggtcaacaccaggcaggttccaagggagtcagaaagacaattggggccactttagactgaaaaaactgttgaaagaccatgcaagcagcatgcccaacgcggaatcctggccggtggttggacagttttcctctgttggaagtttgggggcagacgagtccaaatggctgtgtagtgagtttaaggaatcaatgttgacattgggaaaggagagcaagacgccaggaaagtccagtgttcctttatacctgatctatcctagcgtcgagaacgtcagaacctctttggaggggtacccagccggtggcagtctgccatattcaatacagacagcagagaagcagaattggctgcactcttatttccataaatggtctgccgaaacaagtggaaggtctaatgctatgccacatattaagacctacatgaggccatccccagatttctctaaaattgcatggtttctggtgaccagtgctaacctgagcaaggcagcctggggggccctagaaaagaacggcactcagctgatgattcggagctatgaattgggcgtcctattcctgcctagtgcctttgggctggattccttcaaggtgaagcagaagtttttcgctggctcccaggagccaatggccaccttcccagtgccctatgaccttccgccagagctttacgggagcaaagatcgtccatggatttggaatatcccatatgttaaagcaccagatacgcacggcaatatgtgggtgccaagctag

SEQ ID NO: 332120 - DNA, 1827 bp, Artificial Sequence
  derived and/or modified sequence
atgagccaggagggcgactacggccggtggaccatcagcagcagcgacgagtctgaggaagaaaaaccaaagcctgacaagccctcgacaagctctctgctctgcgctagacagggggcagcaaatgagcctcgatatacttgttctgaggcccagaaagctgcccacaagaggaagatttccccggtgaaattttccaatacagatagtgtgctccctccaaaaagacagaagagtgggtcacaggaagatctcgggtggtgcctgagttcttccgatgatgagctgcaacctgaaatgccacagaagcaggctgagaaggtggtgatcaaaaaggagaaggacatctcggcacctaacgacggaacagcgcagcgcaccgaaaatcacggcgcacccgcctgtcatagactaaaagaggaggaggatgagtacgaaacaagtggcgaagggcaggacatctgggacatgctggataaaggcaatcctttccagttctacctgacccgtgtgtccggtgtaaaaccaaagtacaattcaggcgcactgcatatcaaggatattctgtctcccctattcggcaccctcgtgagctctgcccagttcaattactgcttcgatgtggattggctcgtgaagcaatacccgcccgagttcaggaagaagccaatcctcttagtacacggcgataagagggaggcgaaagctcacctgcatgcccaggctaaaccgtatgagaatattagcctgtgtcaggcgaagctcgacattgcttttgggactcatcataccaagatgatgcttctgctgtacgaggaaggattgcgagtggtgattcatacctctaacctgattcacgccgactggcaccagaagacacagggtatttggctgtcgccgctttatccgcgcatcgcggacggcacccacaagtctggagagtcccctactcacttcaaggccgatctcatctcctatctcatggcttacaatgccccttcactaaaggagtggatcgacgtgattcacaagcacgacctttctgagacaaacgtgtacttaatcggtagcacgcccgggagattccaaggcagtcagaaggacaattgggggcactttcggttgaagaagctcttaaaggatcacgcttcttcaatgcctaatgctgaaagctggccagttgtgggtcagttctcctcagtgggctctctgggtgccgacgagtccaaatggttatgctccgagttcaaggagagcatgttgaccctcgggaaggagtcaaaaacaccgggcaaaagctccgtacccctgtacctgatttaccctagcgtcgaaaatgtgcgcactagtctggaggggtatccggccggaggctcactgccatacagtattcagaccgccgagaagcagaactggctccatagttactttcacaagtggtctgctgaaacttctggccggtccaatgctatgccccacatcaagacatacatgcggccatcccccgatttttccaaaattgcttggtttctggtgaccagcgctaacctctcaaaggctgcttggggtgccctagaaaaaaacggtacgcagttaatgatacgttcctacgaattaggagtgctgtttcttcccagtgcatttggattggattcctttaaagtaaagcagaaattcttcgccgggtcgcaggaacctatggcgacctttccagtcccatatgacctccctcccgagttgtacgggtcaaaggaccggccatggatctggaacattccatacgtcaaggcccctgacactcatggtaatatgtgggtcccttcatag

SEQ ID NO: 332121 - DNA, 1827 bp, Artificial Sequence
  derived and/or modified sequence
atgagccaggaaggtgattatgggaggtggaccatctcatcatctgacgagagtgaagaggagaaacctaagccggataagccttcaacatcatcactattgtgtgctcggcagggcgctgccaatgaacctcggtatacttgctccgaggctcagaaagcggctcacaaacgcaaaatcagtccagtcaagttctcaaataccgactctgttctgccaccgaaaagacagaaatctggttcccaggaagatctggggtggtgtctgtccagctccgatgacgaacttcaacccgaaatgccccagaagcaggcggaaaaggtagttatcaaaaaggagaaagacatttcagctccaaacgatggtaccgcacagaggactgaaaatcatggagcccctgcttgccacagacttaaggaggaagaggatgaatacgagacctctggcgaaggtcaggacatctgggatatgctcgacaaaggcaaccctttccagttctatcttacccgggttagtggggttaaacccaaatataattcaggagcactgcacattaaggacattcttagcccactgttcgggaccctcgttagtagtgcccagttcaactattgttttgacgtggactggctggtgaaacagtatccccctgagtttagaaaaaaacctatcctgctggtgcacggcgataaaagggaagccaaagctcacctgcatgcacaggccaagccgtatgagaatatttcgctatgtcaagccaagcttgacattgcttttgggactcaccacaccaaaatgatgctgttgttatatgaagaaggcctacgggtggtaatccacactagcaatctaatccatgccgactggcaccaaaaaacccaggggatctggctgtcccccctttacccacgtattgccgacggtacacacaaatcaggggaatctcccacgcacttcaaggcagacctcatcagctacctgatggcttataacgctccgagcctgaaagagtggatcgatgtgattcacaagcacgacctgagcgaaaccaacgtatacctgatcggatccaccccagggagattccagggatctcagaaagataactggggacatttccggctgaagaagctgctgaaggatcacgctagttcgatgcccaatgccgaatcttggcccgtggtgggccagttttccagtgtaggctctctcggggcagatgaatccaagtggttgtgcagcgagttcaaggagagtatgctgactctggggaaagagtcaaagacacccggaaagtcttcagttccactgtatctcatataccctagtgtagaaaacgtgcggacatctctcgaggggtatccagccggaggttcgctgccatattccattcagacagccgaaaaacagaactggctacacagctatttccacaagtggtcggcggagacttccggaagatctaacgccatgcctcatatcaagacgtacatgcgcccttctccagatttttcaaaaatcgcgtggttccttgtgacatcagctaacctgagcaaagcggcatggggagcattagagaagaatggcacacagcttatgatccggtcatatgagctaggggtgctttttctcccatcggcatttggcctcgactcgtttaaagttaaacagaagttttttgccggatcccaggagcctatggccacattccctgtcccgtatgatttaccccctgaactgtatgggtccaaagatagaccatggatctggaatataccatacgtgaaggctcctgacacccacggtaacatgtgggtgccctcatag

SEQ ID NO: 332122 - DNA, 1827 bp, Artificial Sequence
  derived and/or modified sequence
atgagccaggagggcgactatgggaggtggaccattagctctagtgacgagtctgaagaggagaaacccaaaccagataaaccctcaacctcgtccctgctatgtgctcggcagggcgcagctaatgaaccacggtatacctgctcagaagcacaaaaggccgctcacaagaggaaaatctctcctgtgaagttttctaacaccgatagcgttctaccccctaagaggcagaagagtggttcccaggaggacctgggatggtgcctttcttccagtgacgatgaactgcagccagagatgccccagaaacaggcagaaaaagttgtgatcaaaaaagagaaagatatctctgcccctaatgatggtaccgcccagcgcaccgaaaatcacggcgcacccgcatgccatcggctcaaagaagaagaagacgagtatgagacctcaggagagggtcaggatatctgggatatgctggacaagggtaaccccttccagttctatctgacgcgcgtaagcggcgtcaagccaaagtacaatagcggcgctctgcacattaaagacatcctgtccccactgttcgggacgttagtgagttctgcgcagttcaactactgctttgacgtggactggctcgtcaaacaatacccaccggagtttcggaagaaacccattctcctagtgcacggtgacaagcgcgaagctaaggcccacctgcacgcccaggcgaagccgtacgagaacattagcctctgtcaggctaaactcgacattgcattcggtacacaccatacaaagatgatgctgctcctgtacgaggaaggacttcgcgtggtgattcacacttcaaatctgatccatgctgactggcaccaaaagacccaggggatctggctatctccactataccccagaattgccgatggaacacacaaatcaggcgagtcccccactcacttcaaagccgacctcatctcttacctcatggcatacaacgctccctccctgaaggaatggatcgatgtgatccataagcacgacctctccgaaacaaacgtgtacttaataggatctacccccggaagattccaggggtcccagaaggataactggggtcacttcagattaaagaaactgctgaaagaccacgcgtcatctatgccaaatgctgagtcttggcccgtggtgggacagttcagtagcgtggggtctttaggggcagatgagagtaaatggctgtgttccgagttcaaggaaagcatgctcacactcggcaaagaatcaaaaactccaggaaaatctagcgtcccgctctatctgatttaccccagtgtggaaaacgttagaactagcctggaggggtatcctgctggagggtctctcccctactccatacagaccgcagagaaacagaactggctccactcctactttcacaagtggtcagccgaaacatcaggtcgttccaatgccatgccgcatatcaaaacgtatatgagaccttctcccgacttttccaagatcgcctggtttctggtgacctcagctaacctgtcaaaggctgcatggggggctttagaaaagaacggcactcagctgatgatacggtcctatgagctcggagtgctattcctcccttccgcgttcgggctggatagcttcaaggtcaagcagaagttcttcgctggaagccaggaaccaatggcaactttccctgtgccctacgacctgccgccagagttgtatggcagcaaggacagaccctggatatggaacatcccttatgtgaaagcacccgatacacatggcaatatgtgggtgccgtcctag

SEQ ID NO: 332123 - DNA, 3696 bp, Artificial Sequence
  derived and/or modified sequence
gttggttctgtgcgcctcagagttggagcacacagctgtattaaaaaggcaaatcgaaggccgggcgcggtgactcacgcctgtcatcctagcactttgggaggccgaggcggctgaatcacttgaggttaggagtttgagatcagcccgggcaacatggtgaaaccccgtctctacaaaaatagaaaaattagccgagcgtgatggtggatgcctgtaatcctagctcctcgggaggctaaggagtataatgtctcaggaaggcgattatgggaggtggaccatatctagtagtgatgaaagtgaggaagaaaagccaaaaccagacaagccatctacctcttctcttctctgtgccaggcaaggagcagcaaatgagcccaggtacacctgttccgaggcccagaaagctgcacacaagaggaaaatatcacctgtgaaattcagcaatacagattcagttttacctcccaaaaggcagaaaagcggttcccaggaggacctcggctggtgtctgtccagcagtgatgatgagctgcaaccagaaatgccgcagaagcaggctgagaaagtggtgatcaaaaaggagaaagacatctctgctcccaatgacggcactgcccaaagaactgaaaatcatggcgctcccgcctgccacaggctcaaagaggaggaagacgagtatgagacatcaggggagggccaggacatttgggacatgctggataaagggaaccccttccagttttacctcactagagtctctggagttaagccaaagtataactctggagccctccacatcaaggatattttatctcctttatttgggacgcttgtttcttcagctcagtttaactactgctttgacgtggactggctcgtaaaacagtatccaccagagttcaggaagaagccaatcctgcttgtgcatggtgataagcgagaggctaaggctcacctccatgcccaggccaagccttacgagaacatctctctctgccaggcaaagttggatattgcgtttggaacacaccacacgaaaatgatgctgctgctctatgaagaaggcctccgggttgtcatacacacctccaacctcatccatgctgactggcaccagaaaactcaaggaatatggttgagccccttatacccacgaattgctgatggaacccacaaatctggagagtcgccaacacattttaaagctgatctcatcagttacttgatggcttataatgccccttctctcaaggagtggatagatgtcattcacaagcacgatctctctgaaacaaatgtttatcttattggttcaaccccaggacgctttcaaggaagtcaaaaagataattggggacattttagacttaagaagcttctgaaagaccatgcctcatccatgcctaacgcagagtcctggcctgtcgtaggtcagttttcaagcgttggctccttgggagccgatgaatcaaagtggttatgttctgagtttaaagagagcatgctgacactggggaaggaaagcaagactccaggaaaaagctctgttcctctttacttgatctatccttctgtggaaaatgtgcggaccagtttagaaggatatcctgctgggggctctcttccctatagcatccagacagctgaaaaacagaattggctgcattcctattttcacaaatggtcagctgagacttctggccgcagcaatgccatgccacatattaagacatatatgaggccttctccagacttcagtaaaattgcttggttccttgtcacaagcgcaaatctgtccaaggctgcctggggagcattggagaagaatggcacccagctgatgatccgctcctacgagctcggggtccttttcctcccttcagcatttggtctagacagtttcaaagtgaaacagaagttcttcgctggcagccaggagccaatggccacctttcctgtgccatatgatttgcctccagaactgtatggaagtaaagatcggccatggatatggaacattccttatgtcaaagcaccggatacgcatgggaacatgtgggtgccctcctgagaatcttgaggcactgtgaaatttaagtgtaagacattgagccacaaacatggaatctcttctttgtactggatgtccacttcccttaaagtcttatttgcacccttacaaaatctttccaaaggtcactcttatgaatggatgttggttatacttttaatggacattaacattcctaataaagtattagtttcttaattcacttttatatgttttggaaagaaaattagtgaacttctctatgttaaaaatacgtactgcttgagtatcccctgtctgaaatgcttgggaccagaagtgtttcagcttttggatttttttgaattttggaatatttgcatagcataatgagatatcttgggaatgggacccaaatctaaacacaaaattcatttatgtttcatatacaccttatatacaataacctaaaggtgattttatatgatattttgagtaattttatgcatgaaacaaagttttgacaggcttttgaccgtgattcatcacatgagttcaggcatggaaattttcatttggagcatcatgtcagcactcaaaaagttctggatcttggagcagttcagattttcagattagggatgctcaaatctatatagatataaaattatcctcacagtaacatagaatctcttggtgctgtcagctgttgggaattgaagattgactttgtgcttccaccctccatccagaaaggcacccttcattccaccagaactttacccaggaagaacacgatcatttcctttttcaccgatgccctctctcagctttctgagtacgtctcttggggtcgctggaggtgatcctaggatctgtctctgagaccaatgtgctgtttcagccccctgcagctaagaattgtattgactgtcctcacagcggcttttcatagctttcagcttcagctttacgaggcttctcctctctccctggcaccctgctggctgcctcactgcttacagacaggtcccaccaaacccaaacacctgcctagggtaaatgggtctctcttctatccccagaaactttcagaggaagcagctcatagaaacatacaaaagcacacaagtattttgggaaaaaatcctaaaaggtgacttaatttgatgccttaaattcacaagtgaggaagctaaggcctagaaggttaaggatgtccccagggtcacacagtgagcggggctcagagcttgagtgtctttgtgctttgtgtacattgtgttctccctagggtgctttagaccctgtttgttttcttctgcatgaggctgatttccagtttgtcatcaacctctttatcttataatttaggatagagttgaacgttagtcttgaaagattttctaaagtagtctttcaaactgttcctcagaggcctaggattttccaaaagtaccttaggaaccttgtaggctgcagtgggggtgtggcgatagagcaggaggcagggagacagggctgcagggcctcccaccttccaacagacaggctctgctgtatctgttgtacatactgggattctgtaaaggacattatctggggtgttgtatgtatttttgtgtgttctgctttttttaaataaacttgaaaagctactg

SEQ ID NO: 332124 - DNA, 2210 bp, Artificial Sequence
  derived and/or modified sequence
gttctgtgcgcctcagagttggagcacacagctgtattaaaaaggcaaatcgaaggccgggcgcggtgactcacgcctgtcatcctagcactttgggaggccgaggcggctgaatcacttgaggttaggagtttgagatcagcccgggcaacatggtgaaaccccgtctctacaaaaatagaaaaattagccgagcgtgatggtggatgcctgtaatcctagctcctcgggaggctaaggagtataatgtctcaggaaggcgattatgggaggtggaccatatctagtagtgatgaaagtgaggaagaaaagccaaaaccagacaagccatctacctcttctcttctctgtgccaggcaaggagcagcaaatgagcccaggtacacctgttccgaggcccagaaagctgcacacaagaggaaaatatcacctgtgaaattcagcaatacagattcagttttacctcccaaaaggcagaaaagcggttcccaggaggacctcggctggtgtctgtccagcagtgatgatgagctgcaaccagaaatgccgcagaagcaggctgagaaagtggtgatcaaaaaggagaaagacatctctgctcccaatgacggcactgcccaaagaactgaaaatcatggcgctcccgcctgccacaggctcaaagaggaggaagacgagtatgagacatcaggggagggccaggacatttgggacatgctggataaagggaaccccttccagttttacctcactagagtctctggagttaagccaaagtataactctggagccctccacatcaaggatattttatctcctttatttgggacgcttgtttcttcagctcagtttaactactgctttgacgtggactggctcgtaaaacagtatccaccagagttcaggaagaagccaatcctgcttgtgcatggtgataagcgagaggctaaggctcacctccatgcccaggccaagccttacgagaacatctctctctgccaggaaaatgatgctgctgctctatgaagaaggcctccgggttgtcatacacacctccaacctcatccatgctgactggcaccagaaaactcaaggaatatggttgagccccttatacccacgaattgctgatggaacccacaaatctggagagtcgccaacacattttaaagctgatctcatcagttacttgatggcttataatgccccttctctcaaggagtggatagatgtcattcacaagcacgatctctctgaaacaaatgtttatcttattggttcaaccccaggacgctttcaaggaagtcaaaaagataattggggacattttagacttaagaagcttctgaaagaccatgcctcatccatgcctaacgcagagtcctggcctgtcgtaggtcagttttcaagcgttggctccttgggagccgatgaatcaaagtggttatgttctgagtttaaagagagcatgctgacactggggaaggaaagcaagactccaggaaaaagctctgttcctctttacttgatctatccttctgtggaaaatgtgcggaccagtttagaaggatatcctgctgggggctctcttccctatagcatccagacagctgaaaaacagaattggctgcattcctattttcacaaatggtcagctgagacttctggccgcagcaatgccatgccacatattaagacatatatgaggccttctccagacttcagtaaaattgcttggttccttgtcacaagcgcaaatctgtccaaggctgcctggggagcattggagaagaatggcacccagctgatgatccgctcctacgagctcggggtccttttcctcccttcagcatttggtctagacagtttcaaagtgaaacagaagttcttcgctggcagccaggagccaatggccacctttcctgtgccatatgatttgcctccagaactgtatggaagtaaagatcggccatggatatggaacattccttatgtcaaagcaccggatacgcatgggaacatgtgggtgccctcctgagaatcttgaggcactgtgaaatttaagtgtaagacattgagccacaaacatggaatctcttctttgtactggatgtccacttcccttaaagtcttatttgcacccttacaaaatctttccaaaggtcactcttatgaatggatgttggttatacttttaatggacattaaca

SEQ ID NO: 332125 - DNA, 2068 bp, Artificial Sequence
  derived and/or modified sequence
atccgaggcaagcgttggttctgtgcgcctcaggagtataatgtctcaggaaggcgattatgggaggtggaccatatctagtagtgatgaaagtgaggaagaaaagccaaaaccagacaagccatctacctcttctcttctctgtgccaggcaaggagcagcaaatgagcccaggtacacctgttccgaggcccagaaagctgcacacaagaggaaaatatcacctgtgaaattcagcaatacagattcagttttacctcccaaaaggcagaaaagcggttcccaggaggacctcggctggtgtctgtccagcagtgatgatgagctgcaaccagaaatgccgcagaagcaggctgagaaagtggtgatcaaaaaggagaaagacatctctgctcccaatgacggcactgcccaaagaactgaaaatcatggcgctcccgcctgccacaggctcaaagaggaggaagacgagtatgagacatcaggggagggccaggacatttgggacatgctggataaagggaaccccttccagttttacctcactagagtctctggagttaagccaaagtataactctggagccctccacatcaaggatattttatctcctttatttgggacgcttgtttcttcagctcagtttaactactgctttgacgtggactggctcgtaaaacagtatccaccagagttcaggaagaagccaatcctgcttgtgcatggtgataagcgagaggctaaggctcacctccatgcccaggccaagccttacgagaacatctctctctgccaggcaaagttggatattgcgtttggaacacaccacacgaaaatgatgctgctgctctatgaagaaggcctccgggttgtcatacacacctccaacctcatccatgctgactggcaccagaaaactcaaggaatatggttgagccccttatacccacgaattgctgatggaacccacaaatctggagagtcgccaacacattttaaagctgatctcatcagttacttgatggcttataatgccccttctctcaaggagtggatagatgtcattcacaagcacgatctctctgaaacaaatgtttatcttattggttcaaccccaggacgctttcaaggaagtcaaaaagataattggggacattttagacttaagaagcttctgaaagaccatgcctcatccatgcctaacgcagagtcctggcctgtcgtaggtcagttttcaagcgttggctccttgggagccgatgaatcaaagtggttatgttctgagtttaaagagagcatgctgacactggggaaggaaagcaagactccaggaaaaagctctgttcctctttacttgatctatccttctgtggaaaatgtgcggaccagtttagaaggatatcctgctgggggctctcttccctatagcatccagacagctgaaaaacagaattggctgcattcctattttcacaaatggtcagctgagacttctggccgcagcaatgccatgccacatattaagacatatatgaggccttctccagacttcagtaaaattgcttggttccttgtcacaagcgcaaatctgtccaaggctgcctggggagcattggagaagaatggcacccagctgatgatccgctcctacgagctcggggtccttttcctcccttcagcatttggtctagacagtttcaaagtgaaacagaagttcttcgctggcagccaggagccaatggccacctttcctgtgccatatgatttgcctccagaactgtatggaagtaaagatcggccatggatatggaacattccttatgtcaaagcaccggatacgcatgggaacatgtgggtgccctcctgagaatcttgaggcactgtgaaatttaagtgtaagacattgagccacaaacatggaatctcttctttgtactggatgtccacttcccttaaagtcttatttgcacccttacaaaatctttccaaaggtcactcttatgaatggatgttggttatacttttaatggacattaacattcctaataaagtattagtttcttaattc

SEQ ID NO: 332126 - protein, 279 aa, Artificial Sequence
  derived and/or modified sequence
MSQEGDYGRWTISSSDESEEEKPKPDKPSTSSLLCARQGAANEPRYTCSEAQKAAHKRKISPVKFSNTDSVLPPKRQKSGSQEDLGWCLSSSDDELQPEMPQKQAEKVVIKKEKDISAPNDGTAQRTENHGAPACHRLKEEEDEYETSGEGQDIWDMLDKGNPFQFYLTRVSGVKPKYNSGALHIKDILSPLFGTLVSSAQFNYCFDVDWLVKQYPPEFRKKPILLVHGDKREAKAHLHAQAKPYENISLCQAKLDIAFGTHHTKMMLLLYEEGLRVVI

SEQ ID NO: 332127 - DNA, 897 bp, Artificial Sequence
  derived and/or modified sequence
atgagccaggagggcgactacggcagatggaccatcagcagcagcgacgagagcgaggaggagaagcccaagcccgacaagcccagcaccagcagcctgctgtgcgccagacagggcgccgccaacgagcccagatacacctgcagcgaggcccagaaggccgcccacaagagaaagatcagccccgtgaagttcagcaacaccgacagcgtgctgccccccaagagacagaagagcggcagccaggaggacctgggctggtgcctgagcagcagcgacgacgagctgcagcccgagatgccccagaagcaggccgagaaggtggtgatcaagaaggagaaggacatcagcgcccccaacgacggcaccgcccagagaaccgagaaccacggcgcccccgcctgccacagactgaaggaggaggaggacgagtacgagaccagcggcgagggccaggacatctgggacatgctggacaagggcaaccccttccagttctacctgaccagagtgagcggcgtgaagcccaagtacaacagcggcgccctgcacatcaaggacatcctgagccccctgttcggcaccctggtgagcagcgcccagttcaactactgcttcgacgtggactggctggtgaagcagtacccccccgagttcagaaagaagcccatcctgctggtgcacggcgacaagagagaggccaaggcccacctgcacgcccaggccaagccctacgagaacatcagcctgtgccaggccaagctggacatcgccttcggcacccaccacaccaagatgatgctgctgctgtacgaggagggcctgagagtggtgatccacaccagcaacctgatccacgccgactggcaccagaagacccagggcacccacctgtag

SEQ ID NO: 332128 - DNA, 441 bp, Artificial Sequence
  derived and/or modified sequence
atgagccaggagggcgactacggcagatggaccatcagcagcagcgacgagagcgaggaggagaagcccaagcccgacaagcccagcaccagcagcctgctgtgcgccagacagggcgccgccaacgagcccagatacacctgcagcgaggcccagaaggccgcccacaagagaaagatcagccccgtgaagttcagcaacaccgacagcgtgctgccccccaagagacagaagagcggcagccaggaggacctgggctggtgcctgagcagcagcgacgacgagctgcagcccgagatgccccagaagcaggccgagaaggtggtgatcaagaaggagaaggacatcagcgcccccaacgacggcaccgcccagagaaccgagaaccacggcgcccccgcctgccacagactgaaggaggaggaggacgagtacgagtag

SEQ ID NO: 332129 - DNA, 447 bp, Artificial Sequence
  derived and/or modified sequence
atgagccaggagggcgactacggcagatggaccatcagcagcagcgacgagagcgaggaggagaagcccaagcccgacaagcccagcaccagcagcctgctgtgcgccagacagggcgccgccaacgagcccagatacacctgcagcgaggcccagaaggccgcccacaagagaaagatcagccccgtgaagttcagcaacaccgacagcgtgctgccccccaagagacagaagagcggcagccaggaggacctgggctggtgcctgagcagcagcgacgacgagctgcagcccgagatgccccagaagcaggccgagaaggtggtgatcaagaaggagaaggacatcagcgcccccaacgacggcaccgcccagagaaccgagaaccacggcgcccccgcctgccacagactgaaggaggaggaggacgagtacgagaccagctag

SEQ ID NO: 332130 - DNA, 840 bp, Artificial Sequence
  derived and/or modified sequence
atgagccaggagggcgactacggcagatggaccatcagcagcagcgacgagagcgaggaggagaagcccaagcccgacaagcccagcaccagcagcctgctgtgcgccagacagggcgccgccaacgagcccagatacacctgcagcgaggcccagaaggccgcccacaagagaaagatcagccccgtgaagttcagcaacaccgacagcgtgctgccccccaagagacagaagagcggcagccaggaggacctgggctggtgcctgagcagcagcgacgacgagctgcagcccgagatgccccagaagcaggccgagaaggtggtgatcaagaaggagaaggacatcagcgcccccaacgacggcaccgcccagagaaccgagaaccacggcgcccccgcctgccacagactgaaggaggaggaggacgagtacgagaccagcggcgagggccaggacatctgggacatgctggacaagggcaaccccttccagttctacctgaccagagtgagcggcgtgaagcccaagtacaacagcggcgccctgcacatcaaggacatcctgagccccctgttcggcaccctggtgagcagcgcccagttcaactactgcttcgacgtggactggctggtgaagcagtacccccccgagttcagaaagaagcccatcctgctggtgcacggcgacaagagagaggccaaggcccacctgcacgcccaggccaagccctacgagaacatcagcctgtgccaggccaagctggacatcgccttcggcacccaccacaccaagatgatgctgctgctgtacgaggagggcctgagagtggtgatctag

SEQ ID NO: 332131 - DNA, 486 bp, Artificial Sequence
  derived and/or modified sequence
atgagccaggagggcgactacggcagatggaccatcagcagcagcgacgagagcgaggaggagaagcccaagcccgacaagcccagcaccagcagcctgctgtgcgccagacagggcgccgccaacgagcccagatacacctgcagcgaggcccagaaggccgcccacaagagaaagatcagccccgtgaagttcagcaacaccgacagcgtgctgccccccaagagacagaagagcggcagccaggaggacctgggctggtgcctgagcagcagcgacgacgagctgcagcccgagatgccccagaagcaggccgagaaggtggtgatcaagaaggagaaggacatcagcgcccccaacgacggcaccgcccagagaaccgagaaccacggcgcccccgcctgccacagactgaaggaggaggaggacgagtacgagaccagcggcgagggccaggacatctgggacatgctggacaagggctag

SEQ ID NO: 332132 - DNA, 456 bp, Artificial Sequence
  derived and/or modified sequence
atgagccaggagggcgactacggcagatggaccatcagcagcagcgacgagagcgaggaggagaagcccaagcccgacaagcccagcaccagcagcctgctgtgcgccagacagggcgccgccaacgagcccagatacacctgcagcgaggcccagaaggccgcccacaagagaaagatcagccccgtgaagttcagcaacaccgacagcgtgctgccccccaagagacagaagagcggcagccaggaggacctgggctggtgcctgagcagcagcgacgacgagctgcagcccgagatgccccagaagcaggccgagaaggtggtgatcaagaaggagaaggacatcagcgcccccaacgacggcaccgcccagagaaccgagaaccacggcgcccccgcctgccacagactgaaggaggaggaggacgagtacgagaccagcggcgagggctag

SEQ ID NO: 332133 - DNA, 897 bp, Artificial Sequence
  derived and/or modified sequence
atgtcccaggaaggagattacggaagatggactattagttcttcagacgaaagtgaggaagagaaacctaagcccgacaaacccagcaccagcagtctcctgtgcgcacgccaaggagccgctaacgagccaagatacacatgttcggaagctcaaaaggcagcacataagcggaagatcagcccagtaaaattttccaacaccgactctgttttgcctccaaaacgtcagaaatcaggatctcaggaagacctcggttggtgcctctcaagttcggacgatgagctacagcctgagatgccccaaaagcaggcagagaaagtggttatcaaaaaagagaaggacatcagcgctccgaatgacggcaccgcccagcgcaccgagaaccacggtgcaccggcttgtcatcgactcaaagaggaggaagatgagtatgagacatcaggagaaggccaggatatctgggacatgctggacaaaggcaacccgtttcaattttacttgacacgcgtgtccggagttaaacctaagtacaacagcggggccttacacatcaaggatatcctctcccccttatttggtacgctggttagcagtgcacagttcaactactgctttgacgtcgattggctggtgaaacagtacccccccgaattccggaaaaaacctatcctcttggtgcatggggacaagagagaggccaaggctcatttgcatgcgcaggccaaaccttatgagaacatttccctgtgtcaagccaaattggacatcgctttcgggacacaccatacaaaaatgatgctgctgctctacgaagaagggctgcgagtggtgatccacacctccaacctaattcacgcagactggcatcagaaaacgcagggaacgcacctatag

SEQ ID NO: 332134 - DNA, 441 bp, Artificial Sequence
  derived and/or modified sequence
atgtcacaagaaggggactacggacggtggacaatcagctccagtgacgagagcgaggaggagaaacccaagccagacaaaccatctacgtctagtctgctttgcgcccgccagggtgctgcgaacgaacctcgctacacttgcagcgaagcccaaaaggcagctcacaagcgaaagatatctcccgtcaaattcagtaatacagactccgtactcccaccgaagagacagaaatctgggtctcaggaagacctggggtggtgtttgtcatcgtccgacgacgaactccagcccgagatgccgcagaaacaggctgaaaaagtggtcattaagaaagagaaggacattagtgcacccaatgacggaacagctcaaaggaccgagaaccatggagccccggcttgccatagactgaaagaagaagaggatgagtacgaatag

SEQ ID NO: 332135 - DNA, 447 bp, Artificial Sequence
  derived and/or modified sequence
atgtcccaggaaggcgactatgggcggtggacaatttccagctcagacgagtctgaggaggaaaagcccaagccagataagccatctaccagttctcttctctgcgctagacagggtgcagcaaacgagcctcgttatacatgttccgaagcgcaaaaagctgcacacaaacggaaaatctctcctgtgaagttcagcaacactgatagcgtgctaccccctaaacggcagaagtccggctcccaggaagacctgggctggtgcctgagctcctctgatgacgagttgcagccagaaatgccgcagaagcaggcagagaaggtggttatcaagaaggagaaggatatctccgctccaaacgatggtactgcacagagaaccgagaatcacggggcccctgcttgccacaggctgaaggaagaggaggacgagtacgaaacctcttag

SEQ ID NO: 332136 - DNA, 840 bp, Artificial Sequence
  derived and/or modified sequence
atgtcccaagaaggcgactacgggagatggacaattagctctagtgacgagagcgaggaagagaagcctaagcccgacaagccgtcaacatcttcattgctgtgcgccaggcagggagctgccaatgagcccaggtatacctgctctgaagcccagaaggctgcccataagcgaaagatctccccggtcaagttttcaaatacagacagtgtccttccacctaaacggcagaagagtggcagtcaagaggatctcggatggtgtctgtcctcttcagatgatgagcttcaacctgagatgccccaaaaacaggccgagaaagttgtaatcaagaaggagaaagacatctctgccccaaatgatggcactgctcagcgcacggaaaaccacggcgcacccgcatgccatcggcttaaggaagaggaggatgagtacgaaacctctggtgagggtcaggacatatgggacatgctggataaagggaacccgttccagttctacttaactcgggttagtggggtcaagccaaagtacaatagcggcgccctccatatcaaggacattctgtcgccactcttcggcacacttgtctcctccgctcaattcaattattgcttcgacgtcgactggttagttaaacagtatcccccagagtttaggaagaaaccaatcctgctcgtgcacggagataaaagagaagccaaggcccatctgcatgctcaggccaaaccctacgagaacatcagcctgtgtcaggcgaagctagatatcgccttcggtactcatcataccaagatgatgcttttactttacgaggagggcctcagggtggtgatttag

SEQ ID NO: 332137 - DNA, 486 bp, Artificial Sequence
  derived and/or modified sequence
atgtcgcaagaaggagattatgggcgttggacgatctcaagtagcgatgagtctgaagaagagaaaccaaagcctgataagccctctacctcatccttgctgtgcgctaggcagggtgcagctaatgagccaaggtatacatgctccgaggcccagaaagccgctcacaaacgaaagatctcaccagtgaaattttctaatactgattctgtgctaccaccaaagcggcagaaaagtggcagtcaggaagatttaggctggtgtctcagctccagcgacgatgaactgcagcccgagatgccccaaaaacaagctgagaaggtggtgataaagaaagagaaggatataagtgctcccaacgacggcactgcgcagcgcacagaaaatcacggcgctccagcttgtcacaggctcaaagaagaagaggacgaatacgagaccagcggtgaaggacaggacatctgggatatgcttgacaaggggtag

SEQ ID NO: 332138 - DNA, 456 bp, Artificial Sequence
  derived and/or modified sequence
atgtcccaggagggcgactatggccgctggaccatcagctctagcgacgagtccgaagaagagaagccaaagccagacaaacctagcacatcatcactactgtgtgcacggcagggtgccgcaaatgaaccgagatacacttgttccgaggctcaaaaagccgctcacaagcgtaagattagccccgtaaaattctcgaacaccgactcagtgttgccccccaagaggcagaaatccggttcccaggaggaccttggatggtgtctgagctcttccgatgatgaactgcagccagagatgccacaaaaacaggctgaaaaggtggtgatcaagaaggagaaggacatttccgcccctaatgatggcaccgcgcagaggaccgaaaatcatggagctcccgcatgccacagattaaaagaggaagaggacgaatatgaaacatccggggaagggtag

SEQ ID NO: 332139 - DNA, 897 bp, Artificial Sequence
  derived and/or modified sequence
atgagccaggagggggactatggccgctggaccatcagcagcagtgatgagagcgaggaggagaagcccaagccagacaagcccagcaccagcagcctgctgtgtgcccggcagggcgccgccaatgagccccgctacacctgcagcgaggcccagaaggccgcccacaagaggaagatcagccctgtgaagttcagcaacacagacagcgtgctgccccccaagaggcagaagagcggcagccaggaggacctgggctggtgcctgagcagcagtgatgatgagctgcagcctgagatgccccagaagcaggccgagaaggtggtgatcaagaaggagaaggacatcagcgccccaaatgatggaacagcccagaggacagagaaccacggggccccagcctgccaccggctgaaggaggaggaggatgaatatgagaccagcggggagggccaggacatctgggacatgctggacaagggcaaccccttccagttctacctgaccagggtgtctggagtgaagcccaagtacaacagcggggccctgcacatcaaggacatcctgagccccctgtttggcaccctggtgtcctctgcccagttcaactactgctttgatgtggactggctggtgaagcagtacccacctgagttcaggaagaagcccatcctgctggtgcacggggacaagcgggaggccaaggcccacctgcacgcccaggccaagccctatgagaacatcagcctgtgccaggccaagctggacatcgccttcggcacccaccacaccaagatgatgctgctgctgtatgaggagggcctgcgggtggtgatccacaccagcaacctgattcatgctgactggcaccagaagacccagggcacccacctgtag

SEQ ID NO: 332140 - DNA, 441 bp, Artificial Sequence
  derived and/or modified sequence
atgagccaggagggggactatggccgctggaccatcagcagcagtgatgagagcgaggaggagaagcccaagccagacaagcccagcaccagcagcctgctgtgtgcccggcagggcgccgccaatgagccccgctacacctgcagcgaggcccagaaggccgcccacaagaggaagatcagccctgtgaagttcagcaacacagacagcgtgctgccccccaagaggcagaagagcggcagccaggaggacctgggctggtgcctgagcagcagtgatgatgagctgcagcctgagatgccccagaagcaggccgagaaggtggtgatcaagaaggagaaggacatcagcgccccaaatgatggaacagcccagaggacagagaaccacggggccccagcctgccaccggctgaaggaggaggaggatgaatatgaatag

SEQ ID NO: 332141 - DNA, 447 bp, Artificial Sequence
  derived and/or modified sequence
atgagccaggagggggactatggccgctggaccatcagcagcagtgatgagagcgaggaggagaagcccaagccagacaagcccagcaccagcagcctgctgtgtgcccggcagggcgccgccaatgagccccgctacacctgcagcgaggcccagaaggccgcccacaagaggaagatcagccctgtgaagttcagcaacacagacagcgtgctgccccccaagaggcagaagagcggcagccaggaggacctgggctggtgcctgagcagcagtgatgatgagctgcagcctgagatgccccagaagcaggccgagaaggtggtgatcaagaaggagaaggacatcagcgccccaaatgatggaacagcccagaggacagagaaccacggggccccagcctgccaccggctgaaggaggaggaggatgaatatgagaccagctag

SEQ ID NO: 332142 - DNA, 840 bp, Artificial Sequence
  derived and/or modified sequence
atgagccaggagggggactatggccgctggaccatcagcagcagtgatgagagcgaggaggagaagcccaagccagacaagcccagcaccagcagcctgctgtgtgcccggcagggcgccgccaatgagccccgctacacctgcagcgaggcccagaaggccgcccacaagaggaagatcagccctgtgaagttcagcaacacagacagcgtgctgccccccaagaggcagaagagcggcagccaggaggacctgggctggtgcctgagcagcagtgatgatgagctgcagcctgagatgccccagaagcaggccgagaaggtggtgatcaagaaggagaaggacatcagcgccccaaatgatggaacagcccagaggacagagaaccacggggccccagcctgccaccggctgaaggaggaggaggatgaatatgagaccagcggggagggccaggacatctgggacatgctggacaagggcaaccccttccagttctacctgaccagggtgtctggagtgaagcccaagtacaacagcggggccctgcacatcaaggacatcctgagccccctgtttggcaccctggtgtcctctgcccagttcaactactgctttgatgtggactggctggtgaagcagtacccacctgagttcaggaagaagcccatcctgctggtgcacggggacaagcgggaggccaaggcccacctgcacgcccaggccaagccctatgagaacatcagcctgtgccaggccaagctggacatcgccttcggcacccaccacaccaagatgatgctgctgctgtatgaggagggcctgcgggtggtgatctag

SEQ ID NO: 332143 - DNA, 486 bp, Artificial Sequence
  derived and/or modified sequence
atgagccaggagggggactatggccgctggaccatcagcagcagtgatgagagcgaggaggagaagcccaagccagacaagcccagcaccagcagcctgctgtgtgcccggcagggcgccgccaatgagccccgctacacctgcagcgaggcccagaaggccgcccacaagaggaagatcagccctgtgaagttcagcaacacagacagcgtgctgccccccaagaggcagaagagcggcagccaggaggacctgggctggtgcctgagcagcagtgatgatgagctgcagcctgagatgccccagaagcaggccgagaaggtggtgatcaagaaggagaaggacatcagcgccccaaatgatggaacagcccagaggacagagaaccacggggccccagcctgccaccggctgaaggaggaggaggatgaatatgagaccagcggggagggccaggacatctgggacatgctggacaagggctag

SEQ ID NO: 332144 - DNA, 456 bp, Artificial Sequence
  derived and/or modified sequence
atgagccaggagggggactatggccgctggaccatcagcagcagtgatgagagcgaggaggagaagcccaagccagacaagcccagcaccagcagcctgctgtgtgcccggcagggcgccgccaatgagccccgctacacctgcagcgaggcccagaaggccgcccacaagaggaagatcagccctgtgaagttcagcaacacagacagcgtgctgccccccaagaggcagaagagcggcagccaggaggacctgggctggtgcctgagcagcagtgatgatgagctgcagcctgagatgccccagaagcaggccgagaaggtggtgatcaagaaggagaaggacatcagcgccccaaatgatggaacagcccagaggacagagaaccacggggccccagcctgccaccggctgaaggaggaggaggatgaatatgagaccagcggggagggctag

SEQ ID NO: 332145 - DNA, 897 bp, Artificial Sequence
  derived and/or modified sequence
atgagccaggagggcgactacggccggtggaccatcagcagcagcgacgagtcagaggaggagaagcctaaacccgataaaccgtcgaccagttcactgctgtgcgctagacagggcgcagccaatgaaccccgctatacctgttccgaggctcagaaggccgcccataagcgcaagataagtcctgtgaagttctccaataccgactccgtactgccccctaaacggcaaaagagtgggagccaggaggaccttggatggtgtttgagctccagtgatgacgagctgcagcccgagatgccccaaaagcaggcggagaaggtggtaataaagaaggagaaagatatctcggccccaaatgacgggactgcccagcgcaccgaaaatcatggagccccagcttgccaccgtctaaaagaggaggaagacgaatatgagacctccggcgaaggtcaagacatttgggatatgctggataaaggaaacccgtttcagttttatcttaccagagttagcggggtgaagccaaagtacaatagcggagctttgcacattaaggatatactgtctccactgttcggaacacttgtgtctagtgctcaattcaactattgcttcgatgtggattggctggtgaagcagtacccacccgaattcaggaaaaagccaatcctgctagttcacggagacaaaagagaagcaaaagcccatctgcatgcacaggctaaaccatatgaaaacatatccttgtgccaagccaagctcgatatcgccttcggcacacaccacactaagatgatgctgctcctgtacgaggagggattgcgcgtggtcattcacacgtctaatctgatccacgcagattggcaccagaagacccaaggcacccacctgtag

SEQ ID NO: 332146 - DNA, 441 bp, Artificial Sequence
  derived and/or modified sequence
atgagccaggagggcgactacggccggtggaccatcagcagcagcgatgaatcagaggaagagaagcccaagcctgacaaaccatctacctcttcgctgttatgcgcccgacagggcgccgcgaatgagccccggtatacatgcagtgaagcacagaaagccgcccataagagaaaaatttccccagtaaaattctctaacacagatagcgttcttcctcctaagaggcaaaagtctggctcccaggaagatctgggatggtgcttgtcatccagcgatgatgagctccagcctgagatgccccagaagcaggctgaaaaagtagtaataaagaaggaaaaggacatcagtgccccaaatgacggaaccgcgcagagaacagaaaaccacggcgccccagcatgccaccggctcaaagaggaagaagacgagtacgaatag

SEQ ID NO: 332147 - DNA, 447 bp, Artificial Sequence
  derived and/or modified sequence
atgagccaggagggcgactacggccggtggaccatcagcagcagcgatgagagcgaggaggagaagcccaaaccagataagcctagcacaagcagcttgctatgtgcccggcagggagcagccaacgagcctagatacacttgctctgaagcgcagaaggctgcccataaacgtaaaatttccccagttaagttcagcaatactgactccgtgcttccccctaagagacagaagagcggatctcaggaggacttgggctggtgcctgagttccagtgatgatgagctccaacccgaaatgccacagaagcaggcagagaaggtggtgatcaaaaaagaaaaagacatatccgccccaaacgatggcaccgcccagcgcaccgagaatcatggagctcccgcttgccaccgccttaaagaagaagaggacgagtatgaaacgagttag

SEQ ID NO: 332148 - DNA, 840 bp, Artificial Sequence
  derived and/or modified sequence
atgagccaggagggcgactacggccggtggaccatcagcagcagcgatgagtcagaagaggaaaaacccaaaccagacaagccctcaacgtctagcttactctgtgctaggcagggcgcagcgaacgaacctcgttacacatgtagcgaagcccagaaggccgcccataagaggaagatttcacctgtcaagttttctaacaccgactcggtcctaccccctaaaagacagaagtcaggctcccaagaggacctggggtggtgtctgtcctcatccgatgacgaactccagccagagatgccccaaaaacaagcagaaaaggtggttatcaagaaagagaaggatatttctgcccctaacgacgggaccgcacagcgaacagagaaccatggggcacctgcatgccaccgtttgaaggaggaggaagacgaatacgagacaagcggagaaggacaagacatctgggatatgctcgacaaaggaaaccccttccagttttacctgacaagggtttccggagtgaagccaaagtacaattcgggagctcttcatattaaagacatcctctctccactgtttgggacactggtgtctagcgcccagttcaactactgcttcgacgttgattggctggtcaaacagtacccccctgagtttcggaagaagcccattttgctggttcacggggacaagagagaagccaaggcccacctgcatgcccaggctaagccctatgaaaacattagcttatgtcaagcgaagttggatattgccttcggtacgcaccacactaaaatgatgctgctactctatgaagaggggctgcgagtcgttatttag

SEQ ID NO: 332149 - DNA, 486 bp, Artificial Sequence
  derived and/or modified sequence
atgagccaggagggcgactacggccggtggaccatcagcagcagcgatgagtcggaggaagaaaagcccaagcccgataagcccagtacaagttccctcctatgcgccagacaaggagccgctaatgagccgaggtacacatgctctgaagctcaaaaggcagcccataagaggaaaatcagccccgtaaaattttccaataccgattctgttctgccacctaaaaggcagaagtctggctcccaagaggacctgggctggtgtctctccagttccgacgacgagctgcagcccgagatgcctcaaaaacaggctgaaaaggtggtgatcaaaaaggaaaaggatatctcggcccctaacgatgggactgcgcagagaaccgagaatcacggcgctccagcttgtcaccggttaaaggaggaagaggacgagtacgagacttccggcgaggggcaggacatttgggacatgctggacaagggctag

SEQ ID NO: 332150 - DNA, 456 bp, Artificial Sequence
  derived and/or modified sequence
atgagccaggagggcgactacggccggtggaccatcagcagcagcgacgaatccgaagaagagaagccaaagcctgacaaaccttccacctcctcattgctgtgtgcccgtcaaggggctgccaatgagcctcggtatacgtgttccgaagcccagaaggccgcacataaaagaaagataagcccagtaaaattctccaacactgacagtgttctgcctccaaaaagacaaaaatcggggagtcaggaggacctcgggtggtgcctctcctcctcggacgatgaacttcagcctgagatgccacagaagcaagccgagaaagtggttatcaaaaaagaaaaagacatatctgctcccaatgatgggactgcacaacgtaccgaaaaccacggtgcgccagcttgtcaccgcctgaaggaagaggaagatgagtacgagaccagcggtgagggttag

SEQ ID NO: 332151 - DNA, 897 bp, Artificial Sequence
  derived and/or modified sequence
atgtctcaggagggggattacggtcgctggactatcagctccagtgacgaatccgaagaagagaagcccaaaccagataagccgagtacatcgtcactgctgtgcgccagacagggcgctgccaacgagcccagatatacatgtagtgaagcacagaaagctgcccataaaagaaagatcagccctgttaagttttctaacacagatagtgtgcttccaccaaagagacagaagtctgggtcccaggaagaccttggctggtgcctctcctcctcagacgatgaattgcagccagagatgcctcagaagcaagctgagaaggtggttatcaagaaggagaaagacatctccgcccctaacgatggaacagcccaaagaactgaaaatcacggagcgcctgcatgccacaggttgaaagaagaagaggatgagtacgaaactagtggcgaaggacaggatatctgggacatgctcgataagggtaacccctttcagttctacctgacccgggtttcaggggtcaagccaaaatacaatagcggcgctctgcatatcaaggatatccttagcccactctttggtacactagtatccagcgctcagttcaattactgtttcgacgtagactggttggtaaaacagtacccccctgagtttaggaagaagccaatcctcctcgtccacggagataagcgagaggcgaaagctcacctgcatgcccaggcaaaaccctacgagaatatcagtctgtgccaagcgaaattggatatcgcgtttggtactcaccatactaagatgatgctgcttctgtacgaagagggattgcgggtggtgatccacacgtctaatttaatacacgcagactggcaccagaagacacagggcactcacctctag

SEQ ID NO: 332152 - DNA, 441 bp, Artificial Sequence
  derived and/or modified sequence
atgagccaggagggcgattacgggagatggactatctccagtagcgacgaatctgaagaggagaaaccgaaaccagacaaacccagcacatctagtctcctctgcgccaggcagggggctgcgaacgagcctcggtatacatgttccgaagcccagaaagcagctcacaagcgcaaaatcagccctgtaaagttcagtaatacagacagtgtcctgccgccaaagcggcagaagagtggctcacaggaggatctcggctggtgtctctcttcctccgatgacgagctgcagcctgaaatgccccagaagcaagctgaaaaagtcgtcattaagaaagaaaaggatatctctgcgcctaacgatggaactgcccagagaacagaaaaccatggagctcctgcctgccaccgactgaaagaggaggaagacgagtatgagtag

SEQ ID NO: 332153 - DNA, 447 bp, Artificial Sequence
  derived and/or modified sequence
atgtcccaggaaggtgactatggccgatggacaatctcatcctctgatgaatcagaggaggagaagccaaaaccagataaacccagcacatcatcccttctctgcgcccgtcaaggagccgctaatgagccacgctacacatgctcagaagcccagaaggcagcgcataagagaaagatttctccagtaaaattcagtaatactgatagtgttctcccccctaagcgacagaagtctgggtctcaagaagacttgggatggtgcctttcatcctccgacgacgaattgcagcccgagatgcctcagaagcaggcagaaaaggtggtcatcaagaaggaaaaggacattagcgcaccgaatgacgggaccgcccaacgtacagagaaccacggggcaccagcctgtcatcgcctcaaagaggaggaagacgagtatgagacgtcttag

SEQ ID NO: 332154 - DNA, 840 bp, Artificial Sequence
  derived and/or modified sequence
atgtcccaggagggggattatggccgatggaccatctccagctctgacgagagcgaggaggagaaaccaaagcccgacaaacccagtacttcatccttactttgcgcaaggcagggagccgctaacgagcccaggtacacctgtagtgaggcccagaaagcagcccacaaacgcaagataagcccagtgaagttttccaataccgattccgtcctgcctcctaagagacagaagagtggctctcaggaagacctaggatggtgcttaagtagtagcgacgacgaactgcagccggaaatgcctcagaaacaagcggagaaggttgtgataaaaaaggaaaaagatatttcagcacctaacgacggaactgcccagcgcactgaaaaccacggggctccagcatgtcatcgactgaaggaggaggaggatgagtatgaaacaagtggcgaaggacaggacatttgggacatgttggacaaagggaacccttttcagttctatttgacacgcgtgagtggcgtcaagcccaaatacaattccggcgcactccacattaaggacattctgtcgcctctcttcgggaccctcgttagtagcgcacagttcaactactgtttcgatgtcgattggttggtgaaacagtatccccctgagttccgcaagaaacccatactcctggtccacggtgacaaacgggaggccaaagcccatctgcacgcccaggctaagccttacgaaaatatctctttgtgccaggctaaactggatattgcatttgggacgcatcacactaagatgatgctgctgctctacgaggaggggttgcgagtggtgatttag

SEQ ID NO: 332155 - DNA, 486 bp, Artificial Sequence
  derived and/or modified sequence
atgtcacaggagggcgattacggcagatggaccatctccagctcggacgagtcagaggaagagaaacccaagcccgataagcctagcacttcctcgctcctgtgtgccaggcaaggggctgccaacgagcctcgctacacatgctcggaggcccagaaagctgcccataagaggaaaatatctccagtgaaattttccaacaccgattccgtcctaccaccaaagaggcagaagtccgggagtcaggaggatctagggtggtgtctttcaagctccgatgatgagctgcagcccgagatgccgcagaaacaggctgaaaaggtcgtcattaaaaaggagaaggatatctctgcgccaaacgacggcactgctcagcgtacagagaatcacggggctccggcttgccaccgtttgaaggaggaggaagatgaatatgaaacaagtggagaggggcaggacatatgggatatgctcgacaagggctag

SEQ ID NO: 332156 - DNA, 456 bp, Artificial Sequence
  derived and/or modified sequence
atgagtcaggagggcgactatggcaggtggactatcagtagtagcgatgagtcagaggaggagaagcccaaacccgataagccttccacctcctccctgctatgcgcccgacaaggagccgctaatgagcctcgatatacctgctcagaggcacagaaagcagctcacaaacgcaaaatctcccccgtgaaattttcgaacaccgattcggtcctgcccccaaaaagacaaaaatctggttcccaggaagacctcggctggtgtctctctagtagtgacgacgagctgcagccagagatgccccagaagcaagcagaaaaagtcgttattaaaaaagagaaagatatctccgctcctaatgatggaacggcccagaggaccgagaatcatggggctcctgcttgccaccggttgaaggaagaagaagatgaatatgagacatctggcgaaggttag

SEQ ID NO: 332157 - DNA, 910 bp, Artificial Sequence
  derived and/or modified sequence
atcctgctcctggccgagtcgcggtgcgcgggctgctggggtccggcagggctggaggcggaccgcgaggaagcggcgcggccgggaagatggggcagggtcgcctcggccccggggcctcggtttcctccgatcacagcgcctcagggggcgcgcacgggcgctgcggagacctgtgtcctgccggggcgcggcgctaggggcccctgctcgggtttttattcccagacctaagcttacagagttggagcacacagctgtattaaaaaggcaaatcgaaggccgggcgcggtgactcacgcctgtcatcctagcactttgggaggccgaggcggctgaatcacttgaggttaggagtttgagatcagcccgggcaacatggtgaaaccccgtctctacaaaaatagaaaaattagccgagcgtgatggtggatgcctgtaatcctagctcctcgggaggctaaggagtataatgtctcaggaaggcgattatgggaggtggaccatatctagtagtgatgaaagtgaggaagaaaagccaaaaccagacaagccatctacctcttctcttctctgtgccaggcaaggagcagcaaatgagcccaggtacacctgttccgaggcccagaaagctgcacacaagaggaaaatatcacctgtgaaattcagcaatacagattcagttttacctcccaaaaggcagaaaagcggttcccaggaggacctcggctggtgtctgtccagcagtgatgatgagctgcaaccagaaatgccgcagaagcaggctgagaaagtggtgatcaaaaaggagaaagacatctctgctcccaatgacggcactgcccaaagaactgaaaatcatggcgctcccgcctgccacaggctcaaagaggaggaagacgagtatgag

SEQ ID NO: 332158 - DNA, 728 bp, Artificial Sequence
  derived and/or modified sequence
aacgccttcagcaagagccctctcacttcctttgtcttcaacccattctccgcagagttggagcacacagctgtattaaaaaggcaaatcgaaggccgggcgcggtgactcacgcctgtcatcctagcactttgggaggccgaggcggctgaatcacttgaggttaggagtttgagatcagcccgggcaacatggtgaaaccccgtctctacaaaaatagaaaaattagccgagcgtgatggtggatgcctgtaatcctagctcctcgggaggctaaggagtataatgtctcaggaaggcgattatgggaggtggaccatatctagtagtgatgaaagtgaggaagaaaagccaaaaccagacaagccatctacctcttctcttctctgtgccaggcaaggagcagcaaatgagcccaggtacacctgttccgaggcccagaaagctgcacacaagaggaaaatatcacctgtgaaattcagcaatacagattcagttttacctcccaaaaggcagaaaagcggttcccaggaggacctcggctggtgtctgtccagcagtgatgatgagctgcaaccagaaatgccgcagaagcaggctgagaaagtggtgatcaaaaaggagaaagacatctctgctcccaatgacggcactgcccaaagaactgaaaatcatggcgctcccgcctgccacaggctcaaagaggaggaagacgagtatgagacatc

SEQ ID NO: 332159 - DNA, 910 bp, Artificial Sequence
  derived and/or modified sequence
gcgcatgcgcggcggccgccgaaggggcgggatccgaggcaagcgttggttctgtgcgcctcaggagtataatgtctcaggaaggcgattatgggaggtggaccatatctagtagtgatgaaagtgaggaagaaaagccaaaaccagacaagccatctacctcttctcttctctgtgccaggcaaggagcagcaaatgagcccaggtacacctgttccgaggcccagaaagctgcacacaagaggaaaatatcacctgtgaaattcagcaatacagattcagttttacctcccaaaaggcagaaaagcggttcccaggaggacctcggctggtgtctgtccagcagtgatgatgagctgcaaccagaaatgccgcagaagcaggctgagaaagtggtgatcaaaaaggagaaagacatctctgctcccaatgacggcactgcccaaagaactgaaaatcatggcgctcccgcctgccacaggctcaaagaggaggaagacgagtatgagacatcaggggagggccaggacatttgggacatgctggataaagggaaccccttccagttttacctcactagagtctctggagttaagccaaagtataactctggagccctccacatcaaggatattttatctcctttatttgggacgcttgtttcttcagctcagtttaactactgctttgacgtggactggctcgtaaaacagtatccaccagagttcaggaagaagccaatcctgcttgtgcatggtgataagcgagaggctaaggctcacctccatgcccaggccaagccttacgagaacatctctctctgccaggcaaagttggatattgcgtttggaacacaccacacgaaaatgatgctgctgctctatgaagaaggcctccgggttgtcataca

SEQ ID NO: 332160 - DNA, 597 bp, Artificial Sequence
  derived and/or modified sequence
gggttatagctctatttgcactcgctgtttagctggtccgaatttcttgtcctgcgtccaagaataatgaggttaggctgacaaccgaaggggaaaagggcggaggagtataatgtctcaggaaggcgattatgggaggtggaccatatctagtagtgatgaaagtgaggaagaaaagccaaaaccagacaagccatctacctcttctcttctctgtgccaggcaaggagcagcaaatgagcccaggtacacctgttccgaggcccagaaagctgcacacaagaggaaaatatcacctgtgaaattcagcaatacagattcagttttacctcccaaaaggcagaaaagcggttcccaggaggacctcggctggtgtctgtccagcagtgatgatgagctgcaaccagaaatgccgcagaagcaggctgagaaagtggtgatcaaaaaggagaaagacatctctgctcccaatgacggcactgcccaaagaactgaaaatcatggcgctcccgcctgccacaggctcaaagaggaggaagacgagtatgagacatcaggggagggccaggacatttgggacatgctggataaagggaa

SEQ ID NO: 332161 - DNA, 748 bp, Artificial Sequence
  derived and/or modified sequence
cgcggactcggtgcggtctctcgcgggctgcggtcgggcccgggatcctgctcctggccgagtcgcggtgcgcgggctgctggggtccggcagggctggaggcggaccgcgaggaagcggcgcggccgggaagatggggcagggtcgcctcggccccggggcctcggtttcctccgatcacagcgcctcagggggcgcgcacgggcgctgcggagacctgtgtcctgccggggcgcggcgctaggggcccctgctcgggtttttattcccagacctaagcttacaggagtataatgtctcaggaaggcgattatgggaggtggaccatatctagtagtgatgaaagtgaggaagaaaagccaaaaccagacaagccatctacctcttctcttctctgtgccaggcaaggagcagcaaatgagcccaggtacacctgttccgaggcccagaaagctgcacacaagaggaaaatatcacctgtgaaattcagcaatacagattcagttttacctcccaaaaggcagaaaagcggttcccaggaggacctcggctggtgtctgtccagcagtgatgatgagctgcaaccagaaatgccgcagaagcaggctgagaaagtggtgatcaaaaaggagaaagacatctctgctcccaatgacggcactgcccaaagaactgaaaatcatggcgctcccgcctgccacaggctcaaagaggaggaagacgagtatgagacatcaggggagggcca

SEQ ID NO: 332162 - protein, 118 aa, Artificial Sequence
  derived and/or modified sequence
MSSGTMKFNGYLRVRIGEAVGLQPTRWSLRHSLFKKGHQLLDPYLTVSVDQVRVGQTSTKQKTNKPTYNEEFCANVTDGGHLELAVFHETPLGYDHFVANCTLQFQELLRTTGASDTF

SEQ ID NO: 332163 - DNA, 120 bp, Artificial Sequence
  derived and/or modified sequence
aaaaaaaggaaagaaaagaaaagagaaaagcgccgcggaaaggagcgcaaggaattatttaagttggtgtcacatgtgcttgagaataggatgggatggcagcatctaaaatggatgtag

SEQ ID NO: 332164 - DNA, 357 bp, Artificial Sequence
  derived and/or modified sequence
atgtcatccggcactatgaaattcaatggctacctcagggtccgtataggcgaagccgtcgggcttcagcccactagatggagcttaaggcactcactgtttaagaaaggacaccagctgttggacccctacctgacagtgagcgtggaccaagtgagggtgggccaaacctctaccaaacaaaagactaacaagccaacttataatgaggagttctgtgcaaatgtgacggatgggggtcacctggagctggccgtttttcatgagaccccactagggtacgatcatttcgttgctaactgcacattgcaatttcaggagctgctccgcaccacaggggctagtgatacgttttag

SEQ ID NO: 332165 - DNA, 357 bp, Artificial Sequence
  derived and/or modified sequence
atgagcagcggcaccatgaagttcaacggctacctgcgggtgcgcatcggggaggccgtgggcctgcagcccacccgctggagcctgcggcacagcctcttcaagaagggccaccagctgctggacccctacctgactgtgtctgtggaccaggtgcgggtgggccagaccagcaccaagcagaagaccaacaagcccacctacaatgaggagttctgtgccaacgtgacagatggcggccacctggagctggccgtgttccacgagacccccctgggctatgaccactttgtggccaactgcaccctgcagttccaggagctgctgcggaccaccggggccagtgacaccttctag

SEQ ID NO: 332166 - DNA, 357 bp, Artificial Sequence
  derived and/or modified sequence
atgagcagcggcaccatgaagttcaacggctacctgcgggtgcggattggcgaggccgtgggactccagccgacacgttggtctttacgacacagcctgtttaaaaaggggcatcagctgttggatccatacctcaccgtgtctgttgatcaggtcagagtcggccagaccagcacgaagcagaagaccaataaacccacatataacgaagagttttgcgctaatgtcaccgacggcgggcacctggagctcgctgtcttccacgagactcccctgggatacgaccacttcgtggccaattgcaccctgcagtttcaggagctgctgaggacaacaggagcaagtgacaccttttag

SEQ ID NO: 332167 - DNA, 357 bp, Artificial Sequence
  derived and/or modified sequence
atgtcgagcggtaccatgaaattcaatggttaccttcgtgtacgcatcggtgaagccgtaggcctgcagcctaccaggtggtccctcagacattctttgttcaaaaaggggcatcagttgctggacccatacctgacagtttccgtggatcaggtacgcgttggccaaacctctaccaaacagaagactaataaaccaacctataacgaggaattttgtgctaatgtgacggatgggggtcatctcgagctggccgtttttcatgagacccccctcggttatgaccatttcgttgccaactgcacgcttcagttccaggaactgctgcggaccaccggggcttccgacaccttttag

SEQ ID NO: 332168 - DNA, 562 bp, Artificial Sequence
  derived and/or modified sequence
atgcttatcggggtgtaatgcctgcctcctgctgctgctccaagctcctccaggagaaggacgctgcttctgcctggtccaggatcgtatcagggtctggggctgcctcgactcctgcacctgtcccgagggctggcctgagacgggactcccggttctcccgctgcgaagcagcgcggccccccggggccggggcagcggcgccggcatgtcgtctggcaccatgaagttcaatggctatttgagggtccgcatcggtgaggcagtggggctgcagcccacccgctggtccctgcgccactcgctcttcaagaagggccaccagctgctggacccctatctgacggtgagcgtggaccaggtgcgcgtgggccagaccagcaccaagcagaagaccaacaaacccacgtacaacgaggagttttgcgctaacgtcaccgacggcggccacctcgagttggccgtcttccacgagacgcccctgggctacgaccacttcgtggccaactgcaccctgcagttccaggagctgctgcgcacgaccggcgcctcggacaccttc

SEQ ID NO: 332169 - DNA, 357 bp, Artificial Sequence
  derived and/or modified sequence
atgagcagcggcaccatgaagttcaacggctacctgagagtgagaatcggcgaggccgtgggcctgcagcccaccagatggagcctgagacacagcctgttcaagaagggccaccagctgctggacccctacctgaccgtgagcgtggaccaggtgagagtgggccagaccagcaccaagcagaagaccaacaagcccacctacaacgaggagttctgcgccaacgtgaccgacggcggccacctggagctggccgtgttccacgagacccccctgggctacgaccacttcgtggccaactgcaccctgcagttccaggagctgctgagaaccaccggcgccagcgacaccttctag

SEQ ID NO: 332170 - protein, 1822 aa, Artificial Sequence [sequence omitted]

SEQ ID NO: 332171 - DNA, 219 bp, Artificial Sequence
  derived and/or modified sequence
atgagctaccagcagcagcagtgcaagcagccctgccagccccccccagtatgccccacacctaaatgtcccgagccctgcccaccacctaaatgcccagagccttgtccttcgccgaagtgcccacaaccgtgcccccctcaacaatgccagcaaaagtacccacctgtcacaccctcccccccatgccaacctaagtgtccacccaagtctaaatag

SEQ ID NO: 332172 - DNA, 219 bp, Artificial Sequence
  derived and/or modified sequence
atgtcctatcagcagcagcagtgtaagcagccgtgccagcccccaccagtgtgtcctactcctaaatgccccgagccatgcccccctcccaaatgcccagaaccttgccccccacccaagtgccctcagccttgccctccacaacagtgccagcaaaaatatccgccagtgaccccttcaccaccttgccaacctaaatatccgccaaaaagcaagtag

SEQ ID NO: 332173 - protein, 57 aa, Artificial Sequence
  derived and/or modified sequence
MVWKVAVFLSVALGIGAVPIDDPEDGGKHWVVIVAGSNGWYNYRHQADACHAYQIIH

SEQ ID NO: 332174 - protein, 58 aa, Artificial Sequence
  derived and/or modified sequence
MVWKVAVFLSVALGIGAVPIDDPEDGGKHWVVIVAGSNGWYNYRHQADACHAYQIIHR

SEQ ID NO: 332175 - protein, 78 aa, Artificial Sequence
  derived and/or modified sequence
MVWKVAVFLSVALGIGAVPIDDPEDGGKHWVVIVAGSNGWYNYRHQADACHAYQIIHRNGIPDEQIVVMMYDDIAYSE

SEQ ID NO: 332176 - protein, 409 aa, Artificial Sequence
  derived and/or modified sequence
MTELPAPLSYFQNAQMSEDNHLSNTVRSQNDNRERQEHNDRRSLGHPEPLSNGRPQGNSRQVVEQDEEEDEELTLKYGAKHVIMLFVPVTLCMVVVVATIKSVSFYTRKDGQLIYTPFTEDTETVGQRALHSILNAAIMISVIVVMTILLVVLYKYRCYKVIHAWLIISSLLLLFFFSFIYLGEVFKTYNVAVDYITVALLIWNFGVVGMISIHWKGPLRLQQAYLIMISALMALVFIKYLPEWTAWLILAVISVYDLVAVLCPKGPLRMLVETAQERNETLFPALIYSSTMVWLVNMAEGDPEAQRRVSKNSKYNAERGVKLGLGDFIFYSVLVGKASATASGDWNTTIACFVAILIGLCLTLLLLAIFKKALPALPISITFGLVFYFATDYLVQPFMDQLAFHQFYI

SEQ ID NO: 332177 - protein, 467 aa, Artificial Sequence
  derived and/or modified sequence
MTELPAPLSYFQNAQMSEDNHLSNTVRSQNDNRERQEHNDRRSLGHPEPLSNGRPQGNSRQVVEQDEEEDEELTLKYGAKHVIMLFVPVTLCMVVVVATIKSVSFYTRKDGQLIYTPFTEDTETVGQRALHSILNAAIMISVIVVMTILLVVLYKYRCYKVIHAWLIISSLLLLFFFSFIYLGEVFKTYNVAVDYITVALLIWNFGVVGMISIHWKGPLRLQQAYLIMISALMALVFIKYLPEWTAWLILAVISVYDLVAVLCPKGPLRMLVETAQERNETLFPALIYSSTMVWLVNMAEGDPEAQRRVSKNSKYNAESTERESQDTVAENDDGGFSEEWEAQRDSHLGPHRSTPESRAAVQELSSSILAGEDPEERGVKLGLGDFIFYSVLVGKASATASGDWNTTIACFVAILIGLCLTLLLLAIFKKALPALPISITFGLVFYFATDYLVQPFMDQLAFHQFYI

SEQ ID NO: 332178 - protein, 378 aa, Artificial Sequence
  derived and/or modified sequence
MTELPAPLSYFQNAQMSEDNHLSNTVRSQNDNRERQEHNDRRSLGHPEPLSNGRPQGNSRQVVEQDEEEDEELTLKYGAKHVIMLFVPVTLCMVVVVATIKSVSFYTRKDGQLIYTPFTEDTETVGQRALHSILNAAIMISVIVVMTILLVVLYKYRCYKVIHAWLIISSLLLLFFFSFIYLGEVFKTYNVAVDYITVALLIWNFGVVGMISIHWKGPLRLQQAYLIMISALMALVFIKYLPEWTAWLILAVISVYDLVAVLCPKGPLRMLVETAQERNETLFPALIYSSTMVWLVNMAEGDPEAQRRVSKNSKYNAERACLPPAAINLLSIAPMAPRLFMPKGACRPTAQKGSHKTLLQRMMMAGSVRNGKPRGTVI

SEQ ID NO: 332179 - protein, 184 aa, Artificial Sequence
  derived and/or modified sequence
MTELPAPLSYFQNAQMSEDNHLSNTVRSQNDNRERQEHNDRRSLGHPEPLSNGRPQGNSRQVVEQDEEEDEELTLKYGAKHVIMLFVPVTLCMVVVVATIKSVSFYTRKDGQLIYTPFTEDTETVGQRALHSILNAAIMISVIVVMTILLVVLYKYRCYKVSMRHRSLLSTLFFLWLGILVTVT

SEQ ID NO: 332180 - protein, 109 aa, Artificial Sequence
  derived and/or modified sequence
MTELPAPLSYFQNAQMSEDNHLSNTVRSQNDNRERQEHNDRRSLGHPEPLSNGRPQGNSRQVVEQDEEEDEELTLKYGAKHVIMLFVPVTLCMVVVVATIKSVSFYTRK

SEQ ID NO: 332181 - protein, 155 aa, Artificial Sequence
  derived and/or modified sequence
MTELPAPLSYFQNAQMSEDNHLSNTVRSQNDNRERQEHNDRRSLGHPEPLSNGRPQGNSRQVVEQDEEEDEELTLKYGAKHVIMLFVPVTLCMVVVVATIKSVSFYTRKDGQLIYTPFTEDTETVGQRALHSILNAAIMISVIVVMTILLVVLYK

SEQ ID NO: 332182 - protein, 99 aa, Artificial Sequence
  derived and/or modified sequence
MTELPAPLSYFQNAQMSEDNHLSNTVRSQNDNRERQEHNDRRSLGHPEPLSNGRPQGNSRQVVEQDEEEDEELTLKYGAKHVIMLFVPVTLCMVVVVAT

SEQ ID NO: 332183 - DNA, 1230 bp, Artificial Sequence
  derived and/or modified sequence
atgacggaactgcccgctccattaagttatttccagaacgcccaaatgtcagaggataaccatctcagtaacaccgtcaggtcacagaacgacaacagagagcgtcaggaacacaatgaccggaggtcccttgggcacccagagcctctttcaaacggacggccacagggcaacagccgtcaggtggtcgagcaggacgaagaggaagatgaggagctgaccctgaaatatggggcaaagcacgtgatcatgttgttcgtgcctgtaactctgtgcatggtggtggtggttgctaccatcaaatctgtcagcttttacacaagaaaagatgggcagctgatctacactccatttaccgaggatactgagaccgtggggcagagggcactccactcaattctcaatgctgctattatgattagcgtcatcgttgtcatgactattttactggttgttctgtacaagtatcggtgttacaaagtgatccacgcgtggctcatcatatcctccttacttctactcttttttttctcattcatctacctgggcgaggtattcaagacttataatgttgctgtagactatatcactgtggccctcttaatttggaactttggagtggtgggcatgatcagcattcactggaaaggccccctcaggctacaacaggcctatctgattatgattagcgccctcatggcgctggtcttcatcaagtacctgcctgaatggaccgcctggctgatcttagcggtgatcagtgtctacgacctggtggcggtcctctgcccgaaagggccgctgagaatgctggtggagaccgctcaggagagaaacgaaactctgtttcccgcactgatctatagcagcaccatggtgtggctggtgaatatggcagagggggaccctgaagcacagaggagagtgtccaaaaattctaagtataacgcagagagaggcgtgaaactcggcctaggggactttatattttactcagtccttgtgggaaaggctagcgcgacggcctccggcgactggaataccaccattgcctgcttcgtggctattctaatcggattgtgcctgacattgctgctgctagcgatcttcaagaaggctctgcctgccctcccgatcagcatcacatttgggctcgtgttttatttcgctactgactatctcgttcagcctttcatggatcagctcgccttccatcaattctacatctag

SEQ ID NO: 332184 - DNA, 1404 bp, Artificial Sequence
  derived and/or modified sequence
atgactgagttacccgcccccctgtcctacttccagaacgcccagatgtccgaagacaaccacctgagtaacactgtaaggtcccaaaatgataaccgggaaaggcaagagcacaacgacaggcgcagcctgggtcaccctgagcccttatcaaatggacgcccgcaggggaacagtaggcaagttgtggagcaggacgaggaagaggacgaggaactcactttgaagtacggagcaaagcatgtgataatgctgttcgtacctgtgactctgtgtatggtggtggtggtggctactattaagagcgtctccttctatacacgtaaagacggtcagttgatctatacaccttttaccgaggacacagagactgttgggcagcgagccctgcactcaatccttaacgctgctatcatgatttcagtcatcgttgtcatgacaatcctgttggtggtgctatacaagtataggtgctacaaggtcattcacgcctggttaatcattagctcgctcttactcctcttcttctttagttttatatatttaggtgaggtgtttaaaacgtataatgtcgccgtggattatattacggtggccctcctcatatggaactttggagtggttggcatgatttccatacactggaaggggcccctgcgactccagcaggcttatttgatcatgataagcgccctcatggcccttgttttcattaagtatcttcctgaatggacagcatggctgatcctcgctgtcattagcgtatacgatttggttgcagtgctgtgtcccaaaggaccactccgaatgcttgtcgagactgcccaggagcgaaacgagacccttttccccgccctaatttactcatccaccatggtgtggctagtaaacatggccgaaggggaccctgaagcgcagcggagagtatccaagaactcaaaatacaatgccgaaagcacagagagagaatcacaggacacagtagctgagaacgacgacggcggattctcagaggaatgggaagcccagcgagacagccatttaggtcctcacagatccacacccgagtctcgggcagccgttcaggaactgtcttcttccatcctggcgggggaggatcccgaagagcgtggcgtgaagctgggactgggagatttcatcttctactcagtgctagttggaaaggcttccgcaaccgcctcaggcgattggaacacaactattgcatgcttcgttgccatcctcatcggtctgtgtctcacattacttctactcgcaatcttcaaaaaagcccttccagctctgccaatttcaatcacatttggcctagtgttctattttgcaacagattaccttgtgcagccctttatggatcagcttgcatttcatcagttctatatatag

SEQ ID NO: 332185 - DNA, 1137 bp, Artificial Sequence
  derived and/or modified sequence
atgactgagctgcccgcaccacttagctattttcaaaacgcacagatgtcggaagataaccatttaagcaataccgtgcggagtcagaacgataacagggagaggcaagaacacaatgaccgcagatccctggggcacccagaacctctttcaaacggaagacctcaaggcaactctaggcaggtggttgagcaagacgaggaggaagacgaagaactgacactgaagtacggcgctaagcatgtgatcatgctgttcgtccccgtcacgctctgcatggtagtcgtcgtcgcaacaatcaaatccgtgagcttctatacgagaaaagacgggcaattaatctatacccccttcaccgaagatacagagactgtgggccaacgggccctccacagtatcctgaatgcagccatcatgattagcgtgattgtggtaatgaccattctgctagtggtattatacaagtatcgctgttataaagtaatccacgcgtggctcattatcagttccttgctcctgttattctttttctctttcatctatctgggagaggtctttaagacgtacaacgtggcagtggactacattactgtcgccttactcatctggaactttggagttgtcggaatgatcagcatacactggaagggtccactgagactccaacaggcatatcttattatgatctcagcactcatggctctggtcttcattaaatacctcccagagtggactgcctggcttatactagccgtgattagcgtctacgacttggtcgcagtcctttgccctaagggcccattgcggatgctagtggaaacagcccaggaaagaaacgaaaccttattccccgcactcatatactcaagcaccatggtttggctagtgaacatggccgaaggggatcccgaagctcaacgcagggtttctaagaactccaagtacaatgccgagagggcctgcttgcctccggctgccatcaacctgttatcaatcgcacctatggccccacgactgtttatgccaaagggtgcctgccgcccaaccgcccagaaaggatcacacaagaccctgctgcagcgcatgatgatggccgggtctgttcgcaacggtaagccacgagggaccgtgatatag

SEQ ID NO: 332186 - DNA, 555 bp, Artificial Sequence
  derived and/or modified sequence
atgaccgaactgcccgcaccccttagctactttcaaaatgcccagatgtccgaagacaatcatctctctaacaccgtgagatctcagaacgacaaccgcgagcgacaggagcacaatgaccgacgatccctgggtcaccctgaaccccttagcaacggacggccacagggcaacagccgccaagtagtagagcaagacgaagaggaagatgaggagttaacattaaagtatggtgcaaagcatgtgatcatgttatttgtccccgtcactctctgtatggtagtggtggtcgccacaattaagtctgtgagtttttacacacggaaggacggtcagctgatctatactccttttactgaagacactgagactgttggccagcgggctctacacagcattctgaatgctgcaattatgataagtgtcatcgtggtgatgacaattctactggtcgttctgtacaagtatcggtgctataaagtgtctatgcgccaccggagcctgcttagcaccttgtttttcttgtggcttggcatcctcgtcactgtcacatag

SEQ ID NO: 332187 - DNA, 330 bp, Artificial Sequence
  derived and/or modified sequence
atgacggaactcccggctcctttgtcatacttccagaatgctcaaatgagcgaagataatcatctgagtaataccgtgaggtcccagaacgacaatcgcgagcggcaggaacataacgaccgccggtccctcgggcaccccgagcctctcagtaatggccggccccaaggcaattctcggcaggtcgtcgaacaggatgaagaagaggacgaggagttaacgctcaaatacggagcaaagcatgtgatcatgctctttgtcccagtgaccttatgcatggtggttgtggtcgctacaatcaaatcggtgtccttttacacgcgtaagtag

SEQ ID NO: 332188 - DNA, 468 bp, Artificial Sequence
  derived and/or modified sequence
atgaccgagctccccgctcccttaagctactttcaaaacgcgcagatgtcagaggataatcacttgtcaaatactgtacggtcacagaacgacaatcgtgagcgccaggaacacaatgaccgccgttcactgggccaccccgaacctcttagtaatggtcggccacaaggaaactccaggcaagtggtggagcaagacgaggaggaagatgaggaactgacattgaagtacggagcaaagcatgtgatcatgctgttcgtcccagtaaccctgtgcatggtggtggtcgtcgcaaccattaagagtgttagtttctacactcggaaagacggtcagcttatctataccccctttaccgaggatacagaaacagtggggcagcgggctctccactcaatactcaacgctgccattatgatctccgttattgttgttatgactatacttctggttgttctgtataaatag

SEQ ID NO: 332189 - DNA, 300 bp, Artificial Sequence
  derived and/or modified sequence
atgactgagcttccggcgcccctgagttacttccaaaacgctcagatgtctgaagacaaccacttatctaatactgtgcgatcacagaacgataatcgggaacgacaggaacataatgatcggcggagcctggggcatcccgagcccttgagcaacgggcgaccccagggtaacagtcgccaggtcgtggaacaagacgaagaggaagacgaagagttgactctcaaatatggcgcaaagcacgtcattatgctgttcgtgcctgttaccctgtgcatggtggtggtggtcgccacttag

SEQ ID NO: 332190 - DNA, 1230 bp, Artificial Sequence
  derived and/or modified sequence
atgacagagctgcctgcccccctgagctacttccagaatgcccagatgtctgaggacaaccacctgagcaacacagtgcgcagccagaatgacaaccgggagcggcaggagcacaatgacagaagaagcctgggccaccctgagcccctgagcaatggccggccccagggcaacagccggcaggtggtggagcaggatgaggaggaggatgaggagctgaccctgaagtatggagccaagcacgtgatcatgctgtttgtgcctgtgaccctgtgcatggtggtggtggtggccaccatcaagtctgtgtccttctacaccaggaaggatggccagctgatctacacccccttcacagaggacacagagaccgtgggccagagggccctgcacagcatcctgaatgctgccatcatgatctctgtgattgtggtgatgaccatcctgctggtggtgctgtacaagtaccgctgctacaaggtgattcatgcctggctgatcatcagcagcctgctgctgctcttcttcttctccttcatctacctgggggaggtgttcaagacctacaacgtggccgtggactacatcaccgtggccctgctgatctggaactttggagtggtgggcatgatcagcatccactggaagggccccctgcggctgcagcaggcctacctgatcatgatcagcgccctgatggccctggtgttcatcaagtacctgcctgagtggacagcctggctgatcctggccgtcatctctgtgtatgacctggtggccgtgctgtgccccaagggccccctgaggatgctggtggagacagcccaggagagaaatgagaccctcttccctgccctgatctacagcagcaccatggtgtggctggtgaacatggccgagggggaccctgaggcccagaggagagtgtccaagaacagcaagtacaatgctgagcggggcgtgaagctgggcctgggggacttcatcttctacagcgtgctggtgggcaaggccagcgccacagccagcggggactggaacaccaccatcgcctgctttgtggccatcctgattggcctgtgcctgaccctgctgctgctggccatcttcaagaaggccctgcctgccctgcccatcagcatcaccttcggcctggtgttctactttgccacagactacctggtgcagcccttcatggaccagctggccttccaccagttctacatctag

SEQ ID NO: 332191 - DNA, 1404 bp, Artificial Sequence
  derived and/or modified sequence
atgacagagctgcctgcccccctgagctacttccagaatgcccagatgtctgaggacaaccacctgagcaacacagtgcgcagccagaatgacaaccgggagcggcaggagcacaatgacagaagaagcctgggccaccctgagcccctgagcaatggccggccccagggcaacagccggcaggtggtggagcaggatgaggaggaggatgaggagctgaccctgaagtatggagccaagcacgtgatcatgctgtttgtgcctgtgaccctgtgcatggtggtggtggtggccaccatcaagtctgtgtccttctacaccaggaaggatggccagctgatctacacccccttcacagaggacacagagaccgtgggccagagggccctgcacagcatcctgaatgctgccatcatgatctctgtgattgtggtgatgaccatcctgctggtggtgctgtacaagtaccgctgctacaaggtgattcatgcctggctgatcatcagcagcctgctgctgctcttcttcttctccttcatctacctgggggaggtgttcaagacctacaacgtggccgtggactacatcaccgtggccctgctgatctggaactttggagtggtgggcatgatcagcatccactggaagggccccctgcggctgcagcaggcctacctgatcatgatcagcgccctgatggccctggtgttcatcaagtacctgcctgagtggacagcctggctgatcctggccgtcatctctgtgtatgacctggtggccgtgctgtgccccaagggccccctgaggatgctggtggagacagcccaggagagaaatgagaccctcttccctgccctgatctacagcagcaccatggtgtggctggtgaacatggccgagggggaccctgaggcccagaggagagtgtccaagaacagcaagtacaatgctgagagcacagagcgggagagccaggacacagtggccgagaatgatgatggcggcttcagcgaggagtgggaggcccagagggacagccacctgggcccccacaggagcaccccagagagcagagctgctgtgcaggagctgagcagcagcatcctggccggggaggaccctgaggagcggggcgtgaagctgggcctgggggacttcatcttctacagcgtgctggtgggcaaggccagcgccacagccagcggggactggaacaccaccatcgcctgctttgtggccatcctgattggcctgtgcctgaccctgctgctgctggccatcttcaagaaggccctgcctgccctgcccatcagcatcaccttcggcctggtgttctactttgccacagactacctggtgcagcccttcatggaccagctggccttccaccagttctacatctag

SEQ ID NO: 332192 - DNA, 1137 bp, Artificial Sequence
  derived and/or modified sequence
atgacagagctgcctgcccccctgagctacttccagaatgcccagatgtctgaggacaaccacctgagcaacacagtgcgcagccagaatgacaaccgggagcggcaggagcacaatgacagaagaagcctgggccaccctgagcccctgagcaatggccggccccagggcaacagccggcaggtggtggagcaggatgaggaggaggatgaggagctgaccctgaagtatggagccaagcacgtgatcatgctgtttgtgcctgtgaccctgtgcatggtggtggtggtggccaccatcaagtctgtgtccttctacaccaggaaggatggccagctgatctacacccccttcacagaggacacagagaccgtgggccagagggccctgcacagcatcctgaatgctgccatcatgatctctgtgattgtggtgatgaccatcctgctggtggtgctgtacaagtaccgctgctacaaggtgattcatgcctggctgatcatcagcagcctgctgctgctcttcttcttctccttcatctacctgggggaggtgttcaagacctacaacgtggccgtggactacatcaccgtggccctgctgatctggaactttggagtggtgggcatgatcagcatccactggaagggccccctgcggctgcagcaggcctacctgatcatgatcagcgccctgatggccctggtgttcatcaagtacctgcctgagtggacagcctggctgatcctggccgtcatctctgtgtatgacctggtggccgtgctgtgccccaagggccccctgaggatgctggtggagacagcccaggagagaaatgagaccctcttccctgccctgatctacagcagcaccatggtgtggctggtgaacatggccgagggggaccctgaggcccagaggagagtgtccaagaacagcaagtacaatgctgagcgggcctgcctgcccccagctgccatcaacctgctgagcatcgcccccatggcccccaggctcttcatgcccaagggggcctgccggcccacagcccagaagggcagccacaagaccctgctgcagaggatgatgatggccggctctgtgagaaatggcaagccccggggcaccgtcatctag

SEQ ID NO: 332193 - DNA, 555 bp, Artificial Sequence
  derived and/or modified sequence
atgacagagctgcctgcccccctgagctacttccagaatgcccagatgtctgaggacaaccacctgagcaacacagtgcgcagccagaatgacaaccgggagcggcaggagcacaatgacagaagaagcctgggccaccctgagcccctgagcaatggccggccccagggcaacagccggcaggtggtggagcaggatgaggaggaggatgaggagctgaccctgaagtatggagccaagcacgtgatcatgctgtttgtgcctgtgaccctgtgcatggtggtggtggtggccaccatcaagtctgtgtccttctacaccaggaaggatggccagctgatctacacccccttcacagaggacacagagaccgtgggccagagggccctgcacagcatcctgaatgctgccatcatgatctctgtgattgtggtgatgaccatcctgctggtggtgctgtacaagtaccgctgctacaaggtgtccatgaggcacaggagcctgctgagcaccctcttcttcctgtggctgggcatcctggtgacagtgacctag

SEQ ID NO: 332194 - DNA, 330 bp, Artificial Sequence
  derived and/or modified sequence
atgacagagctgcctgcccccctgagctacttccagaatgcccagatgtctgaggacaaccacctgagcaacacagtgcgcagccagaatgacaaccgggagcggcaggagcacaatgacagaagaagcctgggccaccctgagcccctgagcaatggccggccccagggcaacagccggcaggtggtggagcaggatgaggaggaggatgaggagctgaccctgaagtatggagccaagcacgtgatcatgctgtttgtgcctgtgaccctgtgcatggtggtggtggtggccaccatcaagtctgtgtccttctacaccaggaagtag

SEQ ID NO: 332195 - DNA, 468 bp, Artificial Sequence
  derived and/or modified sequence
atgacagagctgcctgcccccctgagctacttccagaatgcccagatgtctgaggacaaccacctgagcaacacagtgcgcagccagaatgacaaccgggagcggcaggagcacaatgacagaagaagcctgggccaccctgagcccctgagcaatggccggccccagggcaacagccggcaggtggtggagcaggatgaggaggaggatgaggagctgaccctgaagtatggagccaagcacgtgatcatgctgtttgtgcctgtgaccctgtgcatggtggtggtggtggccaccatcaagtctgtgtccttctacaccaggaaggatggccagctgatctacacccccttcacagaggacacagagaccgtgggccagagggccctgcacagcatcctgaatgctgccatcatgatctctgtgattgtggtgatgaccatcctgctggtggtgctgtacaagtag

SEQ ID NO: 332196 - DNA, 300 bp, Artificial Sequence
  derived and/or modified sequence
atgacagagctgcctgcccccctgagctacttccagaatgcccagatgtctgaggacaaccacctgagcaacacagtgcgcagccagaatgacaaccgggagcggcaggagcacaatgacagaagaagcctgggccaccctgagcccctgagcaatggccggccccagggcaacagccggcaggtggtggagcaggatgaggaggaggatgaggagctgaccctgaagtatggagccaagcacgtgatcatgctgtttgtgcctgtgaccctgtgcatggtggtggtggtggccacctag

SEQ ID NO: 332197 - DNA, 1230 bp, Artificial Sequence
  derived and/or modified sequence
atgaccgagctgcccgcccccctgagctacttccagaacgcccagatgagcgaggacaatcatttgtccaatactgtgaggagtcagaacgataaccgcgaacgccaagaacacaatgacaggcgcagcctcggtcacccagagccactgagcaatggcaggccccaggggaactctcggcaggtggtggaacaagacgaagaggaggatgaagagctgaccctcaaatacggggccaagcacgtcataatgctcttcgtgcctgtgacgttatgcatggtggtggtggtcgctaccatcaaaagcgtgtccttctatacacggaaggatggccaattaatctacacccccttcactgaagatacagagaccgtgggccaacgggcacttcattccatcctcaacgctgccattatgatcagcgtgatcgtggtgatgacgatactgctggttgtgttatataagtaccggtgttataaggtgattcacgcatggctgatcatttcctctctccttttgcttttctttttcagctttatttatcttggcgaggtgttcaaaacatacaacgtagctgttgattatatcaccgtggcgctacttatttggaattttggagtggtgggaatgatcagcatacattggaagggtcccctgagactccagcaagcctacctcattatgatctcagccctgatggcccttgtgtttattaaatacctgcccgagtggaccgcatggctgattctagctgtgatttctgtctacgatctggtcgccgtcttgtgccccaagggccctctgcgcatgcttgtggagacagcacaggaacggaacgaaacactttttccagctctaatatactcctctacaatggtctggctggtaaatatggctgaaggcgaccccgaagcccaacggcgagtgtctaagaactctaaatacaacgcagaaaggggagtgaaactgggactgggtgatttcatcttctacagtgtgctggtgggaaaagccagcgcgacggctagtggcgattggaacaccactattgcctgctttgtggccatactcatcggattgtgtctgactcttcttcttctggccatttttaagaaggctctccccgcgctgcccattagcatcacgtttggcctggtcttttattttgcaaccgattatctcgtgcagccatttatggaccagctggccttccaccaattttacatctag

SEQ ID NO: 332198 - DNA, 1404 bp, Artificial Sequence
  derived and/or modified sequence
atgaccgagctgcccgcccccctgagctacttccagaacgcccagatgtctgaagataatcaccttagcaacacggtacgcagccagaatgataaccgggagcggcaggaacataatgacagacgaagcctgggacaccccgagcctctgagcaatggccgtcctcaaggtaattctagacaagtggtggaacaggatgaggaagaagatgaagagctaaccttaaagtacggcgccaaacacgttattatgctctttgtgccggtgaccctgtgtatggtagtggtggttgccactataaaaagcgtatccttttacactcgcaaggacggtcaactgatttacaccccatttaccgaggatactgagaccgttgggcagcgcgccctgcactcaatcctgaacgccgctatcatgatctcggtgatcgtagtcatgacaatactgcttgtggtgctctataagtacagatgctacaaagtgatccatgcgtggttgattattagctccttattactgctgttctttttttcctttatttacttgggcgaggtttttaagacgtacaacgtcgccgttgattacataaccgttgccttgctgatctggaattttggcgttgttggcatgatctcaatccattggaagggacctttgagacttcagcaggcatacctgatcatgatatcagctttaatggcactggtctttatcaaatacctgccagagtggacagcctggctgatcctcgccgtgatctcagtgtacgatctcgtcgcagtcttatgtcctaagggtcctctgaggatgctggtggaaacagctcaggaacggaatgagaccctcttccccgccctgatttattcatccacgatggtttggctggtgaacatggcagaaggagatccagaggcgcagcgccgcgtgtcaaagaactcaaaatacaatgccgagagcactgagagagagagtcaggatacagtcgcagaaaacgatgacggcgggttcagtgaagagtgggaagctcagcgcgacagccatctgggtcctcacaggagcacacctgaatctagggcagcagtccaggaactgtcttccagcatacttgccggcgaagatcccgaggagcggggagtgaagctgggtctgggcgactttatattctattcagtcctggtgggcaaggcgagtgccaccgctagcggagactggaacacaacgatcgcatgtttcgtagctattctgattggactgtgcttgactcttctcctgttagcaatctttaagaaagccctcccagccctgccgatcagtatcacattcggcctcgtgttttacttcgcgacagattatctcgtgcagccctttatggaccaacttgcatttcaccaattttacatttag

SEQ ID NO: 332199 - DNA, 1137 bp, Artificial Sequence
  derived and/or modified sequence
atgaccgagctgcccgcccccctgagctacttccagaacgcccagatgagcgaggataaccatttgagcaacacggtccgttcccagaacgataatagggagcgtcaggaacataacgatagaagatctttgggacatccagagccactgagtaatgggaggccacagggcaactctcgacaggtcgtggaacaagacgaggaagaagatgaggagctaacgctgaagtacggagccaagcacgtgatcatgctttttgtgccagtcacgctctgtatggtcgttgtggttgcaacgatcaagagcgtgagtttctacacacggaaagacggccagttaatctacacacctttcacggaagacaccgagaccgtggggcagagagctttacactccatcctgaacgctgcgatcatgatctctgtgatcgttgttatgactatactcctggtggtcttgtacaaatatcgctgttataaagtcatccacgcttggctaatcatttcaagcttactactccttttctttttctctttcatatacctgggagaggtgttcaaaacttacaacgtagccgtggactatatcacggtggctctgctaatatggaatttcggtgtagtgggcatgatctctattcattggaaggggcctcttcggctgcagcaagcttacctaattatgatctcggcactgatggccctggtttttatcaagtacctcccagagtggaccgcttggcttattctggcagtgattagcgtatatgacctggtggcagtcctgtgtccaaagggcccgctcagaatgctggtggagacagctcaagagagaaatgagactttattcccagccctaatctacagcagcacgatggtatggctggtgaatatggcagaaggagaccccgaggcacaaaggagagtttcaaagaactcgaaatacaacgcagagcgcgcctgcttgcccccagccgccatcaatctgctcagtattgcccctatggcacctagactgttcatgcctaagggcgcctgcagacccacagcccagaagggcagccataagacgctgttgcaaaggatgatgatggccgggagcgtaagaaatgggaagccaagaggtacggttatctag

SEQ ID NO: 332200 - DNA, 555 bp, Artificial Sequence
  derived and/or modified sequence
atgaccgagctgcccgcccccctgagctacttccagaacgcccagatgagcgaagataaccacctgtctaataccgtgcgctcacagaacgataatcgcgagcgccaagaacacaacgatcgtcggagtcttggacacccagaacctctctcgaacggtagaccacaaggaaactctcgccaagtggtggaacaggatgaggaagaggacgaggagctgacgcttaaatacggcgcgaaacacgttatcatgctgtttgtgcctgtgactctgtgtatggttgtcgttgttgctacaataaagtccgtcagcttttataccagaaaggatggccagctgatctacactcccttcactgaggacaccgagactgtaggccaaagggctctgcatagcattctcaacgctgctattatgatatccgtgatagtggtgatgacaattcttttggtggtgctgtacaagtacagatgttacaaagtttccatgcggcacaggagtctactgtccactctcttcttcttgtggctcggcatcctcgttaccgtaacctag

SEQ ID NO: 332201 - DNA, 330 bp, Artificial Sequence
  derived and/or modified sequence
atgaccgagctgcccgcccccctgagctacttccagaacgcccagatgtccgaagacaatcacctttccaacactgtcaggtcacagaatgataatcgggagcgccaagaacacaacgaccgaaggtctttggggcatcccgaacccctgtctaacggtcgaccgcagggcaacagcaggcaagttgtggaacaagacgaagaagaagacgaagaacttacccttaaatatggggccaagcacgttatcatgctgtttgtccctgtcacactttgtatggtggtagtagtcgccacaatcaagtccgttagtttttacacccgcaagtag

SEQ ID NO: 332202 - DNA, 468 bp, Artificial Sequence
  derived and/or modified sequence
atgaccgagctgcccgcccccctgagctacttccagaacgcccagatgagtgaagacaatcacctgtcgaacacagtgcggtctcaaaacgacaaccgtgagcgccaagaacacaatgaccgccgctcgttaggccatccagagccgctgtccaacggccgaccccaggggaattctcggcaagtagtggagcaggacgaagaggaagacgaagagctcaccctcaaatatggtgctaagcacgtcataatgctgttcgtccctgtgacactttgtatggtggttgtggtggctacaattaaaagcgtatccttttatacacgtaaggatggtcaattgatctacactccattcacagaggacaccgaaacagtgggacagagagctttacactctatcctgaacgctgctatcatgatctctgttatcgttgtgatgacaatactcctggtggttctgtataagtag

SEQ ID NO: 332203 - DNA, 300 bp, Artificial Sequence
  derived and/or modified sequence
atgaccgagctgcccgcccccctgagctacttccagaacgcccagatgtctgaggataaccatctatcaaacactgtgcggtcgcagaacgacaatcgggagcgtcaagaacataacgacagacgttctctcggacaccctgagcctctctccaacgggcggccccagggaaactctaggcaggtggttgagcaggatgaagaagaggacgaggaattaaccctgaagtacggcgcaaaacatgtaataatgttgttcgttccggtgactttatgcatggtggtagttgtggccacgtag

SEQ ID NO: 332204 - DNA, 2590 bp, Artificial Sequence
  derived and/or modified sequence
tgggacaggcagctccggggtccgcggtttcacatcggaaacaaaacagcggctggtctggaaggaacctgagctacgagccgcggcggcagcggggcggcggggaagcgtatacctaatctgggagcctgcaagtgacaacagcctttgcggtccttagacagcttggcctggaggagaacacatgaaagaaagaacctcaagaggctttgttttctgtgaaacagtatttctatacagttgctccaatgacagagttacctgcaccgttgtcctacttccagaatgcacagatgtctgaggacaaccacctgagcaatactgtacgtagccagaatgacaatagagaacggcaggagcacaacgacagacggagccttggccaccctgagccattatctaatggacgaccccagggtaactcccggcaggtggtggagcaagatgaggaagaagatgaggagctgacattgaaatatggcgccaagcatgtgatcatgctctttgtccctgtgactctctgcatggtggtggtcgtggctaccattaagtcagtcagcttttatacccggaaggatgggcagctaatctataccccattcacagaagataccgagactgtgggccagagagccctgcactcaattctgaatgctgccatcatgatcagtgtcattgttgtcatgactatcctcctggtggttctgtataaatacaggtgctataaggtcatccatgcctggcttattatatcatctctattgttgctgttctttttttcattcatttacttgggggaagtgtttaaaacctataacgttgctgtggactacattactgttgcactcctgatctggaattttggtgtggtgggaatgatttccattcactggaaaggtccacttcgactccagcaggcatatctcattatgattagtgccctcatggccctggtgtttatcaagtacctccctgaatggactgcgtggctcatcttggctgtgatttcagtatatgatttagtggctgttttgtgtccgaaaggtccacttcgtatgctggttgaaacagctcaggagagaaatgaaacgctttttccagctctcatttactcctcaacaatggtgtggttggtgaatatggcagaaggagacccggaagctcaaaggagagtatccaaaaattccaagtataatgcagaaaggggagtaaaacttggattgggagatttcattttctacagtgttctggttggtaaagcctcagcaacagccagtggagactggaacacaaccatagcctgtttcgtagccatattaattggtttgtgccttacattattactccttgccattttcaagaaagcattgccagctcttccaatctccatcacctttgggcttgttttctactttgccacagattatcttgtacagccttttatggaccaattagcattccatcaattttatatctagcatatttgcggttagaatcccatggatgtttcttctttgactataacaaaatctggggaggacaaaggtgattttcctgtgtccacatctaacaaagtcaagattcccggctggacttttgcagcttccttccaagtcttcctgaccaccttgcactattggactttggaaggaggtgcctatagaaaacgattttgaacatacttcatcgcagtggactgtgtccctcggtgcagaaactaccagatttgagggacgaggtcaaggagatatgataggcccggaagttgctgtgccccatcagcagcttgacgcgtggtcacaggacgatttcactgacactgcgaactctcaggactaccgttaccaagaggttaggtgaagtggtttaaaccaaacggaactcttcatcttaaactacacgttgaaaatcaacccaataattctgtattaactgaattctgaacttttcaggaggtactgtgaggaagagcaggcaccagcagcagaatggggaatggagaggtgggcaggggttccagcttccctttgattttttgctgcagactcatcctttttaaatgagacttgttttcccctctctttgagtcaagtcaaatatgtagattgcctttggcaattcttcttctcaagcactgacactcattaccgtctgtgattgccatttcttcccaaggccagtctgaacctgaggttgctttatcctaaaagttttaacctcaggttccaaattcagtaaattttggaaacagtacagctatttctcatcaattctctatcatgttgaagtcaaatttggattttccaccaaattctgaatttgtagacatacttgtacgctcacttgccccagatgcctcctctgtcctcattcttctctcccacacaagcagtctttttctacagccagtaaggcagctctgtcgtggtagcagatggtcccattattctagggtcttactctttgtatgatgaaaagaatgtgttatgaatcggtgctgtcagccctgctgtcagaccttcttccacagcaaatgagatgtatgcccaaagacggtagaattaaagaagagtaaaatggctgttgaagc

SEQ ID NO: 332205 - DNA, 6078 bp, Artificial Sequence
  derived and/or modified sequence
cggtgagggttctcgggcggggcctgggacaggcagctccggggtccgcggtttcacatcggaaacaaaacagcggctggtctggaaggaacctgagctacgagccgcggcggcagcggggcggcggggaagcgtatacctaatctgggagcctgcaagtgacaacagcctttgcggtccttagacagcttggcctggaggagaacacatgaaagaaagaacctcaagaggctttgttttctgtgaaacagtatttctatacagttgctccaatgacagagttacctgcaccgttgtcctacttccagaatgcacagatgtctgaggacaaccacctgagcaatactgtacgtagccagaatgacaatagagaacggcaggagcacaacgacagacggagccttggccaccctgagccattatctaatggacgaccccagggtaactcccggcaggtggtggagcaagatgaggaagaagatgaggagctgacattgaaatatggcgccaagcatgtgatcatgctctttgtccctgtgactctctgcatggtggtggtcgtggctaccattaagtcagtcagcttttatacccggaaggatgggcagctaatctataccccattcacagaagataccgagactgtgggccagagagccctgcactcaattctgaatgctgccatcatgatcagtgtcattgttgtcatgactatcctcctggtggttctgtataaatacaggtgctataaggtcatccatgcctggcttattatatcatctctattgttgctgttctttttttcattcatttacttgggggaagtgtttaaaacctataacgttgctgtggactacattactgttgcactcctgatctggaattttggtgtggtgggaatgatttccattcactggaaaggtccacttcgactccagcaggcatatctcattatgattagtgccctcatggccctggtgtttatcaagtacctccctgaatggactgcgtggctcatcttggctgtgatttcagtatatgatttagtggctgttttgtgtccgaaaggtccacttcgtatgctggttgaaacagctcaggagagaaatgaaacgctttttccagctctcatttactcctcaacaatggtgtggttggtgaatatggcagaaggagacccggaagctcaaaggagagtatccaaaaattccaagtataatgcagaaagcacagaaagggagtcacaagacactgttgcagagaatgatgatggcgggttcagtgaggaatgggaagcccagagggacagtcatctagggcctcatcgctctacacctgagtcacgagctgctgtccaggaactttccagcagtatcctcgctggtgaagacccagaggaaaggggagtaaaacttggattgggagatttcattttctacagtgttctggttggtaaagcctcagcaacagccagtggagactggaacacaaccatagcctgtttcgtagccatattaattggtttgtgccttacattattactccttgccattttcaagaaagcattgccagctcttccaatctccatcacctttgggcttgttttctactttgccacagattatcttgtacagccttttatggaccaattagcattccatcaattttatatctagcatatttgcggttagaatcccatggatgtttcttctttgactataacaaaatctggggaggacaaaggtgattttcctgtgtccacatctaacaaagtcaagattcccggctggacttttgcagcttccttccaagtcttcctgaccaccttgcactattggactttggaaggaggtgcctatagaaaacgattttgaacatacttcatcgcagtggactgtgtccctcggtgcagaaactaccagatttgagggacgaggtcaaggagatatgataggcccggaagttgctgtgccccatcagcagcttgacgcgtggtcacaggacgatttcactgacactgcgaactctcaggactaccgttaccaagaggttaggtgaagtggtttaaaccaaacggaactcttcatcttaaactacacgttgaaaatcaacccaataattctgtattaactgaattctgaacttttcaggaggtactgtgaggaagagcaggcaccagcagcagaatggggaatggagaggtgggcaggggttccagcttccctttgattttttgctgcagactcatcctttttaaatgagacttgttttcccctctctttgagtcaagtcaaatatgtagattgcctttggcaattcttcttctcaagcactgacactcattaccgtctgtgattgccatttcttcccaaggccagtctgaacctgaggttgctttatcctaaaagttttaacctcaggttccaaattcagtaaattttggaaacagtacagctatttctcatcaattctctatcatgttgaagtcaaatttggattttccaccaaattctgaatttgtagacatacttgtacgctcacttgccccagatgcctcctctgtcctcattcttctctcccacacaagcagtctttttctacagccagtaaggcagctctgtcgtggtagcagatggtcccattattctagggtcttactctttgtatgatgaaaagaatgtgttatgaatcggtgctgtcagccctgctgtcagaccttcttccacagcaaatgagatgtatgcccaaagacggtagaattaaagaagagtaaaatggctgttgaagcactttctgtcctggtattttgtttttgcttttgccacacagtagctcagaatttgaacaaatagccaaaagctggtggttgatgaattatgaactagttgtatcaacacaaagcaagagttggggaaagccatatttaacttggtgagctgtgggagaacctggtggcagaaggagaaccaactgccaaggggaaagagaaggggcctccagcagcgaaggggatacagtgagctaatgatgtcaaggaggagtttcaggttattctcgtcagctccacaaatgggtgctttgtggtctctgcccgcgttacctttcctctcaatgtacctttgtgtgaactgggcagtggaggtgcctgctgcagttaccatggagttcaggctctgggcagctcagtcaggcaaaacacacaaacagccatcagcctgtgtgggctcagggcacctctggacaaaggcttgtggggcataaccttctttaccacagagagcccttagctatgctgatcagaccgtaagcgtttatgagaaacttagtttcctcctgtggctgaggaggggccagctttttcttcttttgcctgctgttttctctcccaatctatgatatgatatgacctggtttggggctgtctttggtgtttagaatatttgttttctgtcccaggatatttcttataagaacctaacttcaagagtagtgtgcgagtactgatctgaatttaaattaaaattggcttatattaggcagtcacagacaggaaaaataagagctatgcaaagaaagggggatttaaagtagtaggttctatcatctcaattcatttttttccatgaaatcccttcttccaagattcattccctctctcagacatgtgctagcatgggtattatcattgagaaagcacagctacagcaaagccacctgaatagcaatttgtgattggaagcattcttgagggatccctaatctagagtaatttatttgtgtaaggatcccaaatgtgttgcacctttcatgatacatttcttctctgaagagggtacgtggggtgtgtgtatttaaatccatcctatgtattactgattgtcctgtgtagaaagatggcaattattctgtctctttctccaagtttgagccacatctcagccacattgttagacagtgtacagagaacctatctttcctttttttttttttaaaggacaggattttgctgtgttgcccaggctagacttgaactcctgggctcaagtaatccacctcagcctgagtagctgagactacagcccatcttatttctttaaatcattcatctcaggcagagaacttttccctcaaacattctttttagaattagttcagtcattcctaaaacatccaaatgctagtcttccaccatgaaaaatagattgtcactggaaagaacagtagcaatttccataaggatgtgccttcactcacacgggacaggcggtggttatagagtcgggcaaaaccagcagtagagtatgaccagccaagccaatctgcttaataaaaagatggaagacagtaaggaaggaaagtagccactaagagtctgagtctgactgggctacagaataaagggtatttatggacagaatgtcattacatgcctatgggaataccaatcatatttggaagatttgcagattttttttcagagaggaaagactcaccttcctgtttttggttctcagtaggttcgtgtgtgttcctagaatcacagctctgactccaaatgactcaatttctcaattagaaaaagtagaagctttctaagcaacttggaagaaaacagtcataagtaagcaatttgttgattttactacagaagcaacaactgaagaggcagtgtttttactttcagactccgggattcccattctgtagtctctctgcttttaaaaaccctccttttgcaatagatgcccaaacagatgatgtttattacttgttatttacgtggcctcagacagtgtatgtattctcgatataacttgtagagtgtgaaatataagtttaactaccaaataaggtctcccagggttagatgactgcgggaagcctttgatcccaacccccaaggctttgtatatttgatcatttgtgatctaaccctggaagaaaaagagctcagaaaccactatgaaaaaatttgttcagtgttttctgtgttcccgtaggttctggagtctgaggatgcaaagatgaataagataaattctcagaatgtagttataatctcttgttttctggtatatgccatctttctttaacttctctaaaatattgggtatttgtcaaataaccacttttaacagttaccattactgagggcttatacattggtgttataaaagtgacttgattcagaaatcaatccattcagtaaagtactccttctctaaatttgctgttatgtctataaggaacagtttgacctgcccttctcctcacctcctcacctgccttccaacattgaatttggaaggagacgtgaaaattggacatttggttttgcccttgggctggaaactatcatataatcataagtttgagcctagaagtgatccttgtgatcttctcacctctttaaattcccacaacacaagagattaaaaacagaggtttcagctcttcatagtgcgttgtgaaatggctggccagagtgtaccaacaaagctgtcatcgggctcacagctcagagacatctgcatgtgatcatctgcatagtcctctcctctaacgggaaacacctcagatttgcatataaaaaagcaccctggtgctgaaatgaacccctttcttgaacatcaaagctgtctcccacagccttgggcagcagggtgcctcttagtggatgtgctgggtccaccctgagccctgacatgtggtggcagcattgccagttggtctgtgtgtctgtgtagcagggacgatttcccagaaagcaattttccttttgaaatacgtaattgttgagactaggcagtttcaaagtcagctgcatatagtagcaagtacaggactgtcttgtttttggtgtccttggaggtgctggggtgagggtttcagtgggatcatttactctcacatgttgtctgccttctgcttctgtggacactgctttgtacttaattcagacagactgtgaatacaccttttttataaatacctttcaaattcttggtaagatataattttgatagctgattgcagattttctgtatttgtcagattaataaagactgcatgaatcca

SEQ ID NO: 332206 - DNA, 2856 bp, Artificial Sequence
  derived and/or modified sequence
tgggacaggcagctccggggtccgcggtttcacatcggaaacaaaacagcggctggtctggaaggaacctgagctacgagccgcggcggcagcggggcggcggggaagcgtatacctaatctgggagcctgcaagtgacaacagcctttgcggtccttagacagcttggcctggaggagaacacatgaaagaaagaacctcaagaggctttgttttctgtgaaacagtatttctatacagttgctccaatgacagagttacctgcaccgttgtcctacttccagaatgcacagatgtctgaggacaaccacctgagcaatactgtacgtagccagaatgacaatagagaacggcaggagcacaacgacagacggagccttggccaccctgagccattatctaatggacgaccccagggtaactcccggcaggtggtggagcaagatgaggaagaagatgaggagctgacattgaaatatggcgccaagcatgtgatcatgctctttgtccctgtgactctctgcatggtggtggtcgtggctaccattaagtcagtcagcttttatacccggaaggatgggcagctaatctataccccattcacagaagataccgagactgtgggccagagagccctgcactcaattctgaatgctgccatcatgatcagtgtcattgttgtcatgactatcctcctggtggttctgtataaatacaggtgctataaggtcatccatgcctggcttattatatcatctctattgttgctgttctttttttcattcatttacttgggggaagtgtttaaaacctataacgttgctgtggactacattactgttgcactcctgatctggaattttggtgtggtgggaatgatttccattcactggaaaggtccacttcgactccagcaggcatatctcattatgattagtgccctcatggccctggtgtttatcaagtacctccctgaatggactgcgtggctcatcttggctgtgatttcagtatatgatttagtggctgttttgtgtccgaaaggtccacttcgtatgctggttgaaacagctcaggagagaaatgaaacgctttttccagctctcatttactcctcaacaatggtgtggttggtgaatatggcagaaggagacccggaagctcaaaggagagtatccaaaaattccaagtataatgcagaaagagcctgtctgcctcctgctgccatcaacctgctgtctatagctcccatggcacccaggctgttcatgccaaagggtgcctgcaggcccacggcacagaaagggagtcacaagacactgttgcagagaatgatgatggcgggttcagtgaggaatgggaagcccagagggacagtcatctagggcctcatcgctctacacctgagtcacgagctgctgtccaggaactttccagcagtatcctcgctggtgaagacccagaggaaaggggagtaaaacttggattgggagatttcattttctacagtgttctggttggtaaagcctcagcaacagccagtggagactggaacacaaccatagcctgtttcgtagccatattaattggtttgtgccttacattattactccttgccattttcaagaaagcattgccagctcttccaatctccatcacctttgggcttgttttctactttgccacagattatcttgtacagccttttatggaccaattagcattccatcaattttatatctagcatatttgcggttagaatcccatggatgtttcttctttgactataacaaaatctggggaggacaaaggtgattttcctgtgtccacatctaacaaagtcaagattcccggctggacttttgcagcttccttccaagtcttcctgaccaccttgcactattggactttggaaggaggtgcctatagaaaacgattttgaacatacttcatcgcagtggactgtgtccctcggtgcagaaactaccagatttgagggacgaggtcaaggagatatgataggcccggaagttgctgtgccccatcagcagcttgacgcgtggtcacaggacgatttcactgacactgcgaactctcaggactaccgttaccaagaggttaggtgaagtggtttaaaccaaacggaactcttcatcttaaactacacgttgaaaatcaacccaataattctgtattaactgaattctgaacttttcaggaggtactgtgaggaagagcaggcaccagcagcagaatggggaatggagaggtgggcaggggttccagcttccctttgattttttgctgcagactcatcctttttaaatgagacttgttttcccctctctttgagtcaagtcaaatatgtagattgcctttggcaattcttcttctcaagcactgacactcattaccgtctgtgattgccatttcttcccaaggccagtctgaacctgaggttgctttatcctaaaagttttaacctcaggttccaaattcagtaaattttggaaacagtacagctatttctcatcaattctctatcatgttgaagtcaaatttggattttccaccaaattctgaatttgtagacatacttgtacgctcacttgccccagatgcctcctctgtcctcattcttctctcccacacaagcagtctttttctacagccagtaaggcagctctgtcgtggtagcagatggtcccattattctagggtcttactctttgtatgatgaaaagaatgtgttatgaatcggtgctgtcagccctgctgtcagaccttcttccacagcaaatgagatgtatgcccaaagacggtagaattaaagaagagtaaaatggctgttgaagc

SEQ ID NO: 332207 - DNA, 1249 bp, Artificial Sequence
  derived and/or modified sequence
cggtgagggttctcgggcggggcctgggacaggcagctccggggtccgcggtttcacatcggaaacaaaacagcggctggtctggaaggaacctgagctacgagccgcggcggcagcggggcggcggggaagcgtatacctaatctgggagcctgcaagtgacaacagcctttgcggtccttagacagcttggcctggaggagaacacatgaaagaaagaacctcaagaggctttgttttctgtgaaacagtatttctatacagttgctccaatgacagagttacctgcaccgttgtcctacttccagaatgcacagatgtctgaggacaaccacctgagcaatactgtacgtagccagaatgacaatagagaacggcaggagcacaacgacagacggagccttggccaccctgagccattatctaatggacgaccccagggtaactcccggcaggtggtggagcaagatgaggaagaagatgaggagctgacattgaaatatggcgccaagcatgtgatcatgctctttgtccctgtgactctctgcatggtggtggtcgtggctaccattaagtcagtcagcttttatacccggaaggatgggcagctaatctataccccattcacagaagataccgagactgtgggccagagagccctgcactcaattctgaatgctgccatcatgatcagtgtcattgttgtcatgactatcctcctggtggttctgtataaatacaggtgctataaggtgagcatgagacacagatctttgctttccaccctgttcttcttatggttgggtattcttgtcacagtaacttaactgatctaggaaagaaaaaatgttttgtcttctagagataagttaatttttagttttcttcctcctcactgtggaacattcaaaaaatacaaaaaggaagccaggtgcatgtgtaatgccaggctcagaggctgaggcaggaggatcacttgggcccaggagttcacaagcagcttgggcaacgtagcaagaccctgcctctattaaagaaaacaaaaaacaaatattggaagtattttatatgcatggaatctatatgtcatgaaaaaattagtgtaaaatatatatattatgattagttatcaagatttagtgataatttatgttattttggatttcaatgcctttttaggccattgtctcaaaaaataaaagcagaaaacaaaaaaagttgtaactgaaaaataaacatttccatataa

SEQ ID NO: 332208 - DNA, 591 bp, Artificial Sequence
  derived and/or modified sequence
ggtttcacatcggaaacaaaacagcggctggtctggaaggaacctgagctacgagccgcggcggcagcggggcggcggggaagcgtatgcatacaaatttattagcatgcagactgggagaaccacaagacctaatctgggagcctgcaagtgacaacagcctttgcggtccttagacagcttggcctggaggagaacacatgaaagaaagaacctcaagaggctttgttttctgtgaaacagtatttctatacagttgctccaatgacagagttacctgcaccgttgtcctacttccagaatgcacagatgtctgaggacaaccacctgagcaatactgtacgtagccagaatgacaatagagaacggcaggagcacaacgacagacggagccttggccaccctgagccattatctaatggacgaccccagggtaactcccggcaggtggtggagcaagatgaggaagaagatgaggagctgacattgaaatatggcgccaagcatgtgatcatgctctttgtccctgtgactctctgcatggtggtggtcgtggctaccattaagtcagtcagcttttatacccggaag

SEQ ID NO: 332209 - DNA, 754 bp, Artificial Sequence
  derived and/or modified sequence
ttctcgggcggggcctgggacaggcagctccggggtccgcggtttcacatcggaaacaaaacagcggctggtctggaaggaacctgagctacgagccgcggcggcagcggggcggcggggaagcgtatacctaatctgggagcctgcaagtgacaacagcctttgcggtccttagacagcttggcctggaggagaacacatgaaagaaagttctgtttttctttcccttttcagaacctcaagaggctttgttttctgtgaaacagtatttctatacagttgctccaatgacagagttacctgcaccgttgtcctacttccagaatgcacagatgtctgaggacaaccacctgagcaatactgtacgtagccagaatgacaatagagaacggcaggagcacaacgacagacggagccttggccaccctgagccattatctaatggacgaccccagggtaactcccggcaggtggtggagcaagatgaggaagaagatgaggagctgacattgaaatatggcgccaagcatgtgatcatgctctttgtccctgtgactctctgcatggtggtggtcgtggctaccattaagtcagtcagcttttatacccggaaggatgggcagctaatctataccccattcacagaagataccgagactgtgggccagagagccctgcactcaattctgaatgctgccatcatgatcagtgtcattgttgtcatgactatcctcctggtggttctgtataaata

SEQ ID NO: 332210 - DNA, 576 bp, Artificial Sequence
  derived and/or modified sequence
atgacgacaacggtgagggttctcgggcggggcctgggacaggcagctccggggtccgcggtttcacatcggaaacaaaacagcggctggtctggaaggaacctgagctacgagccgcggcggcagcggggcggcggggaagcacctaatctgggagcctgcaagtgacaacagcctttgcggtccttagacagcttggcctggaggagaacacatgaaagaaagaacctcaagaggctttgttttctgtgaaacagtatttctatacagttgctccaatgacagagttacctgcaccgttgtcctacttccagaatgcacagatgtctgaggacaaccacctgagcaatactgtacgtagccagaatgacaatagagaacggcaggagcacaacgacagacggagccttggccaccctgagccattatctaatggacgaccccagggtaactcccggcaggtggtggagcaagatgaggaagaagatgaggagctgacattgaaatatggcgccaagcatgtgatcatgctctttgtccctgtgactctctgcatggtggtggtcgtggctacca

SEQ ID NO: 332211 - DNA, 1230 bp, Artificial Sequence
  derived and/or modified sequence
atgaccgagctgcctgccccactgtcatattttcagaacgcgcaaatgagtgaggataaccatctgtcgaacacggtgaggtcacagaatgataatagagagcgtcaggaacacaacgatagacgttctctaggccacccagagccgcttagtaacggcaggcctcagggcaacagccggcaggtagtggaacaggatgaggaagaggatgaagagctcaccttaaaatatggagccaagcatgtgatcatgctattcgtacccgtgacattgtgcatggtagttgtggtcgctaccataaagagcgtttctttctacacccggaaggacggacaactaatctatactcctttcactgaggatacagaaaccgtcggccagagggccctccactcaatcctgaacgccgctataatgatctctgtgatcgttgtgatgaccattctcctagtcgtgctctacaaatatcgatgttacaaggttatccacgcctggctcatcatttcatcactcttgctgctctttttctttagctttatatacctgggtgaggtctttaagacctacaacgtggcagtggattatattactgtagcgctcttgatttggaacttcggcgtggtgggaatgattagcatccattggaaaggcccattacggttgcagcaggcctacctgatcatgatctccgcgctgatggccttggtgttcatcaaatacctgccagagtggactgcctggttaatccttgcggtgattagcgtttacgaccttgtggcagttttgtgccctaaggggcctctacgcatgctggtcgaaactgcccaggaacgcaacgaaacactgttcccagcactgatttacagctctacgatggtgtggctggtcaacatggctgagggcgacccagaagcacagcggcgtgttagcaagaacagtaagtacaatgcagaacgtggggtgaagttgggactgggagactttatattttactccgtgcttgtgggtaaagcaagcgccacagctagcggcgactggaataccacaatcgcgtgtttcgtcgccatcctgataggactctgtctaactcttttgctgctggcaatctttaaaaaggcattacccgctctgcccatttccataacattcgggctagtgttctactttgctaccgattatctagttcaaccctttatggaccagctggcttttcaccagttttacatctag

SEQ ID NO: 332212 - DNA, 1404 bp, Artificial Sequence
  derived and/or modified sequence
atgacggagcttcctgctccgctgagttacttccagaatgcccaaatgtctgaagacaaccacttgagcaatacagttcggagccagaacgataatcgggaacgtcaggaacataatgatagacgttccctgggacaccctgagccactgtccaacggcaggccccaagggaactcgcggcaggttgttgagcaggacgaggaggaggacgaggagctcactctgaagtatggcgcaaaacacgtcataatgttattcgtgcccgtgactctgtgtatggttgttgttgtggctaccatcaagtctgttagtttttatacacgcaaggacggacagttgatttacacccccttcaccgaggacaccgaaaccgttgggcagcgcgctttacattccatcttgaatgctgctatcatgatctctgttattgtggtcatgacaatcctgctggtagtcttgtataagtatcgatgctacaaggtcatccatgcatggctaatcatttcctccctgctgttgctcttctttttctccttcatttatctgggtgaggtctttaaaacgtataacgtggcagttgactacataacggtcgccctcctgatttggaacttcggggtggtgggcatgatctctattcactggaaaggcccactacgcctgcagcaggcctatctgatcatgatcagcgccctgatggctttggtgttcatcaagtacctgcccgagtggaccgcctggctgatcttggccgttattagcgtctacgacctcgtggctgttctgtgcccgaaggggcctcttagaatgctggtcgaaactgcccaagaacgaaatgagaccttgttccctgcactgatttattcttccaccatggtgtggctggttaatatggctgaaggagacccggaagcacagaggagggtctccaagaattctaagtataacgctgaatccaccgagcgcgagtcccaggatacagtagccgagaacgacgacggcggttttagcgaggagtgggaggctcagagggattctcacctggggcctcatcgttcaactccggagtcccgcgctgccgtgcaagagctaagctcctctatcctcgccggtgaggaccccgaagaacggggagtaaagctggggcttggtgatttcatattctattcggttcttgtgggaaaggctagcgcaaccgctagcggagattggaataccaccatcgcctgcttcgtagcaatccttatcggcctgtgcctgaccctccttctgctggcaatcttcaagaaggcactccctgcgctgcctatcagcatcacatttgggctggtgttctatttcgccacggactacttggtgcaaccattcatggaccaattggcttttcaccagttttatatatag

SEQ ID NO: 332213 - DNA, 1137 bp, Artificial Sequence
  derived and/or modified sequence
atgacagagcttcctgctcctttgagctacttccagaacgcacagatgtccgaagataaccacctgagtaacacagtgcgatctcaaaacgacaatagagaacgacaggagcataatgacagaaggagcctcggtcacccggagccactgtccaacggaaggcctcaggggaactcccgtcaggtcgtagagcaagatgaggaagaggacgaagagctcaccttgaagtatggtgcgaagcatgtgattatgctctttgtgccagtcactctgtgcatggtcgtggttgtggcgacaatcaaatcagtatccttttacaccagaaaggacggtcagctcatatataccccttttaccgaggatacagagactgtgggacagcgcgcactccactctatactgaatgcagctatcatgatctcagttattgtggtgatgaccatactgcttgtggtcctgtataagtaccgttgttataaagtcatccacgcttggctcataatcagttctctgttactgctgtttttcttttcattcatttatttgggcgaagttttcaagacatataatgtagctgtggattacattacagtagcattgctgatctggaatttcggggtcgttggaatgatttcaatacattggaagggacccctcaggctgcagcaggcgtacctaataatgatttccgctctcatggcactggtctttatcaaatacctccctgaatggaccgcttggctgatcctggcagtgatcagtgtgtacgatctagttgcagtgctttgccccaaaggcccacttaggatgctagttgagaccgcacaggagagaaatgagaccctgttccctgctctaatttattctagcaccatggtgtggctggttaacatggcagagggggaccctgaagctcaaagacgcgtgtcaaagaactccaaatataacgctgagcgtgcttgcctgccacctgcagcaatcaaccttctgtccatcgctcctatggcacctcggctattcatgcctaagggagcctgtcggcctacagctcaaaaaggctctcataaaaccttgttgcagagaatgatgatggctggaagcgtccgaaatggtaaacctcggggaaccgttatctag

SEQ ID NO: 332214 - DNA, 555 bp, Artificial Sequence
  derived and/or modified sequence
atgaccgaactcccagctcctctaagttactttcaaaacgcgcagatgagtgaagataatcacctcagtaacacggtgagatctcagaatgataaccgcgaaagacaggaacataatgatcgcagaagcctgggacaccccgagccactaagcaatgggaggcctcaagggaactcccggcaggtggtcgaacaggacgaggaagaggatgaggaactgaccttgaaatacggagctaaacacgttataatgctgttcgtgcctgtcaccctgtgcatggtagtagtcgtcgccactatcaagtccgttagtttttacactagaaaagacggccaactcatctataccccgttcaccgaggataccgaaacagtgggacaacgcgcactccactccatcctgaacgctgcaatcatgatttctgtcatcgtagtcatgaccatcctccttgtcgtcctctacaagtaccgatgctacaaagtgagcatgcggcacagaagtctgttatctacgcttttcttcctgtggctgggcatcctggtgaccgtgacatag

SEQ ID NO: 332215 - DNA, 330 bp, Artificial Sequence
  derived and/or modified sequence
atgacagagcttcccgctcccctttcctacttccagaacgctcagatgagtgaagacaaccacctgtctaacaccgtgaggtcccagaatgataaccgcgagcggcaggagcataatgacagacgctcgctcggccatcctgagcctctctctaatggtcggcctcaaggtaactcccggcaagttgtagagcaagacgaggaggaggacgaagagctgacactgaagtacggcgctaaacacgtgatcatgctgttcgtccctgtgactctgtgcatggtggtggtagtggctaccattaaatccgtctcgttttacactcggaagtag

SEQ ID NO: 332216 - DNA, 468 bp, Artificial Sequence
  derived and/or modified sequence
atgaccgagctcccggcaccattatcttattttcagaatgcccagatgagtgaagacaatcatctgtctaataccgttcgctctcagaacgataaccgcgagagacaggagcacaacgaccgaagatctctaggccaccctgagcccttgtcaaatggaagaccgcagggtaacagccgtcaagtggtcgaacaggatgaggaggaagacgaagaactgaccctcaaatacggagcaaaacacgtgatcatgttatttgtgccggtgacgttgtgcatggtggtggtggtcgctaccattaagagtgtctcattctacacacggaaagatggccagttaatctacacaccctttaccgaagatactgagaccgtaggccagagagcactgcactctattctgaatgccgcaataatgatttctgtcattgtggtcatgacaatcctgcttgttgtactgtataagtag

SEQ ID NO: 332217 - DNA, 300 bp, Artificial Sequence
  derived and/or modified sequence
atgactgagttaccagcccctctgtcatactttcagaatgcacagatgtcagaggacaatcatctgtcaaacaccgttagaagtcagaacgataatagagagcgccaggagcacaacgaccggagatctctgggtcatcccgaaccactctcgaatgggagacctcaggggaacagtaggcaggtggtggaacaggacgaagaagaggacgaggagctgaccttaaagtatggtgccaaacatgtaattatgctattcgtgccagtaaccctatgtatggtggtggttgtggccacgtag

SEQ ID NO: 332218 - DNA, 1230 bp, Artificial Sequence
  derived and/or modified sequence
atgaccgagctgcccgcccccctgagctacttccagaacgcccagatgagcgaggacaaccacctgagcaacaccgtgagaagccagaacgacaacagagagagacaggagcacaacgacagaagaagcctgggccaccccgagcccctgagcaacggcagaccccagggcaacagcagacaggtggtggagcaggacgaggaggaggacgaggagctgaccctgaagtacggcgccaagcacgtgatcatgctgttcgtgcccgtgaccctgtgcatggtggtggtggtggccaccatcaagagcgtgagcttctacaccagaaaggacggccagctgatctacacccccttcaccgaggacaccgagaccgtgggccagagagccctgcacagcatcctgaacgccgccatcatgatcagcgtgatcgtggtgatgaccatcctgctggtggtgctgtacaagtacagatgctacaaggtgatccacgcctggctgatcatcagcagcctgctgctgctgttcttcttcagcttcatctacctgggcgaggtgttcaagacctacaacgtggccgtggactacatcaccgtggccctgctgatctggaacttcggcgtggtgggcatgatcagcatccactggaagggccccctgagactgcagcaggcctacctgatcatgatcagcgccctgatggccctggtgttcatcaagtacctgcccgagtggaccgcctggctgatcctggccgtgatcagcgtgtacgacctggtggccgtgctgtgccccaagggccccctgagaatgctggtggagaccgcccaggagagaaacgagaccctgttccccgccctgatctacagcagcaccatggtgtggctggtgaacatggccgagggcgaccccgaggcccagagaagagtgagcaagaacagcaagtacaacgccgagagaggcgtgaagctgggcctgggcgacttcatcttctacagcgtgctggtgggcaaggccagcgccaccgccagcggcgactggaacaccaccatcgcctgcttcgtggccatcctgatcggcctgtgcctgaccctgctgctgctggccatcttcaagaaggccctgcccgccctgcccatcagcatcaccttcggcctggtgttctacttcgccaccgactacctggtgcagcccttcatggaccagctggccttccaccagttctacatctag

SEQ ID NO: 332219 - DNA, 1404 bp, Artificial Sequence
  derived and/or modified sequence
atgaccgagctgcccgcccccctgagctacttccagaacgcccagatgagcgaggacaaccacctgagcaacaccgtgagaagccagaacgacaacagagagagacaggagcacaacgacagaagaagcctgggccaccccgagcccctgagcaacggcagaccccagggcaacagcagacaggtggtggagcaggacgaggaggaggacgaggagctgaccctgaagtacggcgccaagcacgtgatcatgctgttcgtgcccgtgaccctgtgcatggtggtggtggtggccaccatcaagagcgtgagcttctacaccagaaaggacggccagctgatctacacccccttcaccgaggacaccgagaccgtgggccagagagccctgcacagcatcctgaacgccgccatcatgatcagcgtgatcgtggtgatgaccatcctgctggtggtgctgtacaagtacagatgctacaaggtgatccacgcctggctgatcatcagcagcctgctgctgctgttcttcttcagcttcatctacctgggcgaggtgttcaagacctacaacgtggccgtggactacatcaccgtggccctgctgatctggaacttcggcgtggtgggcatgatcagcatccactggaagggccccctgagactgcagcaggcctacctgatcatgatcagcgccctgatggccctggtgttcatcaagtacctgcccgagtggaccgcctggctgatcctggccgtgatcagcgtgtacgacctggtggccgtgctgtgccccaagggccccctgagaatgctggtggagaccgcccaggagagaaacgagaccctgttccccgccctgatctacagcagcaccatggtgtggctggtgaacatggccgagggcgaccccgaggcccagagaagagtgagcaagaacagcaagtacaacgccgagagcaccgagagagagagccaggacaccgtggccgagaacgacgacggcggcttcagcgaggagtgggaggcccagagagacagccacctgggcccccacagaagcacccccgagagcagagccgccgtgcaggagctgagcagcagcatcctggccggcgaggaccccgaggagagaggcgtgaagctgggcctgggcgacttcatcttctacagcgtgctggtgggcaaggccagcgccaccgccagcggcgactggaacaccaccatcgcctgcttcgtggccatcctgatcggcctgtgcctgaccctgctgctgctggccatcttcaagaaggccctgcccgccctgcccatcagcatcaccttcggcctggtgttctacttcgccaccgactacctggtgcagcccttcatggaccagctggccttccaccagttctacatctag

SEQ ID NO: 332220 - DNA, 1137 bp, Artificial Sequence
  derived and/or modified sequence
atgaccgagctgcccgcccccctgagctacttccagaacgcccagatgagcgaggacaaccacctgagcaacaccgtgagaagccagaacgacaacagagagagacaggagcacaacgacagaagaagcctgggccaccccgagcccctgagcaacggcagaccccagggcaacagcagacaggtggtggagcaggacgaggaggaggacgaggagctgaccctgaagtacggcgccaagcacgtgatcatgctgttcgtgcccgtgaccctgtgcatggtggtggtggtggccaccatcaagagcgtgagcttctacaccagaaaggacggccagctgatctacacccccttcaccgaggacaccgagaccgtgggccagagagccctgcacagcatcctgaacgccgccatcatgatcagcgtgatcgtggtgatgaccatcctgctggtggtgctgtacaagtacagatgctacaaggtgatccacgcctggctgatcatcagcagcctgctgctgctgttcttcttcagcttcatctacctgggcgaggtgttcaagacctacaacgtggccgtggactacatcaccgtggccctgctgatctggaacttcggcgtggtgggcatgatcagcatccactggaagggccccctgagactgcagcaggcctacctgatcatgatcagcgccctgatggccctggtgttcatcaagtacctgcccgagtggaccgcctggctgatcctggccgtgatcagcgtgtacgacctggtggccgtgctgtgccccaagggccccctgagaatgctggtggagaccgcccaggagagaaacgagaccctgttccccgccctgatctacagcagcaccatggtgtggctggtgaacatggccgagggcgaccccgaggcccagagaagagtgagcaagaacagcaagtacaacgccgagagagcctgcctgccccccgccgccatcaacctgctgagcatcgcccccatggcccccagactgttcatgcccaagggcgcctgcagacccaccgcccagaagggcagccacaagaccctgctgcagagaatgatgatggccggcagcgtgagaaacggcaagcccagaggcaccgtgatctag

SEQ ID NO: 332221 - DNA, 555 bp, Artificial Sequence
  derived and/or modified sequence
atgaccgagctgcccgcccccctgagctacttccagaacgcccagatgagcgaggacaaccacctgagcaacaccgtgagaagccagaacgacaacagagagagacaggagcacaacgacagaagaagcctgggccaccccgagcccctgagcaacggcagaccccagggcaacagcagacaggtggtggagcaggacgaggaggaggacgaggagctgaccctgaagtacggcgccaagcacgtgatcatgctgttcgtgcccgtgaccctgtgcatggtggtggtggtggccaccatcaagagcgtgagcttctacaccagaaaggacggccagctgatctacacccccttcaccgaggacaccgagaccgtgggccagagagccctgcacagcatcctgaacgccgccatcatgatcagcgtgatcgtggtgatgaccatcctgctggtggtgctgtacaagtacagatgctacaaggtgagcatgagacacagaagcctgctgagcaccctgttcttcctgtggctgggcatcctggtgaccgtgacctag

SEQ ID NO: 332222 - DNA, 330 bp, Artificial Sequence
  derived and/or modified sequence
atgaccgagctgcccgcccccctgagctacttccagaacgcccagatgagcgaggacaaccacctgagcaacaccgtgagaagccagaacgacaacagagagagacaggagcacaacgacagaagaagcctgggccaccccgagcccctgagcaacggcagaccccagggcaacagcagacaggtggtggagcaggacgaggaggaggacgaggagctgaccctgaagtacggcgccaagcacgtgatcatgctgttcgtgcccgtgaccctgtgcatggtggtggtggtggccaccatcaagagcgtgagcttctacaccagaaagtag

SEQ ID NO: 332223 - DNA, 468 bp, Artificial Sequence
  derived and/or modified sequence
atgaccgagctgcccgcccccctgagctacttccagaacgcccagatgagcgaggacaaccacctgagcaacaccgtgagaagccagaacgacaacagagagagacaggagcacaacgacagaagaagcctgggccaccccgagcccctgagcaacggcagaccccagggcaacagcagacaggtggtggagcaggacgaggaggaggacgaggagctgaccctgaagtacggcgccaagcacgtgatcatgctgttcgtgcccgtgaccctgtgcatggtggtggtggtggccaccatcaagagcgtgagcttctacaccagaaaggacggccagctgatctacacccccttcaccgaggacaccgagaccgtgggccagagagccctgcacagcatcctgaacgccgccatcatgatcagcgtgatcgtggtgatgaccatcctgctggtggtgctgtacaagtag

SEQ ID NO: 332224 - DNA, 300 bp, Artificial Sequence
  derived and/or modified sequence
atgaccgagctgcccgcccccctgagctacttccagaacgcccagatgagcgaggacaaccacctgagcaacaccgtgagaagccagaacgacaacagagagagacaggagcacaacgacagaagaagcctgggccaccccgagcccctgagcaacggcagaccccagggcaacagcagacaggtggtggagcaggacgaggaggaggacgaggagctgaccctgaagtacggcgccaagcacgtgatcatgctgttcgtgcccgtgaccctgtgcatggtggtggtggtggccacctag

SEQ ID NO: 332225 - protein, 463 aa, Artificial Sequence
  derived and/or modified sequence
MTELPAPLSYFQNAQMSEDNHLSNTNDNRERQEHNDRRSLGHPEPLSNGRPQGNSRQVVEQDEEEDEELTLKYGAKHVIMLFVPVTLCMVVVVATIKSVSFYTRKDGQLIYTPFTEDTETVGQRALHSILNAAIMISVIVVMTILLVVLYKYRCYKVIHAWLIISSLLLLFFFSFIYLGEVFKTYNVAVDYITVALLIWNFGVVGMISIHWKGPLRLQQAYLIMISALMALVFIKYLPEWTAWLILAVISVYDLVAVLCPKGPLRMLVETAQERNETLFPALIYSSTMVWLVNMAEGDPEAQRRVSKNSKYNAESTERESQDTVAENDDGGFSEEWEAQRDSHLGPHRSTPESRAAVQELSSSILAGEDPEERGVKLGLGDFIFYSVLVGKASATASGDWNTTIACFVAILIGLCLTLLLLAIFKKALPALPISITFGLVFYFATDYLVQPFMDQLAFHQFYI

SEQ ID NO: 332226 - protein, 92 aa, Artificial Sequence
  derived and/or modified sequence
MTELPAPLSYFQNAQMSEDNHLSNTNDNRERQEHNDRRSLGHPEPLSNGRPQGNSRQVVEQDEEEDEELTLKYGAKHVIMLFVPVTLCMVVV

SEQ ID NO: 332227 - protein, 147 aa, Artificial Sequence
  derived and/or modified sequence
MTELPAPLSYFQNAQMSEDNHLSNTNDNRERQEHNDRRSLGHPEPLSNGRPQGNSRQVVEQDEEEDEELTLKYGAKHVIMLFVPVTLCMVVVVATIKSVSFYTRKDGQLIYTPFTEDTETVGQRALHSILNAAIMISVIVVMTILLV

SEQ ID NO: 332228 - protein, 58 aa, Artificial Sequence
  derived and/or modified sequence
MTELPAPLSYFQNAQMSEDNHLSNTNDNRERQEHNDRRSLGHPEPLSNGRPQGNSRQV

SEQ ID NO: 332229 - protein, 63 aa, Artificial Sequence
  derived and/or modified sequence
MTELPAPLSYFQNAQMSEDNHLSNTNDNRERQEHNDRRSLGHPEPLSNGRPQGNSRQVVEQDE

SEQ ID NO: 332230 - protein, 91 aa, Artificial Sequence
  derived and/or modified sequence
MTELPAPLSYFQNAQMSEDNHLSNTNDNRERQEHNDRRSLGHPEPLSNGRPQGNSRQVVEQDEEEDEELTLKYGAKHVIMLFVPVTLCMVV

SEQ ID NO: 332231 - protein, 62 aa, Artificial Sequence
  derived and/or modified sequence
MTELPAPLSYFQNAQMSEDNHLSNTNDNRERQEHNDRRSLGHPEPLSNGRPQGNSRQVVEQD

SEQ ID NO: 332232 - protein, 135 aa, Artificial Sequence
  derived and/or modified sequence
MTELPAPLSYFQNAQMSEDNHLSNTNDNRERQEHNDRRSLGHPEPLSNGRPQGNSRQVVEQDEEEDEELTLKYGAKHVIMLFVPVTLCMVVVVATIKSVSFYTRKDGQLIYTPFTEDTETVGQRALHSILNAAIM

SEQ ID NO: 332233 - protein, 109 aa, Artificial Sequence
  derived and/or modified sequence
MTELPAPLSYFQNAQMSEDNHLSNTNDNRERQEHNDRRSLGHPEPLSNGRPQGNSRQVVEQDEEEDEELTLKYGAKHVIMLFVPVTLCMVVVVATIKSVSFYTRKDGQL

SEQ ID NO: 332234 - DNA, 1392 bp, Artificial Sequence
  derived and/or modified sequence
atgaccgagttacccgccccactctcttatttccaaaacgctcagatgtccgaggacaatcatctgagcaacactaatgacaatagagagcggcaggagcataacgaccgccgcagcttgggtcaccccgagcctctatcaaatggaagaccccagggcaattcccgccaggtcgtcgagcaagacgaggaggaggacgaggaattaactttgaagtacggagccaagcatgtaattatgctattcgttccagttaccctttgtatggtcgttgtcgtcgcaactatcaagtcggtctccttctatacgagaaaagatggacaattgatttacactccattcacggaggacactgaaaccgtggggcagagagccctccactcaatcttaaatgctgctatcatgattagcgtcatagttgtgatgacaattctgctagtcgtgttgtacaaatacagatgctacaaagtcatccacgcatggctgatcattagcagcctgcttttgctcttctttttcagctttatctatctcggtgaagtattcaagacctataacgtggccgtcgattatatcaccgtcgctctcctgatctggaactttggagtggttggtatgatttctatccattggaagggcccactccgcctacagcaggcctatcttatcatgatctccgcgcttatggctcttgttttcattaaatacttaccagagtggacagcttggcttattcttgccgtgatctccgtatacgatctcgtcgccgtcctttgcccaaaaggaccccttcgtatgctggtcgaaactgcccaggagcggaatgaaaccctcttccctgcacttatctattcctccacaatggtgtggctggtgaatatggcagaaggcgaccccgaggcccagcgcagagtgtctaaaaacagtaagtataacgccgaaagcactgaaagagaaagtcaggatacggtggcggaaaacgatgacggcggattctctgaggaatgggaggcacagcgtgattcccatctaggtccacatcgcagtacgccagagagccgggcggccgtgcaggagctatcatctagcatcctggcaggtgaggacccagaagaacggggggtgaaacttggcctaggcgacttcattttctattccgtgcttgtcggtaaggcatcggcaaccgcttctggagactggaacacaactattgcatgctttgtggccatcttgatcggcctctgtctcacgctcctcctgttggctatcttcaagaaggcactccccgctctcccaatcagtataactttcggtttagtgttctactttgccaccgactacctggttcagccctttatggaccagctcgcctttcaccaattttatatttag

SEQ ID NO: 332235 - DNA, 1392 bp, Artificial Sequence
  derived and/or modified sequence
atgaccgaactcccagctccactgtcttattttcagaacgctcagatgagtgaggacaaccatttgagtaacaccaatgataacagggaaaggcaggagcataacgatcggcggagccttggacatccagagcccctgtcaaacggccggccacaaggcaattccaggcaggtagtggaacaggatgaagaggaggacgaagagctcactcttaagtacggggcgaaacacgtcatcatgttattcgtgcctgtgaccctgtgcatggtggttgtagtggctaccattaaatctgttagcttttataccagaaaagatggtcagctcatttatacgccattcacagaagatactgaaactgtaggccagagagctcttcatagcatcctgaacgccgcaatcatgatttccgtaattgtagttatgacaattctgcttgtcgtcctctacaagtacagatgctacaaggtgattcatgcgtggctgatcatctccagtctactgttactctttttctttagttttatctatctgggggaggttttcaagacttacaacgtagccgtggattacatcacagtggctcttctgatctggaacttcggggttgtgggcatgatctcaattcactggaagggcccactgaggctacaacaagcttacctgatcatgataagcgcactcatggccctggtgttcatcaaatatctgcccgagtggaccgcctggctaatccttgccgtgatttccgtctacgatttggttgcagtattgtgccccaaggggccactcagaatgttggtggagacagctcaggagcgaaatgagaccctttttccagcacttatctattcttctaccatggtttggttagttaacatggcagaaggcgatcccgaggcccagagacgcgttagcaaaaacagcaagtataatgctgagtccacagaacgcgagagtcaggatactgtagccgagaatgatgacggcgggttctccgaagaatgggaggcgcagagggattctcaccttggcccccatcgatcaacccctgaatcacgcgcagcagtacaagagctgtcgagctcaatactggccggggaggaccctgaagaacgcggcgtcaaacttggcctaggggactttatattctattcagtgctggtcggaaaggcctcagccaccgccagtggcgactggaacactacaatcgcttgctttgtagcaatcctgattggtctgtgccttaccctgttgctgcttgctatattcaagaaggcactgcccgcgctccctatcagcatcactttcgggctggtgttctatttcgccaccgactacctggtccagcctttcatggaccagctggcctttcaccagttctacatctag

SEQ ID NO: 332236 - DNA, 279 bp, Artificial Sequence
  derived and/or modified sequence
atgacagagcttcctgcgccactatcgtactttcagaatgcgcagatgtcagaagacaaccatctgtcaaatacgaacgataatagagaacgacaggaacacaacgacagacggagcctaggacaccctgagccgctgtctaatggtaggccccaggggaatagccgtcaggttgtagagcaggacgaggaagaggacgaggagctgacactgaagtacggagcaaagcatgtaattatgctttttgtcccggtcaccctctgtatggtggtggtgtag

SEQ ID NO: 332237 - DNA, 444 bp, Artificial Sequence
  derived and/or modified sequence
atgaccgagcttcccgcacccctgtcatactttcagaatgcccagatgtccgaggataatcacctgtccaacaccaacgacaaccgtgagagacaagagcacaatgatcggagatcactgggccaccctgaaccactttctaacggcagacctcaagggaattccagacaagtggtggagcaggatgaagaggaggatgaggagcttaccctcaaatacggcgccaaacatgttatcatgttattcgtgcccgtgacactgtgcatggtggtcgttgtcgccaccattaaaagcgtgtcattctacacccgaaaggacgggcaactcatatacacacccttcaccgaagacacagagaccgtgggacaacgcgccctccacagtatcttgaatgctgccattatgatttccgtgattgtcgtcatgaccatcctgctggtgtag

SEQ ID NO: 332238 - DNA, 177 bp, Artificial Sequence
  derived and/or modified sequence
atgaccgagctgccagccccactgtcttacttccagaatgctcagatgagtgaagacaatcatctttccaataccaacgacaatcgcgagaggcaggagcacaatgatcggcggtccttagggcatccagagccactctccaatggacgaccacaggggaatagtaggcaggtgtag

SEQ ID NO: 332239 - DNA, 279 bp, Artificial Sequence
  derived and/or modified sequence
atgactgaattacctgctccattatcttattttcagaatgctcaaatgagcgaggacaatcacctctctaacaccaacgataaccgagaacgccaggaacataacgatcgtaggtccctgggccaccccgaacccctctcaaatggcagaccccaggggaactcccgtcaggtcgtcgagcaggatgaggaagaagatgaagaactcacactgaagtacggcgccaagcatgtgattatgctgttcgtgcccgtgacattgtgtatggtggttgtgtag

SEQ ID NO: 332240 - DNA, 192 bp, Artificial Sequence
  derived and/or modified sequence
atgaccgagttgcccgcgccgcttagctactttcagaatgcccagatgtcggaagacaaccatttgtccaataccaacgacaaccgggagagacaggaacataatgatcgacgcagcctaggacaccctgagccactttccaatggccggcctcaaggcaattcacggcaggtcgtcgagcaggatgagtag

SEQ ID NO: 332241 - DNA, 276 bp, Artificial Sequence
  derived and/or modified sequence
atgaccgagctcccagcacccctgagctattttcaaaacgcacagatgagtgaagataaccacctgtcaaacacgaacgataatcgggagagacaggagcataatgatcggcgctctttgggacatccagagcccctatcaaacggacgcccgcagggaaattcacgccaagtggttgaacaggatgaggaggaagatgaggagctcactctgaagtatggtgccaaacacgtaatcatgttgttcgtacccgtgacgctgtgtatggtagtctag

SEQ ID NO: 332242 - DNA, 189 bp, Artificial Sequence
  derived and/or modified sequence
atgaccgaattgccagccccactgtcctatttccaaaacgcccagatgtctgaagacaatcatctctctaacacaaacgataacagagagcggcaggagcacaatgataggaggtctctgggtcacccagaacccctgtccaatgggcgacctcagggaaactctaggcaagtggtagagcaggactag

SEQ ID NO: 332243 - DNA, 408 bp, Artificial Sequence
  derived and/or modified sequence
atgaccgagcttcctgcccctctgagctacttccagaatgcgcaaatgagcgaggataaccatttatctaataccaatgacaatagggaaaggcaggagcataacgacagaagaagcttgggccaccctgagccattgtctaatggacgcccacagggcaactcccgccaggtcgtcgagcaggacgaggaggaagatgaagaactcacgctcaagtacggcgccaagcatgtgatcatgctgtttgtccccgttactctctgtatggtagtggtcgtggctacaataaaatccgtgagtttctatactagaaaagacggacagctgatctatacgcccttcacggaggacacggagaccgtggggcaaagagcattacacagcatactgaacgctgcaattatgtag

SEQ ID NO: 332244 - DNA, 330 bp, Artificial Sequence
  derived and/or modified sequence
atgaccgaacttccagcccctcttagctatttccagaacgcgcagatgagtgaagacaatcatctgagcaacactaatgataatagagagcgacaggagcacaatgacaggcgtagtcttgggcatccggaacctctctctaatggccggccacaggggaatagcagacaggtggtggagcaggatgaggaggaagacgaagaactgaccctcaaatatggagccaaacacgtcatcatgctgtttgttcccgtaaccctttgtatggtggtcgttgtggcaactataaagagcgtctctttctacacccggaaggatggtcaactgtag

SEQ ID NO: 332245 - DNA, 1392 bp, Artificial Sequence
  derived and/or modified sequence
atgacagagctgcctgcccccctgagctacttccagaatgcccagatgtctgaggacaaccacctgagcaacaccaatgacaaccgggagcggcaggagcacaatgacagaagaagcctgggccaccctgagcccctgagcaatggccggccccagggcaacagccggcaggtggtggagcaggatgaggaggaggatgaggagctgaccctgaagtatggagccaagcacgtgatcatgctgtttgtgcctgtgaccctgtgcatggtggtggtggtggccaccatcaagtctgtgtccttctacaccaggaaggatggccagctgatctacacccccttcacagaggacacagagaccgtgggccagagggccctgcacagcatcctgaatgctgccatcatgatctctgtgattgtggtgatgaccatcctgctggtggtgctgtacaagtaccgctgctacaaggtgattcatgcctggctgatcatcagcagcctgctgctgctcttcttcttctccttcatctacctgggggaggtgttcaagacctacaacgtggccgtggactacatcaccgtggccctgctgatctggaactttggagtggtgggcatgatcagcatccactggaagggccccctgcggctgcagcaggcctacctgatcatgatcagcgccctgatggccctggtgttcatcaagtacctgcctgagtggacagcctggctgatcctggccgtcatctctgtgtatgacctggtggccgtgctgtgccccaagggccccctgaggatgctggtggagacagcccaggagagaaatgagaccctcttccctgccctgatctacagcagcaccatggtgtggctggtgaacatggccgagggggaccctgaggcccagaggagagtgtccaagaacagcaagtacaatgctgagagcacagagcgggagagccaggacacagtggccgagaatgatgatggcggcttcagcgaggagtgggaggcccagagggacagccacctgggcccccacaggagcaccccagagagcagagctgctgtgcaggagctgagcagcagcatcctggccggggaggaccctgaggagcggggcgtgaagctgggcctgggggacttcatcttctacagcgtgctggtgggcaaggccagcgccacagccagcggggactggaacaccaccatcgcctgctttgtggccatcctgattggcctgtgcctgaccctgctgctgctggccatcttcaagaaggccctgcctgccctgcccatcagcatcaccttcggcctggtgttctactttgccacagactacctggtgcagcccttcatggaccagctggccttccaccagttctacatctag

SEQ ID NO: 332246 - DNA, 279 bp, Artificial Sequence
  derived and/or modified sequence
atgacagagctgcctgcccccctgagctacttccagaatgcccagatgtctgaggacaaccacctgagcaacaccaatgacaaccgggagcggcaggagcacaatgacagaagaagcctgggccaccctgagcccctgagcaatggccggccccagggcaacagccggcaggtggtggagcaggatgaggaggaggatgaggagctgaccctgaagtatggagccaagcacgtgatcatgctgtttgtgcctgtgaccctgtgcatggtggtggtgtag

SEQ ID NO: 332247 - DNA, 444 bp, Artificial Sequence
  derived and/or modified sequence
atgacagagctgcctgcccccctgagctacttccagaatgcccagatgtctgaggacaaccacctgagcaacaccaatgacaaccgggagcggcaggagcacaatgacagaagaagcctgggccaccctgagcccctgagcaatggccggccccagggcaacagccggcaggtggtggagcaggatgaggaggaggatgaggagctgaccctgaagtatggagccaagcacgtgatcatgctgtttgtgcctgtgaccctgtgcatggtggtggtggtggccaccatcaagtctgtgtccttctacaccaggaaggatggccagctgatctacacccccttcacagaggacacagagaccgtgggccagagggccctgcacagcatcctgaatgctgccatcatgatctctgtgattgtggtgatgaccatcctgctggtgtag

SEQ ID NO: 332248 - DNA, 177 bp, Artificial Sequence
  derived and/or modified sequence
atgacagagctgcctgcccccctgagctacttccagaatgcccagatgtctgaggacaaccacctgagcaacaccaatgacaaccgggagcggcaggagcacaatgacagaagaagcctgggccaccctgagcccctgagcaatggccggccccagggcaacagccggcaggtgtag

SEQ ID NO: 332249 - DNA, 192 bp, Artificial Sequence
  derived and/or modified sequence
atgacagagctgcctgcccccctgagctacttccagaatgcccagatgtctgaggacaaccacctgagcaacaccaatgacaaccgggagcggcaggagcacaatgacagaagaagcctgggccaccctgagcccctgagcaatggccggccccagggcaacagccggcaggtggtggagcaggatgaatag

SEQ ID NO: 332250 - DNA, 276 bp, Artificial Sequence
  derived and/or modified sequence
atgacagagctgcctgcccccctgagctacttccagaatgcccagatgtctgaggacaaccacctgagcaacaccaatgacaaccgggagcggcaggagcacaatgacagaagaagcctgggccaccctgagcccctgagcaatggccggccccagggcaacagccggcaggtggtggagcaggatgaggaggaggatgaggagctgaccctgaagtatggagccaagcacgtgatcatgctgtttgtgcctgtgaccctgtgcatggtggtgtag

SEQ ID NO: 332251 - DNA, 189 bp, Artificial Sequence
  derived and/or modified sequence
atgacagagctgcctgcccccctgagctacttccagaatgcccagatgtctgaggacaaccacctgagcaacaccaatgacaaccgggagcggcaggagcacaatgacagaagaagcctgggccaccctgagcccctgagcaatggccggccccagggcaacagccggcaggtggtggagcaggactag

SEQ ID NO: 332252 - DNA, 408 bp, Artificial Sequence
  derived and/or modified sequence
atgacagagctgcctgcccccctgagctacttccagaatgcccagatgtctgaggacaaccacctgagcaacaccaatgacaaccgggagcggcaggagcacaatgacagaagaagcctgggccaccctgagcccctgagcaatggccggccccagggcaacagccggcaggtggtggagcaggatgaggaggaggatgaggagctgaccctgaagtatggagccaagcacgtgatcatgctgtttgtgcctgtgaccctgtgcatggtggtggtggtggccaccatcaagtctgtgtccttctacaccaggaaggatggccagctgatctacacccccttcacagaggacacagagaccgtgggccagagggccctgcacagcatcctgaatgctgccatcatgtag

SEQ ID NO: 332253 - DNA, 330 bp, Artificial Sequence
  derived and/or modified sequence
atgacagagctgcctgcccccctgagctacttccagaatgcccagatgtctgaggacaaccacctgagcaacaccaatgacaaccgggagcggcaggagcacaatgacagaagaagcctgggccaccctgagcccctgagcaatggccggccccagggcaacagccggcaggtggtggagcaggatgaggaggaggatgaggagctgaccctgaagtatggagccaagcacgtgatcatgctgtttgtgcctgtgaccctgtgcatggtggtggtggtggccaccatcaagtctgtgtccttctacaccaggaaggatggccagctgtag

SEQ ID NO: 332254 - DNA, 1392 bp, Artificial Sequence
  derived and/or modified sequence
atgaccgagctgcccgcccccctgagctacttccagaacgcccagatgagcgaagataatcatctgagcaacacaaacgacaatcgagagcggcaggaacacaacgacaggaggtcccttggtcatcccgagcctctcagcaacggtcggcctcagggcaacagtcgtcaggttgtagagcaggacgaggaagaggatgaggagctcactctgaagtatggcgcgaaacacgtaataatgctgttcgttccggtaacactttgcatggtagtagtagttgcgacaatcaagagtgttagcttctatacgagaaaagacggccagctgatatacaccccttttactgaagacaccgaaactgtgggccaacgggctctgcacagtattctgaacgcagctatcatgatatcagttatcgtagtgatgacaatactgctcgttgttttatacaaataccgatgctataaggtcatccacgcttggctgataatatctagcctattgctgctgtttttcttctcgttcatttacctgggcgaggtgttcaagacttacaacgtcgctgtggactacattacagtggcccttctgatctggaattttggtgtggtgggtatgatctccatccactggaagggacctctcagacttcaacaagcctatctaataatgatctcagccttgatggccttggtattcattaaatacttgcctgagtggaccgcgtggttaattcttgctgtgatttcggtctatgacctcgtcgctgttctgtgccccaaaggacctctacgtatgctggttgagaccgcccaggagcgtaacgaaactttattccccgctttgatatattcaagcacaatggtctggctcgtgaacatggctgagggtgaccctgaggcacagaggagagtctcaaagaactctaagtataacgccgagagcaccgaaagggaaagccaagatactgttgccgagaatgacgatgggggcttttcagaggaatgggaggcccagcgcgacagccacctgggaccacacagaagcacacccgagtccagggcagcagtccaagaactgagctccagtatactggcaggggaagatcctgaggaacggggcgtaaaactcggcttgggcgactttatcttttattcggtgcttgtggggaaggcctctgccactgcatccggcgactggaataccacaattgcatgcttcgtagctatcctcattggcctctgtctaaccttgcttctgcttgccattttcaagaaggcccttcctgctttacccatctctatcacctttggactcgttttttacttcgccaccgattatctggtgcagcccttcatggaccagctggcctttcatcagttttacatctag

SEQ ID NO: 332255 - DNA, 1392 bp, Artificial Sequence
  derived and/or modified sequence
atgaccgagctgcccgcccccctgagctacttccagaacgcccagatgtcagaggataatcaccttagcaataccaatgataatagagaaaggcaagaacacaatgaccgtcgctcactgggtcatccagaaccactgtccaacggccgaccccagggcaacagccgccaggtcgtggagcaagacgaggaggaggatgaggaattgactctcaaatacggggcaaagcacgtcatcatgttgtttgtcccagtcacgttgtgtatggtggttgtcgtcgcaactattaagtctgtaagcttttacaccaggaaggatggccagcttatttacacacccttcaccgaggatactgagacagtcggacaacgggctttacactccatcctcaacgcagctattatgatttctgttatcgtggtaatgaccattctcctggtggtgctctacaagtaccggtgttacaaagtgatccatgcctggctgatcatctccagcttgctgctgctgtttttcttcagtttcatctatctgggcgaagtatttaagacctacaacgtcgcggtggattatatcaccgtggccctgcttatttggaacttcggcgtggtaggaatgatctcaatacattggaagggcccgctgagactgcagcaagcctatcttattatgattagcgcactgatggcgttagtttttattaaatacctgcccgagtggaccgcctggttgatccttgctgtaatcagcgtttatgacctggtggcggttctgtgtcccaaagggcccctccgaatgttggtcgagaccgcccaggagaggaacgagacactctttcctgcgctcatctactcaagtacgatggtctggcttgtcaatatggccgagggagaccccgaggctcagaggcgcgtgagtaagaatagcaaatataacgcagagtcaaccgagcgagagtcccaagacactgtcgcagagaacgatgacggcggcttttcggaagaatgggaggcgcaaagagactctcatctgggaccccatagatcaacacccgagtcacgcgccgcagtccaagagctcagctcaagcatcctggctggagaggaccctgaggagcgtggggtcaagctgggcctgggagacttcatcttctacagcgtgttggtggggaaggcttcggccaccgctagcggagactggaatacaactattgcgtgctttgttgcaatcctcatcgggctctgtctgaccttgcttttactcgcaatatttaaaaaggcccttcctgccctgcccatcagcatcacttttggcttggtgttctactttgctacggactacctggttcaacccttcatggaccagttagcctttcaccagttttacatctag

SEQ ID NO: 332256 - DNA, 279 bp, Artificial Sequence
  derived and/or modified sequence
atgaccgagctgcccgcccccctgagctacttccagaacgcccagatgtccgaggataatcatctgagcaacactaacgataatagggaacgccaagaacataatgatcgacgtagcctcgggcaccccgagccgctcagcaacggacggccacagggcaattcaagacaggtagttgagcaggacgaagaagaagatgaagaactgacattgaaatatggcgctaagcacgtcatcatgctatttgtccctgtgactctctgcatggttgtggtgtag

SEQ ID NO: 332257 - DNA, 444 bp, Artificial Sequence
  derived and/or modified sequence
atgaccgagctgcccgcccccctgagctacttccagaacgcccagatgtctgaagacaaccacctatccaatacaaatgacaacagagagaggcaggagcacaacgacaggcgcagcctgggccacccagagcccctttctaacgggaggccacagggcaattctagacaggtcgtcgagcaggacgaggaggaagatgaagaattaactctcaaatatggcgccaaacacgtgataatgctgttcgtaccagtgaccttatgcatggtggtggtggtcgcaaccatcaagtccgtctctttttatacgcgcaaggacggtcagttgatttatacacccttcacggaggacacggagaccgtcgggcagcgtgccctgcacagtattctaaacgctgcaataatgataagcgtgatcgtcgtgatgactattcttttggtctag

SEQ ID NO: 332258 - DNA, 177 bp, Artificial Sequence
  derived and/or modified sequence
atgaccgagctgcccgcccccctgagctacttccagaacgcccagatgtccgaagataaccacctgtcgaacacaaacgataacagggagcgccaggaacacaacgaccggaggtctctcggccacccagaaccattgagcaatggacggccacagggtaacagtcgacaagtttag

SEQ ID NO: 332259 - DNA, 279 bp, Artificial Sequence
  derived and/or modified sequence
atgaccgagctgcccgcccccctgagctacttccagaacgcccagatgagtgaggacaaccacctctcaaacaccaatgacaaccgggaacggcaggagcacaatgaccggagatcccttgggcaccccgagccactgtctaatgggagaccccagggtaatagtcgccaggttgttgagcaagacgaagaggaggatgaagagctgacattgaaatatggcgcaaagcacgtcatcatgctgtttgttccagtaacattatgcatggtggtggtgtag

SEQ ID NO: 332260 - DNA, 192 bp, Artificial Sequence
  derived and/or modified sequence
atgaccgagctgcccgcccccctgagctacttccagaacgcccagatgtcagaagacaaccatctgtctaatacaaacgataaccgggagcgacaggagcacaatgacaggcgcagcctaggacatcccgaacccctgagtaacggtcggccacaaggcaatagcagacaggtcgtggagcaggacgaatag

SEQ ID NO: 332261 - DNA, 276 bp, Artificial Sequence
  derived and/or modified sequence
atgaccgagctgcccgcccccctgagctacttccagaacgcccagatgagtgaagataatcatctgtcaaacacgaacgacaatcgggagcgccaggagcacaatgacagaaggagcttggggcaccctgagccattatcaaatggcagaccgcaagggaactctaggcaagttgtggagcaggatgaagaggaggacgaagaactaaccctgaagtatggtgcaaagcacgttattatgcttttcgtcccagttacgctctgcatggtcgtgtag

SEQ ID NO: 332262 - DNA, 189 bp, Artificial Sequence
  derived and/or modified sequence
atgaccgagctgcccgcccccctgagctacttccagaacgcccagatgagcgaggacaatcatttgtccaacaccaacgataatagagagaggcaggagcacaacgacagacgcagtttaggccatccggagccactctcaaatggacgtcctcagggcaacagtcgccaagtggtggaacaggactag

SEQ ID NO: 332263 - DNA, 408 bp, Artificial Sequence
  derived and/or modified sequence
atgaccgagctgcccgcccccctgagctacttccagaacgcccagatgagcgaagacaatcacctaagtaacaccaacgacaatagggaacgtcaggagcataatgacagacgatcccttggccacccagagccattgagcaacgggcggccccagggcaattcaagacaggtcgtggaacaggatgaagaggaagacgaggagttaactctgaagtacggagcgaagcatgtcatcatgcttttcgtacctgtcactctgtgtatggtggttgtggtagctacaatcaaaagtgtgtctttctatactcggaaggacggccaacttatctacacaccatttaccgaggacacagagacagtgggccagcgcgctctccattctattttgaatgccgcaatcatgtag

SEQ ID NO: 332264 - DNA, 330 bp, Artificial Sequence
  derived and/or modified sequence
atgaccgagctgcccgcccccctgagctacttccagaacgcccagatgagtgaagacaaccacttgagcaacaccaacgacaaccgtgagaggcaggaacataatgatagacgatctttgggccatcctgagcctctctccaacggacggccacaggggaattcccgacaggtggtggagcaggacgaggaggaagacgaggagctgaccctgaaatacggggccaaacacgttataatgctatttgtcccagtgacgctgtgcatggttgttgttgtggcaaccataaaatctgtttcattttacacacgcaaagacggccaattatag

SEQ ID NO: 332265 - DNA, 2776 bp, Artificial Sequence
  derived and/or modified sequence
cggtgagggttctcgggcggggcctgggacaggcagctccggggtccgcggtttcacatcggaaacaaaacagcggctggtctggaaggaacctgagctacgagccgcggcggcagcggggcggcggggaagcgtatacctaatctgggagcctgcaagtgacaacagcctttgcggtccttagacagcttggcctggaggagaacacatgaaagaaagaacctcaagaggctttgttttctgtgaaacagtatttctatacagttgctccaatgacagagttacctgcaccgttgtcctacttccagaatgcacagatgtctgaggacaaccacctgagcaatactaatgacaatagagaacggcaggagcacaacgacagacggagccttggccaccctgagccattatctaatggacgaccccagggtaactcccggcaggtggtggagcaagatgaggaagaagatgaggagctgacattgaaatatggcgccaagcatgtgatcatgctctttgtccctgtgactctctgcatggtggtggtcgtggctaccattaagtcagtcagcttttatacccggaaggatgggcagctaatctataccccattcacagaagataccgagactgtgggccagagagccctgcactcaattctgaatgctgccatcatgatcagtgtcattgttgtcatgactatcctcctggtggttctgtataaatacaggtgctataaggtcatccatgcctggcttattatatcatctctattgttgctgttctttttttcattcatttacttgggggaagtgtttaaaacctataacgttgctgtggactacattactgttgcactcctgatctggaattttggtgtggtgggaatgatttccattcactggaaaggtccacttcgactccagcaggcatatctcattatgattagtgccctcatggccctggtgtttatcaagtacctccctgaatggactgcgtggctcatcttggctgtgatttcagtatatgatttagtggctgttttgtgtccgaaaggtccacttcgtatgctggttgaaacagctcaggagagaaatgaaacgctttttccagctctcatttactcctcaacaatggtgtggttggtgaatatggcagaaggagacccggaagctcaaaggagagtatccaaaaattccaagtataatgcagaaagcacagaaagggagtcacaagacactgttgcagagaatgatgatggcgggttcagtgaggaatgggaagcccagagggacagtcatctagggcctcatcgctctacacctgagtcacgagctgctgtccaggaactttccagcagtatcctcgctggtgaagacccagaggaaaggggagtaaaacttggattgggagatttcattttctacagtgttctggttggtaaagcctcagcaacagccagtggagactggaacacaaccatagcctgtttcgtagccatattaattggtttgtgccttacattattactccttgccattttcaagaaagcattgccagctcttccaatctccatcacctttgggcttgttttctactttgccacagattatcttgtacagccttttatggaccaattagcattccatcaattttatatctagcatatttgcggttagaatcccatggatgtttcttctttgactataacaaaatctggggaggacaaaggtgattttcctgtgtccacatctaacaaagtcaagattcccggctggacttttgcagcttccttccaagtcttcctgaccaccttgcactattggactttggaaggaggtgcctatagaaaacgattttgaacatacttcatcgcagtggactgtgtccctcggtgcagaaactaccagatttgagggacgaggtcaaggagatatgataggcccggaagttgctgtgccccatcagcagcttgacgcgtggtcacaggacgatttcactgacactgcgaactctcaggactaccgttaccaagaggttaggtgaagtggtttaaaccaaacggaactcttcatcttaaactacacgttgaaaatcaacccaataattctgtattaactgaattctgaacttttcaggaggtactgtgaggaagagcaggcaccagcagcagaatggggaatggagaggtgggcaggggttccagcttccctttgattttttgctgcagactcatcctttttaaatgagacttgttttcccctctctttgagtcaagtcaaatatgtagattgcctttggcaattcttcttctcaagcactgacactcattaccgtctgtgattgccatttcttcccaaggccagtctgaacctgaggttgctttatcctaaaagttttaacctcaggttccaaattcagtaaattttggaaacagtacagctatttctcatcaattctctatcatgttgaagtcaaatttggattttccaccaaattctgaatttgtagacatacttgtacgctcacttgccccagatgcctcctctgtcctcattcttctctcccacacaagcagtctttttctacagccagtaaggcagctctgtcgtggtagcagatggtcccattattctagggtcttactctttgtatgatgaaaagaatgtgttatgaatcggtgctgtcagccctgctgtcagaccttcttccacagcaaatgagatgtatgcccaaagacggtagaattaaagaagagtaaaatggctgttgaagc

SEQ ID NO: 332266 - DNA, 3046 bp, Artificial Sequence
  derived and/or modified sequence
ggaaatgctgtttgctcgaagacgtctcagggcgcaggtgccttgggccgggattagtagccgtctgaactggagtggagtaggagaaagaggaagcgtcttgggctgggtctgcttgagcaactggtgaaactccgcgcctcacgccccgggtgtgtccttgtccaggggcgacgagcattctgggcgaagtccgcacgcctcttgttcgaggcggaagacggggtctgatgctttctccttggtcgggactgtctcgaggcatgcatgtccagtgactcttgtgtttgctgctgcttccctctcagattcttctcaccgttgtggtcagctctgctttaggcatattaatccatagtggaggctgggatgggtgagagaattgaggtgacttttccataattcagacctaatctgggagcctgcaagtgacaacagcctttgcggtccttagacagcttggcctggaggagaacacatgaaagaaagaacctcaagaggctttgttttctgtgaaacagtatttctatacagttgctccaatgacagagttacctgcaccgttgtcctacttccagaatgcacagatgtctgaggacaaccacctgagcaatactaatgacaatagagaacggcaggagcacaacgacagacggagccttggccaccctgagccattatctaatggacgaccccagggtaactcccggcaggtggtggagcaagatgaggaagaagatgaggagctgacattgaaatatggcgccaagcatgtgatcatgctctttgtccctgtgactctctgcatggtggtggtcgtggctaccattaagtcagtcagcttttatacccggaaggatgggcagctaatctataccccattcacagaagataccgagactgtgggccagagagccctgcactcaattctgaatgctgccatcatgatcagtgtcattgttgtcatgactatcctcctggtggttctgtataaatacaggtgctataaggtcatccatgcctggcttattatatcatctctattgttgctgttctttttttcattcatttacttgggggaagtgtttaaaacctataacgttgctgtggactacattactgttgcactcctgatctggaattttggtgtggtgggaatgatttccattcactggaaaggtccacttcgactccagcaggcatatctcattatgattagtgccctcatggccctggtgtttatcaagtacctccctgaatggactgcgtggctcatcttggctgtgatttcagtatatgatttagtggctgttttgtgtccgaaaggtccacttcgtatgctggttgaaacagctcaggagagaaatgaaacgctttttccagctctcatttactcctcaacaatggtgtggttggtgaatatggcagaaggagacccggaagctcaaaggagagtatccaaaaattccaagtataatgcagaaagcacagaaagggagtcacaagacactgttgcagagaatgatgatggcgggttcagtgaggaatgggaagcccagagggacagtcatctagggcctcatcgctctacacctgagtcacgagctgctgtccaggaactttccagcagtatcctcgctggtgaagacccagaggaaaggggagtaaaacttggattgggagatttcattttctacagtgttctggttggtaaagcctcagcaacagccagtggagactggaacacaaccatagcctgtttcgtagccatattaattggtttgtgccttacattattactccttgccattttcaagaaagcattgccagctcttccaatctccatcacctttgggcttgttttctactttgccacagattatcttgtacagccttttatggaccaattagcattccatcaattttatatctagcatatttgcggttagaatcccatggatgtttcttctttgactataacaaaatctggggaggacaaaggtgattttcctgtgtccacatctaacaaagtcaagattcccggctggacttttgcagcttccttccaagtcttcctgaccaccttgcactattggactttggaaggaggtgcctatagaaaacgattttgaacatacttcatcgcagtggactgtgtccctcggtgcagaaactaccagatttgagggacgaggtcaaggagatatgataggcccggaagttgctgtgccccatcagcagcttgacgcgtggtcacaggacgatttcactgacactgcgaactctcaggactaccgttaccaagaggttaggtgaagtggtttaaaccaaacggaactcttcatcttaaactacacgttgaaaatcaacccaataattctgtattaactgaattctgaacttttcaggaggtactgtgaggaagagcaggcaccagcagcagaatggggaatggagaggtgggcaggggttccagcttccctttgattttttgctgcagactcatcctttttaaatgagacttgttttcccctctctttgagtcaagtcaaatatgtagattgcctttggcaattcttcttctcaagcactgacactcattaccgtctgtgattgccatttcttcccaaggccagtctgaacctgaggttgctttatcctaaaagttttaacctcaggttccaaattcagtaaattttggaaacagtacagctatttctcatcaattctctatcatgttgaagtcaaatttggattttccaccaaattctgaatttgtagacatacttgtacgctcacttgccccagatgcctcctctgtcctcattcttctctcccacacaagcagtctttttctacagccagtaaggcagctctgtcgtggtagcagatggtcccattattctagggtcttactctttgtatgatgaaaagaatgtgttatgaatcggtgctgtcagccctgctgtcagaccttcttccacagcaaatgagatgtatgcccaaagacggtagaattaaagaagagtaaaatggctgttgaagc

SEQ ID NO: 332267 - DNA, 591 bp, Artificial Sequence
  derived and/or modified sequence
aacggtgagggttctcgggcggggcctgggacaggcagctccggggtccgcggtttcacatcggaaacaaaacagcggctggtctggaaggaacctgagctacgagccgcggcggcagcggggcggcggggaagcgtatgatttaactaacaatggatgacctggtgaaatcctatttcagacctaatctgggagcctgcaagtgacaacagcctttgcggtccttagacagcttggcctggaggagaacacatgaaagaaagaacctcaagaggctttgttttctgtgaaacagtatttctatacagttgctccaatgacagagttacctgcaccgttgtcctacttccagaatgcacagatgtctgaggacaaccacctgagcaatactaatgacaatagagaacggcaggagcacaacgacagacggagccttggccaccctgagccattatctaatggacgaccccagggtaactcccggcaggtggtggagcaagatgaggaagaagatgaggagctgacattgaaatatggcgccaagcatgtgatcatgctctttgtccctgtgactctctgcatggtggtggt

SEQ ID NO: 332268 - DNA, 712 bp, Artificial Sequence
  derived and/or modified sequence
caacggtgagggttctcgggcggggcctgggacaggcagctccggggtccgcggtttcacatcggaaacaaaacagcggctggtctggaaggaacctgagctacgagccgcggcggcagcggggcggcggggaagcacctaatctgggagcctgcaagtgacaacagcctttgcggtccttagacagcttggcctggaggagaacacatgaaagaaagaacctcaagaggctttgttttctgtgaaacagtatttctatacagttgctccaatgacagagttacctgcaccgttgtcctacttccagaatgcacagatgtctgaggacaaccacctgagcaatactaatgacaatagagaacggcaggagcacaacgacagacggagccttggccaccctgagccattatctaatggacgaccccagggtaactcccggcaggtggtggagcaagatgaggaagaagatgaggagctgacattgaaatatggcgccaagcatgtgatcatgctctttgtccctgtgactctctgcatggtggtggtcgtggctaccattaagtcagtcagcttttatacccggaaggatgggcagctaatctataccccattcacagaagataccgagactgtgggccagagagccctgcactcaattctgaatgctgccatcatgatcagtgtcattgttgtcatgactatcctcctggtg

SEQ ID NO: 332269 - DNA, 612 bp, Artificial Sequence
  derived and/or modified sequence
tgaatttggtcagcatagaaaaaggaatgttgagaacattccttaagattactcagctccctttgctggaaatcagaagtcattaagtatctttgtggttgaaaatgtttggtgtctcaggcggttctacttattgctaaagaggtctaccttgagcttatagtaaatttgtcagttagttgaaagtcgtgacaaattaatacattcctggtttacaaattggtcttataagtatttgattggtttaaatgaatttactaggatttaactaacaatggatgacctggtgaaatcctatttcagacctaatctgggagcctgcaagtgacaacagcctttgcggtccttagacagcttggcctggaggagaacacatgaaagaaagaacctcaagaggctttgttttctgtgaaacagtatttctatacagttgctccaatgacagagttacctgcaccgttgtcctacttccagaatgcacagatgtctgaggacaaccacctgagcaatactaatgacaatagagaacggcaggagcacaacgacagacggagccttggccaccctgagccattatctaatggacgaccccagggtaactcccggcaggtg

SEQ ID NO: 332270 - DNA, 550 bp, Artificial Sequence
  derived and/or modified sequence
aaatgacgacaacggtgagggttctcgggcggggcctgggacaggcagctccggggtccgcggtttcacatcggaaacaaaacagcggctggtctggaaggaacctgagctacgagccgcggcggcagcggggcggcggggaagcgtatacctaatctgggagcctgcaagtgacaacagcctttgcggtccttagacagcttggcctggaggagaacacatgaaagaaaggctttgttttctgtgaaacagtatttctatacagttgctccaatgacagagttacctgcaccgttgtcctacttccagaatgcacagatgtctgaggacaaccacctgagcaatactaatgacaatagagaacggcaggagcacaacgacagacggagccttggccaccctgagccattatctaatggacgaccccagggtaactcccggcaggtggtggagcaagatgaggaagaagatgaggagctgacattgaaatatggcgccaagcatgtgatcatgctctttgtccctgtgactctctgcatggtggtggtcg

SEQ ID NO: 332271 - DNA, 574 bp, Artificial Sequence
  derived and/or modified sequence
aaatgacgacaacggtgagggttctcgggcggggcctgggacaggcagctccggggtccgcggtttcacatcggaaacaaaacagcggctggtctggaaggaacctgagctacgagccgcggcggcagcggggcggcggggaagcgtatattcttctcaccgttgtggtcagctctgctttaggcatattaatccatagtggaggctgggatgggtgagagaattgaggtgacttttccataattcagacctaatctgggagcctgcaagtgacaacagcctttgcggtccttagacagcttggcctggaggagaacacatgaaagaaagaacctcaagaggctttgttttctgtgaaacagtatttctatacagttgctccaatgacagagttacctgcaccgttgtcctacttccagaatgcacagatgtctgaggacaaccacctgagcaatactaatgacaatagagaacggcaggagcacaacgacagacggagccttggccaccctgagccattatctaatggacgaccccagggtaactcccggcaggtggtggagcaagatgagga

SEQ ID NO: 332272 - DNA, 552 bp, Artificial Sequence
  derived and/or modified sequence
aatgacgacaacggtgagggttctcgggcggggcctgggacaggcagctccggggtccgcggtttcacatcggaaacaaaacagcggctggtctggaaggaacctgagctacgagccgcggcggcagcggggcggcggggaagcacctaatctgggagcctgcaagtgacaacagcctttgcggtccttagacagcttggcctggaggagaacacatgaaagaaagaacctcaagaggctttgttttctgtgaaacagtatttctatacagttgctccaatgacagagttacctgcaccgttgtcctacttccagaatgcacagatgtctgaggacaaccacctgagcaatactaatgacaatagagaacggcaggagcacaacgacagacggagccttggccaccctgagccattatctaatggacgaccccagggtaactcccggcaggtggtggagcaagatgaggaagaagatgaggagctgacattgaaatatggcgccaagcatgtgatcatgctctttgtccctgtgactctctgcatggtggtg

SEQ ID NO: 332273 - DNA, 555 bp, Artificial Sequence
  derived and/or modified sequence
gagctacgagccgcggcggcagcggggcggcggggaagcgtatattcttctcaccgttgtggtcagctctgctttaggcatattaatccatagtggaggctgggatgggtgagagaattgaggtgacttttccataattcaggcatacaaatttattagcatgcagactgggagaaccacaagcctgggtgacagagcaagactgtgtctcaaaataaagacaggaacaaagacctaatctgggagcctgcaagtgacaacagcctttgcggtccttagacagcttggcctggaggagaacacatgaaagaaagaacctcaagaggctttgttttctgtgaaacagtatttctatacagttgctccaatgacagagttacctgcaccgttgtcctacttccagaatgcacagatgtctgaggacaaccacctgagcaatactaatgacaatagagaacggcaggagcacaacgacagacggagccttggccaccctgagccattatctaatggacgaccccagggtaactcccggcaggtggtggagcaagatga

SEQ ID NO: 332274 - DNA, 571 bp, Artificial Sequence
  derived and/or modified sequence
aacgacgccagagccggaaatgacgacaacgacctaatctgggagcctgcaagtgacaacagcctttgcggtccttagacagcttggcctggaggagaacacatgaaagaaagaacctcaagaggctttgttttctgtgaaacagtatttctatacagttgctccaatgacagagttacctgcaccgttgtcctacttccagaatgcacagatgtctgaggacaaccacctgagcaatactaatgacaatagagaacggcaggagcacaacgacagacggagccttggccaccctgagccattatctaatggacgaccccagggtaactcccggcaggtggtggagcaagatgaggaagaagatgaggagctgacattgaaatatggcgccaagcatgtgatcatgctctttgtccctgtgactctctgcatggtggtggtcgtggctaccattaagtcagtcagcttttatacccggaaggatgggcagctaatctataccccattcacagaagataccgagactgtgggccagagagccctgcactcaattctgaatgctgccatcatg

SEQ ID NO: 332275 - DNA, 696 bp, Artificial Sequence
  derived and/or modified sequence
gagggttctcgggcggggcctgggacaggcagctccggggtccgcggtttcacatcggaaacaaaacagcggctggtctggaaggaacctgagctacgagccgcggcggcagcggggcggcggggaagcgtatgtgcgtgatggggagtccgggcaagccaggaaggcaccgcggacatgggcggccgcgggcagggcccggccctttgtggccgcccgggccgcgaagccgacctaatctgggagcctgcaagtgacaacagcctttgcggtccttagacagcttggcctggaggagaacacatgaaagaaagaacctcaagaggctttgttttctgtgaaacagtatttctatacagttgctccaatgacagagttacctgcaccgttgtcctacttccagaatgcacagatgtctgaggacaaccacctgagcaatactaatgacaatagagaacggcaggagcacaacgacagacggagccttggccaccctgagccattatctaatggacgaccccagggtaactcccggcaggtggtggagcaagatgaggaagaagatgaggagctgacattgaaatatggcgccaagcatgtgatcatgctctttgtccctgtgactctctgcatggtggtggtcgtggctaccattaagtcagtcagcttttatacccggaaggatgggcagctgta

SEQ ID NO: 332276 - DNA, 1392 bp, Artificial Sequence
  derived and/or modified sequence
atgaccgaactacctgcgcctctctcatacttccagaatgcccagatgagcgaagacaatcatctaagcaacacgaacgataaccgcgagcgtcaagagcataacgatcggaggtcactgggacacccagaacccttaagtaatggcaggccacaaggcaacagtagacaagtggtagagcaggatgaggaagaagacgaagagctgacgctcaaatacggcgcaaaacacgtcattatgttgtttgtgccagtgacactttgtatggtcgttgtggtcgccacaatcaagtccgtgtccttctacacccggaaagatggccagctgatctacacaccctttacagaggacactgagactgttggccagcgggcactacattcaatcctcaacgcagccattatgatctctgtaatcgttgtaatgacaatcctgcttgtggtgctgtacaaatacaggtgttacaaggtaatccatgcatggttgatcatctctagccttctcttgctgttcttcttctccttcatttaccttggcgaggtgtttaaaacgtataatgtagccgtcgactacatcacagtcgcactattaatctggaattttggcgtcgttggcatgatatccatccactggaagggtcccctccgtctgcagcaggcgtacctcatcatgatctccgcactgatggcgctcgtttttatcaagtatttgcccgaatggaccgcctggctcatcctggctgtgatcagtgtgtatgatttggtggctgtcctgtgtcctaaagggcctctgagaatgctggtggaaacagcccaggaaagaaatgaaaccctgttccctgccctcatttactcgtccactatggtatggctcgtcaatatggccgagggcgatcccgaggcccaacgaagggtcagcaagaactctaagtataacgccgagtcgacggagagggagtcccaggatactgtggccgaaaacgacgatggaggtttctcagaagaatgggaagcacaacgagacagccatcttggaccacatcgctccacaccggaatctcgtgcagcagtgcaggagctgagtagctcaatcctcgcaggggaagacccagaagaaagaggcgtgaagcttggattgggagactttatcttctactctgtcttagttggcaaagcgtctgcgacagccagcggagactggaacactacaatcgcatgtttcgtcgccattttaattggactatgtttgaccctactactcctcgccatcttcaagaaggccttacccgcacttcctatttccattaccttcgggctggtgttttactttgctaccgattatcttgtgcagccctttatggatcagcttgcattccaccagttctacatatag

SEQ ID NO: 332277 - DNA, 1392 bp, Artificial Sequence
  derived and/or modified sequence
atgacagagctgcctgcccctttgtcgtatttccagaacgcccagatgtcagaggacaatcacttgtccaacacaaatgataacagagaacggcaggaacataatgacagacggtccctggggcatcccgaacccctatcaaatgggaggccacaagggaattctaggcaggtggttgagcaagacgaagaggaggacgaggaattgactctgaagtacggagccaaacacgttattatgctcttcgtgcctgtaacattgtgtatggtggtcgtcgtggcaacaatcaaatctgtgagcttttacacaaggaaggatggccagctcatttacaccccatttacagaagataccgaaacagtgggccagcgagctctgcacagtatattgaacgccgctatcatgatttctgtgattgtagtaatgacaatcctgttagtcgttctgtataagtaccggtgttacaaagtgatccacgcttggttgatcatctctagtctgctgctgctgttcttcttcagtttcatctacctgggggaagttttcaaaacgtacaatgtggcagtggattatattaccgtcgctctgctcatctggaactttggcgtggttggcatgatctccatccattggaaaggtcccctgagactgcagcaggcctacctgataatgatctctgcgttaatggctctggtgtttattaagtaccttcccgagtggacagcgtggctgattctagccgttatatccgtgtacgatctcgttgctgtcttatgccccaaaggtcccctgcgtatgctggtggagacagcccaggaacggaatgagaccctattcccagctctgatttactcaagcacaatggtgtggcttgtgaatatggccgagggcgatcccgaagcccagcggcgagtgtccaagaactctaaatacaatgctgagtctaccgaacgagaaagccaagacaccgtcgcagagaacgatgacggcggattttcagaggagtgggaagcccagcgagactctcacttaggtccacaccgttccacccctgagagtagagcggctgtacaggaattgtcgtcgagcatcctagctggggaagatcccgaagagcggggtgtcaaattgggcctgggcgacttcatcttttattctgttttagtgggcaaggcgtcagctaccgcatccggcgactggaatacaacgatcgcatgtttcgtggccattctgattggcttgtgtttgacactcctcctgctcgccattttcaagaaggcccttcccgcactgccaatcagtattacgtttggtctggtgttctactttgccacagactaccttgttcagccttttatggaccaacttgcctttcatcagttctatatttag

SEQ ID NO: 332278 - DNA, 279 bp, Artificial Sequence
  derived and/or modified sequence
atgaccgaactgcccgcacccctctcatactttcaaaacgcccaaatgtcagaagataaccacctgagtaacactaacgacaaccgggagcgtcaggagcacaacgaccgaaggagcctgggacatcccgagccattgtctaacggacgccctcagggtaattcccgccaggttgtggaacaggatgaagaggaagatgaggaactgacgttaaagtatggggctaaacacgtgatcatgttgtttgttccagtgactttgtgcatggtcgtcgtctag

SEQ ID NO: 332279 - DNA, 444 bp, Artificial Sequence
  derived and/or modified sequence
atgaccgaactccctgccccattgtcctattttcagaatgcccagatgagtgaggacaatcatctgagcaacaccaatgataatcgagagagacaggaacacaacgaccggcgttccctggggcatccagagcccctatccaacgggagacctcaggggaacagtagacaagtggtggagcaggacgaagaagaggatgaggagctgacattgaaatacggcgcaaaacatgtaattatgctgtttgttcccgttacattgtgcatggtcgtcgtggtggctaccatcaagtcagtgagcttctatacgagaaaggacgggcagctgatctacacacccttcaccgaggatacggagacagtgggccagcgcgctctccactcaattctcaacgcagcaattatgatttcggtgattgtcgtgatgaccattctgctggtgtag

SEQ ID NO: 332280 - DNA, 177 bp, Artificial Sequence
  derived and/or modified sequence
atgactgagcttcctgccccactgagttactttcaaaacgcgcagatgtctgaggacaaccacctctcaaatactaacgacaacagagaacggcaagagcacaacgatcgtcgatcattaggccatccagagcccctttctaatggaaggcctcagggaaatagtcgacaggtgtag

SEQ ID NO: 332281 - DNA, 279 bp, Artificial Sequence
  derived and/or modified sequence
atgacagaactgcctgcgcctttgtcatatttccaaaacgctcagatgtcagaagataatcatctctctaatacaaacgataatcgggagagacaggaacacaatgaccgccgttctcttggccatccagagcctctaagcaatggtaggccgcaaggtaattctcgccaagttgttgagcaggacgaggaagaggacgaagaactcaccctcaagtacggagctaagcatgttattatgttgtttgtacccgtgaccttgtgtatggtggttgtgtag

SEQ ID NO: 332282 - DNA, 192 bp, Artificial Sequence
  derived and/or modified sequence
atgacggaactcccagctcccctgtcctatttccagaatgctcagatgagcgaggacaatcatctcagcaataccaacgacaatcgcgagcggcaggagcataatgatcggaggagcttaggacatcccgaaccgctgtcaaacggccgacctcagggcaatagcaggcaggtcgttgagcaggacgaatag

SEQ ID NO: 332283 - DNA, 276 bp, Artificial Sequence
  derived and/or modified sequence
atgaccgaactgccggcacccctctcgtattttcagaacgcccagatgtccgaggacaatcacctttccaacactaatgacaaccgggagcggcaagagcacaacgaccggaggagcctcggacatcctgagcctctgtcaaatggcagaccacaaggaaactctaggcaggtagtcgagcaagacgaggaggaggatgaggagctcacattaaagtatggggctaagcatgtgatcatgctgttcgtgcctgtgaccctatgtatggtggtgtag

SEQ ID NO: 332284 - DNA, 189 bp, Artificial Sequence
  derived and/or modified sequence
atgacagaactccccgctccactgtcttatttccagaacgctcagatgtccgaagataatcacctttcaaacactaacgacaatcgagaaagacaagagcacaacgatcggcgatcactcggacacccggaaccgctttctaacggccgacctcaaggtaattcaaggcaggtggttgagcaggactag

SEQ ID NO: 332285 - DNA, 408 bp, Artificial Sequence
  derived and/or modified sequence
atgacggagctaccggctcccctgagctacttccaaaacgcccaaatgagcgaagataaccatctcagcaataccaatgacaaccgggagcgacaggagcacaatgaccgccgttccctggggcatcctgagcccctgagcaatggcagacctcaaggcaactcacgccaagtcgttgaacaggatgaagaggaggatgaagaacttactctgaagtacggagccaagcacgtgataatgttgttcgtacctgtaaccctgtgcatggtggtcgttgttgccacgattaaatcagtgagcttctacactaggaaggacggccagctgatttacaccccttttactgaggataccgaaacggtggggcaaagggccttgcatagcatcctgaatgctgctatcatgtag

SEQ ID NO: 332286 - DNA, 330 bp, Artificial Sequence
  derived and/or modified sequence
atgactgaactgcccgctcctctgagctatttccagaatgcacagatgagcgaggataaccacctgtccaacaccaacgataaccgagagagacaggagcataatgatcgcaggtcactgggtcaccctgaacccctgagcaatggcagaccgcagggtaattctaggcaagtggtggagcaggatgaggaggaagatgaggaactgacccttaagtatggtgcaaagcatgtaatcatgctattcgtgcccgtgacattgtgcatggtggttgtggtggccaccatcaagagtgtgtctttctataccaggaaggacgggcagctgtag

SEQ ID NO: 332287 - DNA, 1392 bp, Artificial Sequence
  derived and/or modified sequence
atgaccgagctgcccgcccccctgagctacttccagaacgcccagatgagcgaggacaaccacctgagcaacaccaacgacaacagagagagacaggagcacaacgacagaagaagcctgggccaccccgagcccctgagcaacggcagaccccagggcaacagcagacaggtggtggagcaggacgaggaggaggacgaggagctgaccctgaagtacggcgccaagcacgtgatcatgctgttcgtgcccgtgaccctgtgcatggtggtggtggtggccaccatcaagagcgtgagcttctacaccagaaaggacggccagctgatctacacccccttcaccgaggacaccgagaccgtgggccagagagccctgcacagcatcctgaacgccgccatcatgatcagcgtgatcgtggtgatgaccatcctgctggtggtgctgtacaagtacagatgctacaaggtgatccacgcctggctgatcatcagcagcctgctgctgctgttcttcttcagcttcatctacctgggcgaggtgttcaagacctacaacgtggccgtggactacatcaccgtggccctgctgatctggaacttcggcgtggtgggcatgatcagcatccactggaagggccccctgagactgcagcaggcctacctgatcatgatcagcgccctgatggccctggtgttcatcaagtacctgcccgagtggaccgcctggctgatcctggccgtgatcagcgtgtacgacctggtggccgtgctgtgccccaagggccccctgagaatgctggtggagaccgcccaggagagaaacgagaccctgttccccgccctgatctacagcagcaccatggtgtggctggtgaacatggccgagggcgaccccgaggcccagagaagagtgagcaagaacagcaagtacaacgccgagagcaccgagagagagagccaggacaccgtggccgagaacgacgacggcggcttcagcgaggagtgggaggcccagagagacagccacctgggcccccacagaagcacccccgagagcagagccgccgtgcaggagctgagcagcagcatcctggccggcgaggaccccgaggagagaggcgtgaagctgggcctgggcgacttcatcttctacagcgtgctggtgggcaaggccagcgccaccgccagcggcgactggaacaccaccatcgcctgcttcgtggccatcctgatcggcctgtgcctgaccctgctgctgctggccatcttcaagaaggccctgcccgccctgcccatcagcatcaccttcggcctggtgttctacttcgccaccgactacctggtgcagcccttcatggaccagctggccttccaccagttctacatctag

SEQ ID NO: 332288 - DNA, 279 bp, Artificial Sequence
  derived and/or modified sequence
atgaccgagctgcccgcccccctgagctacttccagaacgcccagatgagcgaggacaaccacctgagcaacaccaacgacaacagagagagacaggagcacaacgacagaagaagcctgggccaccccgagcccctgagcaacggcagaccccagggcaacagcagacaggtggtggagcaggacgaggaggaggacgaggagctgaccctgaagtacggcgccaagcacgtgatcatgctgttcgtgcccgtgaccctgtgcatggtggtggtgtag

SEQ ID NO: 332289 - DNA, 444 bp, Artificial Sequence
  derived and/or modified sequence
atgaccgagctgcccgcccccctgagctacttccagaacgcccagatgagcgaggacaaccacctgagcaacaccaacgacaacagagagagacaggagcacaacgacagaagaagcctgggccaccccgagcccctgagcaacggcagaccccagggcaacagcagacaggtggtggagcaggacgaggaggaggacgaggagctgaccctgaagtacggcgccaagcacgtgatcatgctgttcgtgcccgtgaccctgtgcatggtggtggtggtggccaccatcaagagcgtgagcttctacaccagaaaggacggccagctgatctacacccccttcaccgaggacaccgagaccgtgggccagagagccctgcacagcatcctgaacgccgccatcatgatcagcgtgatcgtggtgatgaccatcctgctggtgtag

SEQ ID NO: 332290 - DNA, 177 bp, Artificial Sequence
  derived and/or modified sequence
atgaccgagctgcccgcccccctgagctacttccagaacgcccagatgagcgaggacaaccacctgagcaacaccaacgacaacagagagagacaggagcacaacgacagaagaagcctgggccaccccgagcccctgagcaacggcagaccccagggcaacagcagacaggtgtag

SEQ ID NO: 332291 - DNA, 192 bp, Artificial Sequence
  derived and/or modified sequence
atgaccgagctgcccgcccccctgagctacttccagaacgcccagatgagcgaggacaaccacctgagcaacaccaacgacaacagagagagacaggagcacaacgacagaagaagcctgggccaccccgagcccctgagcaacggcagaccccagggcaacagcagacaggtggtggagcaggacgagtag

SEQ ID NO: 332292 - DNA, 276 bp, Artificial Sequence
  derived and/or modified sequence
atgaccgagctgcccgcccccctgagctacttccagaacgcccagatgagcgaggacaaccacctgagcaacaccaacgacaacagagagagacaggagcacaacgacagaagaagcctgggccaccccgagcccctgagcaacggcagaccccagggcaacagcagacaggtggtggagcaggacgaggaggaggacgaggagctgaccctgaagtacggcgccaagcacgtgatcatgctgttcgtgcccgtgaccctgtgcatggtggtgtag

SEQ ID NO: 332293 - DNA, 189 bp, Artificial Sequence
  derived and/or modified sequence
atgaccgagctgcccgcccccctgagctacttccagaacgcccagatgagcgaggacaaccacctgagcaacaccaacgacaacagagagagacaggagcacaacgacagaagaagcctgggccaccccgagcccctgagcaacggcagaccccagggcaacagcagacaggtggtggagcaggactag

SEQ ID NO: 332294 - DNA, 408 bp, Artificial Sequence
  derived and/or modified sequence
atgaccgagctgcccgcccccctgagctacttccagaacgcccagatgagcgaggacaaccacctgagcaacaccaacgacaacagagagagacaggagcacaacgacagaagaagcctgggccaccccgagcccctgagcaacggcagaccccagggcaacagcagacaggtggtggagcaggacgaggaggaggacgaggagctgaccctgaagtacggcgccaagcacgtgatcatgctgttcgtgcccgtgaccctgtgcatggtggtggtggtggccaccatcaagagcgtgagcttctacaccagaaaggacggccagctgatctacacccccttcaccgaggacaccgagaccgtgggccagagagccctgcacagcatcctgaacgccgccatcatgtag

SEQ ID NO: 332295 - DNA, 330 bp, Artificial Sequence
  derived and/or modified sequence
atgaccgagctgcccgcccccctgagctacttccagaacgcccagatgagcgaggacaaccacctgagcaacaccaacgacaacagagagagacaggagcacaacgacagaagaagcctgggccaccccgagcccctgagcaacggcagaccccagggcaacagcagacaggtggtggagcaggacgaggaggaggacgaggagctgaccctgaagtacggcgccaagcacgtgatcatgctgttcgtgcccgtgaccctgtgcatggtggtggtggtggccaccatcaagagcgtgagcttctacaccagaaaggacggccagctgtag

SEQ ID NO: 332296 - protein, 612 aa, Artificial Sequence
  derived and/or modified sequence
MLKLDNKDVISHPLGYPSESLLSIASMLDSSDSSSQPHWSNELIAEQLQQQVSQLQDQLDAELEDKRKVLLELSREKAQNEDLKLEVTNILQKHKQEVELLQNAATISQPPDRQSEPATHPAVLQENTQIEPSEPKNQEEKKLSQVLNELQVSHAETTLELEKTRDMLILQRKINVCYQEELEAMMTKADNDNRDHKEKLERLTRLLDLKNNRIKQLEGILRSHDLPTSGDFNLTDPAEKPNGSIQVQLDWKFPYIPPESFLKPEAQTKGKDTKDSSKISSEEEKASFPSQDQMASPEVPIEAGQYRSKRKPPHGGERKEKEHQVVSYSRRKHGKRIGVQGKNRMEYLSLNILNGNTPEQVNYTEWKFSETNSFIGDGFKNQHEEEEMTLSHSALKQKEPLHPVNDKESSEQGSEVSEAQTTDSDDVIVPPMSQKYPKADSEKMCIEIVSLAFYPEAEVMSDENIKQVYVEYKFYDLPLSETETPVSLRKPRAGEEIHFHFSKVIDLDPQEQQGRRRFLFDMLNGQDPDQGHLKFTVVSDPLDEEKKECEEVGYAYLQLWQILESGRDILEQELDIVSPEDLATPIGRLKVSLQAAAVLHAIYKEMTEDLFS

SEQ ID NO: 332297 - DNA, 1839 bp, Artificial Sequence
  derived and/or modified sequence
atgttaaagctggataacaaagacgtgatcagccatcctctgggatacccttcagagtccttgctatccattgccagtatgctggattctagcgactcatcgtctcaacctcactggtcaaacgagctgatagctgaacagcttcagcagcaagtctctcagctgcaagatcagctggatgccgaactcgaagataagcgcaaagtactactcgaactttctagggaaaaagcccagaatgaggatctcaagctggaagtcaccaacattctgcaaaagcacaagcaagaggtagagctgctgcagaacgctgccactatctctcagcctccagataggcagtctgagcctgcaacccatcctgcagtgttacaggagaatactcagattgagccctcggagccgaagaatcaggaggagaaaaagttgtcgcaggtccttaatgaactgcaggtgtcccacgctgagacgaccttggagttagagaaaacgcgtgacatgctgattctgcagaggaaaatcaacgtgtgttaccaagaggaactagaagctatgatgactaaggcggataacgacaacagggatcataaagagaaactggaacggctgacgcgcctgctggatctgaagaacaatcggatcaaacagttggaaggcattcttcgatcacacgacctgcccacgagcggcgattttaatcttacggatccggccgagaaacctaatggaagtattcaggtccagctggactggaagtttccctatattccaccagagtccttcctgaagcccgaagctcaaacaaaagggaaagacactaaagattctagtaagattagtagtgaagaggagaaagctagttttcctagccaagaccagatggcctctcctgaggtccccatcgaagccggtcagtaccgtagcaagcgaaaacccccccacggaggtgaaaggaaagagaaggaacatcaggttgtcagttattcccggcgaaaacatgggaaacggataggcgtgcaaggcaaaaatcggatggaatatctgtctttgaacatcctgaacgggaacacccctgagcaggtgaattatacggagtggaagttctctgagaccaactcctttataggagatggcttcaaaaatcagcatgaagaagaagaaatgaccctcagtcactctgcccttaaacaaaaagagcctctccaccctgttaacgacaaggagtcctcagagcagggttcagaggtgagcgaagcccagacaactgacagcgatgacgtaatcgtgccacctatgtcccagaaatacccaaaggccgatagtgagaagatgtgtattgagatcgttagtctggcgttttatcctgaggccgaggttatgtcggatgagaacatcaagcaagtgtatgttgagtacaagttctacgacctgccattgagtgagactgaaacacctgtgagcctgcgaaaacctcgcgctggtgaagaaattcattttcacttttcaaaggtgattgacctggatccacaggagcagcagggacggaggaggtttctgtttgacatgctgaacggccaggatcccgatcagggacacctgaagtttactgttgtgtcggatccactggatgaagaaaaaaaggaatgtgaggaggttggctatgcttacctgcagctgtggcagattctggaaagcggcagggacatccttgaacaggagctggacatcgtgtccccagaggatcttgctactcctatcgggaggctcaaggtgtcccttcaggcagccgccgtattacacgccatctataaggaaatgactgaagatctgttttcatag

SEQ ID NO: 332298 - DNA, 1839 bp, Artificial Sequence
  derived and/or modified sequence
atgctgaagctggacaacaaggatgtgatcagccaccccctgggctaccccagcgagagcctgctgagcatcgcctccatgctggacagcagtgacagcagcagccagccccactggagcaatgagctgattgctgagcagctgcagcagcaggtgtcccagctgcaggaccagctggatgctgagctggaggacaagaggaaggtgctgctggagctgagccgggagaaggcccagaatgaagacctgaagctggaggtgaccaacatcctgcagaagcacaagcaggaggtggagctgctgcagaatgctgccaccatcagccagcccccagaccggcagagcgagcccgccacccaccctgctgtgctgcaggagaacacccagatcgagcccagcgagcccaagaaccaggaggagaagaagctgagccaggtgctgaatgagctgcaggtgtcccatgctgagaccaccctggagctggagaagacccgggacatgctgatcctgcagaggaagatcaacgtgtgctaccaggaggagctggaggccatgatgaccaaggctgacaatgacaacagagaccacaaggagaagctggagcggctgacccggctgctggacctgaagaacaaccgcatcaagcagctggagggcatcctgcggagccatgacctgcccaccagcggggacttcaacctgacagatcctgctgagaagcccaacggcagcatccaggtgcagctggactggaagttcccctacatccccccagagagcttcctgaagccagaggcccagaccaagggcaaggacaccaaggacagcagcaagatcagcagcgaggaggagaaggccagcttccccagccaggaccagatggccagccctgaggtgcccattgaagctggccagtaccgcagcaagaggaagccaccccacggcggggagaggaaggagaaggagcaccaggtggtgtcctacagcaggaggaagcacggcaagagaattggagtgcagggcaagaacaggatggagtacctgagcctgaacatcctgaatggaaacaccccagagcaggtgaactacacagagtggaagttcagcgagaccaacagcttcatcggagatggcttcaagaaccagcacgaggaggaggagatgaccctgagccacagcgccctgaagcagaaggagcccctgcaccctgtgaatgacaaggagagcagcgagcagggcagcgaggtgtctgaggcccagaccacagacagtgatgatgtgattgtgccccccatgagccagaagtaccccaaggctgacagcgagaagatgtgcatcgagatcgtgtccctggccttctacccagaggccgaggtgatgtctgatgagaacatcaagcaggtgtatgtggagtacaagttctatgacctgcccctgtctgaaacagagacccctgtgtccctgaggaagcccagggctggggaggagatccacttccacttcagcaaggtgattgacctggacccccaggagcagcagggcagaagacgcttcctgtttgacatgctgaatggccaggaccctgaccagggccacctgaagttcaccgtggtgtctgaccccctggatgaggagaagaaggaatgtgaggaggtgggctacgcctacctgcagctgtggcagatcctggagagcggccgggacatcctggagcaggagctggacatcgtgtccccagaggacctggccacccccatcggccgcctgaaggtgtccctgcaggccgctgctgtgctgcacgccatctacaaggagatgacagaggacctcttctcctag

SEQ ID NO: 332299 - DNA, 1839 bp, Artificial Sequence
  derived and/or modified sequence
atgctgaagctggacaacaaggacgtgatcagccaccccctgggctatccttccgaatcacttctctccatagcttccatgttggattccagtgactcatcgagccagccacactggtctaacgaactgattgcagaacaactccagcaacaggtctctcaattacaagaccagttagatgccgaactggaggataaacgcaaagttctcctggagctaagtagggagaaagcccaaaatgaagatctgaaacttgaggtcactaatatactccagaagcataagcaggaggtggagcttttgcaaaacgccgctacaatctcccaaccccctgacaggcaatctgagccagcgactcacccagcagtattacaggagaatacccaaatcgagcccagcgagcccaaaaaccaggaggagaagaagcttagccaggtccttaatgagctacaggtatcgcatgctgagactacactagaactggaaaaaaccagagacatgctgatcctacagaggaagatcaatgtgtgctatcaggaagagctcgaagccatgatgacaaaggcagacaacgataaccgggatcataaagaaaaattggagcggctcaccaggttgctagatctcaagaataaccgtatcaaacagctcgagggcatcctgcggtcacacgacctgccaacgagtggtgatttcaatctgactgatcccgctgaaaaacctaacggcagcatccaggttcagctcgattggaagttcccgtacattcctcccgagtctttcttgaagcctgaggctcagaccaagggaaaggatacaaaagacagctcaaagattagcagcgaggaggagaaggcttccttcccaagtcaggaccaaatggcatccccggaagttcccatcgaggccggtcagtaccgctctaaacgcaagccgcctcacggaggagagcgaaaggagaaagagcatcaggtggtgagttattcaagacggaaacacgggaaacgcattggggtgcaggggaaaaataggatggagtatctcagtttaaatattttgaacgggaatacacctgagcaggtcaactacaccgagtggaaattcagcgagaccaatagctttataggcgatggcttcaagaaccagcacgaggaggaggagatgacactgtcgcactccgctctgaagcaaaaggaaccgctccatcctgttaatgataaagaatcgtcagagcaaggaagtgaggtatcggaggctcagactaccgacagcgacgatgtaatcgtgccccccatgtcacagaagtaccccaaggccgactcagagaaaatgtgtattgagatcgtgtcactggctttctatccagaagcagaagtgatgtcggacgagaatatcaaacaggtgtatgtcgagtacaaattttacgatctcccactttctgagactgagactcccgtcagcctccggaagcctagagcaggcgaagagatccatttccatttctcaaaggtgatcgacttagaccctcaggagcagcagggcagaaggcggttcctgttcgacatgcttaatggccaggatccagatcagggccaccttaagttcaccgtcgtcagcgatcccctggacgaagaaaagaaagagtgtgaagaggtcggatatgcctatctgcagttatggcaaatcttagaatccggtagggacattctggaacaggagctggatattgtttcaccagaggatctagctacgcctatcggtagacttaaagtgtctctgcaggccgctgctgtcctccatgccatttataaggaaatgacagaagacttgttttcctag

SEQ ID NO: 332300 - DNA, 1839 bp, Artificial Sequence
  derived and/or modified sequence
atgttgaagctcgacaacaaagatgttattagtcacccactgggatatcctagcgagtcattgttgtcaatcgccagcatgttagactcttccgattcaagttctcagccacactggagtaacgaactcattgcagagcagctgcagcagcaggtgagtcagcttcaggaccagctggatgctgaactggaggataaaaggaaagtcctgcttgagctgtcccgggagaaggctcagaatgaggacctgaaattggaggtgacaaacattttacagaaacacaaacaggaggtggagctcctacagaatgctgcgaccattagccagccccctgaccgtcaatctgagcccgctactcaccctgccgtgttgcaggaaaacacacagatcgagccctctgaaccaaagaatcaggaggaaaagaagctcagccaagtcctgaacgagctccaagtttcccatgccgaaaccacattggagctcgaaaagacaagggacatgctaatactgcagcgtaaaatcaatgtttgttaccaagaggagcttgaggcaatgatgactaaagccgacaatgataatcgcgatcataaagagaagttggaaagattgactcgattactggacttgaaaaacaacagaattaaacaactcgaagggatcctccgttctcacgacttgcccacatccggagatttcaacctgactgatccagccgagaagcctaatggatctattcaggttcagctggattggaagtttccctacatcccacccgaaagtttcttgaagccagaggcgcagactaaaggcaaagatactaaggacagcagtaagatctcctctgaggaggagaaggctagcttcccctcccaggaccaaatggcgtcccccgaagtacccatcgaggcagggcagtacaggtctaagcgcaaacccccacatggcggtgaacgaaaggaaaaagagcatcaggttgtttcatattcgcgccgtaagcacggcaagcggattggggtacagggaaaaaataggatggaatacctgagcctgaatatccttaatggcaacaccccagagcaggtaaactacacagagtggaaattcagtgagacgaattcattcattggagacgggtttaagaaccagcacgaggaagaagagatgaccctttcgcattcggcacttaaacagaaggagccccttcaccccgttaacgacaaagaatcatctgagcagggcagcgaggtgtcggaggcccagaccacagattctgacgacgtaatagtaccaccaatgtcgcagaagtacccgaaggctgatagcgagaagatgtgcatagaaatagtgtccctggcattttacccagaggcagaagtgatgtcagacgagaacataaagcaagtttacgtggaatataaattctacgacctacccctgtctgaaaccgagacccccgtctccctgaggaagccgagggcaggcgaagaaattcatttccacttttctaaggtgatcgacctcgacccccaggagcaacagggaaggaggcggttcctgtttgatatgctaaatggtcaggatcccgaccagggccacctgaagttcacagtggtatccgatccgctggatgaagagaagaaggagtgcgaggaggtgggctacgcatatctgcagctgtggcagatccttgaaagcggccgtgacatcctggaacaagagctggacatcgtgtctcctgaagacctggcaacacccatcgggcgtctgaaagtctcactccaggctgccgcagtgctacacgccatatacaaagaaatgactgaggatcttttcagctag

SEQ ID NO: 332301 - DNA, 2004 bp, Artificial Sequence
  derived and/or modified sequence
agttggtaaatgacagttatgaataaagcaagggcagaaaaaaacatgtaggggagagaatgaggaactaggtccaggagatgctgaaactggataataaagacgtcatatcacaccccttggggtatccatctgagagcttgctttccattgccagcatgctggacagcagtgacagctccagtcagccccactggagcaacgagctcatagcggaacagctacagcagcaagtctctcagctgcaggatcagctggatgctgagctggaggacaagagaaaagttttacttgagctgtccagggagaaagcccaaaatgaggatctgaagcttgaagtcaccaacatacttcagaagcataaacaggaagtagagctcctccaaaatgcagccacaatttcccaacctcctgacaggcaatctgaaccagccactcacccagctgtattgcaagagaacactcagatcgagccaagtgaacccaaaaaccaagaagaaaagaaactgtcccaggtgctaaatgagttgcaagtatcacacgcagagaccacattggaactagaaaagaccagggacatgcttattctgcagcgcaaaatcaacgtgtgttatcaggaggaactggaggcaatgatgacaaaagctgacaatgataatagagatcacaaagaaaagctggagaggttgactcgactactagacctcaagaataaccgtatcaagcagctggaaggtattttaagaagccatgaccttccaacatctggtgattttaacctcactgaccctgcagagaaacccaacggatctattcaagtgcaactggattggaagtttccctacataccccctgagagcttcctgaaaccagaagctcagactaaggggaaggataccaaggacagttcaaagatctcatctgaagaggaaaaggcttcatttccttcccaggatcagatggcatctcctgaggttcccattgaagctggccagtatcgatctaagagaaaacctcctcatgggggagaaagaaaggagaaggagcaccaggttgtgagctactcaagaagaaaacatggcaaaagaataggtgttcaaggaaagaatagaatggagtatcttagccttaacatcttaaatggaaatacaccagagcaggtgaattacactgagtggaagttctcagagactaacagcttcataggtgatggctttaaaaatcagcacgaggaagaggaaatgacattatcccattcagcactgaaacagaaggaacctctacatcctgtaaatgacaaagaatcctctgaacaaggttctgaagtcagtgaagcacaaactaccgacagtgatgatgtcatagtgccacccatgtctcagaaatatcctaaggcagattcagagaagatgtgcattgaaattgtctccctggccttctacccagaggcagaagtgatgtctgatgagaacataaaacaggtgtatgtggagtacaaattctacgacctacccttgtcggagacagagactccagtgtccctaaggaagcctagggcaggagaagaaatccactttcactttagcaaggtaatagacctggacccacaggagcagcaaggccgaaggcggtttctgttcgacatgctgaatggacaagatcctgatcaaggacatttaaagtttacagtggtaagtgatcctctggatgaagaaaagaaagaatgtgaagaagtgggatatgcatatcttcaactgtggcagatcctggagtcaggaagagatattctagagcaagagctagacattgttagccctgaagatctggctaccccaataggaaggctgaaggtttcccttcaagcagctgctgtcctccatgctatttacaaggagatgactgaagatttgttttcatgaaggaacaagtgctattccaatctaaaagtctctgagggaaccatagtaaaaagtctcttataaagttagcttgctataacatgaa

SEQ ID NO: 332302 - DNA, 1839 bp, Artificial Sequence
  derived and/or modified sequence
atgctgaagctggacaacaaggacgtgatcagccaccccctgggctaccccagcgagagcctgctgagcatcgccagcatgctggacagcagcgacagcagcagccagccccactggagcaacgagctgatcgccgagcagctgcagcagcaggtgagccagctgcaggaccagctggacgccgagctggaggacaagagaaaggtgctgctggagctgagcagagagaaggcccagaacgaggacctgaagctggaggtgaccaacatcctgcagaagcacaagcaggaggtggagctgctgcagaacgccgccaccatcagccagccccccgacagacagagcgagcccgccacccaccccgccgtgctgcaggagaacacccagatcgagcccagcgagcccaagaaccaggaggagaagaagctgagccaggtgctgaacgagctgcaggtgagccacgccgagaccaccctggagctggagaagaccagagacatgctgatcctgcagagaaagatcaacgtgtgctaccaggaggagctggaggccatgatgaccaaggccgacaacgacaacagagaccacaaggagaagctggagagactgaccagactgctggacctgaagaacaacagaatcaagcagctggagggcatcctgagaagccacgacctgcccaccagcggcgacttcaacctgaccgaccccgccgagaagcccaacggcagcatccaggtgcagctggactggaagttcccctacatcccccccgagagcttcctgaagcccgaggcccagaccaagggcaaggacaccaaggacagcagcaagatcagcagcgaggaggagaaggccagcttccccagccaggaccagatggccagccccgaggtgcccatcgaggccggccagtacagaagcaagagaaagcccccccacggcggcgagagaaaggagaaggagcaccaggtggtgagctacagcagaagaaagcacggcaagagaatcggcgtgcagggcaagaacagaatggagtacctgagcctgaacatcctgaacggcaacacccccgagcaggtgaactacaccgagtggaagttcagcgagaccaacagcttcatcggcgacggcttcaagaaccagcacgaggaggaggagatgaccctgagccacagcgccctgaagcagaaggagcccctgcaccccgtgaacgacaaggagagcagcgagcagggcagcgaggtgagcgaggcccagaccaccgacagcgacgacgtgatcgtgccccccatgagccagaagtaccccaaggccgacagcgagaagatgtgcatcgagatcgtgagcctggccttctaccccgaggccgaggtgatgagcgacgagaacatcaagcaggtgtacgtggagtacaagttctacgacctgcccctgagcgagaccgagacccccgtgagcctgagaaagcccagagccggcgaggagatccacttccacttcagcaaggtgatcgacctggacccccaggagcagcagggcagaagaagattcctgttcgacatgctgaacggccaggaccccgaccagggccacctgaagttcaccgtggtgagcgaccccctggacgaggagaagaaggagtgcgaggaggtgggctacgcctacctgcagctgtggcagatcctggagagcggcagagacatcctggagcaggagctggacatcgtgagccccgaggacctggccacccccatcggcagactgaaggtgagcctgcaggccgccgccgtgctgcacgccatctacaaggagatgaccgaggacctgttcagctag

SEQ ID NO: 332303 - protein, 645 aa, Artificial Sequence
  derived and/or modified sequence
MLLMAPDRCRYVWKHCQPMEMRIKWIFLCCIRPLYDFTSQYVMETDSLFLHYLQEASARLDIHQAMASEHSTLAAGWICFDRVLETVEKVHGLATLIGAGGEEFGVLEYWMRLRFPIKPSLQACNKRKKAQVYLSTDVLGGRKAQEEEFRSESWEPQNELWIEITKCCGLRSRWLGTQPSPYAVYRFFTFSDHDTAIIPASNNPYFRDQARFPVLVTSDLDHYLRREALSIHVFDDEDLEPGSYLGRARVPLLPLAKNESIKGDFNLTDPAEKPNGSIQVQLDWKFPYIPPESFLKPEAQTKGKDTKDSSKISSEEEKASFPSQDQMASPEVPIEAGQYRSKRKPPHGGERKEKEHQVVSYSRRKHGKRIGVQGKNRMEYLSLNILNGNTPEQVNYTEWKFSETNSFIGDGFKNQHEEEEMTLSHSALKQKEPLHPVNDKESSEQGSEVSEAQTTDSDDVIVPPMSQKYPKADSEKMCIEIVSLAFYPEAEVMSDENIKQVYVEYKFYDLPLSETETPVSLRKPRAGEEIHFHFSKVIDLDPQEQQGRRRFLFDMLNGQDPDQGHLKFTVVSDPLDEEKKECEEVGYAYLQLWQILESGRDILEQELDIVSPEDLATPIGRLKVSLQAAAVLHAIYKEMTEDLFS

SEQ ID NO: 332304 - DNA, 198 bp, Artificial Sequence
  derived and/or modified sequence
atgggcaacccccggctgccccggctgctgtgtgccctgaagttcagcggcttcctgagcaacatccggggccccctggccggagaagatggcatgggagacacccagctggcccgggtgcgggacagcgccctgaagaccccctggaggcctgccccctgccccccaccagcccacagcctggatgactggaagtag

SEQ ID NO: 332305 - DNA, 1938 bp, Artificial Sequence
  derived and/or modified sequence
atgctgctcatggcacctgatcgctgtcgatacgtgtggaaacattgtcagcctatggagatgaggattaagtggattttcctctgttgtatacgtccactctacgattttacatctcagtatgtcatggaaacagactctctgttcctccactacctacaggaggcctctgccagactggacatacaccaggccatggccagcgaacacagcaccctcgccgccggctggatctgtttcgatcgtgttctagagacagtcgagaaagtacatggactggcaactctgattggtgcaggtggtgaggaattcggtgtgcttgagtactggatgcgacttaggtttccgattaagccctctcttcaagcttgcaataaacggaagaaagcacaggtgtacttgagcactgacgtgttaggcgggaggaaggcacaggaggaggaatttcgttctgagtcctgggagcctcagaacgagctgtggattgagataactaagtgttgtggccttcgtagcagatggctggggacgcagccatcaccttatgccgtatatcgattctttacgtttagcgaccatgatactgctattatacccgcttccaacaacccatatttcagggatcaggctcgctttcctgtcctcgtgacatccgacctggaccactatctgcggagagaggctctatccattcatgttttcgatgatgaggatcttgagcccggctcctacctcggccgagcgcgcgttccactcttgcccctggcaaaaaatgaaagcatcaaaggtgattttaacttgactgatccggcagagaaaccaaacggttcaattcaggtacagctggattggaagtttccttatataccccccgagtctttcctgaagcctgaggcgcagaccaaaggaaaggacactaaggactcatccaaaatctctagtgaagaggagaaagcctcttttccctcccaagatcagatggcctcaccggaggtgcccattgaagcaggtcagtatcggtccaaacgtaagccgcctcatgggggagaaaggaaggaaaaagagcaccaggtagttagctattcgcgaagaaagcacgggaaaagaataggtgtgcagggcaaaaatcggatggagtatctgagtttgaacattctgaatggcaatacaccagagcaggtgaactatacagaatggaagttttccgaaactaacagttttattggcgacggcttcaaaaatcagcatgaggaagaggagatgactttatctcactccgccctgaagcagaaggaaccactgcaccccgtaaatgacaaggagtcctctgagcaggggtccgaggtgagtgaggcacaaaccactgatagcgacgacgtgatcgtgccacctatgtctcagaagtatcccaaggctgattcggaaaagatgtgtattgagattgtttctttagccttctatccagaggcagaagttatgagtgacgagaatattaaacaggtttatgtcgagtataagttctacgacctgcctctgtccgaaaccgaaactcctgttagcctgaggaaaccacgggcaggggaggagattcatttccatttttccaaggtcattgatctggacccccaagagcagcagggtcgcagacgtttcctgtttgacatgttaaacggacaggatcccgatcaaggacatctgaagttcaccgtggttagcgacccccttgatgaggagaagaaagagtgtgaagaagtgggctatgcctacttgcaactttggcagattctggaaagcggacgtgatattctggagcaggagctggacatcgtctcgccagaagatctagctactccaattggcaggctgaaagtgtctttgcaggccgctgccgtgctgcacgctatttataaagagatgaccgaagacttgttttcttag

SEQ ID NO: 332306 - DNA, 1938 bp, Artificial Sequence
  derived and/or modified sequence
atgctgctgatggccccagaccgctgccgctacgtgtggaagcactgccagcccatggagatgaggatcaagtggatcttcctgtgctgcatccggcccctgtatgacttcaccagccagtatgtgatggagacagacagcctcttcctgcactacctgcaggaggccagcgcccggctggacatccaccaggccatggccagcgagcacagcaccctggccgccggctggatctgctttgacagagtgctggagaccgtggagaaggtgcacggcctggccaccctgattggagctggaggagaggagtttggagtgctggagtactggatgaggctgcgcttccccatcaagcccagcctgcaggcctgcaacaagaggaagaaggcccaggtgtacctgagcacagatgtgctgggcggcaggaaggcccaggaggaggagttccgctctgagagctgggagccccagaatgagctgtggattgagatcaccaagtgctgcggcctgcggagccgctggctgggcacccagcccagcccctatgctgtgtaccgcttcttcaccttcagtgaccatgacacagccatcatcccagccagcaacaacccctacttccgggaccaggcccgcttccctgtgctggtgaccagtgacctggaccactacctgcggcgggaggccctgagcatccacgtgtttgatgatgaggacctggagcccggcagctacctgggccgggcccgggtgcccctgctgcccctggccaagaatgaaagcatcaagggggacttcaacctgacagatcctgctgagaagcccaacggcagcatccaggtgcagctggactggaagttcccctacatccccccagagagcttcctgaagccagaggcccagaccaagggcaaggacaccaaggacagcagcaagatcagcagcgaggaggagaaggccagcttccccagccaggaccagatggccagccctgaggtgcccatcgaggccggccagtaccgcagcaagaggaagccccctcatggaggagagaggaaggagaaggagcaccaggtggtgtcctacagcaggaggaagcacggcaagagaattggagtgcagggcaagaacaggatggagtacctgagcctgaacatcctgaatggaaacaccccagagcaggtgaactacacagagtggaagttcagcgagaccaacagcttcatcggagatggcttcaagaaccagcacgaggaggaggagatgaccctgagccacagcgccctgaagcagaaggagcccctgcaccctgtgaatgacaaggagagcagcgagcagggcagcgaggtgtctgaggcccagaccacagacagtgatgatgtgattgtgccccccatgagccagaagtaccccaaggctgacagcgagaagatgtgcattgaaattgtgtccctggccttctacccagaggccgaggtgatgtctgatgagaacatcaagcaggtgtatgtggagtacaagttctatgacctgcccctgtctgaaacagagacccctgtgtccctgaggaagccccgggccggggaggagatccacttccacttcagcaaggtgattgacctggacccccaggagcagcagggcagaagacgcttcctgtttgacatgctgaatggccaggaccctgaccagggccacctgaagttcaccgtggtgtctgaccccctggatgaggagaagaaggaatgtgaggaggtgggctacgcctacctgcagctgtggcagatcctggagagcggccgggacatcctggagcaggagctggacatcgtgtccccagaggacctggccacccccatcggccgcctgaaggtgtccctgcaggccgctgctgtgctgcacgccatctacaaggagatgacagaagatctcttctcctag

SEQ ID NO: 332307 - DNA, 1938 bp, Artificial Sequence
  derived and/or modified sequence
atgctgctgatggcccccgaccggtgccggtacgtgtggaagcactgtcagcccatggaaatgcgtatcaagtggatcttcctgtgttgtatcaggcccttgtacgattttacaagccagtatgttatggagactgacagcttatttcttcattaccttcaggaggcctcagctaggcttgacatacaccaagcgatggcttccgagcactccactctggcagcaggctggatttgctttgacagggtcttggagacagtcgaaaaggtgcacggattagccaccctaataggtgccggcggagaagagtttggagtcctggagtattggatgcgattgcgatttccaatcaagccttcacttcaggcttgcaataagagaaagaaggctcaggtgtacctttctacagacgtgctgggcggaagaaaagctcaggaggaggagtttaggagcgagtcttgggagccgcagaacgagctctggattgagattacaaaatgctgcggccttcgttcgaggtggctaggtacccaaccctcaccatatgcagtgtacaggttttttaccttcagcgaccatgacaccgcaattatccccgcctcaaacaacccgtacttccgggaccaggccaggtttcccgtcctcgtgacctccgatctcgaccattatctgcggcgcgaagctcttagcatacacgtcttcgatgacgaagacttggagcccggcagttatctgggtagagcccgcgttcccctcttgcccctggccaagaacgagtccattaagggcgattttaacctgacagatccagcggagaagccgaacggatcaattcaagtgcaactggactggaagttcccttacatacctcccgaatcttttcttaagccggaggcacagaccaaaggtaaggacaccaaggatagctccaaaatttccagcgaggaagagaaggcaagtttcccaagccaagatcagatggctagtcccgaggtgcctatcgaagcagggcaataccgcagcaaacggaaaccaccacatggcggggaaaggaaagagaaggagcatcaggttgtatcctatagccggaggaagcatgggaaacgcataggcgtgcaaggtaaaaacagaatggaatacctctctctaaacatactaaatgggaataccccagagcaggtgaattacacagaatggaaattttccgagaccaattctttcatcggagacgggttcaaaaaccagcatgaggaagaggagatgaccctctctcatagcgcactaaaacagaaggaacctctgcacccagttaacgacaaggagtctagtgagcagggcagtgaagtgagcgaagcccagacgacagattccgacgatgtgattgttcctccgatgtcccagaagtaccccaaagccgattctgagaagatgtgcatcgaaatcgtgtcactcgctttctatcccgaagccgaagtgatgtctgatgaaaatatcaaacaggtctacgtcgaatataagttttacgacctacctctgtccgaaacagagacgcctgtgtcgctccgcaagcccagagcaggcgaagaaatccacttccacttttcaaaagtcatagacctagatccccaggagcagcagggacgacgtcggtttttgttcgatatgctcaatggccaagatcccgatcagggccacttgaaatttaccgtggtttcagacccacttgatgaagagaagaaagagtgtgaagaggtcggctatgcatatttgcagctgtggcaaattctggaatctggcagggacattctggagcaggagctggatatcgtgtcccctgaggacctggctacccctattgggcgactgaaagtctctctgcaggccgcagcggtgcttcatgcaatttataaagagatgaccgaagacttgttttcctag

SEQ ID NO: 332308 - DNA, 1938 bp, Artificial Sequence
  derived and/or modified sequence
atgctgttgatggcccctgacaggtgtagatacgtgtggaaacactgccaacctatggaaatgcggatcaaatggatatttctgtgctgcatccgccctctgtacgatttcaccagccagtacgttatggagactgattccctgttcttgcattacctgcaagaagccagcgcacgtctggacatccatcaggccatggccagtgaacatagcaccctcgctgcaggttggatatgctttgaccgcgtgctggagaccgtcgaaaaagtccacggcctggcaaccctcattggggctgggggagaagagtttggagtattggagtactggatgcgcctccgttttcccattaagcccagtctacaggcttgcaataaacggaaaaaagctcaagtctacctgtccactgacgttcttggcggacgcaaagctcaggaagaggagttcaggagtgagtcctgggagccccagaacgagctgtggatcgaaatcaccaagtgttgcggcctccgatcacgctggctgggtacccagccctcgccttatgccgtttaccgcttctttaccttttcggatcacgataccgcgattatccccgcaagcaataacccatactttcgcgatcaggcccgattcccagtcctggtgacgtccgacttggaccactatctgcgacgggaagccctgtccatccatgtttttgacgatgaggacctggagccagggtcgtatctgggaagagcaagagtaccgctcctgccgttagcaaagaacgagagtatcaagggcgactttaacctcaccgatccggctgagaagcctaatgggtccattcaggtgcaacttgattggaaatttccctacattccaccagagtcctttctgaagccagaagcccaaaccaaaggaaaggataccaaggatagctccaaaattagttccgaagaggaaaaggcatccttcccttcccaggatcaaatggcttctccagaagttccaattgaggcgggacagtaccgtagcaagaggaagccccctcatggaggcgaaagaaaagagaaggagcatcaggtggtgtcctactcccggcgtaagcacggcaagcgcattggcgtgcaaggaaaaaaccgaatggagtatctctcactgaacattctgaatggcaatacaccagagcaggttaattacacagaatggaagttttccgaaaccaacagctttattggcgacggcttcaaaaaccagcacgaagaagaggagatgaccctgtcccattcagcgttgaagcagaaggagccattacatcccgtcaatgacaaagagagttcagagcaggggagtgaagtgagcgaggctcagaccaccgactccgacgatgtcatcgtcccacctatgtctcagaaataccccaaagcggatagcgaaaagatgtgcattgagattgtatccctggcattttacccagaagctgaggttatgagcgacgaaaacattaagcaagtgtatgttgagtacaagttctacgatctcccgttgtcagaaacagagacccccgtaagtttgcgtaagccacgggctggcgaagagatccatttccacttttccaaggttattgacctcgaccctcaggaacagcaggggcgaaggcgtttcctttttgatatgcttaacggacaggaccccgaccagggccatttgaaattcaccgtcgtgtctgatcctctggatgaggagaagaaagagtgcgaagaggtaggttacgcttacctgcagctgtggcagattctggaaagtgggcgagacattcttgagcaagaacttgatatcgtcagcccagaggatctggcgacacccattggtcgtctgaaggtctccctacaggccgctgctgtcttgcacgcaatttacaaagaaatgaccgaggacctgtttagctag

SEQ ID NO: 332309 - DNA, 2021 bp, Artificial Sequence
  derived and/or modified sequence
atgttgcttatggcacccgaccgttgtcgttatgtttggaaacactgccagcccatggagatgaggataaagtggatatttctctgctgcatcaggcccctctatgacttcacctcccagtatgtgatggagacagattcgcttttcttacactaccttcaagaggcttcagcccggcttgacatacaccaggccatggccagtgaacacagcactcttgctgcaggatggatttgctttgacagggtgctagagactgtggagaaagtccatggcttggccacactgattggagctggtggagaagagttcggggttctagagtactggatgaggctgcgtttccccataaaacccagcctacaggcgtgcaataaacgaaagaaagcccaggtctacctgtcaaccgatgtgcttggaggccggaaggcccaggaagaggagttcagatcggagtcttgggaacctcagaacgagctgtggattgaaatcaccaagtgctgtggcctccggagtcgatggctgggaactcaacccagtccatatgctgtgtaccgcttcttcaccttttctgaccatgacactgccatcattccagccagtaacaacccctactttagagaccaggctcgattcccagtgcttgtgacctctgacctggaccattatctgagacgggaggccttgtctatacatgtttttgatgatgaagacttagagcctggctcgtatcttggccgagcccgagtgcctttactgcctcttgcaaaaaatgaatctatcaaaggtgattttaacctcactgaccctgcagagaaacccaacggatctattcaagtgcaactggattggaagtttccctacataccccctgagagcttcctgaaaccagaagctcagactaaggggaaggataccaaggacagttcaaagatctcatctgaagaggaaaaggcttcatttccttcccaggatcagatggcatctcctgaggttcccattgaagctggccagtatcgatctaagagaaaacctcctcatgggggagaaagaaaggagaaggagcaccaggttgtgagctactcaagaagaaaacatggcaaaagaataggtgttcaaggaaagaatagaatggagtatcttagccttaacatcttaaatggaaatacaccagagcaggtgaattacactgagtggaagttctcagagactaacagcttcataggtgatggctttaaaaatcagcacgaggaagaggaaatgacattatcccattcagcactgaaacagaaggaacctctacatcctgtaaatgacaaagaatcctctgaacaaggttctgaagtcagtgaagcacaaactaccgacagtgatgatgtcatagtgccacccatgtctcagaaatatcctaaggcagattcagagaagatgtgcattgaaattgtctccctggccttctacccagaggcagaagtgatgtctgatgagaacataaaacaggtgtatgtggagtacaaattctacgacctacccttgtcggagacagagactccagtgtccctaaggaagcctagggcaggagaagaaatccactttcactttagcaaggtaatagacctggacccacaggagcagcaaggccgaaggcggtttctgttcgacatgctgaatggacaagatcctgatcaaggacatttaaagtttacagtggtaagtgatcctctggatgaagaaaagaaagaatgtgaagaagtgggatatgcatatcttcaactgtggcagatcctggagtcaggaagagatattctagagcaagagctagacattgttagccctgaagatctggctaccccaataggaaggctgaaggtttcccttcaagcagctgctgtcctccatgctatttacaaggagatgactgaagatttgttttcatgaaggaacaagtgctattccaatctaaaagtctctgagggaaccatagtaaaaagtctcttataaagttagcttgctataacatg

SEQ ID NO: 332310 - DNA, 1938 bp, Artificial Sequence
  derived and/or modified sequence
atgctgctgatggcccccgacagatgcagatacgtgtggaagcactgccagcccatggagatgagaatcaagtggatcttcctgtgctgcatcagacccctgtacgacttcaccagccagtacgtgatggagaccgacagcctgttcctgcactacctgcaggaggccagcgccagactggacatccaccaggccatggccagcgagcacagcaccctggccgccggctggatctgcttcgacagagtgctggagaccgtggagaaggtgcacggcctggccaccctgatcggcgccggcggcgaggagttcggcgtgctggagtactggatgagactgagattccccatcaagcccagcctgcaggcctgcaacaagagaaagaaggcccaggtgtacctgagcaccgacgtgctgggcggcagaaaggcccaggaggaggagttcagaagcgagagctgggagccccagaacgagctgtggatcgagatcaccaagtgctgcggcctgagaagcagatggctgggcacccagcccagcccctacgccgtgtacagattcttcaccttcagcgaccacgacaccgccatcatccccgccagcaacaacccctacttcagagaccaggccagattccccgtgctggtgaccagcgacctggaccactacctgagaagagaggccctgagcatccacgtgttcgacgacgaggacctggagcccggcagctacctgggcagagccagagtgcccctgctgcccctggccaagaacgagagcatcaagggcgacttcaacctgaccgaccccgccgagaagcccaacggcagcatccaggtgcagctggactggaagttcccctacatcccccccgagagcttcctgaagcccgaggcccagaccaagggcaaggacaccaaggacagcagcaagatcagcagcgaggaggagaaggccagcttccccagccaggaccagatggccagccccgaggtgcccatcgaggccggccagtacagaagcaagagaaagcccccccacggcggcgagagaaaggagaaggagcaccaggtggtgagctacagcagaagaaagcacggcaagagaatcggcgtgcagggcaagaacagaatggagtacctgagcctgaacatcctgaacggcaacacccccgagcaggtgaactacaccgagtggaagttcagcgagaccaacagcttcatcggcgacggcttcaagaaccagcacgaggaggaggagatgaccctgagccacagcgccctgaagcagaaggagcccctgcaccccgtgaacgacaaggagagcagcgagcagggcagcgaggtgagcgaggcccagaccaccgacagcgacgacgtgatcgtgccccccatgagccagaagtaccccaaggccgacagcgagaagatgtgcatcgagatcgtgagcctggccttctaccccgaggccgaggtgatgagcgacgagaacatcaagcaggtgtacgtggagtacaagttctacgacctgcccctgagcgagaccgagacccccgtgagcctgagaaagcccagagccggcgaggagatccacttccacttcagcaaggtgatcgacctggacccccaggagcagcagggcagaagaagattcctgttcgacatgctgaacggccaggaccccgaccagggccacctgaagttcaccgtggtgagcgaccccctggacgaggagaagaaggagtgcgaggaggtgggctacgcctacctgcagctgtggcagatcctggagagcggcagagacatcctggagcaggagctggacatcgtgagccccgaggacctggccacccccatcggcagactgaaggtgagcctgcaggccgccgccgtgctgcacgccatctacaaggagatgaccgaggacctgttcagctag

SEQ ID NO: 332311 - protein, 371 aa, Artificial Sequence
  derived and/or modified sequence
MAELQEVQITEEKPLLPGQTPEAAKEAELAARILLDQGQTHSVETPYGSVTFTVYGTPKPKRPAILTYHDVGLNYKSCFQPLFQFEDMQEIIQNFVRVHVDAPGMEEGAPVFPLGYQYPSLDQLADMIPCVLQYLNFSTIIGVGVGAGAYILARYALNHPDTVEGLVLINIDPNAKGWMDWAAHKLTGLTSSIPEMILGHLFSQEELSGNSELIQKYRNIITHAPNLDNIELYWNSYNNRRDLNFERGGDITLRCPVMLVVGDQAPHEDAVVECNSKLDPTQTSFLKMADSGGQPQLTQPGKLTEAFKYFLQGMGYMASSCMTRLSRSRTASLTSAASVDGNRSRSRTLSQSSESGTLSSGPPGHTMEVSC

SEQ ID NO: 332312 - protein, 99 aa, Artificial Sequence
  derived and/or modified sequence
MAELQEVQITEEKPLLPGQTPEAAKEAELAARILLDQGQTHSVETPYGSVTFTVYGTPKPKRPAILTYHDVGLNYKSCFQPLFQFEDMQEIIQNFVRVH

SEQ ID NO: 332313 - DNA, 1116 bp, Artificial Sequence
  derived and/or modified sequence
atggccgagctgcaggaggtgcagatcaccgaggagaagcccctgctgcccggccagacccccgaggccgccaaggaggccgagctggccgccagaatcctgctggaccagggccagacccacagcgtggagaccccctacggcagcgtgaccttcaccgtgtacggcacccccaagcccaagagacccgccatcctgacctaccacgacgtgggcctgaactacaagagctgcttccagcccctgttccagttcgaggacatgcaggagatcatccagaacttcgtgagagtgcacgtggacgcccccggcatggaggagggcgcccccgtgttccccctgggctaccagtaccccagcctggaccagctggccgacatgatcccctgcgtgctgcagtacctgaacttcagcaccatcatcggcgtgggcgtgggcgccggcgcctacatcctggccagatacgccctgaaccaccccgacaccgtggagggcctggtgctgatcaacatcgaccccaacgccaagggctggatggactgggccgcccacaagctgaccggcctgaccagcagcatccccgagatgatcctgggccacctgttcagccaggaggagctgagcggcaacagcgagctgatccagaagtacagaaacatcatcacccacgcccccaacctggacaacatcgagctgtactggaacagctacaacaacagaagagacctgaacttcgagagaggcggcgacatcaccctgagatgccccgtgatgctggtggtgggcgaccaggccccccacgaggacgccgtggtggagtgcaacagcaagctggaccccacccagaccagcttcctgaagatggccgacagcggcggccagccccagctgacccagcccggcaagctgaccgaggccttcaagtacttcctgcagggcatgggctacatggccagcagctgcatgaccagactgagcagaagcagaaccgccagcctgaccagcgccgccagcgtggacggcaacagaagcagaagcagaaccctgagccagagcagcgagagcggcaccctgagcagcggcccccccggccacaccatggaggtgagctgctag

SEQ ID NO: 332314 - DNA, 1116 bp, Artificial Sequence
  derived and/or modified sequence
atggctgagttgcaggaagttcagattactgaggagaaacccctgctgcccgggcagacgcccgaggcggccaaggaggctgaactagctgcgcgcattttgttagatcagggacagactcactcagtagagacaccttatggaagcgtgacctttactgtatatggaacacctaagccgaaacgcccagcgatcttgacttaccacgacgtgggcctcaattataagagttgctttcagccactttttcagttcgaagacatgcaggaaatcattcagaattttgtgagggtgcacgtggacgctcccggcatggaagagggcgctccggtgttcccactcgggtatcagtatccttccctggaccagctcgcagatatgatcccatgtgttttacagtacctgaacttctcaacaattatcggagttggagtgggtgcaggtgcatacatcttagccagatatgccctcaaccatccggatacggtcgaggggttggttttgataaacatcgaccccaatgccaaaggttggatggactgggccgcacataaactgaccgggctgacgagctcaatccccgaaatgatccttggtcatctcttctcccaggaggaattgtctggcaattccgaactgatccaaaagtatcgcaatattattacccacgcacccaaccttgacaatatcgaactgtattggaatagttataacaatcgccgagatctgaactttgaacgtgggggcgacattacgttaaggtgtccagtgatgctggtggtgggagaccaggccccacatgaagatgcagttgttgaatgcaattctaagctcgatcccactcagacttccttcctcaaaatggccgacagcggggggcaaccacagttgacacagcctggcaaactaacagaagcttttaagtattttttacagggcatggggtacatggccagcagttgcatgacgagactatctcggtctcgaactgcctcccttacatccgccgcatcagtagacgggaaccggagccgtagccgaacactcagtcagtctagcgaatccgggactctgtctagtggcccccctgggcacaccatggaggtgtcctgctag

SEQ ID NO: 332315 - DNA, 1116 bp, Artificial Sequence
  derived and/or modified sequence
atggcagaactccaggaggtacaaatcactgaggagaagcctctgctccccggccagacaccagaagcagccaaagaggccgagcttgccgcccgcatactcctggaccaaggccagactcactctgtggagaccccttatggatctgtcacattcacagtgtacggcacacccaagcctaaacgcccggctattcttacctatcatgacgtgggcctcaattataaatcatgttttcagcccctgtttcagttcgaggacatgcaggagattatccagaactttgtgcgggttcatgtggacgcccctggcatggaggagggagcccctgtgttcccgctaggctatcaatacccttcgctggatcagctcgctgatatgatcccttgtgtgctgcaatacctaaacttctcaactataattggagtgggagtgggagcgggggcttacattttggcaaggtacgccctgaatcatccagatactgtcgaggggctggtgctaattaacatagatccaaatgccaaggggtggatggactgggcagcccataagcttactggccttacctctagcattcccgaaatgatcctgggacatctgttcagccaagaggaattatccggaaatagtgaactcattcagaagtaccggaacatcattacccacgctcccaatctggacaacatcgagctctattggaactcatacaacaaccgcagggatctgaacttcgagaggggcggggatatcaccttgcgatgtcccgtcatgcttgtggtcggagatcaggcgcctcacgaggatgcggtcgtggaatgtaatagcaaactcgaccccacccaaacctcttttctgaagatggccgatagtggtgggcagccgcagcttactcaacctggtaaactgaccgaagcattcaagtactttctgcaaggtatggggtatatggcttcaagctgtatgaccaggctcagtaggagcagaactgcatctctcactagcgctgcttctgtggacggcaataggtcacgttctcgtaccctgtcacagtcttcagagtcaggcactttgtccagcggaccaccaggacatactatggaagtttcctgttag

SEQ ID NO: 332316 - DNA, 1116 bp, Artificial Sequence
  derived and/or modified sequence
atggccgagctccaagaagtccagattacggaggagaagcccttactgccggggcagactcccgaggccgcaaaagaggccgagctggctgctagaattttgctggatcaggggcagacccacagtgtggagaccccttatggtagcgttacgtttaccgtgtacggtactccaaaacctaagcgtcctgcaatcctgacctatcatgatgtgggcctgaactacaagagctgctttcaacctcttttccaattcgaagacatgcaagaaatcatccaaaacttcgtgagggtgcacgttgacgccccaggcatggaagaaggtgcaccggtatttccgttgggctatcaatacccatctctagatcagttggctgacatgatcccctgcgtgctccagtatctgaattttagcacaatcatcggggtgggcgtgggcgcaggagcttatatactggcacggtatgcactaaatcatcctgatactgtagagggcctggtactgattaatatcgacccgaacgccaagggatggatggactgggcagcgcataagcttacaggactgacttcctccatacccgaaatgatattgggccatcttttcagccaggaagagctgtcgggtaactccgagctcatccaaaagtaccgaaatattatcacccatgctccaaatctggataacatcgagctttactggaactcatacaacaatcggagggatttaaactttgaacgaggcggcgacatcacgttacggtgcccagtcatgctggtggtcggcgaccaggcgcctcacgaagacgcggtagtggagtgcaattctaaactggatccaacccagacctcctttctcaagatggccgacagcggaggccaacctcagctgactcagccgggcaaactaacagaagccttcaagtacttcctgcagggcatgggctacatggcctcctcctgcatgacccggttgagcagaagtcggaccgcttcgctcacaagtgccgccagcgtagacggtaacagatctaggagtaggaccctcagtcagagctccgagtcaggaacgctgtcttccggcccccccgggcacaccatggaagtgtcctgctag

SEQ ID NO: 332317 - DNA, 1116 bp, Artificial Sequence
  derived and/or modified sequence
atggccgagttacaagaggtccagattaccgaagagaaacctcttctcccaggccagacacccgaagcagcaaaggaggccgagttggctgccaggattcttcttgatcagggccaaacccattccgtagagacaccctacgggtcagtgaccttcacagtttacgggactccgaagccgaaaaggcctgctatcttgacctatcacgatgttggcctcaattacaagtcctgctttcagccgttgtttcaatttgaggacatgcaagagatcattcagaattttgtacgggtccacgttgatgcgccaggaatggaagagggggctccagtcttcccactggggtaccagtatccttcactggatcagctagccgacatgatcccttgcgtgctgcaatacctaaatttctccaccattattggcgtcggcgtcggggccggcgcttacatcttagctcgttacgccctgaatcatccggacacagtggaggggttggtgcttatcaatattgatccgaatgccaaggggtggatggactgggcagcccataagttaactggcctgacaagcagcattcctgaaatgattctcgggcatctctttagtcaggaggaactttctgggaatagtgagcttatccagaaataccgaaacattataacgcatgcacccaacctcgacaacattgaactttactggaactcctacaataaccgcagggatttaaatttcgagcgtggcggcgatatcaccctgaggtgcccagtcatgctcgttgttggcgaccaggctcctcacgaggacgcggtggtcgaatgtaattcaaaacttgaccctactcaaacatcgtttctgaaaatggccgactctggtggacagcctcagctgacccagcccggcaagctcactgaagcctttaaatattttctgcagggcatggggtatatggctagtagctgtatgacaagactttctcgctccaggaccgcctcactgacatccgcagcttccgtcgatggcaacagatcccgatctagaacactgtcgcagagctccgaatcaggaacattgtcgagcggacctccaggccataccatggaggtgagctgctag

SEQ ID NO: 332318 - DNA, 1116 bp, Artificial Sequence
  derived and/or modified sequence
atggccgagttgcaggaggtgcagatcacagaggagaaaccgcttctgcccggccaaacacccgaagcggccaaggaggcggagctggccgcgaggatcctattggatcagggccagacccacagcgtggagactccctatggctctgtcacctttacagtctacggtacaccaaagcccaagcgccctgccattctaacctaccacgacgtggggttaaactataagtcttgtttccagcccctgtttcagttcgaggatatgcaggaaataatacagaacttcgtccgtgttcacgtggatgctcccggaatggaagaaggagcccctgtctttcccctgggttatcaatacccttctttggaccagctggctgatatgattccttgtgttctgcagtacttaaacttctccaccatcattggcgttggcgtgggagccggcgcttatatcctagctcgttatgctcttaatcatcccgatacggtggagggactggtccttatcaatatcgatcctaacgccaagggatggatggactgggcagcacacaaactcacagggctcacatccagcatccctgagatgattctaggccatctattctctcaggaggagcttagtggtaactctgagctcatccaaaagtatcgcaacatcattacccatgcgcctaacttggataatatcgaactatactggaacagttacaacaataggagggacctgaatttcgaaagagggggtgatataaccctgcggtgtcccgttatgcttgtcgtaggcgatcaggctccacacgaagatgcagtagtggaatgcaacagtaagctcgaccccacgcagaccagcttcctcaaaatggccgactctggcggacagccacagctcacacaacctggtaagctgacggaggcctttaaatatttcctacagggcatgggatatatggcttcatcctgtatgacgcgactctcacggtcccggaccgcatccctaaccagtgcagcatccgttgacgggaacagaagccgctctcggacgctgagccagtcatctgaaagcggcactctgtcctcagggcctccaggccacactatggaggttagctgttag

SEQ ID NO: 332319 - DNA, 1116 bp, Artificial Sequence
  derived and/or modified sequence
atggccgagctgcaggaggtgcagatcacagaggagaagcccctgctgcccggccagaccccagaggccgccaaggaggccgagctggccgcccgcatcctgctggaccagggccagacccacagcgtggagaccccctacggctctgtgaccttcaccgtgtatggcacccccaagcccaagaggcctgccatcctgacctaccatgatgtgggcctgaactacaagagctgcttccagcccctcttccagtttgaggacatgcaggagatcatccagaactttgtgcgggtgcacgtggatgcccctggcatggaggagggcgcccctgtgttccccctgggctaccagtaccccagcctggaccagctggccgacatgatcccctgtgtgctgcagtacctgaacttcagcaccatcattggagtgggcgtgggcgctggggcctacatcctggcccgctatgccctgaaccacccagacacagtggagggcctggtgctgatcaacatcgaccccaatgccaagggctggatggactgggccgcccacaagctgaccggcctgaccagcagcatccctgagatgatcctgggccacctgttcagccaggaggagctgagcggcaacagcgagctgatccagaagtacagaaacatcatcacccacgcccccaacctggacaacatcgagctgtactggaacagctacaacaacagaagagacctgaactttgagcggggcggggacatcaccctgcgctgccctgtgatgctggtggtgggggaccaggcccctcatgaagatgctgtggtggagtgcaacagcaagctggaccccacccagaccagcttcctgaagatggctgacagcggcggccagccccagctgacccagcccgggaagctgacagaggccttcaagtacttcctgcagggcatgggctacatggccagcagctgcatgacccggctgagccgcagcaggacagccagcctgaccagcgctgcctctgtggatggcaacagaagccgcagcaggaccctgagccagagcagcgagagcggcaccctgagcagcggccccccaggccacaccatggaggtgtcctgctag

SEQ ID NO: 332320 - DNA, 1116 bp, Artificial Sequence
  derived and/or modified sequence
atggccgagctgcaggaggtgcagatcaccgaggagaagcccctgctgcctggtcagacaccggaggctgccaaggaagcggaattggccgcgcggattctgctcgatcaaggtcaaactcacagtgtcgaaaccccctatggttcagtaacttttaccgtgtatggaaccccaaaacctaaaagacccgccatcctgacttaccatgacgtggggttgaactataagagctgcttccagcccctgtttcaatttgaagacatgcaagaaatcattcagaattttgtgcgggttcacgtggatgctcccgggatggaagagggagcccccgtgttcccattgggctatcagtatccctccctcgatcagctggcagacatgatcccgtgcgtactccagtacctgaacttcagcaccatcattggcgtaggtgtcggagcgggggcctatatcctcgctcgctacgctctgaatcaccccgacacagtcgagggacttgtgttaatcaacattgatccaaatgccaagggatggatggactgggccgcccataagctgacgggcctgacgagttccattccggagatgatattgggacatctcttcagtcaggaggagctgagcgggaattccgaactcatccagaaatatagaaacatcataacgcacgcacctaacctggacaacattgagttatactggaattcttacaacaaccgtagggacctgaattttgagcggggtggggatattaccctccgatgccctgttatgttagtagtcggagatcaggctcctcacgaagatgcagtggtggagtgtaacagtaaactagacccaacacagaccagctttttgaaaatggcggacagtggggggcagccccagctcacccagcctggcaaattgaccgaagccttcaaatacttccttcaagggatggggtacatggccagcagttgtatgacaagactctccagaagtcgaacagcttctctgacatccgctgcgtcggttgatggcaatcgctctaggtcgcgcactctgagccaatcctctgaatccggcactctaagttccggtcctcccggacacaccatggaagtatcctgttag

SEQ ID NO: 332321 - DNA, 1116 bp, Artificial Sequence
  derived and/or modified sequence
atggccgagctgcaggaggtgcagatcaccgaggagaagcccctgctgcctggacagacccctgaggccgctaaggaagccgagcttgcagcgcggattctgctggaccagggccagacccattcagtggaaaccccatatggtagcgtgacattcacagtgtacgggacaccaaagccaaaacgcccggctattttgacctatcatgacgtgggcttgaactataagagctgttttcagcctctgtttcagtttgaagatatgcaggagatcatccagaattttgtccgggtgcacgtcgacgctcccggaatggaagaaggcgctccggtgtttcccttaggttaccaatacccctccctggatcagctagctgatatgatcccgtgtgtccttcagtaccttaacttttctacgattattggagttggtgtcggggcaggcgcttacatcctggcccgctatgcactcaaccaccctgacaccgttgaggggctggtcttgattaatattgaccccaatgccaaggggtggatggactgggccgctcataagctgaccgggctcacatcctccatccctgagatgatactgggacatctcttctcccaggaggagttgtcaggaaattctgaactgatccaaaaataccggaacatcatcacacacgctcccaatctcgataacattgagctgtactggaattcatataataataggcgagatcttaactttgagagaggtggggatatcaccctcaggtgccctgtgatgctggtggttggtgatcaggccccccatgaggatgcagtagtagagtgtaacagcaaactggatcctacccagacctccttcctgaagatggctgactcaggagggcaaccgcagcttacccagccgggtaagctaacagaagcattcaaatacttcctgcaaggtatggggtacatggcctcttcatgcatgaccaggctgagccgcagccggacggcttctctgacatcagcagcctcagtggatggaaatcgctcacgcagtcgcacactttcacaaagttctgaaagcggaaccctatcaagtgggccacccggacacactatggaagtctcttgttag

SEQ ID NO: 332322 - DNA, 1116 bp, Artificial Sequence
  derived and/or modified sequence
atggccgagctgcaggaggtgcagatcaccgaggagaagcccctgttgccaggtcaaacccccgaagccgccaaggaagctgagctggccgcacgaatactgctcgatcaggggcagacacatagcgtcgagaccccgtacggcagcgtcaccttcacggtgtatggcaccccaaagccgaagcgcccagccatattaacatatcacgacgttgggctgaactacaagagttgctttcagccgctttttcagtttgaggatatgcaagagataattcagaatttcgtgcgggtgcatgtcgatgcgcctgggatggaggaaggagcacctgtgtttcccctgggctatcagtatccctccttggatcagctggccgacatgatcccctgcgtgttgcagtatctgaacttttccaccatcattggcgtgggagtgggggccggggcctacattctggctcgctacgcactcaaccaccctgacacagtggaaggtctggtgttaatcaatatcgacccaaacgcgaagggctggatggattgggctgcccataaattgacgggactgacctcatcaattccagagatgattttaggccacctcttctcccaagaagaactgtccggcaacagcgagctgatccaaaagtaccggaatatcatcacgcacgctccaaacctcgataacatagaactctattggaactcttataacaataggagggatctgaacttcgaaaggggcggagatattactctgcgttgcccagtcatgctagttgtaggagaccaggcaccacatgaggatgccgtggttgagtgcaattcaaagctagatccaacccagacctcttttctcaaaatggctgatagcggcggacagccccagcttacccagccaggtaaactcacggaggctttcaagtattttttgcagggcatgggctatatggctagtagttgcatgacccgattgtcacgttctcgaacagctagtttgacatccgcagccagtgtagatggcaatcgcagtaggagccggaccctttcccagtcatcggagtcaggaactctgtcttcagggccccccgggcacaccatggaagtgagctgctag

SEQ ID NO: 332323 - DNA, 1116 bp, Artificial Sequence
  derived and/or modified sequence
atggccgagctgcaggaggtgcagatcaccgaggagaagcccctgctgccggggcagacacccgaagccgccaaggaggcagaattggcagcccggatcttgctcgatcagggtcagacacattccgtggagacaccctatggaagcgtgacctttacggtatacggtacaccaaagcccaagaggcctgccatcctcacctaccatgatgtggggcttaactacaaaagttgctttcaacccctgttccagtttgaggacatgcaggaaattatacagaattttgttcgagttcacgtggacgcccctggcatggaagagggggccccagtttttccattggggtatcagtacccaagcctggaccaactggccgatatgatcccttgcgtgttgcagtatctgaatttctccacaatcattggggtcggtgtgggggccggcgcctacattctcgcccgctatgctctgaatcatcccgacaccgtagagggactcgtgctcataaatatcgaccctaacgctaagggctggatggattgggccgctcacaaactgacaggactgacaagttccattccggaaatgatcttaggacatctgttctcccaggaagaactctcaggcaactccgaactaattcagaagtaccggaacatcatcactcacgcacccaatttggataacattgagctgtactggaattcctacaacaaccggcgcgatttaaatttcgagaggggaggagacatcacactgaggtgccccgttatgctcgtcgtgggtgaccaagcaccccacgaggacgcagtggtggaatgtaattcaaagttggaccctacgcagacatcctttttaaaaatggctgactccggaggccagccgcagctgacacaacccgggaagctaaccgaggcgttcaagtatttcctccaaggcatgggttatatggcttctagctgcatgacaagactgtctcgcagtcggaccgcgagcttgacatcagccgcctctgttgatggcaacaggagccggagcagaaccctttcacaaagttccgaatctgggacactatcctccggaccccccgggcatacaatggaagttagctgctag

SEQ ID NO: 332324 - DNA, 1116 bp, Artificial Sequence
  derived and/or modified sequence
atggccgagctgcaggaggtgcagatcaccgaggagaagcccctgctaccaggccagacccctgaagctgccaaagaggccgagctggccgcccgaattttgctggaccagggacagacacacagcgtcgagacaccatatggaagcgtgacattcactgtttacggcactcctaagcctaagcgccccgctatcttgacttaccatgatgtgggactcaattacaagagttgcttccagcccctgttccagttcgaagacatgcaggaaattatccagaactttgttagggtgcacgtcgatgctcctggtatggaggagggtgcaccagtgtttccactgggttaccaatacccttcactcgaccagctggccgacatgatcccctgcgtcttacagtatctcaattttagcaccatcattggtgtgggcgttggcgcaggcgcatacattctggcgcgctacgcactgaatcaccccgacaccgtggagggactggtcctgattaatattgatccgaacgcaaaggggtggatggattgggccgcgcacaagttgaccggactgacatcaagcatcccagaaatgatcctgggccatctctttagccaggaggagctgagcggcaactcagaactgatccaaaagtacaggaatattataacccacgccccaaatctggataatattgaactttattggaattcctataacaatcggcgcgacttgaactttgagaggggaggagacatcaccctacggtgtccagtgatgctggtggtgggggaccaagcccctcacgaagatgctgttgtcgagtgcaacagcaaactcgaccccacacaaacctccttcctaaagatggccgatagcggagggcagccacagctcacccagccgggcaaactcacagaagccttcaagtacttcttacagggcatggggtacatggcatctagctgtatgactcgcctttcgagatctcgtacagccagccttaccagcgcagcctctgtagatgggaatcggtcacggagtcggaccctgtctcagtccagtgagagcggaacactaagctccggtcctcctggccacacaatggaagtttcctgttag

SEQ ID NO: 332325 - DNA, 2122 bp, Artificial Sequence
  derived and/or modified sequence
cggccccccgcattccccgcccccacctccccgccttgttgtccaacttctcccggagcagccggagagcaggcgtcgggacgcagcaaagagaggagagaccccagagtcagaaggagtgagaaccctgacccctaatcccactgcatccagccaataggagcccagccaccatggcggagctgcaggaggtgcagatcacagaggagaagccactgttgccaggacagacgcctgaggcggccaaggaggctgagttagctgcccgaatcctcctggaccagggacagactcactctgtggagacaccatacggctctgtcactttcactgtctatggcacccccaaacccaaacgcccagcgatccttacctaccacgatgtgggactcaactataaatcttgcttccagccactgtttcagttcgaggacatgcaggaaatcattcagaactttgtgcgggttcatgtggatgcccctggaatggaagagggagcccctgtgttccctttgggatatcagtacccatctctggaccagcttgcagacatgatcccttgcgtcctgcagtacctaaatttctctacaataattggagttggtgttggagctggagcctacatcctggcgagatatgctcttaaccacccggacactgttgaaggtcttgtcctcatcaacattgatcccaatgccaagggttggatggattgggcagcccacaagctaacaggcctcacctcttccattccggagatgatccttggacatcttttcagccaggaagagctctctggaaattctgagttgatacaaaagtacagaaatatcattacacatgcacccaacctggataacattgaattgtactggaacagctacaacaaccgccgagacctgaactttgagcgtggaggtgatatcaccctcaggtgtcctgtgatgctggtggtaggagaccaagcacctcatgaagatgcagtggtggaatgtaactcaaaactggaccccacccagacctcgttcctcaagatggctgactccggaggtcagccccagctgactcagccaggcaagctgaccgaggccttcaagtacttcctgcaaggcatgggctacatggcctcatcctgcatgactcgcctgtcccggtctcgtacagcctctctgaccagtgcagcatccgttgatggcaaccggtcccgctctcgcaccctgtcccagagcagcgagtctggaactctttcttcggggcccccggggcacaccatggaggtctcctgttgaatggcccttgttgccctagagtgggacccagccctcacctcccccagagctaacctgggaggtgctgaaggggcattgggccaccgtaagcaagggaaaaagggcagatcatgcggggagatgaccttgatctttgattgctaccctaaccttgacctttaacccgtgattccccccagctcctggaagagatgtcctaatatctcttagggacccagacccctaaattctcctcctcccccattttgatgttaaggtggagagggcatatgcatcctctgtcctgatctaggtgtctatagctgaggggtaagaggttgttgtagttgtcctggtgcctccatcagactctccctacttgtcccatatttgcaaggggaggggatttggggctggggctccattcaccaaagctgaggtggcttctcattaaccctttaggactctgaagggtatggacctacgtgaatgtgtgtcagggggagacttgctggtgggttagtggtcctcaggatgtgatagaaacatccagtgtaaaaaggaagttggaatgggagttggcgggcagtgaacgagtgtggggaaggattggtgctggggcaacaggaaggggcctggggccgtttggctgcactaactttggtagctcagtgtgcatctagagtgggactggggagggagctaagcttgggctgggctgcttggggcttggcatagggtggaaagggctaccctggggctctgaccacactgtagtatgtgtggagggtgccctcccgtctcccacaacttctgctataacaataaactgtagaggaatctgagtaccgtta

SEQ ID NO: 332326 - DNA, 2022 bp, Artificial Sequence
  derived and/or modified sequence
gggtctgcgggaagcccgagccggggcgggcccgagtcaaaggcaagtgaaggtggaagcggccgcggcggcagcaggccaccatggcggagctgcaggaggtgcagatcacagaggagaagccactgttgccaggacagacgcctgaggcggccaaggaggctgagttagctgcccgaatcctcctggaccagggacagactcactctgtggagacaccatacggctctgtcactttcactgtctatggcacccccaaacccaaacgcccagcgatccttacctaccacgatgtgggactcaactataaatcttgcttccagccactgtttcagttcgaggacatgcaggaaatcattcagaactttgtgcgggttcatgtggatgcccctggaatggaagagggagcccctgtgttccctttgggatatcagtacccatctctggaccagcttgcagacatgatcccttgcgtcctgcagtacctaaatttctctacaataattggagttggtgttggagctggagcctacatcctggcgagatatgctcttaaccacccggacactgttgaaggtcttgtcctcatcaacattgatcccaatgccaagggttggatggattgggcagcccacaagctaacaggcctcacctcttccattccggagatgatccttggacatcttttcagccaggaagagctctctggaaattctgagttgatacaaaagtacagaaatatcattacacatgcacccaacctggataacattgaattgtactggaacagctacaacaaccgccgagacctgaactttgagcgtggaggtgatatcaccctcaggtgtcctgtgatgctggtggtaggagaccaagcacctcatgaagatgcagtggtggaatgtaactcaaaactggaccccacccagacctcgttcctcaagatggctgactccggaggtcagccccagctgactcagccaggcaagctgaccgaggccttcaagtacttcctgcaaggcatgggctacatggcctcatcctgcatgactcgcctgtcccggtctcgtacagcctctctgaccagtgcagcatccgttgatggcaaccggtcccgctctcgcaccctgtcccagagcagcgagtctggaactctttcttcggggcccccggggcacaccatggaggtctcctgttgaatggcccttgttgccctagagtgggacccagccctcacctcccccagagctaacctgggaggtgctgaaggggcattgggccaccgtaagcaagggaaaaagggcagatcatgcggggagatgaccttgatctttgattgctaccctaaccttgacctttaacccgtgattccccccagctcctggaagagatgtcctaatatctcttagggacccagacccctaaattctcctcctcccccattttgatgttaaggtggagagggcatatgcatcctctgtcctgatctaggtgtctatagctgaggggtaagaggttgttgtagttgtcctggtgcctccatcagactctccctacttgtcccatatttgcaaggggaggggatttggggctggggctccattcaccaaagctgaggtggcttctcattaaccctttaggactctgaagggtatggacctacgtgaatgtgtgtcagggggagacttgctggtgggttagtggtcctcaggatgtgatagaaacatccagtgtaaaaaggaagttggaatgggagttggcgggcagtgaacgagtgtggggaaggattggtgctggggcaacaggaaggggcctggggccgtttggctgcactaactttggtagctcagtgtgcatctagagtgggactggggagggagctaagcttgggctgggctgcttggggcttggcatagggtggaaagggctaccctggggctctgaccacactgtagtatgtgtggagggtgccctcccgtctcccacaacttctgctataacaataaactgtagaggaatctg

SEQ ID NO: 332327 - DNA, 2079 bp, Artificial Sequence
  derived and/or modified sequence
aagcccgagccggggcgggcccgagtcaaaggcaagtgaaggtggaagcggccgcggcggcagcagaccccagagtcagaaggagtgagaaccctgacccctaatcccactgcatccagccaataggagcccagccaccatggcggagctgcaggaggtgcagatcacagaggagaagccactgttgccaggacagacgcctgaggcggccaaggaggctgagttagctgcccgaatcctcctggaccagggacagactcactctgtggagacaccatacggctctgtcactttcactgtctatggcacccccaaacccaaacgcccagcgatccttacctaccacgatgtgggactcaactataaatcttgcttccagccactgtttcagttcgaggacatgcaggaaatcattcagaactttgtgcgggttcatgtggatgcccctggaatggaagagggagcccctgtgttccctttgggatatcagtacccatctctggaccagcttgcagacatgatcccttgcgtcctgcagtacctaaatttctctacaataattggagttggtgttggagctggagcctacatcctggcgagatatgctcttaaccacccggacactgttgaaggtcttgtcctcatcaacattgatcccaatgccaagggttggatggattgggcagcccacaagctaacaggcctcacctcttccattccggagatgatccttggacatcttttcagccaggaagagctctctggaaattctgagttgatacaaaagtacagaaatatcattacacatgcacccaacctggataacattgaattgtactggaacagctacaacaaccgccgagacctgaactttgagcgtggaggtgatatcaccctcaggtgtcctgtgatgctggtggtaggagaccaagcacctcatgaagatgcagtggtggaatgtaactcaaaactggaccccacccagacctcgttcctcaagatggctgactccggaggtcagccccagctgactcagccaggcaagctgaccgaggccttcaagtacttcctgcaaggcatgggctacatggcctcatcctgcatgactcgcctgtcccggtctcgtacagcctctctgaccagtgcagcatccgttgatggcaaccggtcccgctctcgcaccctgtcccagagcagcgagtctggaactctttcttcggggcccccggggcacaccatggaggtctcctgttgaatggcccttgttgccctagagtgggacccagccctcacctcccccagagctaacctgggaggtgctgaaggggcattgggccaccgtaagcaagggaaaaagggcagatcatgcggggagatgaccttgatctttgattgctaccctaaccttgacctttaacccgtgattccccccagctcctggaagagatgtcctaatatctcttagggacccagacccctaaattctcctcctcccccattttgatgttaaggtggagagggcatatgcatcctctgtcctgatctaggtgtctatagctgaggggtaagaggttgttgtagttgtcctggtgcctccatcagactctccctacttgtcccatatttgcaaggggaggggatttggggctggggctccattcaccaaagctgaggtggcttctcattaaccctttaggactctgaagggtatggacctacgtgaatgtgtgtcagggggagacttgctggtgggttagtggtcctcaggatgtgatagaaacatccagtgtaaaaaggaagttggaatgggagttggcgggcagtgaacgagtgtggggaaggattggtgctggggcaacaggaaggggcctggggccgtttggctgcactaactttggtagctcagtgtgcatctagagtgggactggggagggagctaagcttgggctgggctgcttggggcttggcatagggtggaaagggctaccctggggctctgaccacactgtagtatgtgtggagggtgccctcccgtctcccacaacttctgctataacaataaactgtagaggaatctga

SEQ ID NO: 332328 - DNA, 2054 bp, Artificial Sequence
  derived and/or modified sequence
cggccccccgcattccccgcccccacctccccgccttgttgtccaacttctcccggagcagccggagagcaggcgtcgggacgcagcaaagagaggagaggccaccatggcggagctgcaggaggtgcagatcacagaggagaagccactgttgccaggacagacgcctgaggcggccaaggaggctgagttagctgcccgaatcctcctggaccagggacagactcactctgtggagacaccatacggctctgtcactttcactgtctatggcacccccaaacccaaacgcccagcgatccttacctaccacgatgtgggactcaactataaatcttgcttccagccactgtttcagttcgaggacatgcaggaaatcattcagaactttgtgcgggttcatgtggatgcccctggaatggaagagggagcccctgtgttccctttgggatatcagtacccatctctggaccagcttgcagacatgatcccttgcgtcctgcagtacctaaatttctctacaataattggagttggtgttggagctggagcctacatcctggcgagatatgctcttaaccacccggacactgttgaaggtcttgtcctcatcaacattgatcccaatgccaagggttggatggattgggcagcccacaagctaacaggcctcacctcttccattccggagatgatccttggacatcttttcagccaggaagagctctctggaaattctgagttgatacaaaagtacagaaatatcattacacatgcacccaacctggataacattgaattgtactggaacagctacaacaaccgccgagacctgaactttgagcgtggaggtgatatcaccctcaggtgtcctgtgatgctggtggtaggagaccaagcacctcatgaagatgcagtggtggaatgtaactcaaaactggaccccacccagacctcgttcctcaagatggctgactccggaggtcagccccagctgactcagccaggcaagctgaccgaggccttcaagtacttcctgcaaggcatgggctacatggcctcatcctgcatgactcgcctgtcccggtctcgtacagcctctctgaccagtgcagcatccgttgatggcaaccggtcccgctctcgcaccctgtcccagagcagcgagtctggaactctttcttcggggcccccggggcacaccatggaggtctcctgttgaatggcccttgttgccctagagtgggacccagccctcacctcccccagagctaacctgggaggtgctgaaggggcattgggccaccgtaagcaagggaaaaagggcagatcatgcggggagatgaccttgatctttgattgctaccctaaccttgacctttaacccgtgattccccccagctcctggaagagatgtcctaatatctcttagggacccagacccctaaattctcctcctcccccattttgatgttaaggtggagagggcatatgcatcctctgtcctgatctaggtgtctatagctgaggggtaagaggttgttgtagttgtcctggtgcctccatcagactctccctacttgtcccatatttgcaaggggaggggatttggggctggggctccattcaccaaagctgaggtggcttctcattaaccctttaggactctgaagggtatggacctacgtgaatgtgtgtcagggggagacttgctggtgggttagtggtcctcaggatgtgatagaaacatccagtgtaaaaaggaagttggaatgggagttggcgggcagtgaacgagtgtggggaaggattggtgctggggcaacaggaaggggcctggggccgtttggctgcactaactttggtagctcagtgtgcatctagagtgggactggggagggagctaagcttgggctgggctgcttggggcttggcatagggtggaaagggctaccctggggctctgaccacactgtagtatgtgtggagggtgccctcccgtctcccacaacttctgctataacaataaactgtagaggaatctgagtaccgtt

SEQ ID NO: 332329 - DNA, 2880 bp, Artificial Sequence
  derived and/or modified sequence
gtgattgatccgcgtcccctggagctggaggctcgggggaaagggccagcacggagcgggcgctcggttgctgcgcacaaaggctgaggctccaagagctgcagggcgtgtttggggtgcgcgcgaggttgtgtgcaaggtccggggcgcttggcaccggccacgcaagggtgtcagtctccacgcggacgggctgcgtagggactcgtagggacgggttccgggtgctgggcccggccggtctcctctgtcctacccatcccttcccgatggcgcttgccttcgcgggccgtcgggggagaacgggagaagattgtgggaccgctctcctctccctttctccactcgtgggacctacacggagactgagtagaggagagaagcgacggcaccaatctttgtgtttgtttttaaattgtggagggaaacagccatgctctgctaccctcctcttactggagagctgtcaaaaattttggggatcccctattcccccgcgtttagtccccctgcagatagaaaattgaggccaaatgtagtaactaactggggcaaggtcacactgggagtggcagagccgggattcgaatccggaggttctgacagggccaccctcttacctccacatcagcacttccttctctcctccgcgcagcctgaactgatgcccttgtagcctatattgattccggctcgagcctagagaggacgtgttctctggacttaggggtagacagacactggggagggttagtgacccgaggaggttgatgaccctgggagtctgggtcttggctgaggctttccgtccctgaaagaccccaggtctgtctcccatgtcattcacctcgttgctgtgttttctcagaccccagagtcagaaggagtgagaaccctgacccctaatcccactgcatccagccaataggagcccagccaccatggcggagctgcaggaggtgcagatcacagaggagaagccactgttgccaggacagacgcctgaggcggccaaggaggctgagttagctgcccgaatcctcctggaccagggacagactcactctgtggagacaccatacggctctgtcactttcactgtctatggcacccccaaacccaaacgcccagcgatccttacctaccacgatgtgggactcaactataaatcttgcttccagccactgtttcagttcgaggacatgcaggaaatcattcagaactttgtgcgggttcatgtggatgcccctggaatggaagagggagcccctgtgttccctttgggatatcagtacccatctctggaccagcttgcagacatgatcccttgcgtcctgcagtacctaaatttctctacaataattggagttggtgttggagctggagcctacatcctggcgagatatgctcttaaccacccggacactgttgaaggtcttgtcctcatcaacattgatcccaatgccaagggttggatggattgggcagcccacaagctaacaggcctcacctcttccattccggagatgatccttggacatcttttcagccaggaagagctctctggaaattctgagttgatacaaaagtacagaaatatcattacacatgcacccaacctggataacattgaattgtactggaacagctacaacaaccgccgagacctgaactttgagcgtggaggtgatatcaccctcaggtgtcctgtgatgctggtggtaggagaccaagcacctcatgaagatgcagtggtggaatgtaactcaaaactggaccccacccagacctcgttcctcaagatggctgactccggaggtcagccccagctgactcagccaggcaagctgaccgaggccttcaagtacttcctgcaaggcatgggctacatggcctcatcctgcatgactcgcctgtcccggtctcgtacagcctctctgaccagtgcagcatccgttgatggcaaccggtcccgctctcgcaccctgtcccagagcagcgagtctggaactctttcttcggggcccccggggcacaccatggaggtctcctgttgaatggcccttgttgccctagagtgggacccagccctcacctcccccagagctaacctgggaggtgctgaaggggcattgggccaccgtaagcaagggaaaaagggcagatcatgcggggagatgaccttgatctttgattgctaccctaaccttgacctttaacccgtgattccccccagctcctggaagagatgtcctaatatctcttagggacccagacccctaaattctcctcctcccccattttgatgttaaggtggagagggcatatgcatcctctgtcctgatctaggtgtctatagctgaggggtaagaggttgttgtagttgtcctggtgcctccatcagactctccctacttgtcccatatttgcaaggggaggggatttggggctggggctccattcaccaaagctgaggtggcttctcattaaccctttaggactctgaagggtatggacctacgtgaatgtgtgtcagggggagacttgctggtgggttagtggtcctcaggatgtgatagaaacatccagtgtaaaaaggaagttggaatgggagttggcgggcagtgaacgagtgtggggaaggattggtgctggggcaacaggaaggggcctggggccgtttggctgcactaactttggtagctcagtgtgcatctagagtgggactggggagggagctaagcttgggctgggctgcttggggcttggcatagggtggaaagggctaccctggggctctgaccacactgtagtatgtgtggagggtgccctcccgtctcccacaacttctgctataacaataaactgtagaggaatctg

SEQ ID NO: 332330 - DNA, 1116 bp, Artificial Sequence
  derived and/or modified sequence
atggctgaactgcaggaagtgcagattacagaagagaaacctctgcttccagggcagacacctgaagccgctaaagaggcagaattagccgctaggattctgctggaccagggacagacacatagcgtagagactccttacggtagtgtcacattcaccgtgtacggaactccaaaacccaagagacctgcaattttaacctatcacgatgttggcctcaactacaagagttgctttcagccattatttcaattcgaggacatgcaggagatcatccaaaacttcgtccgggtgcacgttgacgcccctggaatggaggaaggcgctccggtcttccctctaggataccagtatccaagcctggatcagctggctgatatgataccctgtgttcttcaatacctgaacttttctacaattatcggcgtgggcgtcggagctggagcctatatactggccaggtatgccctgaatcaccctgacaccgtcgagggattggtcctgatcaacatcgacccgaacgctaaaggatggatggactgggcggcacacaaattgaccgggttgacttccagtataccggaaatgatcctgggccacctgttttctcaggaggaactcagcggcaacagcgaactgattcaaaagtacagaaatattatcacccatgctccaaatttagacaacatagagctgtattggaactcttacaacaatcgccgtgacctcaattttgaacgcggtggagacatcacattgcgatgccccgtgatgctggtcgtaggcgatcaggcccctcacgaagacgccgtcgtggagtgcaattccaagttggacccaacacagacctccttcctcaaaatggccgacagtgggggacagccacagctcacccaacccggtaagttgacagaagccttcaagtatttcctgcagggaatgggatacatggcctctagttgcatgacaaggctttctagatccagaaccgcttctctgacaagcgcagcaagtgtcgacgggaaccgttccaggtccaggaccctctcccaaagcagtgaatccgggaccctgtccagcggtcctccaggacacacaatggaagtgtcctgttag

SEQ ID NO: 332331 - DNA, 1116 bp, Artificial Sequence
  derived and/or modified sequence
atggctgagctgcaggaagtccagattactgaggagaaaccgcttctgcccggacaaacccctgaggcagctaaagaggcggagctcgccgctcgtatcttactggaccaaggccagacccattcagtggaaaccccgtacgggagcgttacatttaccgtgtacggcacgcccaagcccaaacgtccggctatcttaacttaccatgatgtagggcttaattacaaatcttgttttcaacctttgttccagtttgaggatatgcaggaaataattcagaattttgtgagagtgcatgtggacgccccaggcatggaggaaggagctcctgttttccctctgggataccaatacccttcacttgaccaactcgccgacatgatcccttgcgtgctccagtacctgaactttagcacaatcattggagtaggggtgggcgctggcgcttatattttggctaggtatgcactgaaccacccggataccgtggaggggctggttttaatcaatatcgatcccaatgcaaaaggctggatggactgggctgctcataagctcaccggtcttacatcctcgatccccgagatgatcttgggccatctgttctcacaggaagaattgagcggcaattccgaactgatccagaagtatcgcaacatcatcacccatgcacccaatctggataacatcgaactgtattggaacagttataacaacaggagagacctgaatttcgagagaggcggagatatcactctccggtgtcccgtgatgcttgtagtcggggaccaggccccacatgaggatgcagtggtcgaatgtaatagtaaactggatcctacccaaacctcgttcctgaaaatggcagatagcggtggccagccacagctgacccagcccggaaaactgactgaggcctttaaatatttccttcaaggtatggggtatatggccagcagctgtatgacacgcctgtccaggtccagaaccgcaagcctgacctcagccgcatccgtagacggcaatcgatccagatcaaggaccctttcccagtcatccgaatctggcaccctgtcttcaggtccccctggccatactatggaggtcagctgctag

SEQ ID NO: 332332 - DNA, 1116 bp, Artificial Sequence
  derived and/or modified sequence
atggctgaactccaggaagtccaaattacagaagaaaaaccacttctccctggccagacaccggaagcggctaaagaagcggagttggccgctcggatcctgctggatcaagggcagacacattcagtggagaccccttacggctccgttacttttacggtctacgggacaccgaagcctaagcgcccagccattctcacgtaccatgatgtggggttgaattataaatcttgttttcagcctctgttccagttcgaggacatgcaggagatcatccagaattttgtgcgggtgcacgttgacgcgccagggatggaagaaggcgctcctgtgttcccactagggtaccagtatccatcactggatcaacttgctgatatgattccctgcgtgctgcaatatctgaacttttccacaatcattggggtcggcgttggagcaggcgcatacattttagctagatatgcactcaaccaccccgatacagtcgaaggtctggttcttataaacattgaccctaatgctaaaggttggatggattgggctgcccacaagttgacagggctgacctccagcatcccagagatgattttgggtcacctgttctcgcaggaggagcttagcggcaattcggaactgatccagaagtatcgcaacatcatcactcatgcacccaatctggacaatatcgaactgtattggaacagctacaacaacagacgggacttgaatttcgaacggggaggggatatcactctcaggtgccccgtgatgttggtcgttggggatcaggcaccacacgaggacgccgttgtggagtgcaattccaaactagaccccacccagactagctttctaaagatggccgatagtggcggtcagcctcagctgacgcaaccaggcaaactgaccgaagcattcaagtacttcctgcagggaatgggatacatggcatccagttgtatgacacgcctatcgaggagcaggacagcaagcctgacgtcagccgcttcggtggacggcaatagatctcgcagtcggacactgagtcaatcatctgaaagtgggactctctccagcggtccaccagggcatactatggaagtctcatgttag

SEQ ID NO: 332333 - DNA, 1116 bp, Artificial Sequence
  derived and/or modified sequence
atggcagagctacaggaggtgcaaatcacggaagaaaaaccactgttaccgggacaaacacccgaagcggctaaggaagcagaactggccgcacgaatcctgctggaccagggccagacccatagtgtggagacaccatatgggtcggtcacattcactgtttacgggactcccaaaccaaagagaccggctatcctaacctatcatgacgtgggcctcaattataaatcttgtttccagcccctatttcagttcgaggatatgcaggaaatcattcagaacttcgtgagggtgcatgtggacgcccctggtatggaagagggagctcccgtctttccgctaggttaccagtacccttcccttgatcagctggccgacatgatcccctgcgtcctccagtatctgaatttcagcactataatcggcgtgggagtaggcgctggcgcttatattctcgctagatacgcgctcaaccatccggacactgtcgagggactagtgttgatcaacattgacccaaatgccaagggatggatggattgggccgcacacaaactcactgggctgacatcgagcattcccgaaatgatccttggccacctgtttagtcaggaagaactgagtgggaactccgaactcatccagaaatatagaaacatcattacccatgctcctaacctggataacatcgagctgtattggaacagttataataaccgcagagatctcaacttcgagaggggcggtgatatcactctcaggtgccccgtcatgctggtcgtgggtgatcaagcacctcatgaagacgcagtcgtggagtgtaatagtaaactggatccaacccagacgagtttcctcaaaatggccgattctggaggtcaacctcagctcacccaaccaggaaagctgacagaagccttcaaatactttctgcagggaatgggctacatggctagcagctgtatgacccggctgtcccgcagcagaacagcttcgctgacctctgctgcttcggtggacggcaatagatcgagaagtcgaacgctctcacagagctcagaatcaggcaccctgtcttccggccctcccggacacaccatggaggtctcctgctag

SEQ ID NO: 332334 - DNA, 1116 bp, Artificial Sequence
  derived and/or modified sequence
atggctgaactgcaggaagttcagattaccgaagagaaacctctgctgcctggacagacaccagaagctgccaaggaggctgaactggccgctagaattttgctggaccagggacaaacccacagtgtggagacaccctacggatccgttaccttcactgtgtatgggactccaaagccaaaaaggcccgctatcctcacatatcatgatgtcgggttaaattataagtcctgcttccagcccttattccagtttgaagatatgcaagaaattatacagaattttgtgagagttcatgttgatgctcctggtatggaggagggggcaccagtgttccccctaggataccagtatcctagccttgaccagctggccgacatgattccctgtgtcctacagtatttgaacttctcaaccattattggcgtcggggtgggcgctggcgcatatattcttgccagatacgcacttaatcatccagacactgtggagggacttgtcctgataaacatcgaccctaacgccaaaggatggatggactgggcagcacataagttaactggacttacctcctcaatcccggagatgatcctgggccatctttttagccaggaagaactgagcggtaacagtgagctaatacagaagtacaggaatattattacgcacgctccaaacctcgataatatagagctgtattggaacagctacaacaaccgcagagacctgaatttcgaaagaggtggagatatcaccctccggtgccccgtcatgctggtcgtaggagaccaggcccctcatgaggacgctgtcgtggagtgtaatagtaagcttgaccctacccaaacttcattcttgaagatggcagactccggtggacagccgcagttgacccaacccggaaaactaacggaagccttcaaatacttcctccagggtatgggttatatggcatctagctgcatgacccgcctaagcaggagccgcaccgcatctcttacgtcagccgcttccgttgatggcaatcgctcgcgctcaaggaccctgagtcagagcagtgagagcggtactctgtcttctggcccaccgggacatacaatggaagtatcctgttag

SEQ ID NO: 332335 - DNA, 82 bp, Artificial Sequence
  derived and/or modified sequence
aaacacagtacaaatactaattcaaatcaaacttactcaaagtcataatcaaacatgccagacgggctgaggggcagcatta

SEQ ID NO: 332336 - protein, 669 aa, Artificial Sequence
  derived and/or modified sequence
MSGRQRTLFQTWGSSISRSSGTPGCSSGTERPQSPGSSKAPLPAAAEAQLESDDDVLLVAAYEAERQLCLENGGFCTSAGALWIYPTNCPVRDYQLHISRAALFCNTLVCLPTGLGKTFIAAVVMYNFYRWFPSGKVVFMAPTKPLVTQQIEACYQVMGIPQSHMAEMTGSTQASTRKEIWCSKRVLFLTPQVMVNDLSRGACPAAEIKCLVIDEAHKALGNYAYCQVVRELVKYTNHFRILALSATPGSDIKAVQQVITNLLIGQIELRSEDSPDILTYSHERKVEKLIVPLGEELAAIQKTYIQILESFARSLIQRNVLMRRDIPNLTKYQIILARDQFRKNPSPNIVGIQQGIIEGEFAICISLYHGYELLQQMGMRSLYFFLCGIMDGTKGMTRSKNELGRNEDFMKLYNHLECMFARTRSTSANGISAIQQGDKNKKFVYSHPKLKKLEEVVIEHFKSWNAENTTEKKRDETRVMIFSSFRDSVQEIAEMLSQHQPIIRVMTFVGHASGKSTKGFTQKEQLEVVKQFRDGGYNTLVSTCVGEEGLDIGEVDLIICFDSQKSPIRLVQRMGRTGRKRQGRIVIILSEGREERIYNQSQSNKRSIYKAISSNRQVLHFYQRSPRMVPDGINPKLHKMFITHGVYEPEKPSRNLQRKSSIFSYRDGK

SEQ ID NO: 332337 - protein, 127 aa, Artificial Sequence
  derived and/or modified sequence
MSFPPHLNRPPMGIPALPPGIPPPQFPGFPPPVPPGTPMIPVPMSIMAPAPTVLVPTVSMVGKHLGARKDHPGLKAKENDENCGPTTTVFVGNISEKASDMLIRQLLAKCGLVLSWKRVQGASGKLQ

SEQ ID NO: 332338 - protein, 300 aa, Artificial Sequence
  derived and/or modified sequence
MSFPPHLNRPPMGIPALPPGIPPPQFPGFPPPVPPGTPMIPVPMSIMAPAPTVLVPTVSMVGKHLGARKDHPGLKAKENDENCGPTTTVFVGNISEKASDMLIRQLLAKCGLVLSWKRVQGASGKLQAFGFCEYKEPESTLRALRLLHDLQIGEKKLLVKVDAKTKAQLDEWKAKKKASNGNARPETVTNDDEEALDEETKRRDQMIKGAIEVLIREYSSELNAPSQESDSHPRKKKKEKKEDIFRRFPVAPLIPYPLITKEDINAIEMEEDKRDLISREISKFRDTHKVVFLSFHLIPI

SEQ ID NO: 332339 - protein, 243 aa, Artificial Sequence
  derived and/or modified sequence
MSFPPHLNRPPMGIPALPPGIPPPQFPGFPPPVPPGTPMIPVPMSIMAPAPTVLVPTVSMVGKHLGARKDHPGLKAKENDENCGPTTTVFVGNISEKASDMLIRQLLAKCGLVLSWKRVQGASGKLQAFGFCEYKEPESTLRALRLLHDLQIGEKKLLVKVDAKTKAQLDEWKAKKKASNGNARPETVTNDDEEALDEETKRRDQMIKGAIEVLIREYSSELNAPSQESDSHPRKKKKEKKED

SEQ ID NO: 332340 - protein, 843 aa, Artificial Sequence
  derived and/or modified sequence
MSFPPHLNRPPMGIPALPPGIPPPQFPGFPPPVPPGTPMIPVPMSIMAPAPTVLVPTVSMVGKHLGARKDHPGLKAKENDENCGPTTTVFVGNISEKASDMLIRQLLAKCGLVLSWKRVQGASGKLQAFGFCEYKEPESTLRALRLLHDLQIGEKKLLVKVDAKTKAQLDEWKAKKKASNGNARPETVTNDDEEALDEETKRRDQMIKGAIEVLIREYSSELNAPSQESDSHPRKKKKEKKEDIFRRFPVAPLIPYPLITKEDINAIEMEEDKRDLISREISKFRDTHKKLEEEKGKKEKERQEIEKERRERERERERERERREREREREREREREKEKERERERERDRDRDRTKERDRDRDRERDRDRDRERSSDRNKDRSRSREKSRDREREREREREREREREREREREREREREREREREREKDKKRDREEDEEDAYERRKLERKLREKEAAYQERLKNWEIRERKKTREYEKEAEREEERRREMAKEAKRLKEFLEDYDDDRDDPKYYRGSALQKRLRDREKEMEADERDRKREKEELEEIRQRLLAEGHPDPDAELQRMEQEAERRRQPQIKQEPESEEEEEEKQEKEEKREEPMEEEEEPEQKPCLKPTLRPISSAPSVSSASGNATPNTPGDESPCGIIIPHENSPDQQQPEEHRPKIGLSLKLGASNSPGQPNSVKRKKLPVDSVFNKFEDEDSDDVPRKRKLVPLDYGEDDKNATKGTVNTEEKRKHIKSLIEKIPTAKPELFAYPLDWSIVDSILMERRIRPWINKKIIEYIGEEEATLVDFVCSKVMAHSSPQSILDDVAMVLDEEAEVFIVKMWRLLIYETEAKKIGLVK

SEQ ID NO: 332341 - protein, 294 aa, Artificial Sequence
  derived and/or modified sequence
MSFPPHLNRPPMGIPALPPGIPPPQFPGFPPPVPPGTPMIPVPMSIMAPAPTVLVPTVSMVGKHLGARKDHPGLKAKENDENCGPTTTVFVGNISEKASDMLIRQLLAKCGLVLSWKRVQGASGKLQAFGFCEYKEPESTLRALRLLHDLQIGEKKLLVKVDAKTKAQLDEWKAKKKASNGNARPETVTNDDEEALDEETKRRDQMIKGAIEVLIREYSSELNAPSQESDSHPRKKKKEKKEDIFRRFPVAPLIPYPLITKEDINAIEMEEDKRDLISREISKFRDTHKRSYGD

SEQ ID NO: 332342 - DNA, 541 bp, Artificial Sequence
  derived and/or modified sequence
agaaggtcgcgaaggcagtaccgtttcctcagcggcgggtgagtttgtgtctctgaacgcgtgtggaaaccgggagaccgggtgcctcagctggtggaggaggaaaagccggggtggctgcgaaagcgccagggtggggtagagactgctgcagtaagaatgtcttttccacctcatttgaatcgccctcccatgggaatcccagcactcccaccagggatcccacccccgcagtttccaggatttcctccacctgtacctccagggaccccaatgattcctgtaccaatgagcattatggctcctgctccaactgtcttagtacccactgtgtctatggttggaaagcatttgggcgcaagaaaggatcatccaggcttaaaggctaaagaaaatgatgaaaattgtggtcctactaccactgtttttgttggcaacatttccgagaaagcttcagacatgcttataagacaactcttagctaaatgtggtttggttttgagctggaagagagtacaaggtgcttccggaaagcttcaag

SEQ ID NO: 332343 - DNA, 2470 bp, Artificial Sequence
  derived and/or modified sequence
ctcgccgcgcagcgcggctgtatttgcggcctgtgcgagtaggcgcttgggcactcagtctccctggcgagcgacgggcagaaatctcgaaccagtggagcgcactcgtaacctggatcccagaaggtcgcgaaggcagtaccgtttcctcagcggcggactgctgcagtaagaatgtcttttccacctcatttgaatcgccctcccatgggaatcccagcactcccaccagggatcccacccccgcagtttccaggatttcctccacctgtacctccagggaccccaatgattcctgtaccaatgagcattatggctcctgctccaactgtcttagtacccactgtgtctatggttggaaagcatttgggcgcaagaaaggatcatccaggcttaaaggctaaagaaaatgatgaaaattgtggtcctactaccactgtttttgttggcaacatttccgagaaagcttcagacatgcttataagacaactcttagctaaatgtggtttggttttgagctggaagagagtacaaggtgcttccggaaagcttcaagccttcggattctgtgagtacaaggagccagaatctaccctccgtgcactcagattattacatgacctgcaaattggagagaaaaagctactcgttaaagttgatgcaaagacaaaggcacagctggatgaatggaaagcaaagaagaaagcttctaatgggaatgcaaggccagaaactgtcactaatgacgatgaagaagccttggatgaagaaacaaagaggagagatcagatgattaaaggggctattgaagttttaattcgtgaatactccagtgagctaaatgccccctcacaggaatctgattctcaccccaggaagaagaagaaggaaaagaaggaggacattttccgcagatttccagtggccccactgatcccttatccactcatcactaaggaggatataaatgctatagaaatggaagaagacaaaagagacctgatatctcgagagatcagcaaattcagagacacacataaggtagtattcttgtcttttcacttgataccaatctagactttttacagaatccaaagcaaagagacaaaaaaaatcaaccttaaattagaatataattttaaatgttttttataggtttaattgatatttagatagaaaaaagaaacagaagaccaataccatattaaagtggtccttgacatgttgtgcttagttttttcagttactgactattctgcagtcatctcactttaatatgaatagaagctaattttatttttagatttcaacataaacatcaaggtcagacttaaattagattcagggggcagcaggataacatacactgtagtgtatttctgggggcagttatttaacttgatcttaggaataccttttctttagagctgagattaaaatttacattttatatttgtatagatttaagttgagtgggggagattttaaacagtaggtcagtggttaccagacttaccaaattttagatgcatggaagaactgtaaattcccataaagctaatctattcattgacccccaccattatgatagagatcatatggtgactaatgcaagatgaaactctcagcttggaaagtaacaaggaataggatgtaagtatgagcttctgttttttattatatttatggatgccccctcagaaaaatatgcaaaggggtaactggcttggaaatgggtatttatgcatagtaaatcccactcacgagttttgcctatttgaagcttctctcaatgacagtgcatctgtgaatgttcgctggtgttgaaaatgatgcttttgaacggtgcaatgcaaacactgcatgaaatgtattttgatggtcgagataataaggtgttgctggttcttactgatagactgagagatctttaactcagtgaaatgttaaatgttcattttctcttttattcttactttttcccattgctttcaaaatctgcagttcacaaataatgccaatgaatcagtgctgctgaacacttactatccagatgcccagcccttgctcacaaacacaatgctttttcaagaattaaatgtgtctaagagcacaaacataattctcccaaaattaattttgagagttgaaaaggtggtctatgggaaatcattttagatgaataattttggttaggtataatactgaaattcaggaccgagtaagcttaaaaatggtatatggttgtgtgtgtggtttaccccctttttgtttttatttatttgttaaaccctgtcatgttattggtaaattatgaggaaatcatgttttaagaaaaattcaaaaatatatttgctttaaagtttgggaatctgttaggcattttactgccttagtattatttcactggagggaatgttttgaattttcagaatgtcttttcaaaataaaaagaaatcaaaatgaaaaa

SEQ ID NO: 332344 - DNA, 1039 bp, Artificial Sequence
  derived and/or modified sequence
aagacctccatcagctcgccgcgcagcgcggctgtatttgcggcctgtgcgagtaggcgcttgggcactcagtctccctggcgagcgacgggcagaaatctcgaaccagtggagcgcactcgtaacctggatcccagaaggtcgcgaaggcagtaccgtttcctcagcggcggacggagtcttactctgtcgttcaggttggagtgcagtggcgcgacctcggctcactgcaacatctgcctcccaggttcaagcaattctcctgcctcaccttccagagtagctgggattacagactgctgcagtaagaatgtcttttccacctcatttgaatcgccctcccatgggaatcccagcactcccaccagggatcccacccccgcagtttccaggatttcctccacctgtacctccagggaccccaatgattcctgtaccaatgagcattatggctcctgctccaactgtcttagtacccactgtgtctatggttggaaagcatttgggcgcaagaaaggatcatccaggcttaaaggctaaagaaaatgatgaaaattgtggtcctactaccactgtttttgttggcaacatttccgagaaagcttcagacatgcttataagacaactcttagctaaatgtggtttggttttgagctggaagagagtacaaggtgcttccggaaagcttcaagccttcggattctgtgagtacaaggagccagaatctaccctccgtgcactcagattattacatgacctgcaaattggagagaaaaagctactcgttaaagttgatgcaaagacaaaggcacagctggatgaatggaaagcaaagaagaaagcttctaatgggaatgcaaggccagaaactgtcactaatgacgatgaagaagccttggatgaagaaacaaagaggagagatcagatgattaaaggggctattgaagttttaattcgtgaatactccagtgagctaaatgccccctcacaggaatctgattctcaccccaggaagaagaagaaggaaaagaaggaggac

SEQ ID NO: 332345 - DNA, 1567 bp, Artificial Sequence
  derived and/or modified sequence
cgccgcgcagcgcggctgtatttgcggcctgtgcgagtaggcgcttgggcactcagtctccctggcgagcgacgggcagaaatctcgaaccagtggagcgcactcgtaacctggatcccagaaggtcgcgaaggcagtaccgtttcctcagcggcggactgctgcagtaagaatgtcttttccacctcatttgaatcgccctcccatgggaatcccagcactcccaccagggatcccacccccgcagtttccaggatttcctccacctgtacctccagggaccccaatgattcctgtaccaatgagcattatggctcctgctccaactgtcttagtacccactgtgtctatggttggaaagcatttgggcgcaagaaaggatcatccaggcttaaaggctaaagaaaatgatgaaaattgtggtcctactaccactgtttttgttggcaacatttccgagaaagcttcagacatgcttataagacaactcttagctaaatgtggtttggttttgagctggaagagagtacaaggtgcttccggaaagcttcaagccttcggattctgtgagtacaaggagccagaatctaccctccgtgcactcagattattacatgacctgcaaattggagagaaaaagctactcgttaaagttgatgcaaagacaaaggcacagctggatgaatggaaagcaaagaagaaagcttctaatgggaatgcaaggccagaaactgtcactaatgacgatgaagaagccttggatgaagaaacaaagaggagagatcagatgattaaaggggctattgaagttttaattcgtgaatactccagtgagctaaatgccccctcacaggaatctgattctcaccccaggaagaagaagaaggaaaagaaggaggacattttccgcagatttccagtggccccactgatcccttatccactcatcactaaggaggatataaatgctatagaaatggaagaagacaaaagagacctgatatctcgagagatcagcaaattcagagacacacataagagatcatatggtgactaatgcaagatgaaactctcagcttggaaagtaacaaggaataggatttcacaaataatgccaatgaatcagtgctgctgaacacttactatccagatgcccagcccttgctcacaaacacaatgctttttcaagaattaaatgtgtctaagagcacaaacataattctcccaaaattaattttgagagttgaaaaggtggtctatgggaaatcattttagatgaataattttggttaggtataatactgaaattcaggaccgagtaagcttaaaaatggtatatggttgtgtgtgtggtttaccccctttttgtttttatttatttgttaaaccctgtcatgttattggtaaattatgaggaaatcatgttttaagaaaaattcaaaaatatatttgctttaaagtttgggaatctgttaggcattttactgccttagtattatttcactggagggaatgttttgaattttcagaatgtcttttcaaaataaaaagaaatcaaaatgaaaaa

SEQ ID NO: 332346 - DNA, 1093 bp, Artificial Sequence
  derived and/or modified sequence
agtgcacgccgggcaagaggaagacctccatcagctcgccgcgcagcgcggctgtatttgcggcctgtgcgagtaggcgcttgggcactcagtctccctggcgagcgacgggcagaaatctcgaaccagtggagcgcactcgtaacctggatcccagaaggtcgcgaaggcagtaccgtttcctcagcggcggactgctgcagtaagaatgtcttttccacctcatttgaatcgccctcccatgggaatcccagcactcccaccagggatcccacccccgcagtttccaggatttcctccacctgtacctccagggaccccaatgattcctgtaccaatgagcattatggctcctgctccaactgtcttagtacccactgtgtctatggttggaaagcatttgggcgcaagaaaggatcatccaggcttaaaggctaaagaaaatgatgaaaattgtggtcctactaccactgtttttgttggcaacatttccgagaaagcttcagacatgcttataagacaactcttagctaaatgtggtttggttttgagctggaagagagtacaaggtgcttccggaaagcttcaagccttcggattctgtgagtacaaggagccagaatctaccctccgtgcactcagattattacatgacctgcaaattggagagaaaaagctactcgttaaagttgatgcaaagacaaaggcacagctggatgaatggaaagcaaagaagaaagcttctaatgggaatgcaaggccagaaactgtcactaatgacgatgaagaagccttggatgaagaaacaaagaggagagatcagatgattaaaggggctattgaagttttaattcgtgaatactccagtgagctaaatgccccctcacaggaatctgattctcaccccaggaagaagaagaaggaaaagaaggaggacattttccgcagatttccagtggccccactgatcccttatccactcatcactaaggaggatataaatgctatagaaatggaagaagacaaaagagacctgatatctcgagagatcagcaaattcagagacacacataagagatcatatggtgactaa

SEQ ID NO: 332347 - DNA, 384 bp, Artificial Sequence
  derived and/or modified sequence
atgagctttcctcctcatctgaataggccacccatgggtatccccgcgttgccgcctgggatcccacccccacagttcccaggcttcccgccccccgtccccccgggcacccctatgattccagttcccatgtcaataatggcacctgcccctaccgtgctagtgcccaccgtctccatggtggggaaacacttaggcgcccggaaggatcatcctggactgaaggcaaaggagaatgatgaaaattgtggacctacaaccaccgtttttgtcggaaatataagcgagaaggccagcgacatgctgatccgacaactgctggccaaatgtggccttgtgctttcttggaagcgggttcagggcgcgagtggaaagctgcagtag

SEQ ID NO: 332348 - DNA, 903 bp, Artificial Sequence
  derived and/or modified sequence
atgtccttcccacctcacttgaaccgaccaccaatgggaatccccgctttgccgccaggaatccctcccccgcagtttccaggatttccaccgcccgtgccaccggggacaccaatgattccggtgccgatgagtatcatggcgcccgcccccactgtgctcgtgcccacagtctcaatggtaggaaagcatctgggagcgagaaaagatcaccctgggttgaaggcaaaggagaacgacgaaaattgtgggcccaccaccaccgtctttgtgggaaatatttccgaaaaggcctcagatatgcttattcgccagctccttgctaagtgtgggcttgtgctcagctggaagagagtgcagggagcttcggggaagcttcaggcatttggtttttgtgagtataaagaacccgaatcgacgctgcgggccctccgactcctgcacgaccttcaaataggcgaaaaaaagctgctggtcaaggtagacgctaagacaaaggcgcagctggatgagtggaaggctaaaaaaaaagcctccaacggtaatgccagaccagagactgtgacaaatgacgatgaagaggccttagatgaggaaactaaaagacgcgatcaaatgatcaagggcgcaattgaagtgctgattcgggagtatagcagcgaactgaatgccccttctcaagagagcgattctcacccgaggaaaaagaaaaaggagaaaaaagaggatatctttcggagattccccgtggcacccctgataccgtaccccctgatcaccaaggaggatattaacgccatcgagatggaggaggataagagagacctcattagccgggaaatctccaagtttagagacactcacaaggttgtgttcctctctttccacctgatccccatctag

SEQ ID NO: 332349 - DNA, 885 bp, Artificial Sequence
  derived and/or modified sequence
atgtcctttccacctcatcttaatagacctcctatggggatccctgctctccctccagggatcccccctcctcagtttcctgggttccctcctccagtgcccccgggcacccctatgatccccgttccaatgtccatcatggccccggcgcctacagtgctggttcccactgtgagcatggtcggaaagcacctgggtgcccgaaaagatcatcctgggttaaaggccaaagagaacgatgagaattgcggaccgacgacaactgtcttcgtcggaaacatttccgaaaaagcatctgacatgcttatacgccaactgctggccaaatgtgggcttgtgttgtcttggaaacgagtgcaaggggctagcgggaaactgcaggccttcggtttttgcgagtacaaagagccggagagcactctgcgcgcactccgactgctgcacgatcttcagataggtgagaaaaagctgcttgtgaaagtggacgccaaaaccaaggctcagctggacgagtggaaggcaaagaaaaaggccagcaacgggaatgccaggccagaaacagtgaccaatgatgatgaagaggcccttgacgaggagactaagcgaagggatcagatgatcaaaggtgccattgaggtcctgatcagggagtatagctccgagttgaatgcccccagtcaggagtcggactcccaccctcgtaagaagaaaaaagagaaaaaggaggacattttccgcagatttcctgtagcccctttgatcccttatcccctgattaccaaggaagacattaacgccatcgagatggaggaggataaacgtgatctaatctcccgagagatctccaaattcagagacacccacaaacgctcatatggcgattag

SEQ ID NO: 332350 - DNA, 732 bp, Artificial Sequence
  derived and/or modified sequence
atgtccttccctcctcacctcaatcggcccccaatgggaatacccgcattgccacctggcattccaccaccccagttcccaggcttcccccctcctgtgcctccggggacacctatgatccctgtacccatgtccatcatggctcccgcaccaacagtgttggtccccactgtgtctatggtgggcaaacacctgggtgcacggaaggaccatcccggcctgaaagctaaggaaaacgacgagaactgcggcccaaccacaactgtctttgtgggtaatatatccgaaaaggctagcgatatgcttatccgccagttgctggccaaatgcggactagtactgtcatggaagcgcgtccagggagcctcaggaaaactgcaagccttcggattctgcgaatataaggagccagagagcactctacgcgcgctgcgtctgctacacgatctgcagatcggcgagaaaaagctcctggtgaaggtggatgctaaaacaaaagctcagctcgacgaatggaaggcgaagaaaaaagcaagtaatggcaatgcacggccagagaccgtcacaaatgacgacgaagaggcccttgacgaagagactaagcggcgggaccagatgattaagggtgctattgaagtgctgatccgtgagtattcatccgagttgaatgctcctagccaggaatctgactcccatccccgtaaaaaaaaaaaggaaaagaaagaagactag

SEQ ID NO: 332351 - DNA, 885 bp, Artificial Sequence
  derived and/or modified sequence
atgtccttcccccctcaccttaatagaccaccaatggggattcccgcacttcccccgggcatccccccgccgcaatttcctggctttccacctcccgtcccaccaggcactcccatgatcccagtgcccatgagtataatggcacctgcgccaaccgttttagtgcctaccgtatccatggtcggaaagcatcttggcgcaagaaaagatcatccaggtctgaaggcgaaagagaatgatgagaactgtggaccaacaaccacagtgtttgtgggcaacatttccgagaaggcaagtgacatgctcatccgccagctcttagccaagtgcggactcgtgcttagttggaaacgcgtgcaaggcgccagtggtaaactgcaggcattcggcttctgtgagtacaaggaaccagaaagcaccttgagggccctgagactgctccatgacctccagataggcgagaagaagctcttggtgaaggtcgacgccaaaacaaaggcccagctcgatgaatggaaggccaaaaagaaggcctctaacgggaacgcccgcccagagacggtgaccaatgacgatgaggaggctcttgatgaggagaccaagaggcgggatcagatgatcaagggcgcgattgaagtgctgatccgtgagtactcatcagagttgaatgctccatcccaagagtctgacagccatccccgaaaaaagaaaaaggaaaagaaagaagacatcttcagaagatttccagtggcacccttgatcccgtaccctctcatcacaaaggaagatatcaatgctatagagatggaagaggacaagcgggatctgatcagtagagaaatttcaaaatttagagatacccacaagcgctcctacggcgattag

SEQ ID NO: 332352 - DNA, 384 bp, Artificial Sequence
  derived and/or modified sequence
atgtccttccccccccacctgaaccggccccccatgggcatcccagccctgcccccaggcatccccccaccccagtttcctggcttccccccacctgtgcccccaggcacccccatgatccctgtgcccatgagcatcatggccccagcccccaccgtgctggtgcccaccgtgtccatggtgggcaagcacctgggcgccaggaaggaccaccctggcctgaaggccaaggaaaatgatgagaactgtggccccaccaccaccgtgtttgtgggcaacatcagcgagaaggccagtgacatgctgatccggcagctgctggccaagtgtggcctggtgctgtcctggaagagggtgcagggcgccagcggcaagctgcagtag

SEQ ID NO: 332353 - DNA, 903 bp, Artificial Sequence
  derived and/or modified sequence
atgtccttccccccccacctgaaccggccccccatgggcatcccagccctgcccccaggcatccccccaccccagtttcctggcttccccccacctgtgcccccaggcacccccatgatccctgtgcccatgagcatcatggccccagcccccaccgtgctggtgcccaccgtgtccatggtgggcaagcacctgggcgccaggaaggaccaccctggcctgaaggccaaggaaaatgatgagaactgtggccccaccaccaccgtgtttgtgggcaacatcagcgagaaggccagtgacatgctgatccggcagctgctggccaagtgtggcctggtgctgtcctggaagagggtgcagggcgccagcggcaagctgcaggccttcggcttctgtgagtacaaggagcctgagagcaccctgcgggccctgcggctgctgcatgacctgcagatcggggagaagaagctgctggtgaaggtggatgccaagaccaaggcccagctggatgagtggaaggccaagaagaaggccagcaatggaaatgcccggcctgagaccgtgaccaatgatgatgaggaggccctggatgaggagaccaagaggcgggaccagatgatcaagggggccatcgaggtgctgatccgggagtacagcagcgagctgaatgcccccagccaggagagtgacagccaccccaggaagaagaagaaggagaagaaggaggacatcttccgccgcttccctgtggcccccctcatcccctaccccctcatcaccaaggaggacatcaatgccatcgagatggaggaggacaagagggacctgatcagccgggagatcagcaagttccgggacacccacaaggtggtgttcctgtccttccacctgatccccatctag

SEQ ID NO: 332354 - DNA, 885 bp, Artificial Sequence
  derived and/or modified sequence
atgtccttccccccccacctgaaccggccccccatgggcatcccagccctgcccccaggcatccccccaccccagtttcctggcttccccccacctgtgcccccaggcacccccatgatccctgtgcccatgagcatcatggccccagcccccaccgtgctggtgcccaccgtgtccatggtgggcaagcacctgggcgccaggaaggaccaccctggcctgaaggccaaggaaaatgatgagaactgtggccccaccaccaccgtgtttgtgggcaacatcagcgagaaggccagtgacatgctgatccggcagctgctggccaagtgtggcctggtgctgtcctggaagagggtgcagggcgccagcggcaagctgcaggccttcggcttctgtgagtacaaggagcctgagagcaccctgcgggccctgcggctgctgcatgacctgcagatcggggagaagaagctgctggtgaaggtggatgccaagaccaaggcccagctggatgagtggaaggccaagaagaaggccagcaatggaaatgcccggcctgagaccgtgaccaatgatgatgaggaggccctggatgaggagaccaagaggcgggaccagatgatcaagggggccatcgaggtgctgatccgggagtacagcagcgagctgaatgcccccagccaggagagtgacagccaccccaggaagaagaagaaggagaagaaggaggacatcttccgccgcttccctgtggcccccctcatcccctaccccctcatcaccaaggaggacatcaatgccatcgagatggaggaggacaagagggacctgatcagccgggagatcagcaagttccgggacacccacaagaggagctatggagactag

SEQ ID NO: 332355 - DNA, 732 bp, Artificial Sequence
  derived and/or modified sequence
atgtccttccccccccacctgaaccggccccccatgggcatcccagccctgcccccaggcatccccccaccccagtttcctggcttccccccacctgtgcccccaggcacccccatgatccctgtgcccatgagcatcatggccccagcccccaccgtgctggtgcccaccgtgtccatggtgggcaagcacctgggcgccaggaaggaccaccctggcctgaaggccaaggaaaatgatgagaactgtggccccaccaccaccgtgtttgtgggcaacatcagcgagaaggccagtgacatgctgatccggcagctgctggccaagtgtggcctggtgctgtcctggaagagggtgcagggcgccagcggcaagctgcaggccttcggcttctgtgagtacaaggagcctgagagcaccctgcgggccctgcggctgctgcatgacctgcagatcggggagaagaagctgctggtgaaggtggatgccaagaccaaggcccagctggatgagtggaaggccaagaagaaggccagcaatggaaatgcccggcctgagaccgtgaccaatgatgatgaggaggccctggatgaggagaccaagaggcgggaccagatgatcaagggggccatcgaggtgctgatccgggagtacagcagcgagctgaatgcccccagccaggagagtgacagccaccccaggaagaagaagaaggagaagaaggaggactag

SEQ ID NO: 332356 - DNA, 384 bp, Artificial Sequence
  derived and/or modified sequence
atgagcttccccccccacctgaaccggccccccatgggcatccccgcattgccccccggcataccacccccgcagttccccggcttccctcccccagtgccacccgggaccccaatgattccagtgcccatgtctattatggcccccgcgccaaccgtgctggtccccactgtctctatggtgggcaaacacttgggagctcggaaagaccatccaggtctgaaagccaaagaaaacgacgagaactgcggtcccactacaacagtgttcgtcgggaacatctcagaaaaggcctcagacatgctgatccgccaactgttagcaaagtgcggactggttttaagctggaagcgcgtgcagggtgctagcggaaagttgcagtag

SEQ ID NO: 332357 - DNA, 903 bp, Artificial Sequence
  derived and/or modified sequence
atgagcttccccccccacctgaaccggccccccatgggcatccccgcccttccaccaggtattccacccccacagttcccaggtttcccaccgcccgttcctcctgggacacccatgatccctgtccctatgagtatcatggcacctgcacccaccgtattggtgcctaccgtgtctatggtcggaaaacaccttggtgctagaaaagaccaccccgggctgaaggccaaggagaatgacgaaaactgtgggccgaccactacggtgttcgtgggtaatatctcagaaaaagcctccgacatgctcatccggcaacttctcgccaaatgtggcttggtactttcttggaaacgcgttcaaggagcttccggcaagctgcaggcctttggcttctgcgagtacaaggaacctgagagtacactgagggctctccggttgctacatgacctccaaatcggagagaagaagctgttagtgaaagttgacgccaagaccaaggcccaactggacgagtggaaagctaagaaaaaagcatctaacgggaatgccagacccgagaccgtgacaaatgatgatgaggaagccctggacgaggagacgaagcgacgcgaccagatgatcaaaggtgctatagaagttctaatcagggaatactcttctgagcttaacgccccaagccaggagtccgacagccatcctaggaaaaaaaaaaaggagaaaaaagaagacatctttcgtcgctttcccgttgcacccctgatcccttaccccttgattactaaagaagatatcaacgcaatcgagatggaggaggataagcgagaccttatttcccgtgaaatttccaaatttcgggatacccacaaagtagtttttctgagttttcacctcatccctatttag

SEQ ID NO: 332358 - DNA, 885 bp, Artificial Sequence
  derived and/or modified sequence
atgagcttccccccccacctgaaccggccccccatgggcatccccgccctgcctcctggcatcccacctccccaattccctggatttccaccgcctgtaccacctggaacacctatgatcccggtgcccatgagtatcatggcccccgcacctacggttctggttccaacggtgagcatggtcggcaagcatctcggagctcggaaagatcaccccgggctgaaggctaaggagaatgatgagaactgtggcccaactactaccgtgtttgtcggcaatatatccgagaaggcctccgatatgctaattaggcagctgctggcgaagtgcggcttggttctgtcttggaagagggtccagggcgcaagcggcaagctgcaggccttcggattctgtgagtacaaggagcctgagagcaccctgcgtgccttgaggctcctacatgacctgcagatcggggagaaaaaactgttggtcaaagtcgacgcaaaaacgaaagcccaactcgacgagtggaaagcaaaaaaaaaagccagcaacggtaacgcccgacccgaaacagtgacaaatgacgacgaggaggccttggatgaagagactaagaggagagaccagatgatcaagggggcgatcgaggtgctcataagggagtacagttccgagctgaatgccccctcccaggagtcggacagtcaccccagaaaaaagaagaaagaaaagaaggaagatatcttcagaagatttccggtggcccccctgattccctaccctctcattacgaaggaagacatcaacgcaattgaaatggaagaggacaagcgagacctgatttcaagagagatttcaaagtttcgcgacacccacaagagatcctacggcgattag

SEQ ID NO: 332359 - DNA, 732 bp, Artificial Sequence
  derived and/or modified sequence
atgagcttccccccccacctgaaccggccccccatgggcatccccgccttgccccccgggatccccccaccacagtttcctgggtttcctccgccggtgccccccggcacacccatgattccggtgccaatgtctatcatggcacccgctcccacagtgctcgtgcctacagtttctatggtgggtaagcacctcggcgcccgaaaagatcacccaggactaaaagccaaagagaatgacgaaaattgtggacctacaaccacggtatttgttgggaacatttccgaaaaggccagtgacatgctgatcaggcagttgctcgccaagtgcggactcgttttgagttggaagcgtgttcagggcgcttccggtaagctgcaggcatttgggttttgcgagtacaaagagccagagtccaccttgcgtgctcttcgcctgctgcacgacctgcagattggagaaaagaaacttctcgtcaaagtcgacgcaaagactaaagcacaactggatgaatggaaggctaaaaagaaggcgtccaatggtaacgcccgccctgagaccgtgacaaatgacgatgaggaggccctagatgaagaaacaaagagaagggaccaaatgatcaaaggagctatagaagtcctgattcgggagtacagctccgagctgaatgccccatcccaggagtctgattctcatcctcgcaagaagaaaaaggagaagaaggaagattag

SEQ ID NO: 332360 - DNA, 885 bp, Artificial Sequence
  derived and/or modified sequence
atgagcttccccccccacctgaaccggccccccatgggcatccccgcactgcccccagggatccctccccctcagtttcctggcttccctccaccagttccacctggcacacccatgattccggtgcctatgtcaataatggcccccgcaccaaccgtgctcgttcccactgttagcatggtgggaaaacatctgggcgcacgcaaagaccacccaggcttgaaggccaaggagaacgatgagaattgcgggcctaccacgactgtattcgtcggaaatatttccgaaaaggcatcagacatgctgatcaggcagctcctagccaagtgtggattggtactgagttggaaaagggtgcagggcgcttccggaaagttgcaggcgttcggcttttgtgaatataaggaacccgaaagcacgctccgggccctgagacttctgcacgacttacagataggagaaaagaaactcctggtaaaagtagacgctaaaaccaaggcccagctggacgaatggaaagctaagaagaaggccagcaacggtaacgctcgacccgaaactgtgactaatgatgatgaggaggccctggatgaagaaacaaaacggagagatcaaatgattaagggcgcaatcgaggtcctgatccgggaatactcaagtgagctgaacgcccctagtcaggagtctgatagccaccccaggaagaaaaagaaggagaagaaggaggacatctttcgacgcttcccagttgccccactgattccataccctctcataaccaaagaggacattaatgccattgaaatggaggaggataagcgtgatcttatcagcagagagatttccaaatttcgggacacccataagcggtcttacggcgattag

SEQ ID NO: 332361 - DNA, 384 bp, Artificial Sequence
  derived and/or modified sequence
atgtccttcccacctcacctcaacaggcccccaatgggcatccctgccctgcccccaggtatcccgcctccacagtttcccggttttccacctcctgtgccccctgggactcccatgatcccagtacccatgtccattatggctcccgctcccactgtcctcgtgcccactgtatcgatggtggggaagcatttaggagcaaggaaggatcatccgggtctcaaggctaaggagaatgacgaaaactgcgggccaacaactaccgtgttcgtcgggaacatctccgagaaagcgtccgatatgctgatccgccaactgctggccaagtgcggcttggtgttgagctggaagagagttcaaggggcatctggtaagttacaatag

SEQ ID NO: 332362 - DNA, 903 bp, Artificial Sequence
  derived and/or modified sequence
atgtcatttccccctcacctgaaccgccctcctatgggtattccagccctccccccaggcatccccccaccccaatttcccggattcccgccacccgttccccctgggacccccatgatccccgtgcctatgtcaatcatggcccctgctccgacagtgctggtcccaacagtgtccatggttggcaagcaccttggcgctcggaaggaccaccccggtctgaaggccaaggagaatgatgagaattgcgggccaactacaaccgtcttcgtagggaatatcagcgaaaaagcttctgatatgctgataagacagcttttggcaaaatgcgggttggtgctgagctggaaacgggtccagggggcatcgggcaaactgcaggcctttgggttctgcgagtacaaggagcctgaatccactctccgcgcattacgtctgctgcacgatcttcagatcggtgagaaaaaacttctggtgaaggtagacgccaaaacgaaggcccagcttgacgagtggaaggccaagaaaaaagcttctaatggcaatgcccgaccagaaaccgtcacaaacgatgatgaggaggcccttgacgaggaaacgaagcggagggatcagatgataaaaggggctatcgaagtgcttattagagaatactcctcagaactcaatgctccttcccaggagagcgacagccatccaagaaaaaaaaaaaaggaaaagaaagaagacatattcaggcgctttccagtagcacctttgatcccatatccgctaataaccaaagaagatattaacgccatcgagatggaggaggataaaagggacctgatctcccgtgaaattagcaaatttcgtgacactcacaaggttgtgtttctaagcttccatctcatccctatctag

SEQ ID NO: 332363 - DNA, 885 bp, Artificial Sequence
  derived and/or modified sequence
atgtcattcccacctcacctgaatcggccaccaatggggatcccggcactgcctccgggtatccctcccccacagtttcctggtttccccccaccggtcccacccggaacgcccatgatccctgtccccatgtccataatggcgccagctcccacggtcctcgtccccacagtgtccatggtcggaaagcacctgggcgcacggaaggaccacccgggtctgaaggccaaggagaatgacgaaaattgcggtccgaccactaccgtcttcgtcggcaatatatctgagaaagcctctgatatgttgatccgccagttgctcgcaaagtgtgggcttgtcctttcttggaagagagtacagggggcaagtggtaagctgcaggccttcggcttttgcgaatacaaggagcccgagtccactctgcgtgccctccgactactgcacgacctccagattggggagaagaaacttctggtcaaagtggatgctaaaaccaaagctcaactggatgaatggaaggcgaaaaagaaagcttcaaatggtaatgcacgacccgaaacggttacaaacgacgacgaagaggccctggacgaggagacaaaacgcagagaccaaatgattaagggtgctattgaggtcctgatccgggagtattcttccgaattgaacgccccatctcaggaatcagattcgcaccctcgcaaaaagaagaaagagaaaaaggaagatattttccgacgctttcctgtcgcaccgttgatcccgtatccactcatcaccaaagaggacattaacgcgattgagatggaggaggacaaaagagacctcatttcccgtgaaatcagcaaattccgcgacacccacaaaagatcttatggagattag

SEQ ID NO: 332364 - DNA, 732 bp, Artificial Sequence
  derived and/or modified sequence
atgagcttccctcctcatctgaatcgcccaccaatgggcatccctgccctcccgccaggcatcccccctccccagtttccaggattccctccacctgttcctccgggaacacctatgatcccagtgccgatgtcgataatggctcccgctccaacggtgctggtacccactgtcagcatggtaggaaaacatctcggcgcacgtaaggaccaccccggattgaaggctaaagagaacgatgagaactgtggtcctacgaccacagtgtttgttggaaatatctccgagaaagcgtctgacatgctcattaggcagctgctcgccaagtgcgggctggtcctgagctggaagagagtgcagggcgcttccgggaagcttcaggcctttggattctgtgagtacaaggagccagaatcgaccctgcgtgcattaaggttactccacgatttgcagatcggcgaaaagaagctgcttgttaaggtggacgcaaagacaaaggcgcagcttgacgagtggaaggctaaaaaaaaggcctccaacggaaacgctagaccagaaactgtgactaatgatgatgaggaagcgctagacgaggagaccaagcgtcgcgatcagatgattaaaggcgctatcgaagtgctgattcgtgaatactcatcagaactcaacgccccttctcaggagtcagattcacaccccagaaagaaaaaaaaggagaagaaggaggattag

SEQ ID NO: 332365 - DNA, 885 bp, Artificial Sequence
  derived and/or modified sequence
atgagctttcccccacacttgaataggccccctatgggcattccagccctcccaccaggcatcccaccaccccaatttcccggtttccctcccccagtacctccaggaacgccaatgatcccagtgcccatgagcataatggcaccggctccaacggtcctagtcccaaccgtctcgatggtcgggaagcatcttggcgctagaaaggatcaccctggattaaaggccaaagaaaacgacgaaaattgcggcccaaccaccaccgtcttcgtggggaacataagtgagaaggctagcgatatgctaattcgacagctgcttgccaagtgcggcctggttttgagctggaaaagagtgcagggcgcaagcggcaagctgcaggcgtttggattctgtgaatataaggagccagaatcaaccctacgggctctgcggctcctgcacgatctgcagattggagagaaaaagctgctggtgaaagtggacgccaaaacaaaggcccagcttgatgaatggaaggcgaagaaaaaagcctccaatggcaatgcaagaccagagaccgtcaccaacgatgatgaagaggcactagacgaggagactaagcgtcgcgaccagatgatcaaaggagcaatcgaagtccttatccgggaatactctagcgaattaaatgccccttcccaggagtccgactcccacccacggaagaagaagaaagagaagaaggaggatatttttagaaggtttcccgtcgcccctttaatcccatatcctctcatcacaaaagaggacattaacgccattgaaatggaggaggataagagagacctgatatctagagagatctccaagttccgggacactcacaaaagaagctacggcgattag

SEQ ID NO: 332366 - DNA, 384 bp, Artificial Sequence
  derived and/or modified sequence
atgagcttccccccccacctgaacagaccccccatgggcatccccgccctgccccccggcatcccccccccccagttccccggcttccccccccccgtgccccccggcacccccatgatccccgtgcccatgagcatcatggcccccgcccccaccgtgctggtgcccaccgtgagcatggtgggcaagcacctgggcgccagaaaggaccaccccggcctgaaggccaaggagaacgacgagaactgcggccccaccaccaccgtgttcgtgggcaacatcagcgagaaggccagcgacatgctgatcagacagctgctggccaagtgcggcctggtgctgagctggaagagagtgcagggcgccagcggcaagctgcagtag

SEQ ID NO: 332367 - DNA, 903 bp, Artificial Sequence
  derived and/or modified sequence
atgagcttccccccccacctgaacagaccccccatgggcatccccgccctgccccccggcatcccccccccccagttccccggcttccccccccccgtgccccccggcacccccatgatccccgtgcccatgagcatcatggcccccgcccccaccgtgctggtgcccaccgtgagcatggtgggcaagcacctgggcgccagaaaggaccaccccggcctgaaggccaaggagaacgacgagaactgcggccccaccaccaccgtgttcgtgggcaacatcagcgagaaggccagcgacatgctgatcagacagctgctggccaagtgcggcctggtgctgagctggaagagagtgcagggcgccagcggcaagctgcaggccttcggcttctgcgagtacaaggagcccgagagcaccctgagagccctgagactgctgcacgacctgcagatcggcgagaagaagctgctggtgaaggtggacgccaagaccaaggcccagctggacgagtggaaggccaagaagaaggccagcaacggcaacgccagacccgagaccgtgaccaacgacgacgaggaggccctggacgaggagaccaagagaagagaccagatgatcaagggcgccatcgaggtgctgatcagagagtacagcagcgagctgaacgcccccagccaggagagcgacagccaccccagaaagaagaagaaggagaagaaggaggacatcttcagaagattccccgtggcccccctgatcccctaccccctgatcaccaaggaggacatcaacgccatcgagatggaggaggacaagagagacctgatcagcagagagatcagcaagttcagagacacccacaaggtggtgttcctgagcttccacctgatccccatctag

SEQ ID NO: 332368 - DNA, 885 bp, Artificial Sequence
  derived and/or modified sequence
atgagcttccccccccacctgaacagaccccccatgggcatccccgccctgccccccggcatcccccccccccagttccccggcttccccccccccgtgccccccggcacccccatgatccccgtgcccatgagcatcatggcccccgcccccaccgtgctggtgcccaccgtgagcatggtgggcaagcacctgggcgccagaaaggaccaccccggcctgaaggccaaggagaacgacgagaactgcggccccaccaccaccgtgttcgtgggcaacatcagcgagaaggccagcgacatgctgatcagacagctgctggccaagtgcggcctggtgctgagctggaagagagtgcagggcgccagcggcaagctgcaggccttcggcttctgcgagtacaaggagcccgagagcaccctgagagccctgagactgctgcacgacctgcagatcggcgagaagaagctgctggtgaaggtggacgccaagaccaaggcccagctggacgagtggaaggccaagaagaaggccagcaacggcaacgccagacccgagaccgtgaccaacgacgacgaggaggccctggacgaggagaccaagagaagagaccagatgatcaagggcgccatcgaggtgctgatcagagagtacagcagcgagctgaacgcccccagccaggagagcgacagccaccccagaaagaagaagaaggagaagaaggaggacatcttcagaagattccccgtggcccccctgatcccctaccccctgatcaccaaggaggacatcaacgccatcgagatggaggaggacaagagagacctgatcagcagagagatcagcaagttcagagacacccacaagagaagctacggcgactag

SEQ ID NO: 332369 - DNA, 732 bp, Artificial Sequence
  derived and/or modified sequence
atgagcttccccccccacctgaacagaccccccatgggcatccccgccctgccccccggcatcccccccccccagttccccggcttccccccccccgtgccccccggcacccccatgatccccgtgcccatgagcatcatggcccccgcccccaccgtgctggtgcccaccgtgagcatggtgggcaagcacctgggcgccagaaaggaccaccccggcctgaaggccaaggagaacgacgagaactgcggccccaccaccaccgtgttcgtgggcaacatcagcgagaaggccagcgacatgctgatcagacagctgctggccaagtgcggcctggtgctgagctggaagagagtgcagggcgccagcggcaagctgcaggccttcggcttctgcgagtacaaggagcccgagagcaccctgagagccctgagactgctgcacgacctgcagatcggcgagaagaagctgctggtgaaggtggacgccaagaccaaggcccagctggacgagtggaaggccaagaagaaggccagcaacggcaacgccagacccgagaccgtgaccaacgacgacgaggaggccctggacgaggagaccaagagaagagaccagatgatcaagggcgccatcgaggtgctgatcagagagtacagcagcgagctgaacgcccccagccaggagagcgacagccaccccagaaagaagaagaaggagaagaaggaggactag

SEQ ID NO: 332370 - DNA, 4426 bp, Artificial Sequence
  derived and/or modified sequence
tggtgagtcagagccaacagcggagacgatctatatacgttcttctctatggttccgcgctccccgcccccggccgcagtgcacgccgggcaagaggaagacctccatcagctcgccgcgcagcgcggctgtatttgcggcctgtgcgagtaggcgcttgggcactcagtctccctggcgagcgacgggcagaaatctcgaaccagtggagcgcactcgtaacctggatcccagaaggtcgcgaaggcagtaccgtttcctcagcggcggactgctgcagtaagaatgtcttttccacctcatttgaatcgccctcccatgggaatcccagcactcccaccagggatcccacccccgcagtttccaggatttcctccacctgtacctccagggaccccaatgattcctgtaccaatgagcattatggctcctgctccaactgtcttagtacccactgtgtctatggttggaaagcatttgggcgcaagaaaggatcatccaggcttaaaggctaaagaaaatgatgaaaattgtggtcctactaccactgtttttgttggcaacatttccgagaaagcttcagacatgcttataagacaactcttagctaaatgtggtttggttttgagctggaagagagtacaaggtgcttccggaaagcttcaagccttcggattctgtgagtacaaggagccagaatctaccctccgtgcactcagattattacatgacctgcaaattggagagaaaaagctactcgttaaagttgatgcaaagacaaaggcacagctggatgaatggaaagcaaagaagaaagcttctaatgggaatgcaaggccagaaactgtcactaatgacgatgaagaagccttggatgaagaaacaaagaggagagatcagatgattaaaggggctattgaagttttaattcgtgaatactccagtgagctaaatgccccctcacaggaatctgattctcaccccaggaagaagaagaaggaaaagaaggaggacattttccgcagatttccagtggccccactgatcccttatccactcatcactaaggaggatataaatgctatagaaatggaagaagacaaaagagacctgatatctcgagagatcagcaaattcagagacacacataagaaactggaagaagagaaaggcaaaaaggaaaaagaaagacaggaaattgagaaagaacggagagaaagagagagggagcgtgaaagggaacgagaaaggcgagaacgggaacgagaaagggaaagagaacgtgaacgagaaaaggagaaagaacgggagcgggaacgagaacgggatagggaccgtgaccggacaaaagagagagaccgagatcgggatcgagagagagatcgtgaccgggatagagaaaggagctcagatcgtaataaggatcgcagtcgatcaagagaaaaaagcagagatcgtgaaagggaacgagagcgggaaagagagagagagagagaacgagagcgagaacgagaacgggagcgagagagagagcgagagagggaacgggagcgagaaagagaaaaagacaaaaaacgggaccgagaagaagatgaagaagatgcatacgaacgaagaaaacttgaaagaaaactccgagagaaagaagctgcttatcaagagcgccttaagaattgggaaatcagagaacgaaagaaaacccgggaatatgagaaagaagctgaaagagaagaagaaagaagaagagaaatggccaaagaagctaaacgactaaaagaattcttagaagactatgatgatgatagagatgaccccaaatattacagaggaagtgctcttcagaaaaggttgcgtgatagagaaaaggaaatggaagcagatgaacgagataggaagagagagaaggaggagcttgaggaaatcaggcagcgccttctggcagaagggcatccagatccagatgcagagctccagaggatggaacaagaggctgagaggcgcaggcagccacaaataaagcaagagccagaatcagaagaggaggaagaagaaaagcaagaaaaagaagaaaaacgagaagaacccatggaagaggaagaggagccagagcaaaagccttgtctgaaacctactctgaggcccatcagctctgctccatctgtttcctctgccagtggcaatgcaacacctaacactcctggggatgagtctccctgtggtattattattcctcatgaaaactcaccagatcaacagcaacctgaggagcataggccaaaaataggactaagtcttaaactgggtgcttccaatagtcctggtcagcctaattctgtgaagagaaagaaactacctgtagatagtgtctttaacaaatttgaggatgaagacagtgatgacgtaccccgaaaaaggaaactggttcccttggattatggtgaagatgataaaaatgcaaccaaaggcactgtaaacactgaagaaaagcgtaaacacattaagagtctcattgagaaaatccctacagccaaacctgagctcttcgcttatcccctggattggtctattgtggattctatactgatggaacgtcgaattagaccatggattaataagaaaatcatagaatatataggtgaagaagaagctacattagttgattttgtttgttctaaggttatggctcatagttcaccccagagcattttagatgatgttgccatggtacttgatgaagaagcagaagtttttatagtcaaaatgtggagattattgatatatgaaacagaagccaagaaaattggtcttgtgaagtaaaactttttatatttagagttccatttcagatttcttctttgccacccttttaaggactttgaatttttctttgtctttgaagacattgtgagatctgtaattttttttttttgtagaaaatgtgaattttttggtcctctaatttgttgttgccctgtgtactcccttggttgtaaagtcatctgaatccttggttctctttatactcaccaggtacaaattactggtatgttttataagccgcagctactgtacacagcctatctgatataatcttgttctgctgatttgtttcttgtaaatattaaaacgactccccaattattttgcagaattgcacttaatattgaaatgtactgtataggaaccaacatgaacaattttaattgaaaacaccagtcataaactattaccacccccactctcttttgatcagaaatggcaagcccttgtgaaggcatggagtttaaaattggaatgcaaaaattagcagacaatccattcctactgtatttctgtatgaatgtgtttgtgaatgtatgtgtaaaagtctttcttttccctaatttgctttggtggggtccttaaaacatttcccaactaaagaatagaattgtaaaggaaaagtggtactgttccaacctgaaatgtctgttataattaggttattagtttcccagagcatggtgttctcgtgtcgtgagcaatgtggtttgctaactggatggggttttcttattaataagatggctgcttcagcttctcttttaaaggaatgtggatcatagtgatttttccttttaattttattgctcagaaatgaggcatatcctaaaaatcctggagagctgtatttaatgcatttttgcactaattggtccttagtttaattctattgtatctgtttatttaacaaaaaattcatcataccaaaaagtgtaagtgaaaaccccctttaaaacaaaacaaaaaaatgaaataaaattaggcaaattgacagacagtgagagttttacaaacatgataggtattctgctcggcaatttgtaagtttacatgttatttaaggataaaggtaaatcattcaaggcagttaccaaccactaactatttgttttcatttttgtcttgtagaaggtttatatcttgttttaccttggctcattagtgtttaaaaatgtactgatgatgtgcttagagaaattcctggggctttcttcgttgtagatcagaatttcaccagggagtaaaattacctgaaaacgtaagaagttttaaacagcttttcacacaaattagatgcaactgttcccatgtctgagtacttatttaaaagaaaggtaaagattggcctgttagaaaaagcataatgtgagctttggattactggattttttttttttttaaacacacctggagaggacatttgaaaacactgttcttaccctcgaaccctgatgtggttccattatgtaaatatttcaaatattaaaaatgtatatatttgatcctggggactcatattctttcagaatcatgtaaataaatggcatcatgttgtaattgtgtggtgcatactagaaaagttaaaaatatgggctgaactttt

SEQ ID NO: 332371 - DNA, 3375 bp, Artificial Sequence
  derived and/or modified sequence
gaagacctccatcagctcgccgcgcagcgcggctgtatttgcggcctgtgcgagtaggcgcttgggcactcagtctccctggcgagcgacgggcagaaatctcgaaccagtggagcgcactcgtaacctggatcccagaaggtcgcgaaggcagtaccgtttcctcagcggcggggtctttctctgtctctcagcctcaagccatcctcctgcatcagcctcccaagtagttgggaccatagactgctgcagtaagaatgtcttttccacctcatttgaatcgccctcccatgggaatcccagcactcccaccagggatcccacccccgcagtttccaggatttcctccacctgtacctccagggaccccaatgattcctgtaccaatgagcattatggctcctgctccaactgtcttagtacccactgtgtctatggttggaaagcatttgggcgcaagaaaggatcatccaggcttaaaggctaaagaaaatgatgaaaattgtggtcctactaccactgtttttgttggcaacatttccgagaaagcttcagacatgcttataagacaactcttagctaaatgtggtttggttttgagctggaagagagtacaaggtgcttccggaaagcttcaagccttcggattctgtgagtacaaggagccagaatctaccctccgtgcactcagattattacatgacctgcaaattggagagaaaaagctactcgttaaagttgatgcaaagacaaaggcacagctggatgaatggaaagcaaagaagaaagcttctaatgggaatgcaaggccagaaactgtcactaatgacgatgaagaagccttggatgaagaaacaaagaggagagatcagatgattaaaggggctattgaagttttaattcgtgaatactccagtgagctaaatgccccctcacaggaatctgattctcaccccaggaagaagaagaaggaaaagaaggaggacattttccgcagatttccagtggccccactgatcccttatccactcatcactaaggaggatataaatgctatagaaatggaagaagacaaaagagacctgatatctcgagagatcagcaaattcagagacacacataagaaactggaagaagagaaaggcaaaaaggaaaaagaaagacaggaaattgagaaagaacggagagaaagagagagggagcgtgaaagggaacgagaaaggcgagaacgggaacgagaaagggaaagagaacgtgaacgagaaaaggagaaagaacgggagcgggaacgagaacgggatagggaccgtgaccggacaaaagagagagaccgagatcgggatcgagagagagatcgtgaccgggatagagaaaggagctcagatcgtaataaggatcgcagtcgatcaagagaaaaaagcagagatcgtgaaagggaacgagagcgggaaagagagagagagagagaacgagagcgagaacgagaacgggagcgagagagagagcgagagagggaacgggagcgagaaagagaaaaagacaaaaaacgggaccgagaagaagatgaagaagatgcatacgaacgaagaaaacttgaaagaaaactccgagagaaagaagctgcttatcaagagcgccttaagaattgggaaatcagagaacgaaagaaaacccgggaatatgagaaagaagctgaaagagaagaagaaagaagaagagaaatggccaaagaagctaaacgactaaaagaattcttagaagactatgatgatgatagagatgaccccaaatattacagaggaagtgctcttcagaaaaggttgcgtgatagagaaaaggaaatggaagcagatgaacgagataggaagagagagaaggaggagcttgaggaaatcaggcagcgccttctggcagaagggcatccagatccagatgcagagctccagaggatggaacaagaggctgagaggcgcaggcagccacaaataaagcaagagccagaatcagaagaggaggaagaagaaaagcaagaaaaagaagaaaaacgagaagaacccatggaagaggaagaggagccagagcaaaagccttgtctgaaacctactctgaggcccatcagctctgctccatctgtttcctctgccagtggcaatgcaacacctaacactcctggggatgagtctccctgtggtattattattcctcatgaaaactcaccagatcaacagcaacctgaggagcataggccaaaaataggactaagtcttaaactgggtgcttccaatagtcctggtcagcctaattctgtgaagagaaagaaactacctgtagatagtgtctttaacaaatttgaggatgaagacagtgatgacgtaccccgaaaaaggaaactggttcccttggattatggtgaagatgataaaaatgcaaccaaaggcactgtaaacactgaagaaaagcgtaaacacattaagagtctcattgagaaaatccctacagccaaacctgagctcttcgcttatcccctggattggtctattgtggattctatactgatggaacgtcgaattagaccatggattaataagaaaatcatagaatatataggtgaagaagaagctacattagttgattttgtttgttctaaggttatggctcatagttcaccccagagcattttagatgatgttgccatggtacttgatgaagaagcagaagtttttatagtcaaaatgtggagattattgatatatgaaacagaagccaagaaaattggtcttgtgaagtaaaactttttatatttagagttccatttcagatttcttctttgccacccttttaaggactttgaatttttctttgtctttgaagacattgtgagatctgtaattttttttttttgtagaaaatgtgaattttttggtcctctaatttgttgttgccctgtgtactcccttggttgtaaagtcatctgaatccttggttctctttatactcaccaggtacaaattactggtatgttttataagccgcagctactgtacacagcctatctgatataatcttgttctgctgatttgtttcttgtaaatattaaaacgactccccaattattttgcagaattgcacttaatattgaaatgtactgtataggaaccaacatgaacaattttaattgaaaacaccagtcataaactattaccacccccactctcttttgatcagaaatggcaagcccttgtgaaggcatggagtttaaaattggaatgcaaaaattagcagacaatccattcctactgtatttctgtatgaatgtgtttgtgaatgtatgtgtaaaagtctttcttttccctaatttgctttggtggggtcctt

SEQ ID NO: 332372 - DNA, 2532 bp, Artificial Sequence
  derived and/or modified sequence
atgtctttcccaccccacctgaatcgacccccaatgggaatccctgccctgcctccaggaatacccccccctcagtttcctggctttccccctcctgtcccacccgggactcccatgattcctgtgcctatgagcatcatggcgccagcaccgactgtgcttgtgccaactgtatccatggtgggtaaacacctcggcgctagaaaggaccatccagggctgaaggctaaggagaacgatgagaattgcggacccaccactaccgtgtttgtcggtaacatcagcgagaaggcttccgatatgcttatcaggcagctgctggcaaaatgtggactcgttttgagttggaagcgcgtgcagggagctagcgggaaactgcaggcattcggcttctgtgagtataaagaacctgagtctactcttagggccctgcgattgctgcatgacttgcagattggggagaaaaaacttctggtgaaggtggacgctaagaccaaggcccagctagatgaatggaaggccaaaaaaaaagcttctaacgggaacgcccggcccgagaccgttactaacgatgacgaggaagcgctggacgaggaaactaagaggagagaccagatgattaagggggcgatcgaagtcttaattagagagtatagctctgagttaaatgctccttcgcaggaaagtgactctcatcccagaaaaaaaaaaaaagagaagaaggaggacatctttcggcggttccccgtggccccactcataccttaccctctgattaccaaggaggacatcaacgcgatagagatggaagaagataagcgcgatctcatttcacgtgagatcagtaagtttagagatacccataagaagctggaggaggagaaggggaaaaaggagaaagaaagacaggagatcgagaaagaaaggcgcgagcgggagagggaacgagaacgggagagggagcggcgggaacgggaacgggagcgggagagggagcgcgagagagagaaggaaaaagaaagggagagggaacgtgagagggatagggatcgtgacagaaccaaggaacgtgatcgggatagggatagggagcgcgaccgggatagggacagggaacgcagcagcgacaggaacaaagataggtcccggagccgcgagaagagcagggacagggagagggagcgagagagagaacgcgagagagagcgagagcgggaaagagagagagaaagggagagggaaagggaaagggagagagaacgcgagagagagcgagaaaaggacaagaagcgtgacagggaggaggacgaggaagacgcctatgaacgccgcaaactggaacgaaaactccgagaaaaagaagccgcataccaagagcgactgaagaactgggagattcgggagcggaaaaaaacgagagagtatgaaaaagaggccgagagagaggaggaaagacgccgggagatggcgaaagaagcgaagagattgaaggagttcctagaggattatgatgacgatagagatgatcctaagtattacagagggagtgccctgcagaagagactccgcgatcgagaaaaggagatggaggccgatgaaagggaccggaaaagagagaaggaggagttagaggaaattcgacagcggttgcttgccgaagggcatccagaccctgatgccgaactgcaacgaatggagcaagaagctgagaggcgaaggcagcctcagattaaacaggaaccagagtccgaggaggaggaagaagaaaagcaagagaaggaagaaaagcgggaagaacccatggaagaagaagaggagcccgaacaaaagccctgtttgaagcccacgcttcgccctatatcatcagccccaagtgtctcctctgcaagcgggaatgccactccaaacacaccaggagatgagtctccatgcggcatcattataccacatgagaacagccccgatcagcagcagccagaagagcaccggccaaaaattggactttctttaaagctcggagcaagcaatagcccggggcagcctaactccgtgaagcggaaaaagctccccgttgactccgtattcaacaagtttgaagatgaggactccgacgacgtgcctcgcaagcgcaaactagtacctcttgattatggcgaggatgataagaacgccaccaagggcactgtgaacactgaagagaagcgaaagcacatcaagtcactcatcgaaaaaatccccacagctaaaccggagctcttcgcctaccctctcgattggagcattgttgactcgattctgatggaaaggcgaatcaggccatggatcaacaagaaaatcattgaatacattggcgaagaagaggccacactcgttgattttgtgtgttctaaggtaatggcccactcatcacctcaaagtatcttggacgacgtagcgatggtcctcgatgaagaggctgaagtcttcatcgtgaagatgtggcgactgctgatttacgaaacagaggctaaaaaaattgggctggttaaatag

SEQ ID NO: 332373 - DNA, 2532 bp, Artificial Sequence
  derived and/or modified sequence
atgtctttcccccctcacttaaatagaccacccatgggaattcctgccctgccacccggcataccgcccccacagtttcccgggttcccaccacctgtacctccaggcacccccatgattcccgttccaatgagtattatggctccggcacccacagtgctcgtccccaccgtcagcatggtcggcaagcacttgggcgctagaaaggatcacccaggcctgaaggccaaagagaacgatgagaactgcggtcctacaactacggtctttgtgggcaatattagtgagaaggcctctgatatgctcatacgacagctgctcgcaaaatgcgggctggtcctgtcctggaaaagagtgcaaggagctagcggcaagctgcaggccttcggtttttgtgagtacaaggaacctgaatcaacgttacgagctctgcgccttttacacgacctgcaaatcggagagaaaaagctgctggtaaaggttgatgccaagactaaggcccagctcgacgaatggaaagcaaaaaaaaaagcctcaaatgggaatgctaggcctgaaaccgtcaccaatgacgacgaggaggcacttgacgaggagacaaagcgtcgagaccagatgattaaaggggccatagaggtgctgataagagaatattcttcagagctgaatgccccatcccaggaatctgattcccaccccagaaagaaaaagaaggaaaagaaagaagatatttttcgccggtttcctgtggccccactcataccatacccactgattacaaaggaggacattaacgccattgaaatggaggaagataaaagagacttaatttcccgcgagatatcaaagttcagggatacgcacaagaagctggaggaggaaaaagggaaaaaggaaaaagaacgccaggagatcgaaaaggaacgaagggagagggagcgagagcgggagcgtgaacgcgagagacgggaacgtgaaagggagcgggagcgtgagcgggaacgcgaaaaggaaaaggagcgcgagagagaaagagaacgagatagagaccgggatagaactaaagagcgggaccgagatagagatcgggagagggaccgagacagggatcgtgagcggagttcggaccgcaataaagatcgatccagatctcgcgagaaatctcgcgaccgggaaagggagcgagagcgtgagcgggagagagaaagggaacgggagagagaaagggagcgcgagcgcgaaagggagagggagcgagagcgggagcgcgagcgcgagaaggacaaaaagcgagatcgcgaggaggatgaggaggacgcatacgagcggaggaaactcgagaggaagctgagagagaaagaggccgcataccaggagagactgaagaattgggaaatcagggagcgcaaaaagacccgcgagtacgaaaaggaagcggagagggaagaagagagacgtagggagatggctaaggaggctaaacgtctgaaggagtttttagaagactatgatgacgacagagacgaccctaagtactatagaggcagtgctctgcaaaagagactccgtgatcgcgaaaaagagatggaggccgatgagcgagacagaaagcgggaaaaggaagagctggaagaaatcagacagcggcttcttgcagaaggccaccctgacccggacgcagaacttcagcgcatggagcaggaggcagaaagaagaaggcaaccgcaaatcaagcaggagcccgagtcagaagaggaggaggaggagaaacaagagaaagaggaaaaacgggaagaacccatggaggaagaagaggaacctgaacagaaaccctgcttgaagcccaccctgaggcctatctcgtcagccccgagtgttagctccgcatctgggaacgccacacctaatactccgggagacgaatccccctgtggtattattattccccacgagaatagcccggatcaacagcagcccgaggagcacaggcccaagatcggcctgtctctgaagctgggagctagtaacagccccgggcagcccaacagcgttaaaaggaagaagctgccggtggattcggtgttcaacaaatttgaagacgaagattctgatgacgtgccccgcaagcgtaagctagtaccactggattacggcgaggacgacaaaaacgccactaagggtactgtcaatacagaagaaaaacggaagcatataaagtccctgatcgaaaagatccctactgcaaagcccgaactgttcgcctaccccttggactggtctatcgtcgacagcattctgatggaacgacggattcgaccctggattaataagaaaattattgaatatataggcgaagaagaggccaccctggttgatttcgtgtgctctaaggtcatggcccactcgagcccccaatcaattctggatgacgtcgccatggtactggacgaagaggccgaggtgttcattgtgaaaatgtggagattgcttatatatgagaccgaggctaaaaagatcggcctggtgaagtag

SEQ ID NO: 332374 - DNA, 2532 bp, Artificial Sequence
  derived and/or modified sequence
atgtccttccccccccacctgaaccggccccccatgggcatcccagccctgcccccaggcatccccccaccccagtttcctggcttccccccacctgtgcccccaggcacccccatgatccctgtgcccatgagcatcatggccccagcccccaccgtgctggtgcccaccgtgtccatggtgggcaagcacctgggcgccaggaaggaccaccctggcctgaaggccaaggaaaatgatgagaactgtggccccaccaccaccgtgtttgtgggcaacatcagcgagaaggccagtgacatgctgatccggcagctgctggccaagtgtggcctggtgctgtcctggaagagggtgcagggcgccagcggcaagctgcaggccttcggcttctgtgagtacaaggagcctgagagcaccctgcgggccctgcggctgctgcatgacctgcagatcggggagaagaagctgctggtgaaggtggatgccaagaccaaggcccagctggatgagtggaaggccaagaagaaggccagcaatggaaatgcccggcctgagaccgtgaccaatgatgatgaggaggccctggatgaggagaccaagaggcgggaccagatgatcaagggggccatcgaggtgctgatccgggagtacagcagcgagctgaatgcccccagccaggagagtgacagccaccccaggaagaagaagaaggagaagaaggaggacatcttccgccgcttccctgtggcccccctcatcccctaccccctcatcaccaaggaggacatcaatgccatcgagatggaggaggacaagagggacctgatcagccgggagatcagcaagttccgggacacccacaagaagctggaggaggagaagggcaagaaggagaaggagcggcaggagattgagaaggagcggcgggagcgggagcgggagcgggagcgggagcgggagcggcgggagcgggagcgggagcgggagcgggagcgggagcgggagaaggagaaggagcgggagcgggagcgggagcgggaccgggaccgggacaggaccaaggagcgggaccgggaccgggaccgggagcgggaccgggaccgggaccgggagaggagcagtgacaggaacaaggacaggagccgcagccgggagaagagccgggaccgggagcgggagcgggagcgggagcgggagcgggagcgggagcgggagcgggagcgggagcgggagcgggagcgggagcgggagcgggagcgggagcgggagcgggagaaggacaagaagagggaccgggaggaggatgaggaggatgcctatgaaagaaggaagctggagaggaagctgcgggagaaggaggccgcctaccaggagcggctgaagaactgggagatccgggagaggaagaagacccgggagtatgagaaggaggccgagcgggaggaggagcggcggcgggagatggccaaggaggccaagaggctgaaggagttcctggaggactatgatgatgacagagatgaccccaagtactaccggggcagcgccctgcagaagaggctgcgggaccgggagaaggagatggaggctgatgagcgggacaggaagcgggagaaggaggagctggaggagatccggcagaggctgctggccgagggccacccagaccctgatgctgagctgcagaggatggagcaggaggccgagcggcggcggcagccccagatcaagcaggagcctgagagcgaggaggaggaggaggagaagcaggagaaggaggagaagcgggaggagcccatggaggaggaggaggagcctgagcagaagccctgcctgaagcccaccctgcggcccatcagcagcgcccccagcgtgagcagcgccagcggaaatgccacccccaacaccccaggagatgagagcccctgtggcatcatcatcccccatgagaacagcccagaccagcagcagcctgaggagcaccggcccaagattggcctgagcctgaagctgggcgccagcaacagccctggccagcccaacagcgtgaagaggaagaagctgcctgtggacagcgtcttcaacaagtttgaagatgaagattctgatgatgtgcccaggaagaggaagctggtgcccctggactatggagaagatgacaagaatgccaccaagggcaccgtgaacacagaggagaagaggaagcacatcaagagcctcatcgagaagatccccacagccaagccagagctgtttgcctaccccctggactggagcatcgtggacagcatcctgatggagcggcgcatccggccctggatcaacaagaagatcatcgagtacatcggggaggaggaggccaccctggtggactttgtgtgcagcaaggtgatggcccacagcagcccccagagcatcctggatgatgtggccatggtgctggatgaggaggccgaggtgttcatcgtgaagatgtggaggctgctgatctatgaaacagaggccaagaagattggcctggtgaagtag

SEQ ID NO: 332375 - DNA, 2532 bp, Artificial Sequence
  derived and/or modified sequence
atgagcttccccccccacctgaaccggccccccatgggcatccccgctcttccacccgggatccctccaccgcagtttcctggatttcccccacccgtgccgcctggaaccccgatgatccccgttcccatgagtatcatggccccggcccccaccgtcctcgtaccaacagtgagcatggtaggcaagcacctaggtgcacggaaggaccacccgggtctgaaggcaaaggagaacgacgagaattgcggaccaaccactactgtgtttgtagggaatatcagtgagaaggccagcgatatgttgataagacagctgcttgcaaaatgcggacttgtgttgtcatggaagagggtgcaaggcgcgagcggcaaactgcaggcgtttgggttttgcgaatataaagagcccgaatccactcttagagccctgagattgctgcacgacctacagatcggcgaaaagaagttgttagtcaaggtcgatgctaaaactaaagcccagcttgacgaatggaaagccaagaaaaaggcctcaaacggaaatgcacgccctgaaactgtgaccaacgacgacgaagaggctctggacgaagagaccaaaaggcgagaccagatgattaagggcgctattgaggtacttatacgagagtatagctcagagctgaacgctccttcacaggagagcgattcccatccacggaagaagaagaaggaaaagaaggaagatattttccggcgtttcccggttgcgcccctgataccatatcctctgatcaccaaagaggacatcaatgcaatcgagatggaagaggataagagagatctgatcagccgcgagatatccaagttccgcgatactcataagaaactagaagaagaaaaaggcaaaaaggagaaagagagacaggaaatcgagaaagaaagacgggaacgtgagagggaacgtgagcgggagcgcgaacgacgcgagcgggaaagggagagggagcgtgagagggaaagagaaaaagaaaaggagcgcgaaagagagcgggaacgggaccgagatagggatcgcacgaaggagcgcgatagggaccgagacagggagagggaccgagatagagaccgcgagcgctccagcgataggaataaggatcgttcacgttcgcgtgagaaatcgcgcgatcgcgagcgggagagggagcgagagcgggaaagagagagagaacgcgagagggagagggagcgcgagagggagcgggaacgggaaagggaacgcgaaagagagcgggaaaaagacaaaaagcgtgatcgggaggaggatgaggaggacgcctacgaacgcagaaagttggaacgcaagcttcgagagaaggaagccgcatatcaggaacgcctgaaaaactgggagatacgcgaaagaaaaaaaactagagaatacgaaaaggaagctgagcgcgaagaggagagaagacgagaaatggcgaaagaggcaaaacgcctaaaagagttcttagaggattacgatgacgaccgtgacgaccctaagtactacaggggttctgctcttcaaaaaagactgagggatcgagaaaaagaaatggaagcggacgaacgtgatcggaaacgagaaaaggaggagttagaggagatacgccagcgtctcctggccgaggggcaccctgaccctgatgctgagctccagcgaatggagcaagaagccgagcggagacgtcagccacaaataaaacaagagcctgaatcagaggaagaagaggaagagaagcaggaaaaggaagaaaaacgggaagaacccatggaggaggaagaggaaccagagcagaaaccttgcctaaagcccactctgcggcccatatcttccgccccttcagtttcatctgcgagtggaaacgcgacaccgaatactcctggtgacgaatctccctgcggcatcattatcccccacgaaaacagtcccgatcagcaacagcctgaggagcaccgcccgaagattgggctctcgcttaagctcggagcctctaactccccaggacagcctaattcagtgaaacgcaaaaagctgcctgtcgattcagtgtttaataagtttgaagatgaggactccgacgacgtgcctcgtaaacgaaagctggttccccttgattacggcgaggatgacaaaaatgccacaaagggaactgtgaacaccgaggaaaaaagaaagcacattaagtccctgatagaaaaaatacctaccgcgaagcccgagctattcgcttaccctctagattggtccattgtggattctatcctgatggagaggagaattcgcccatggatcaacaaaaaaatcattgagtacatcggggaggaggaggccaccctcgtggattttgtttgctctaaagtaatggcccacagctctccccaatctatacttgacgatgtggctatggtactggacgaggaggcagaggtatttatcgtgaaaatgtggcggctcttaatctacgagaccgaagccaagaaaatcgggctcgtgaagtag

SEQ ID NO: 332376 - DNA, 2532 bp, Artificial Sequence
  derived and/or modified sequence
atgagcttccccccccacctgaaccggccccccatgggcatccccgctctgccaccaggaattccacccccacagtttcctggttttccgccccctgtgcctccagggactcccatgatcccagttcccatgagtataatggccccagcacccacagtgctggtgccaaccgtttccatggtgggaaagcatctaggcgccagaaaggaccaccccggactaaaagccaaggagaatgatgagaactgtggccctaccacaaccgtcttcgttggtaatatttctgagaaggcttcagatatgctgatcagacagctgttagccaaatgtggcctcgtgctgagctggaagagagtccagggtgcctctggcaagctgcaggccttcggcttctgcgaatataaagagccagagtctacactgcgggctctacgactgctacacgacctccaaattggggaaaagaaactcctggtgaaggtggacgccaaaaccaaagcgcagctggacgaatggaaggccaagaagaaagcctctaatgggaacgccaggcctgaaaccgtgacgaacgatgacgaagaagccctggatgaggagaccaagagaagggaccagatgataaaaggagcaattgaagtgttaatccgggagtactcttccgaactcaacgcgccttcccaggaatctgacagccaccctagaaagaaaaagaaagaaaaaaaggaggatattttccggaggtttcccgtggctcctctgataccttaccctctgattacaaaagaagacataaacgcaatcgagatggaagaggacaagcgtgatctgatcagccgtgagattagtaaattccgtgacacccacaagaaactggaggaggagaaggggaaaaaggaaaaagagagacaggagatagaaaaggagcgcagggagagggaaagggaacgggaaagagagcgggaacgcagggaaagagagcgggagagagagagggaaagggagagagaaaaggagaaagagcgggagagagagcgcgagcgggatcgggaccgtgataggacgaaggaacgggatcgcgatagggatcgtgagcgtgatagggatcgcgacagagaacggtctagcgatagaaataaagaccggagccgcagtagggagaagtccagagatcgcgagcgggaacgtgaaagagagcgcgaaagagaaagggagagagagcgtgagagagagcgggagagagagcgcgagcgtgagcgggagagagaacgggaacgggaaaaggataagaagcgtgacagggaggaggatgaggaagatgcgtatgagagaaggaagcttgagcgaaaacttcgcgagaaggaggccgcatatcaagagcgcctaaaaaactgggagatccgcgaacgaaagaagacccgagagtacgagaaagaagctgaaagggaggaggaaaggcgcagagagatggcaaaagaggcaaaacgcctcaaagagtttctggaggactacgatgacgatcgagatgacccaaaatactacagaggaagcgccctgcaaaagcgccttcgcgatcgggagaaagagatggaagccgatgagcgggaccgcaaacgggagaaggaagagctggaagaaatccggcaacgcctactagctgagggccaccctgatccagatgcggaactccagcggatggaacaggaggcagagcggcggcggcaaccacagatcaagcaagagcctgagtcggaagaggaggaggaagagaaacaggagaaggaggaaaagcgggaagaaccaatggaggaggaggaagaaccggaacagaagccttgcctgaagcctacactgaggcccatttcttcagctccctcagttagctctgcttcaggaaacgctacaccaaatacacctggcgatgagtcgccatgtggcattattatcccacatgagaactcaccggaccagcagcagcctgaggagcaccgccctaaaattggcctttctctgaagctcggggcttccaattctcctggccagcccaatagcgtaaagcgaaaaaaactccctgtcgatagtgtcttcaataagttcgaggatgaggactccgacgacgtgccgaggaagcgaaagctggtcccactcgattacggagaagacgacaagaacgctacaaaaggtacggtgaacactgaagaaaagaggaagcacattaagtccctcatcgaaaagattcctacggctaagcctgagctttttgcctacccattggattggtccattgtagacagcattctgatggaacggcgcattagaccttggattaataaaaaaatcatcgaatacattggagaggaggaagctactctcgtcgacttcgtctgttcaaaggttatggcccactcctccccacagtctatcctggacgacgttgctatggtactcgatgaagaagccgaagtttttattgtgaagatgtggcgactgctgatatatgaaacagaggcgaagaagattggacttgtcaaatag

SEQ ID NO: 332377 - DNA, 2532 bp, Artificial Sequence
  derived and/or modified sequence
atgagtttccctccacacctgaacaggcctccgatggggatcccagcattaccccctggtatccctccacctcaatttccaggattcccccctccagtaccacccggtaccccgatgatacccgttccaatgtccatcatggctcctgcccctaccgtcctggtgccgaccgtctcaatggtggggaagcacctgggcgcacgaaaagaccaccctggcttaaaagctaaggaaaatgacgaaaactgcggacccacaaccaccgtgttcgtcggcaacatctccgagaaagcttccgacatgctgataagacagctgctggccaaatgcggccttgtgctgtcatggaaaagggtgcagggagcctctgggaagctgcaggcattcgggttttgtgagtataaggaacctgaatccaccctgagggccctgagactgctgcacgatttgcagataggagagaagaagctgctcgtgaaagtggacgcgaagaccaaagctcagctcgacgagtggaaagctaagaagaaggccagcaacggcaacgcacgccctgagacagtgactaacgacgacgaagaggccctggatgaagaaactaagcggagggaccaaatgataaagggcgctatcgaggtgttgatccgggagtattcctctgaactgaatgctcctagccaggaatctgactcgcacccccgtaaaaagaagaaggagaagaaagaagacatcttcagacgttttcctgtcgccccactaattccatatcccctgattactaaagaggacatcaacgctatcgagatggaggaggataagcgagatttgatttcccgcgagatctctaagttcagagatacgcacaagaaactggaggaagagaaaggtaaaaaagagaaggagagacaggaaatcgagaaggaacgacgagaacgagaaagggaaagggagagagaacgggagaggagagaacgtgagcgggaaagagaacgggagcgtgagagggaaaaggagaaggagagggaaagagaaagagagagagatcgggatcgagaccgcaccaaggaaagagatagagacagagatcgggaaagagaccgcgatcgcgaccgtgaaagaagcagtgatcgcaacaaggatagatctcgcagtcgcgagaaatcgcgcgacagagagcgcgaacgagaacgcgagcgggaacgagagcgggaaagggaacgggagcgcgaacgtgagcgcgagagagaacgtgagcgcgagcgagagcgcgaacgggaaaaagacaagaaaagggacagagaggaggacgaggaagatgcctatgaaaggaggaaactggagagaaagctgcgcgaaaaggaggcggcttaccaggagcgtctgaagaattgggagatcagagagaggaaaaaaacccgagaatatgagaaggaagcagaaagggaggaggagaggagacgcgagatggccaaggaggccaaaaggttgaaggaattccttgaagactacgatgatgaccgcgacgacccaaagtattaccggggatccgccctccagaagagactgagggaccgagaaaaagagatggaagctgatgagcgcgatcgaaagagagaaaaggaagagctagaggagattaggcagaggctgctggctgagggtcaccctgaccccgacgcggaactccagaggatggagcaagaggcagagcggagaagacagccgcagattaaacaagagcctgagtcggaggaggaagaggaagagaaacaagagaaggaggagaagcgagaggagcctatggaggaggaggaagagcctgagcaaaaaccctgcctaaaaccaacgttaagacctatcagttccgcgccatccgtgagcagtgcctctggcaacgccaccccaaatacccctggagatgaaagtccctgcggcattattatcccccacgaaaactcccccgatcaacagcagcctgaggagcatcggcctaaaatcgggctcagccttaagttaggagcttcaaattctccaggacagcctaacagcgtgaaacgaaaaaagctgcccgtagattcggtgttcaataagtttgaggatgaggacagcgacgacgtaccacggaaacgcaaattggtgcctctggactatggggaggatgataaaaacgctaccaagggaactgtgaataccgaggaaaagagaaagcacatcaagtccctaattgaaaagattcctaccgccaagccagaactgtttgcatatccactcgactggtcaattgtggatagtatcctgatggagcgaagaatccgcccatggataaacaagaagatcatcgaatatatcggcgaagaggaagctacacttgtcgacttcgtgtgctcaaaggttatggcacattcctctccccagagcattcttgacgacgtggcaatggttttagacgaagaagccgaagtttttattgttaagatgtggcgcctcctgatatatgagaccgaggctaagaaaattggcctggtgaagtag

SEQ ID NO: 332378 - DNA, 2532 bp, Artificial Sequence
  derived and/or modified sequence
atgagcttccctcctcacttaaataggcctcctatggggatccccgcacttccccctggaataccccctccacaattccccggtttccctcctcctgtccccccaggaactccaatgatacccgtgcctatgtctattatggctccagccccaacggtattagtcccaacagtttcaatggtaggcaagcatttaggagctaggaaagaccatcctgggctgaaggctaaggaaaatgatgaaaactgtggccctacaactacggttttcgtcggcaacattagtgagaaggcctcagacatgctgattaggcaactactggccaagtgtggtttggtcctatcctggaaacgtgtccaaggagctagcggcaaactgcaggcattcggcttttgcgaatataaagaacctgaatctacccttcgggcactgcgcctgcttcatgacctgcagattggggaaaagaagttgcttgtgaaggttgacgccaagacaaaggctcagcttgacgaatggaaggccaagaagaaagcctctaatggaaatgcccgtcctgagaccgtgactaacgatgatgaagaagccttggatgaagaaactaagcgcagagatcagatgattaagggcgctattgaggtcctcatccgcgagtacagctccgaattgaacgcccctagtcaggaatcggattcccatcctcgaaaaaaaaagaaggagaagaaggaagatatctttaggagatttccggtcgctccactgatcccctatcccctcatcaccaaggaagatatcaatgccatcgagatggaggaagacaaacgggacctcatttccagagagattagcaaattcagagacacccataagaagctggaggaagaaaagggtaagaaagagaaggagcgccaggaaatcgagaaagaacggagagaaagggagcgagagagggaacgcgaacgcgaacgacgcgagagagagcgagagagagagagggaacgcgaacgagaaaaggagaaggaaagagagcgcgagcgagagcgggacagagatcgggaccgcacgaaggaacgcgacagggatcgcgaccgtgaacgcgacagggatcgggatagggagaggagcagtgaccggaataaggaccgtagtcggagtcgcgagaaatccagggacagggagagagaaagagaaagggaaagagagcgtgaaagagaacgggagagagaaagggaaagagaacgcgaaagagagagagaaagggagagggaaagggaacgtgagaaggacaagaagcgcgaccgcgaggaagacgaggaagacgcttatgaacggcgtaaactggagaggaaactgcgcgagaaagaagccgcataccaagagcgactgaagaattgggaaatacgagaacggaaaaagacacgagaatatgagaaggaagctgagcgcgaggaagagcggcgtcgcgagatggcgaaggaggcgaaacggctcaaggagttcttggaggattacgatgatgatcgggatgacccaaagtattaccgtggcagtgctctccagaagcggctgagggatagggagaaagaaatggaggctgatgaacgggatagaaaaagggagaaggaagagttggaggagatccgacagcgattattggccgagggtcatcccgatcctgatgcagagctgcagcggatggagcaagaggcagagcgacggcgacagccccagataaaacaggagcccgagagcgaggaggaggaggaagaaaagcaggaaaaggaagaaaagcgcgaggaaccgatggaagaagaggaagaacccgagcagaaaccctgtctgaagccaaccttgaggccgatctcgtccgccccatccgtgagctctgcctctggcaacgctacccccaacacccctggcgatgagtctccgtgtgggatcattattccacatgaaaacagccccgatcagcagcagccagaggaacatcgacccaagatcggcctctcactgaaactcggggcatcaaacagtccgggacagcccaacagcgtgaaacgcaagaagctgccggtggacagtgtgtttaataaatttgaagacgaggacagcgacgacgtgcctcggaaaaggaaactggtacctttagactacggtgaagatgataagaatgctacaaaagggacggtgaacacagaagaaaagcgcaaacatatcaaatcattgatcgaaaagatcccaacggccaaacccgagctgttcgcctacccactggactggtcaattgtcgacagtatcttaatggaaagacgcattagaccgtggattaataaaaagattattgaatacataggggaggaagaggcaaccctcgtggatttcgtatgttctaaggtcatggcacatagttcgccacagtccattttagacgatgttgcaatggtcttagatgaggaggccgaggtctttatcgtcaaaatgtggaggctcctgatctacgagactgaggcaaaaaagatcgggctagttaagtag

SEQ ID NO: 332379 - DNA, 2532 bp, Artificial Sequence
  derived and/or modified sequence
atgagcttccccccccacctgaacagaccccccatgggcatccccgccctgccccccggcatcccccccccccagttccccggcttccccccccccgtgccccccggcacccccatgatccccgtgcccatgagcatcatggcccccgcccccaccgtgctggtgcccaccgtgagcatggtgggcaagcacctgggcgccagaaaggaccaccccggcctgaaggccaaggagaacgacgagaactgcggccccaccaccaccgtgttcgtgggcaacatcagcgagaaggccagcgacatgctgatcagacagctgctggccaagtgcggcctggtgctgagctggaagagagtgcagggcgccagcggcaagctgcaggccttcggcttctgcgagtacaaggagcccgagagcaccctgagagccctgagactgctgcacgacctgcagatcggcgagaagaagctgctggtgaaggtggacgccaagaccaaggcccagctggacgagtggaaggccaagaagaaggccagcaacggcaacgccagacccgagaccgtgaccaacgacgacgaggaggccctggacgaggagaccaagagaagagaccagatgatcaagggcgccatcgaggtgctgatcagagagtacagcagcgagctgaacgcccccagccaggagagcgacagccaccccagaaagaagaagaaggagaagaaggaggacatcttcagaagattccccgtggcccccctgatcccctaccccctgatcaccaaggaggacatcaacgccatcgagatggaggaggacaagagagacctgatcagcagagagatcagcaagttcagagacacccacaagaagctggaggaggagaagggcaagaaggagaaggagagacaggagatcgagaaggagagaagagagagagagagagagagagagagagagagagagagaagagagagagagagagagagagagagagagagagagagagagaaggagaaggagagagagagagagagagagagagacagagacagagacagaaccaaggagagagacagagacagagacagagagagagacagagacagagacagagagagaagcagcgacagaaacaaggacagaagcagaagcagagagaagagcagagacagagagagagagagagagagagagagagagagagagagagagagagagagagagagagagagagagagagagagagagagagagagagagagagagagagagagagagaaggacaagaagagagacagagaggaggacgaggaggacgcctacgagagaagaaagctggagagaaagctgagagagaaggaggccgcctaccaggagagactgaagaactgggagatcagagagagaaagaagaccagagagtacgagaaggaggccgagagagaggaggagagaagaagagagatggccaaggaggccaagagactgaaggagttcctggaggactacgacgacgacagagacgaccccaagtactacagaggcagcgccctgcagaagagactgagagacagagagaaggagatggaggccgacgagagagacagaaagagagagaaggaggagctggaggagatcagacagagactgctggccgagggccaccccgaccccgacgccgagctgcagagaatggagcaggaggccgagagaagaagacagccccagatcaagcaggagcccgagagcgaggaggaggaggaggagaagcaggagaaggaggagaagagagaggagcccatggaggaggaggaggagcccgagcagaagccctgcctgaagcccaccctgagacccatcagcagcgcccccagcgtgagcagcgccagcggcaacgccacccccaacacccccggcgacgagagcccctgcggcatcatcatcccccacgagaacagccccgaccagcagcagcccgaggagcacagacccaagatcggcctgagcctgaagctgggcgccagcaacagccccggccagcccaacagcgtgaagagaaagaagctgcccgtggacagcgtgttcaacaagttcgaggacgaggacagcgacgacgtgcccagaaagagaaagctggtgcccctggactacggcgaggacgacaagaacgccaccaagggcaccgtgaacaccgaggagaagagaaagcacatcaagagcctgatcgagaagatccccaccgccaagcccgagctgttcgcctaccccctggactggagcatcgtggacagcatcctgatggagagaagaatcagaccctggatcaacaagaagatcatcgagtacatcggcgaggaggaggccaccctggtggacttcgtgtgcagcaaggtgatggcccacagcagcccccagagcatcctggacgacgtggccatggtgctggacgaggaggccgaggtgttcatcgtgaagatgtggagactgctgatctacgagaccgaggccaagaagatcggcctggtgaagtag

SEQ ID NO: 332380 - protein, 133 aa, Artificial Sequence
  derived and/or modified sequence
MGSKKLKRVGLSQELCDRLSRHQILTCQDFLCLSPLELMKVTGLSYRGVHELLCMVSRACAPKMQTAYGIKAQRSADFSPAFLSTTLSALDEALHGGVACGSLTEITGPPGCGKTQFCIMMSILATLPTNMGG

SEQ ID NO: 332381 - DNA, 1101 bp, Artificial Sequence
  derived and/or modified sequence
atgggcagcaagaagctgaagagagtgggcctgagccaggagctgtgcgacagactgagcagacaccagatcctgacctgccaggacttcctgtgcctgagccccctggagctgatgaaggtgaccggcctgagctacagaggcgtgcacgagctgctgtgcatggtgagcagagcctgcgcccccaagatgcagaccgcctacggcatcaaggcccagagaagcgccgacttcagccccgccttcctgagcaccaccctgagcgccctggacgaggccctgcacggcggcgtggcctgcggcagcctgaccgagatcaccggcccccccggctgcggcaagacccagttctgcatcatgatgagcatcctggccaccctgcccaccaacatgggcggcctggagggcgccgtggtgtacatcgacaccgagagcgccttcagcgccgagagactggtggagatcgccgagagcagattccccagatacttcaacaccgaggagaagctgctgctgaccagcagcaaggtgcacctgtacagagagctgacctgcgacgaggtgctgcagagaatcgagagcctggaggaggagatcatcagcaagggcatcaagctggtgatcctggacagcgtggccagcgtggtgagaaaggagttcgacgcccagctgcagggcaacctgaaggagagaaacaagttcctggccagagaggccagcagcctgaagtacctggccgaggagttcagcatccccgtgatcctgaccaaccagatcaccacccacctgagcggcgccctggccagccaggccgacctggtgagccccgccgacgacctgagcctgagcgagggcaccagcggcagcagctgcgtgatcgccgccctgggcaacacctggagccacagcgtgaacaccagactgatcctgcagtacctggacagcgagagaagacagatcctgatcgccaagagccccctggcccccttcaccagcttcgtgtacaccatcaaggaggagggcctggtgctgcaggagttctggcacatctgcatcagcggcttcagcatccagaacagactgaaggagaacgagagctag

SEQ ID NO: 332382 - DNA, 1101 bp, Artificial Sequence
  derived and/or modified sequence
atggggagcaagaagctcaaaagagtcggcctcagtcaggagctttgtgatcgtctgtcaaggcaccagattttgacatgtcaggattttttgtgccttagcccactcgagttgatgaaggtaacaggcctctcttacagaggcgtccatgagttactttgtatggtctcccgggcctgtgcgccaaagatgcaaacggcctatggcatcaaggcacagaggtctgcagatttctctcccgcttttttgagcacaacgctgtccgccctggatgaagccctccacggcggtgttgcatgtggctcgttgactgagatcacaggtcctccaggatgtggaaaaacccaattctgcattatgatgagcatattggctactctccctactaacatggggggcttagagggggccgtcgtctacattgacacggagagcgctttctccgcggaacggctcgttgaaatcgcagaatctaggtttcctcggtacttcaacaccgaagaaaagctgctgttgacatccagtaaggtgcacctgtacagggaactaacttgtgatgaggtgttgcagcgaatcgaatccctggaggaggagattatctccaagggaatcaagttggtaattctggatagcgtcgcgtctgtggtaagaaaggagtttgatgcacagctgcaagggaacctgaaagaacgcaacaaatttctggcacgcgaagccagctcgttgaagtatctggcagaagaattttcaattcctgtcattctcaccaatcagatcacaacacatttgagcggcgcgctcgctagccaggctgatctagtgtccccagccgatgacctcagtctgagcgaggggacttctgggtcatcatgtgtgattgccgcgttgggcaacacttggtcccattctgtaaatacacgtcttatactgcaataccttgactctgaaagacgacagatcctgatagcaaaaagccctctcgcaccgttcacatcatttgtgtatacgataaaggaggaaggcctggtgctgcaggagttttggcatatctgtatctctggattttccatccagaataggctgaaggagaacgagtcatag

SEQ ID NO: 332383 - DNA, 1101 bp, Artificial Sequence
  derived and/or modified sequence
atgggctctaagaagcttaaaagggtcggcctgtctcaggaactctgtgacaggctaagtcggcaccagatcctgacgtgccaggactttctgtgtctgtctcccctggaactcatgaaggttactgggctgtcatacaggggggtgcacgagttactgtgcatggtgtctagagcctgcgcgccgaaaatgcagacagcctatggtatcaaagcgcaaaggagtgcagatttcagccctgccttcctgtccacaaccctcagcgccctggatgaagcgttgcacggtggagtggcctgcggctctctgacggagattacaggacctccaggatgtgggaaaacacagttttgtatcatgatgtctattctggctactctgcccaccaatatggggggtctcgaaggggccgtagtctatatcgatacagagtcagcttttagcgcagagagactggtggaaatcgccgaaagccggtttcccaggtatttcaacaccgaggagaagctcctgctcacctccagtaaggtgcacctctaccgggagctaacctgcgacgaagtgctgcaaagaattgagtcccttgaggaggagattattagtaagggcatcaaattggtgattctggactccgttgcgtccgtggtgcgcaaagagtttgacgcccaattgcagggtaacctgaaagagcgaaataagtttctcgcacgggaggcgtcttcgctaaagtacttagcagaggagttctcaattcctgtaatattgaccaatcaaatcaccacccacttgtctggagcgctagccagtcaggcagatctggtcagtccagccgacgatttgtctctgtccgagggtacttctggctcaagctgcgttattgccgccctggggaatacttggagccactccgttaacacccgactgatcctgcagtacttagacagtgaaaggcgacaaatacttatcgctaagtcacccttagctccgtttacatccttcgtatacacaataaaagaagaggggctggtgctgcaggaattttggcacatctgcatctccggcttctctattcagaacaggctcaaggagaatgagtcgtag

SEQ ID NO: 332384 - DNA, 1101 bp, Artificial Sequence
  derived and/or modified sequence
atgggcagcaagaagctgaagagggtgggcctgagccaggagctgtgtgaccggctgagccgccaccagatcctgacctgccaggacttcctgtgcctgagccccctggagctgatgaaggtgacaggcctgagctaccggggcgtgcatgagctgctgtgcatggtgtcccgggcctgtgcccccaagatgcagacagcctacggcatcaaggcccagaggtctgctgacttcagccctgccttcctgagcaccaccctgagcgccctggatgaggccctgcatggaggagtggcctgtggcagcctgacagagatcactggacctcctggctgtgggaagacccagttctgcatcatgatgagcatcctggccaccctgcccaccaacatgggcggcctggagggcgctgtggtgtacatcgacacagaaagtgccttctctgctgagcggctggtggagattgctgagagccgcttcccccgctacttcaacacagaggagaagctgctgctgaccagcagcaaggtgcacctgtaccgggagctgacctgtgatgaggtgctgcagagaattgagagcctggaggaggagatcatcagcaagggcatcaagctggtgatcctggacagcgtggcctctgtggtgaggaaggagtttgatgcccagctgcagggcaacctgaaggagaggaacaagttcctggcccgggaggccagcagcctgaagtacctggccgaggagttcagcatccctgtgatcctgaccaaccagatcaccacccacctgagcggggccctggccagccaggccgacctggtgtccccagcagatgacctgagcctgtctgagggcaccagcggcagcagctgtgtgattgctgccctgggcaacacctggagccacagcgtgaacaccaggctcatcctgcagtacctggacagcgagcggcggcagatcctgattgccaagagccccctggcccccttcaccagctttgtgtacaccatcaaggaggagggcctggtgctgcaggagttctggcacatctgcatcagcggcttcagcatccagaaccggctgaaggaaaatgaaagctag

SEQ ID NO: 332385 - DNA, 1101 bp, Artificial Sequence
  derived and/or modified sequence
atgggcagcaagaagctgaagcgggtgggcctgagccaggagctgtgcgataggctctctaggcaccaaattttgacttgtcaggacttcctatgtctgtctccgctggaattaatgaaagtgactggactaagttaccgaggggtccacgagctgctttgcatggtgtctagggcctgcgctcccaagatgcagaccgcctacggcatcaaggcccagcgatctgcggattttagtcctgccttcctttctactaccctttccgcgctggatgaggctttacatggcggcgtagcttgcggctctctcacagaaatcacagggccccctggctgtggtaagacgcagttttgtattatgatgagcatcctcgcgacactgccgaccaacatgggcggccttgagggagccgtggtgtatattgacactgaatccgccttctctgcagaacgactcgtggagattgccgaatcacggttccctagatactttaacaccgaggagaagctgctcttaacctctagtaaagtgcacctgtaccgggagctaacctgtgatgaggtactgcagaggatcgaatcactggaggaggagattatcagtaaagggattaagctcgtgatccttgactcagttgcatccgttgtacggaaagagttcgatgctcaactccaggggaatctgaaagagaggaacaagttcttggcacgagaagcttccagtctgaaatatttggccgaggaatttagcattcccgtaattctaacaaaccagattactactcacctgtctggcgcgttagcctctcaagctgacctcgtgtctccggcggacgacctctctctttctgaagggacaagtgggtcttcttgcgttatagccgccttaggtaacacatggtctcactctgtgaatacgaggctgattctccagtacctggactcggagcgacgccaaatactgatcgctaaaagccccctggcaccattcacttcattcgtatacacaataaaggaggaaggtcttgtcctgcaggagttttggcatatatgcatctccgggttttcaatacagaaccgccttaaggaaaatgagagttag

SEQ ID NO: 332386 - DNA, 1101 bp, Artificial Sequence
  derived and/or modified sequence
atgggcagcaagaagctgaagcgggtgggcctgagccaggagctgtgtgataggctgagccgtcaccagattttaacttgccaggactttctgtgcttgtctccgctggagctcatgaaggtgaccgggctgagttatcgaggcgttcacgagctgctgtgtatggtgtctagggcctgtgctcccaagatgcagactgcttacgggataaaagcgcagagatccgccgacttctcgccagccttcctgagtactaccctgagcgctttggacgaagcactgcatggaggggtggcatgcgggagcttgacagaaataacaggccctccgggatgtggaaaaacgcagttctgcataatgatgtcaatactggctaccctacctacaaacatgggaggtctcgaaggcgctgttgtttacatcgatacagagtcagctttctctgctgagcgcctcgtggaaattgcagagagccgcttcccaagatacttcaataccgaagagaagctcttactgacctcctctaaggtccacctgtatagggagctgacgtgtgatgaagttttgcagcgaatagaaagccttgaagaagagatcatctccaaaggaattaaactggtgatattagattccgtagcttccgttgtcagaaaagagttcgatgcccagctgcaagggaatctaaaagaacgaaacaaattccttgctcgggaggccagtagcctcaaatatctcgcggaagagtttagcatccccgtcatactgacgaaccaaatcacaacacacctaagtggggccctggcatctcaggctgaccttgtttcacctgcggacgatctcagcttgtctgagggaacctctgggtcgagctgcgtgattgccgccttagggaatacgtggtcacatagtgtgaatacccgcctgatcctgcagtacctggattccgagcgccgccaaattcttatcgcgaaatctcccttagccccttttacatcattcgtgtatacaatcaaagaggaggggctggtgctgcaggagttctggcatatctgtattagtgggttctctattcagaaccggctcaaagagaacgaatcgtag

SEQ ID NO: 332387 - DNA, 1101 bp, Artificial Sequence
  derived and/or modified sequence
atgggctcaaagaagcttaaacgggttggcctgtctcaggaactctgtgatcgtctcagtagacaccagatcctaacctgtcaagacttcctctgcctaagtccgctggaacttatgaaggtgactggcctgtcttacagaggagtgcacgagctgctgtgcatggtctcccgagcctgtgccccaaagatgcagacagcatatgggattaaagcacaaagatccgctgacttttcacccgcattcctgtccacaaccttgtccgccctggacgaggctctgcacggcggtgtggcatgcgggtcactgactgagattaccggtccccctggctgcggcaaaacccagttttgcattatgatgtccattctggccaccttgccgactaatatgggaggactggaaggcgcagtcgtatacatagatactgaatccgctttttccgctgagcggctggtcgagattgcagagagtcgattcccacggtactttaacactgaagagaagctcctgttgacatcatctaaggtgcatctgtaccgcgaactgacgtgcgacgaggtgctgcagcgtattgaatctctggaagaggaaatcatcagcaaagggatcaaattggtgatcctggactccgtagcaagcgtggtgaggaaggaatttgacgctcagttacagggaaacctcaaagaacgcaacaaattccttgcgagagaggcctcttctttgaaatatttggcagaggaattctcgattcctgtaatattaactaatcagattacgacccacttaagtggagctctggcctctcaagccgacctggtgtcccccgctgacgatctgagcctgagcgaaggcacctccgggagctcctgtgtcattgcagctctgggcaacacgtggtcccactccgtcaacacccgcctgatcctccaatatctggattcggagcggaggcagattttaatagctaaatcccccctcgcgccttttacaagctttgtgtatacgattaaagaggagggactcgtgctccaggagttttggcacatctgtattagtggcttctccatccagaaccgcctgaaggagaacgagtcatag

SEQ ID NO: 332388 - DNA, 1101 bp, Artificial Sequence
  derived and/or modified sequence
atggggtccaaaaagttgaaaagggtcggcctctcccaggagttgtgcgacaggctgtcaaggcaccagatcctcacttgccaggatttcctctgtttatctcctctggaactaatgaaagtcaccggactatcttacagaggagtacacgagctgttgtgtatggtgtctcgcgcttgcgccccaaagatgcagacggcgtacggtatcaaggcgcagaggtccgccgacttttcccccgcattcctatccacaaccctaagtgcactggacgaagccttgcacggcggtgtcgcatgcggcagcctgaccgaaatcaccggtccaccgggttgcggaaagacccagttttgtattatgatgtccatccttgctaccctcccgactaatatgggtggacttgagggagctgtcgtgtatatcgatactgagagcgccttctctgcagagagactcgtggagatcgccgaatctaggttccctagatatttcaatacggaggagaagctgctgctgacaagttcgaaagtgcacctctatagggagttgacttgtgatgaggtcttgcaaaggattgaaagcctcgaagaagagatcataagcaaaggcattaaactggtgatcttggactcagtagcttcagtggtcaggaaggagttcgacgcccagttgcaggggaacctgaaggaacgtaataagtttctggctcgggaagcatcttctctgaaatacctcgccgaggagtttagcatccctgtgatccttaccaaccagatcaccacccatctgtcgggagccctagcttcgcaagctgacctggtctcccctgctgatgacctctcgctgtccgaggggacatccggaagctcctgcgttattgctgccctaggtaatacttggtcccacagtgttaatactcggctaattctgcaatatttggactccgagcgacggcagatcttgattgcaaaaagccctctggcgccatttacgtctttcgtatatactatcaaagaggaagggctcgtgctgcaagagttttggcatatttgcatttccgggtttagcatccagaatcgtctgaaggaaaacgagtcttag

SEQ ID NO: 332389 - DNA, 1101 bp, Artificial Sequence
  derived and/or modified sequence
atgggtagcaagaaactaaaacgagtgggtttatcacaagagctgtgtgaccgtctgagtagacatcagatccttacctgtcaggactttttatgtctttccccactggagcttatgaaggtgactggtctgagttatcgaggtgtccatgaacttctatgtatggtcagcagggcctgtgccccaaagatgcaaacggcttatgggataaaagcacaaaggtctgctgatttctcaccagcattcttatctactaccctttctgctttggacgaagccctgcatggtggtgtggcttgtggatccctcacagagattacaggtccaccaggttgtggaaaaactcagttttgtataatgatgagcattttggctacattacccaccaacatgggaggattagaaggagctgtggtgtacattgacacagagtctgcatttagtgctgaaagactggttgaaatagcagaatcccgttttcccagatattttaacactgaagaaaagttacttttgacaagtagtaaagttcatctttatcgggaactcacctgtgatgaagttctacaaaggattgaatctttggaagaagaaattatctcaaaaggaattaaacttgtgattcttgactctgttgcttctgtggtcagaaaggagtttgatgcacaacttcaaggcaatctcaaagaaagaaacaagttcttggcaagagaggcatcctccttgaagtatttggctgaggagttttcaatcccagttatcttgacgaatcagattacaacccatctgagtggagccctggcttctcaggcagacctggtgtctccagctgatgatttgtccctgtctgaaggcacttctggatccagctgtgtgatagccgcactaggaaatacctggagtcacagtgtgaatacccggctgatcctccagtaccttgattcagagagaagacagattcttattgccaagtcccctctggctcccttcacctcatttgtctacaccatcaaggaggaaggcctggttcttcaagaattttggcacatttgcatatctggtttctcaatccagaacagactaaaagaaaatgagtcctga

SEQ ID NO: 332390 - DNA, 1550 bp, Artificial Sequence
  derived and/or modified sequence
ttgaaagttggatgctgcagacccggcatgggtagcaagaaactaaaacgagtgggtttatcacaagagctgtgtgaccgtctgagtagacatcagatccttacctgtcaggactttttatgtctttccccactggagcttatgaaggtgactggtctgagttatcgaggtgtccatgaacttctatgtatggtcagcagggcctgtgccccaaagatgcaaacggcttatgggataaaagcacaaaggtctgctgatttctcaccagcattcttatctactaccctttctgctttggacgaagccctgcatggtggtgtggcttgtggatccctcacagagattacaggtccaccaggttgtggaaaaactcagttttgtataatgatgagcattttggctacattacccaccaacatgggaggattagaaggagctgtggtgtacattgacacagagtctgcatttagtgctgaaagactggttgaaatagcagaatcccgttttcccagatattttaacactgaagaaaagttacttttgacaagtagtaaagttcatctttatcgggaactcacctgtgatgaagttctacaaaggattgaatctttggaagaagaaattatctcaaaaggaattaaacttgtgattcttgactctgttgcttctgtggtcagaaaggagtttgatgcacaacttcaaggcaatctcaaagaaagaaacaagttcttggcaagagaggcatcctccttgaagtatttggctgaggagttttcaatcccagttatcttgacgaatcagattacaacccatctgagtggagccctggcttctcaggcagacctggtgtctccagctgatgatttgtccctgtctgaaggcacttctggatccagctgtgtgatagccgcactaggaaatacctggagtcacagtgtgaatacccggctgatcctccagtaccttgattcagagagaagacagattcttattgccaagtcccctctggctcccttcacctcatttgtctacaccatcaaggaggaaggcctggttcttcaagaattttggcacatttgcatatctggtttctcaatccagaacagactaaaagaaaatgagtcctgagattgctacagatgagacccacccatcggagccaggctttgaaggaactgaccgcagtgtgcatgaggaagtacttcacggtgatgaccctcgccaccctctcaggaaaacacagtgacctctcccccaacatccccttcccactcccaggtcccccggcaaaggcagaagaaccaagcaagcctttccaccaaagcagccatgaaccccattctcatcctttccaagaactctctgctataccagataggggtttggggttctgttttccattttttaaaaaaatcatttcaagactcttgaacagtgtgtcggtttacactattctatcttcttaagccaccatatcaacatattcactctgcttcctttcttttcatttggcagatgccacacttttaatggcagcaataaaaggtgtt

SEQ ID NO: 332391 - DNA, 402 bp, Artificial Sequence
  derived and/or modified sequence
atgggcagcaagaagctgaagagagtgggcctgagccaggagctgtgcgacagactgagcagacaccagatcctgacctgccaggacttcctgtgcctgagccccctggagctgatgaaggtgaccggcctgagctacagaggcgtgcacgagctgctgtgcatggtgagcagagcctgcgcccccaagatgcagaccgcctacggcatcaaggcccagagaagcgccgacttcagccccgccttcctgagcaccaccctgagcgccctggacgaggccctgcacggcggcgtggcctgcggcagcctgaccgagatcaccggcccccccggctgcggcaagacccagttctgcatcatgatgagcatcctggccaccctgcccaccaacatgggcggctag

SEQ ID NO: 332392 - DNA, 228 bp, Artificial Sequence
  derived and/or modified sequence
atgggcagcaagaagctgaagagagtgggcctgagccaggagctgtgcgacagactgagcagacaccagatcctgacctgccaggacttcctgtgcctgagccccctggagctgatgaaggtgaccggcctgagctacagaggcgtgcacgagctgctgtgcatggtgagcagagcctgcgcccccaagatgcagaccgcctacggcatcaaggcccagagaagctag

SEQ ID NO: 332393 - DNA, 402 bp, Artificial Sequence
  derived and/or modified sequence
atgggtagcaaaaaattaaagagggtgggactgtcacaagagctatgtgatcgcctgagtcgccaccagatattgacatgtcaggacttcctctgtctgtctcccctggaactcatgaaagttactggcctctcatatcgaggagttcacgagctgctatgcatggtttctagagcttgtgccccaaagatgcagaccgcctacggcatcaaggctcagagatctgccgacttttctccggcattcctatctaccaccctgagtgccctcgacgaggcactgcacggcggtgtggcatgtgggtcactaacagagatcaccgggccccccggctgtgggaaaacacagttctgtataatgatgagcatactcgcgacccttcctaccaacatggggggctag

SEQ ID NO: 332394 - DNA, 228 bp, Artificial Sequence
  derived and/or modified sequence
atgggctcgaaaaagctaaagcgcgtgggcctctcccaagagctgtgcgacaggctgagccgccaccagatcttgacgtgtcaggattttctgtgcctatcgccgcttgagttgatgaaggttaccggcctctcatataggggagtccacgagcttttatgtatggtatctagggcctgcgcccctaaaatgcagaccgcttatggaattaaagcccagcggtcctag

SEQ ID NO: 332395 - DNA, 402 bp, Artificial Sequence
  derived and/or modified sequence
atgggcagcaagaagctgaagagggtgggcctgagccaggagctgtgtgaccggctgagccgccaccagatcctgacctgccaggacttcctgtgcctgagccccctggagctgatgaaggtgacaggcctgagctaccggggcgtgcatgagctgctgtgcatggtgtcccgggcctgtgcccccaagatgcagacagcctacggcatcaaggcccagaggtctgctgacttcagccctgccttcctgagcaccaccctgagcgccctggatgaggccctgcatggaggagtggcctgtggcagcctgacagagatcactggacctcctggctgtgggaagacccagttctgcatcatgatgagcatcctggccaccctgcccaccaacatgggcggctag

SEQ ID NO: 332396 - DNA, 228 bp, Artificial Sequence
  derived and/or modified sequence
atgggcagcaagaagctgaagagggtgggcctgagccaggagctgtgtgaccggctgagccgccaccagatcctgacctgccaggacttcctgtgcctgagccccctggagctgatgaaggtgacaggcctgagctaccggggcgtgcatgagctgctgtgcatggtgtcccgggcctgtgcccccaagatgcagacagcctacggcatcaaggcccagaggagctag

SEQ ID NO: 332397 - DNA, 402 bp, Artificial Sequence
  derived and/or modified sequence
atgggcagcaagaagctgaagcgggtgggcctgagccaggagctgtgtgaccgactttcacgccatcagatcttaacatgtcaggacttcctgtgtctgtctcccctggaactgatgaaagtgacaggtctgtcctataggggcgtgcacgaacttctttgcatggtcagtagggcttgcgccccaaagatgcaaaccgcctacggcattaaggcacagcgaagtgcggatttctcccccgctttcctgagcaccacactcagcgcactcgacgaagccttgcacgggggggtggcttgcgggagcctgactgaaatcactggacctcccgggtgcggcaaaacacagttctgtatcatgatgtccattctcgccactctcccgacaaacatgggcggctag

SEQ ID NO: 332398 - DNA, 228 bp, Artificial Sequence
  derived and/or modified sequence
atgggcagcaagaagctgaagcgggtgggcctgagccaggagctgtgtgatcgactctcgcggcaccagatactcacctgccaagacttcctttgcctgtctccactggagttgatgaaagtgaccggtctaagttatcgaggcgtccacgaattgctatgtatggtgtcaagagcatgcgcccctaaaatgcagactgcctacggcataaaggcccagaggtcctag

SEQ ID NO: 332399 - DNA, 402 bp, Artificial Sequence
  derived and/or modified sequence
atgggaagcaaaaagttaaagagggtggggctttcacaagaactctgtgatagactctctcggcaccagattctcacctgccaagattttctgtgtctgtcccctctggaacttatgaaggtgacaggactcagctaccggggagtccacgaactcctgtgtatggtctcgcgggcatgtgctccaaaaatgcagaccgcctacggcatcaaggcacaaagaagcgccgatttttcacccgcttttctgtccaccacgttatccgccctcgacgaagcattacacgggggagtcgcttgtggatccctcaccgaaatcacaggtccacccggttgcggaaagacccagttttgcatcatgatgtctatcttggccaccctgcccaccaacatggggggatag

SEQ ID NO: 332400 - DNA, 228 bp, Artificial Sequence
  derived and/or modified sequence
atgggtagtaagaagctcaagcgagttggactctcgcaggagttgtgcgatagactctcaagacaccagatccttacctgtcaggatttcctttgcttatcacccttggaattgatgaaagttacaggcctgtcttatcgtggcgtgcacgagttactttgcatggtgtctcgggcttgtgctccgaagatgcagaccgcctatgggataaaggcacagaggtcttag

SEQ ID NO: 332401 - DNA, 568 bp, Artificial Sequence
  derived and/or modified sequence
cttggatccatgaagagttcctgtttcagttcgttccagaggatacttctttaccatctcaatgagatatacagcttctcctttgtatgcattaagagactcacagtaattcttttttagctctgtgaagataaatctttcatgagcctcatttacccctagcaaggcatgggtagcaagaaactaaaacgagtgggtttatcacaagagctgtgtgaccgtctgagtagacatcagatccttacctgtcaggactttttatgtctttccccactggagcttatgaaggtgactggtctgagttatcgaggtgtccatgaacttctatgtatggtcagcagggcctgtgccccaaagatgcaaacggcttatgggataaaagcacaaaggtctgctgatttctcaccagcattcttatctactaccctttctgctttggacgaagccctgcatggtggtgtggcttgtggatccctcacagagattacaggtccaccaggttgtggaaaaactcagttttgtataatgatgagcattttggctacattacccaccaacatgggaggat

SEQ ID NO: 332402 - DNA, 249 bp, Artificial Sequence
  derived and/or modified sequence
cttttctttgctggatctggaggcatgggtagcaagaaactaaaacgagtgggtttatcacaagagctgtgtgaccgtctgagtagacatcagatccttacctgtcaggactttttatgtctttccccactggagcttatgaaggtgactggtctgagttatcgaggtgtccatgaacttctatgtatggtcagcagggcctgtgccccaaagatgcaaacggcttatgggataaaagcacaaaggtct

SEQ ID NO: 332403 - protein, 95 aa, Artificial Sequence
  derived and/or modified sequence
MNFDFPFKKGSGIPLLTTNLSPQCLSLLHAMVAYDPDERIAAHQALQHPYFQEQRTQNGSEDEASAVLLPIQTRSSLNPLLSTCMLPGRSVTLLV

SEQ ID NO: 332404 - DNA, 288 bp, Artificial Sequence
  derived and/or modified sequence
atgaactttgacttcccttttaagaagggctccggcattccactcctcaccaccaatctttcgccccagtgtctatctttgctgcacgccatggtggcttacgatcctgacgagaggatcgccgcccatcaggctctgcagcatccctattttcaggaacagcgaactcaaaatggatctgaggatgaggcttccgccgtacttctgcctatccagaccagatcaagtttgaatcctttgctaagcacatgcatgctgcccggtaggagcgtgaccctgctggtctag

SEQ ID NO: 332405 - DNA, 288 bp, Artificial Sequence
  derived and/or modified sequence
atgaactttgacttccccttcaagaagggcagcggcatccccctgctgaccaccaacctgagcccccagtgcctgagcctgctgcacgccatggtggcctatgaccctgatgaaagaattgctgcccaccaggccctgcagcacccctacttccaggagcagaggacccagaatggaagtgaagatgaggccagcgctgtgctgctgcccatccagaccaggagcagcctgaaccccctgctgagcacctgcatgctgcccggccgctctgtgaccctgctggtgtag

SEQ ID NO: 332406 - DNA, 288 bp, Artificial Sequence
  derived and/or modified sequence
atgaacttcgacttccccttcaagaagggcagcggcatccccctgcttaccacaaacctaagcccgcagtgtctctcactgctccacgcgatggtggcatatgacccagatgagagaatcgcagctcaccaggccctgcagcacccctattttcaggagcagcgcacacagaatggctctgaagacgaggccagcgccgtattgctgcctatccaaacccgctcgtctcttaatcccctgctgagtacctgtatgctgccaggtcgctccgtcaccctgctggtatag

SEQ ID NO: 332407 - DNA, 288 bp, Artificial Sequence
  derived and/or modified sequence
atgaacttcgatttcccattcaaaaaaggaagtggaatcccgctgctcactaccaatctctccccacagtgcctgtccctacttcatgctatggtcgcttatgacccggatgaacggatagccgctcatcaggccctccaacacccttacttccaggagcagaggactcagaatggatcagaggacgaggcaagtgctgtcctgctgcccattcagaccagaagcagtctcaatccactgctgtcgacctgtatgttgccgggaagatcagtgacacttcttgtatag

SEQ ID NO: 332408 - DNA, 288 bp, Artificial Sequence
  derived and/or modified sequence
atgaacttcgacttccccttcaagaagggcagcggcatccccctgctgaccaccaacctgagcccccagtgcctgagcctgctgcacgccatggtggcctacgaccccgacgagagaatcgccgcccaccaggccctgcagcacccctacttccaggagcagagaacccagaacggcagcgaggacgaggccagcgccgtgctgctgcccatccagaccagaagcagcctgaaccccctgctgagcacctgcatgctgcccggcagaagcgtgaccctgctggtgtag

SEQ ID NO: 332409 - protein, 54 aa, Artificial Sequence
  derived and/or modified sequence
MKAADEPAYLTVGTDVSAKYRGAFCEAKIKTVKRLVKVKVLLKQDNTTQLVQDD

SEQ ID NO: 332410 - DNA, 148 bp, Artificial Sequence
  derived and/or modified sequence
gaatgaattgaatgcaaacatcgaatggtctcgaatggaatcatcttcaaatggaatggaatggaatcatcgcatagaatcgaatggaattatcaacgaatggaatcgaatggaatcatcatcagatggaaatgaatggaatcgtcat

SEQ ID NO: 332411 - DNA, 1053 bp, Artificial Sequence
  derived and/or modified sequence
atgcccagcttcatcagacacggccccaccatccccagaagaaccgacatctgcctgcccgacagcagccccaacgccttcagcaccagcggcgacgtggtgagcagaaaccagagcttcctgagaacccccatccagagaaccccccacgagatcatgagaagagagagcaacagactgagcgcccccagctacctggccagaagcctggccgacgtgcccagagagtacggcagcagccagagcttcgtgaccgaggtgagcttcgccgtggagaacggcgacagcggcagcagatactactacagcgacaacttcttcgacggccagagaaagagacccctgggcgacagagcccacgaggactacagatactacgagtacaaccacgacctgttccagagaatgccccagaaccagggcagacacgccagcggcatcggcagagtggccgccaccagcctgggcaacctgaccaaccacggcagcgaggacctgcccctgccccccggctggagcgtggactggaccatgagaggcagaaagtactacatcgaccacaacaccaacaccacccactggagccaccccctggagagagagggcctgccccccggctgggagagagtggagagcagcgagttcggcacctactacgtggaccacaccaacaagaaggcccagtacagacacccctgcgcccccagcgtgcccagatacgaccagcccccccccgtgacctaccagccccagcagaccgagagaaaccagagcctgctggtgcccgccaacccctaccacaccgccgagatccccgactggctgcaggtgtacgccagagcccccgtgaagtacgaccacatcctgaagtgggagctgttccagctggccgacctggacacctaccagggcatgctgaagctgctgttcatgaaggagctggagcagatcgtgaagatgtacgaggcctacagacaggccctgctgaccgagctggagaacagaaagcagagacagcagtggtacgcccagcagcacggcaagaacttctag

SEQ ID NO: 332412 - DNA, 1053 bp, Artificial Sequence
  derived and/or modified sequence
atgcctagctttatccggcatggcccaacaattccccgacgcacagacatctgcctccctgacagttctcctaacgctttcagtaccagtggcgacgttgtctcccgtaatcagagcttcctaagaacccctatacaaagaacgcctcacgagatcatgcgccgggaatccaacagactcagcgccccctcctacttggcccgttcattagctgatgtcccacgcgaatacggcagttctcaatcattcgtgaccgaggtttccttcgctgtcgagaatggtgattctggaagtcggtattattattccgataactttttcgatgggcagcgaaagcgacccctgggtgacagagcccacgaggactatcggtactacgagtacaatcacgacttgttccaacgcatgccacagaaccaggggcgtcatgcctccggaatcggaagggtggccgcaactagcctcgggaacttgactaatcatgggtccgaagatctcccccttcctcccggctggtccgtggattggaccatgcggggccgcaagtattatattgatcacaacaccaacaccactcactggagccatccacttgagcgggagggcctccctcctggttgggaaagagtagaaagctctgagtttggcacctattacgtggaccacacaaacaagaaggctcagtaccgccacccttgcgcccctagtgtgcctaggtacgaccagccgcccccggtaacttaccaacctcagcaaacggaacgcaaccagtcactgctggtgcccgctaacccgtatcacaccgcagaaatccccgactggctgcaggtgtatgcccgagctcccgttaagtacgatcatatcctgaagtgggaactttttcaactggctgaccttgacacctaccagggcatgctcaaactgctcttcatgaaagagctggagcagattgtgaaaatgtatgaggcctatcgccaggcactgttaacagaactagaaaacaggaagcagcgacagcaatggtacgcacagcaacacggaaagaacttctag

SEQ ID NO: 332413 - DNA, 1053 bp, Artificial Sequence
  derived and/or modified sequence
atgcccagcttcatcagacatggccccaccatccccaggagaacagacatctgcctgcctgacagcagccccaatgccttcagcaccagcggagatgtggtgtccaggaaccagagcttcctgcggacccccatccagaggacccctcatgagatcatgaggcgggagagcaaccggctgagcgcccccagctacctggcccggagcctggctgatgtgccccgggagtatggcagcagccagagctttgtgacagaggtgtcctttgctgtggagaatggagacagcggcagccgctactactacagcgacaacttctttgatggccagaggaagaggcccctgggggaccgggcccacgaggactaccgctactatgagtacaaccacgacctcttccagaggatgccccagaaccagggcagacatgccagcggcatcggccgggtggccgccaccagcctgggcaacctgaccaaccacggcagcgaggacctgcccctgcccccaggctggagcgtggactggaccatgaggggcaggaagtactacatcgaccacaacaccaacaccacccactggagccaccccctggagcgggagggcctgcccccaggctgggagcgggtggagagcagcgagtttggcacctactacgtggaccacaccaacaagaaggcccagtaccgccacccctgtgcccccagcgtgcccaggtatgaccagcccccacctgtgacctaccagccccagcagacagaaagaaaccagagcctgctggtgcctgccaacccctaccacacagctgagatcccagactggctgcaggtgtatgcccgggcccctgtgaagtatgaccacatcctgaagtgggagctgttccagctggccgacctggacacctaccagggcatgctgaagctgctcttcatgaaggagctggagcagatcgtgaagatgtatgaggcctaccggcaggccctgctgacagagctggagaacaggaagcagaggcagcagtggtacgcccagcagcacggcaagaacttctag

SEQ ID NO: 332414 - DNA, 1053 bp, Artificial Sequence
  derived and/or modified sequence
atgcccagcttcatccggcacggccccaccatcccccggcggaccgatatatgtctgccagatagctctccaaatgcatttagcacatcaggcgatgttgtgtctaggaaccaaagtttcctgaggacacccatccagaggacacctcatgagatcatgagaagggaatccaatcgtctttctgcgcctagttacttagctagatcactggccgatgtacccagggagtacggatcttcacagtcgtttgttacagaggtgagcttcgcagtggaaaacggcgatagtggctccagatactattatagcgacaatttctttgatggtcagagaaagagacctctaggcgaccgagctcatgaggattaccgctattatgagtacaatcacgacctgtttcagcgaatgccccagaatcagggacgccacgcctctgggatcgggcgagtagccgcaacaagcctaggtaatcttacgaaccacggcagcgaagacttgcccctgcctcctggatggtccgtggactggactatgcgtggacgaaagtactacatcgatcataacacaaacacaacccattggtctcatccactggagcgcgagggcctcccgcccggctgggaacgggtggaatcatcggagttcggcacctactatgttgaccatacaaacaaaaaggcccagtacaggcacccgtgtgctccctcagtccccagatacgaccagcccccgcccgtaacttatcagccccagcagaccgagcggaatcagagtctgcttgttcccgccaacccatatcacaccgcagaaatccctgattggctccaagtgtacgctagagcccccgtcaaatatgatcacatcctgaagtgggaacttttccagcttgcagatctggacacttatcagggaatgctgaaactactgttcatgaaagagttggagcagatcgtgaagatgtatgaggcatacagacaagccctgctgaccgaactagagaacaggaagcagcgtcagcagtggtacgcccagcaacatggcaaaaatttctag

SEQ ID NO: 332415 - DNA, 1053 bp, Artificial Sequence
  derived and/or modified sequence
atgcccagcttcatccgccatggacctactatcccacgaaggactgatatctgcctcccagatagctcacccaacgccttctctacctctggcgacgtggttagccgtaaccaaagttttctgcggacaccaatacagaggacccctcatgaaataatgagacgggaatcaaatagactgtctgcccctagctatttagcgaggagcttggctgacgtcccgcgagaatatggctcctctcagagtttcgttaccgaagtctcattcgctgtggaaaacggggattctggctctaggtactactacagcgacaactttttcgatgggcagaggaagcgacctctgggggaccgggcacatgaagattaccggtattacgagtataatcacgacctgtttcagcggatgccccagaaccaaggtaggcatgcatcggggatagggcgagtcgcagcaactagtctgggcaacctaacaaaccacggatccgaagacctgcccttgccacccggttggtccgtcgactggaccatgagaggcagaaagtactatatcgatcataacacaaatactactcactggtcccaccctctggagagagagggccttcctcctggctgggagagggtggagagttccgagtttggcacttactacgtcgatcacacgaacaagaaagctcagtaccggcacccttgcgcaccatctgtgcctagatatgaccaacctccgccagttacataccagcctcagcagacagagcgcaaccaaagcctgctggtgccagctaatccataccacaccgctgagatccccgattggcttcaggtgtatgctagagccccagtgaagtatgatcacattctcaagtgggagctgttccaactcgccgatctggatacctatcagggaatgctgaaattgttgtttatgaaagaactcgagcagatcgttaagatgtacgaagcttatagacaggcactgttgactgaacttgagaatcgtaagcagcggcagcagtggtacgcccaacagcatggcaagaacttctag

SEQ ID NO: 332416 - DNA, 1827 bp, Artificial Sequence
  derived and/or modified sequence
atgtcacggaggaaacagcgcaaaccacaacagcttattagcgactgcgaaggcccttccgcctcagagaatggggatgcatctgaagaagaccatcctcaagtttgtgccaagtgttgcgctcagtttaccgaccccacagaattcctcgcacaccagaatgcctgttccaccgaccccccagttatggttatcattggagggcaggagaacccaaacaattcgtcagcctcttctgagcccagacctgagggtcataacaacccacaagtgatggataccgagcattccaacccaccggattctggtagctcagtgccaaccgaccccacttgggggcccgagaggcgtggagaggagtcaccgggacatttcctagtagccgccactggcaccgccgctggaggaggaggcggcctaatcttagcctctccaaagctgggagcgactcctcttcccccggagtctactcccgcccctccaccaccacctccaccccccccgccacccggtgtgggaagcggacacttaaatattccattaattttggaggaactgcgggtcttgcagcagcggcagattcaccagatgcagatgaccgagcagatctgtcggcaggtccttctccttgggtcactgggtcagactgttggtgcccccgctagcccatcagaactaccaggcaccgggacagcgtcctcgacaaagcccctgttgccactgttttccccaataaagcccgtccaaacatcaaagacactggcctcaagcagttcgtccagcagctcgtcctctggggctgagaccccaaagcaagctttctttcacctgtatcatcctctgggttcgcagcatccattcagtgctggcggcgtaggcaggagccacaaacctacaccggcgccctctcccgccctgcccggctccacggaccagctgatagcatctccccacctggcttttccaagtacgaccggccttctggccgcccagtgtctgggcgcggctcgtggactggaggccacggcttccccagggttattgaaacccaagaatggcagtggggagctctcatacggggaggttatgggcccgctggaaaaaccagggggtaggcacaagtgtaggttttgtgctaaagtatttggttccgactccgcacttcaaatccatctgcggtcacacaccggcgaacgcccctacaagtgcaacgtgtgcggaaataggttcactacacggggaaatcttaaagttcacttccataggcaccgggagaagtacccccatgtccagatgaatcctcacccagtcccggaacatctggactacgtgatcactagctccggtttgccgtatggaatgtccgtcccccccgagaaggctgaagaggaagccgctactccgggcgggggggttgagcggaagcccctagtcgcatcgactaccgctttgtccgccacagaaagcctgacacttttgtcaaccagcgctggaacagctacagcccccgggcttccagccttcaacaagttcgtgctgatgaaagccgtggagcctaaaaacaaagcagacgaaaataccccccccggttcagaagggagcgccatctccggggttgctgagtcctctacggcaacacgaatgcagttgtctaaacttgtgacatctctgccttcctgggcactgctgacaaaccacttcaagtcaacaggatcattcccctttccatatgttccagaggaagtgcatcagtgctgccacagcgccgctgcttgtcctgatgcaccaggcggaccggacccccagaggtggtactgtactccctag

SEQ ID NO: 332417 - DNA, 1827 bp, Artificial Sequence
  derived and/or modified sequence
atgagcaggaggaagcagaggaagccccagcagctgatcagtgactgtgagggccccagcgcctctgaaaatggagatgccagcgaggaggaccacccccaggtgtgtgccaagtgctgtgcccagttcacagaccccacagagttcctggcccaccagaatgcctgcagcacagacccccctgtgatggtgatcatcggcggccaggagaaccccaacaacagcagcgccagcagcgagcccaggcctgagggccacaacaacccccaggtgatggacacagagcacagcaaccccccagacagcggcagctctgtgcccacagaccccacctggggccctgagcggcggggggaggagagccctggccacttcctggtggccgccaccggcacagctgctgggggcggcggcggcctcatcctggccagccccaagctgggcgccacccccctgcccccagagagcaccccagcccctcctcctcctcctcctcctcctcctcctcctggggtgggcagcggccacctgaacatccccctcatcctggaggagctgcgggtgctgcagcagaggcagatccaccagatgcagatgacagagcagatctgccggcaggtgctgctgctgggcagcctgggccagacagtgggcgccccagccagccccagcgagctgcccggcactggaacagccagcagcaccaagcccctgctgcccctcttcagccccatcaagcctgtgcagaccagcaagaccctggccagcagcagcagcagcagcagcagcagcagtggagctgagacccccaagcaggccttcttccacctgtaccaccccctgggcagccagcaccccttctctgctggaggagtgggccgcagccacaagcccaccccagcccccagccctgccctgcccggcagcacagaccagctgattgccagcccccacctggccttccccagcaccaccggcctgctggccgcccagtgcctgggcgccgcccggggcctggaggccacagccagccctggcctgctgaagcccaagaatggcagcggggagctgtcctatggagaggtgatgggccccctggagaagccaggcggccgccacaagtgccgcttctgtgccaaggtgtttggaagtgacagcgccctgcagatccacctgcggagccacactggagagcggccctacaagtgcaatgtgtgtggcaaccgcttcaccacccggggcaacctgaaggtgcacttccaccgccaccgggagaagtacccccacgtgcagatgaacccccaccctgtgcctgagcacctggactatgtgatcaccagcagcggcctgccctacggcatgtctgtgcccccagagaaggccgaggaggaggccgccacccctgggggcggcgtggagaggaagcccctggtggccagcaccacagccctgagcgccacagagagcctgaccctgctgagcaccagcgctggaacagccacagcccctggcctgcctgccttcaacaagtttgtgctgatgaaggctgtggagcccaagaacaaggcagatgagaacaccccacctggcagcgagggcagcgccatctctggagtggccgagagcagcacagccaccaggatgcagctgagcaagctggtgaccagcctgcccagctgggccctgctgaccaaccacttcaagagcacaggcagcttccccttcccctacgtgcctgaggaggtgcaccagtgctgccacagcgctgctgcctgcccagatgcccctgggggccctgacccccagcgctggtactgcaccccctag

SEQ ID NO: 332418 - DNA, 1827 bp, Artificial Sequence
  derived and/or modified sequence
atgagccggcggaagcagcggaagccccagcagctgatcagcgactgcgaagggccgtccgcgtccgagaacggcgacgcttcggaggaagatcacccccaggtttgcgccaagtgctgtgctcagttcacagaccccaccgagttcctagcacaccaaaacgcgtgctccaccgatccacccgtaatggtcatcatcggaggccaggaaaacccaaacaacagctccgcgtccagtgagcccagacccgagggccacaacaaccctcaggtcatggatacagaacacagcaatccacccgactccggctcatcagtgcccaccgatccaacatggggacccgagcgaaggggggaggaatctcccggacactttttagtggccgccacagggacagctgcaggtggcggtggcggactgatcctggcgagcccaaaacttggggctaccccactgccacccgaatcaacccccgcaccccctcctcctcccccaccccctcctccccctggggtgggttctggccatctaaacatacccttgattcttgaggagctgagggtcctgcaacaacgccagattcatcagatgcaaatgacagaacaaatctgcagacaagtgctgttactcggcagtctggggcaaacagttggcgcgcccgcaagtccatccgagttacccggaactggtactgcctccagcaccaaaccgctacttcccctcttctcaccaattaaaccagtacagacttctaagactctggcatcctcttccagttcatcttcctcttcttcaggtgccgaaacacccaaacaagcttttttccacctgtaccacccacttggtagccagcacccattctcggcagggggcgtcggcagatcccacaaacccactccagcaccctctcctgctctgcccggcagcacagatcaactcattgcctccccccatctcgctttcccctctacgaccggattgttggccgcacagtgtcttggagctgcacgcggtctggaggcgactgcttctcctggccttttgaagccaaaaaatggctccggtgagctctcatatggagaagtgatgggcccactcgagaagcccggcggccggcataaatgccggttttgcgctaaggtctttggatcagattctgccctgcagatccacctacgctcccacacgggagagagaccttataagtgcaatgtgtgtggtaataggtttacaacaaggggtaatttgaaggtgcactttcataggcatagagaaaagtacccccacgtccagatgaatcctcaccctgtgccggagcacctggactacgtgataacttcgtccggattgccttatggaatgagcgtgcctccagaaaaagccgaggaagaagctgccacacccggggggggcgtggagcggaaaccacttgtcgcatccacgacagccctgtcagccacagagtccctgaccctattgtcaacatctgctggcaccgctaccgccccggggctaccggcattcaacaaatttgtacttatgaaagccgtggagccaaagaacaaggctgatgagaataccccacccggaagcgaggggagcgcaatttccggcgttgctgagtctagtaccgccacccgtatgcagttgtcgaagctggtgacaagtttacctagctgggcgctgcttacaaaccacttcaaatccactggaagctttccatttccctacgtgcccgaagaggtgcaccagtgttgccacagtgccgccgcttgccctgatgcacccggcgggcctgacccacaacgctggtactgcactccctag

SEQ ID NO: 332419 - DNA, 1827 bp, Artificial Sequence
  derived and/or modified sequence
atgagccgccgtaaacagcggaagccacagcagctgatctcggattgtgaagggccatcagcttccgaaaatggggatgccagtgaagaggatcacccgcaggtttgcgccaagtgttgcgcccagttcacggacccaaccgagtttctggcccaccagaatgcctgtagtaccgatcctcctgtaatggttatcatcgggggacaagagaaccccaacaattcctccgctagttcagagcctcggcctgagggccacaataaccctcaggtgatggataccgaacacagtaacccccctgattcaggctcctccgtgcccacagacccgacatggggccctgaaaggcggggtgaagaatctcccggacacttcttagtggccgctaccggaacagccgctgggggaggcggaggactgatactagcctctcccaagctcggcgctacaccactgccgccagagtccaccccggctccaccacctcctccgcctcccccaccaccacccggagtgggctctgggcacctgaatattccgttgatcctcgaagaactgagagtgctgcaacagcgccagattcaccagatgcagatgacagagcaaatctgcaggcaggttcttctactgggttctctgggccagaccgtgggcgctcccgcaagcccttcggaattgcccggaactggaacagcttcttcaactaagcctctgctgcccctattctcacctatcaaacctgttcagacctctaagactctcgccagcagttccagctcaagcagttcctctagtggtgcagagacacccaagcaggcctttttccatctttatcatcctctcgggtcccagcatccgttttccgcaggaggcgtggggagatctcataagcccactccagccccaagtcctgcattgccgggttctaccgaccagctaatcgccagcccccatctcgcgttccccagtaccactggactcctagcagctcagtgtctgggagcagccagaggtctcgaggccactgctagtcccggtcttctaaaaccaaaaaatggaagtggtgaactgtcttatggcgaggtgatgggaccactcgagaaacccggaggccgtcataagtgccggttctgtgcgaaggtgtttggttccgattctgccctccagatccacctgcggtctcacaccggggagaggccctacaagtgcaacgtctgtggtaatcgattcaccacacgtggcaatttaaaggtgcacttccacaggcatagggaaaaatacccacacgtgcagatgaacccacaccccgtgcctgaacacctggattacgtgataacgtcctctgggctcccatacggcatgtctgttcccccagaaaaggcggaggaagaggctgctacccccggaggcggtgtcgagcggaagcctttagtggcgtccaccactgccctttccgctacagagtccctcacccttctctccacaagtgctggcacagccaccgccccaggcctgcctgctttcaataaatttgtactgatgaaagccgttgagcctaaaaataaggccgatgaaaatactccaccaggaagcgagggatcggcaatttccggggtcgccgagtccagcacggctaccagaatgcaactttccaaactggttaccagcctgccttcctgggccctgctgaccaaccactttaagtccacgggcagtttcccatttccttacgtccccgaagaagttcatcagtgttgtcactctgccgctgcttgtccagacgcgcctggcggaccagacccgcaacggtggtactgcacaccatag

SEQ ID NO: 332420 - DNA, 2665 bp, Artificial Sequence
  derived and/or modified sequence
agagagagagtctgtgtctctgggaaagaagaacatctctgcttcacagtgatttgcgctgggggagaggcatcaattggcttcggacccaagggggagacgagaccaggtcaccccggttaagaccaagtgagcgttgcccctccctctcccaactctctacccgggaatgtctcggcgaaagcagcggaaaccccaacagttaatctcggactgcgaaggtcccagcgcgtctgagaacggtgatgctagcgaggaggatcacccccaagtctgtgccaagtgctgcgcacaattcactgacccaactgaattcctcgcccaccagaacgcatgttctactgaccctcctgtaatggtgataattgggggccaggagaaccccaacaactcttcggcctcctctgaaccccggcctgagggtcacaataatcctcaggtcatggacacagagcatagcaaccccccagattctgggtcctccgtgcccacggatcccacctggggcccagagaggagaggagaggagtctccagggcatttcctggtcgctgccacaggtacagcggctgggggaggcgggggcctgatcttggccagtcccaagctgggagcaaccccattacctccagaatcgacccctgcaccccctcctcctccaccaccccctccgcccccaggggtaggcagtggccacttgaatatccccctgatcttggaagagctacgggtgctgcagcagcggcagatccatcagatgcagatgactgagcaaatctgcaggcaggtgctgttgcttggctccttaggccagacggtgggtgcccctgccagtccctcagagctacctgggacagggactgcctcttccaccaagcccctactacccctcttcagccccatcaagcctgtccaaaccagcaagacactggcatcttcctcctcctcctcctcttcctcttcaggggcagaaacgcccaagcaggccttcttccacctttaccacccactggggtcacagcatcctttctctgctggaggggttgggcgaagccacaaacccacccctgccccttccccagccttgccaggcagcacagatcagctgattgcctcgcctcatctggcattcccaagcaccacgggactactggcagcacagtgtcttggggcagcccgaggccttgaggccactgcctccccagggctcctgaagccaaagaatggaagtggtgagctgagctacggagaagtgatgggtcccttggagaagcctggtggaaggcacaaatgccgcttctgtgccaaagtatttggcagtgacagtgccctgcagatccaccttcgttcccacacgggtgagaggccctataagtgcaatgtctgtggaaaccgttttaccacccgtggcaacctcaaagtgcatttccaccggcatcgtgagaagtacccacatgtgcagatgaacccacacccagtaccagagcacctagactatgtcattaccagcagtggcttgccttatggtatgtccgtgccaccagagaaggccgaggaggaggcagccactccaggtggaggggttgagcgcaagcctctggtggcctccacaacagcactcagtgccacagagagcctgactctgctctccaccagtgcaggcacagccacggctccaggactccctgctttcaataagtttgtgctcatgaaagcagtggaacccaagaataaagctgatgaaaacacccccccagggagtgagggctcagccatcagtggagtggcagaaagtagcacggcaactcgcatgcaactaagtaagttggtgacttcactaccaagctgggcactgcttaccaaccacttcaagtccactggcagcttccccttcccctatgtgccagaagaagttcaccaatgctgtcactctgcagcagcatgtccggatgcacctggggggccagatccccaacggtggtactgcactccctgaaggtggaggaggtggggacagtggcggcagcagccacagctgggaaggagatggacagtaatgagaaaactactcaacagtcttctttgccaccaccaccaccacctgacagcctggatcagcctcagccaatggagcagggaagcagtggtgttttaggaggcaaggaagaggggggcaaaccggagagaagctcaagtccggcatcagcactcaccccagaaggggaagccaccagcgtgaccttggtagaggagctgagcctgcaggaggcaatgagaaaggagccaggagagagcagcagcagaaaggcctgcgaagtgtgtggccaggcctttccctcccaggcagctctggaggagcatcagaagacccaccccaaggaggggccgctcttcacttgtgttttctgcaggcagggctttcttgagcgggctaccctcaagaagcatatgctcctggcacaccaccaggtacagccctttgccccccatggccctcagaatattgctgctctttctctagtccctggctgttcgccttccatcacctccacagggctctccccctttccccgaaaagatgaccccacgatcccatgagcctgtttttctgtacctgctgctctttgtcccacagagcagaaacagcttcacaaaaggacctccc

SEQ ID NO: 332421 - DNA, 1827 bp, Artificial Sequence
  derived and/or modified sequence
atgagcagaagaaagcagagaaagccccagcagctgatcagcgactgcgagggccccagcgccagcgagaacggcgacgccagcgaggaggaccacccccaggtgtgcgccaagtgctgcgcccagttcaccgaccccaccgagttcctggcccaccagaacgcctgcagcaccgacccccccgtgatggtgatcatcggcggccaggagaaccccaacaacagcagcgccagcagcgagcccagacccgagggccacaacaacccccaggtgatggacaccgagcacagcaacccccccgacagcggcagcagcgtgcccaccgaccccacctggggccccgagagaagaggcgaggagagccccggccacttcctggtggccgccaccggcaccgccgccggcggcggcggcggcctgatcctggccagccccaagctgggcgccacccccctgccccccgagagcacccccgcccccccccccccccccccccccccccccccccccggcgtgggcagcggccacctgaacatccccctgatcctggaggagctgagagtgctgcagcagagacagatccaccagatgcagatgaccgagcagatctgcagacaggtgctgctgctgggcagcctgggccagaccgtgggcgcccccgccagccccagcgagctgcccggcaccggcaccgccagcagcaccaagcccctgctgcccctgttcagccccatcaagcccgtgcagaccagcaagaccctggccagcagcagcagcagcagcagcagcagcagcggcgccgagacccccaagcaggccttcttccacctgtaccaccccctgggcagccagcaccccttcagcgccggcggcgtgggcagaagccacaagcccacccccgcccccagccccgccctgcccggcagcaccgaccagctgatcgccagcccccacctggccttccccagcaccaccggcctgctggccgcccagtgcctgggcgccgccagaggcctggaggccaccgccagccccggcctgctgaagcccaagaacggcagcggcgagctgagctacggcgaggtgatgggccccctggagaagcccggcggcagacacaagtgcagattctgcgccaaggtgttcggcagcgacagcgccctgcagatccacctgagaagccacaccggcgagagaccctacaagtgcaacgtgtgcggcaacagattcaccaccagaggcaacctgaaggtgcacttccacagacacagagagaagtacccccacgtgcagatgaacccccaccccgtgcccgagcacctggactacgtgatcaccagcagcggcctgccctacggcatgagcgtgccccccgagaaggccgaggaggaggccgccacccccggcggcggcgtggagagaaagcccctggtggccagcaccaccgccctgagcgccaccgagagcctgaccctgctgagcaccagcgccggcaccgccaccgcccccggcctgcccgccttcaacaagttcgtgctgatgaaggccgtggagcccaagaacaaggccgacgagaacaccccccccggcagcgagggcagcgccatcagcggcgtggccgagagcagcaccgccaccagaatgcagctgagcaagctggtgaccagcctgcccagctgggccctgctgaccaaccacttcaagagcaccggcagcttccccttcccctacgtgcccgaggaggtgcaccagtgctgccacagcgccgccgcctgccccgacgcccccggcggccccgacccccagagatggtactgcaccccctag

SEQ ID NO: 332422 - protein, 620 aa, Artificial Sequence
  derived and/or modified sequence
MAWLRLQPLTSAFLHFGLVTFVLFLNGLRAEAGGSGDVPSTGQNNESCSGSSDCKEGVILPIWYPENPSLGDKIARVIVYFVALIYMFLGVSIIADRFMASIEVITSQEREVTIKKPNGETSTTTIRVWNETVSNLTLMALGSSAPEILLSLIEVCGHGFIAGDLGPSTIVGSAAFNMFIIIGICVYVIPDGETRKIKHLRVFFITAAWSIFAYIWLYMILAVFSPGVVQVWEGLLTLFFFPVCVLLAWVADKRLLFYKYMHKKYRTDKHRGIIIETEGDHPKGIEMDGKMMNSHFLDGNLVPLEGKEVDESRREMIRILKDLKQKHPEKDLDQLVEMANYYALSHQQKSRAFYRIQATRMMTGAGNILKKHAAEQAKKASSMSEVHTDEPEDFISKVFFDPCSYQCLENCGAVLLTVVRKGGDMSKTMYVDYKTEDGSANAGADYEFTEGTVVLKPGETQKEFSVGIIDDDIFEEDEHFFVRLSNVRIEEEQPEEGMPPAIFNSLPLPRAVLASPCVATVTILDDDHAGIFTFECDTIHVSESIGVMEVKVLRTSGARGTVIVPFRTVEGTAKGGGEDFEDTYGELEFKNDETVCDRQEADYGRRGGQEDSRDGKASIG

SEQ ID NO: 332423 - protein, 927 aa, Artificial Sequence
  derived and/or modified sequence
MAWLRLQPLTSAFLHFGLVTFVLFLNGLRAEAGGSGDVPSTGQNNESCSGSSDCKEGVILPIWYPENPSLGDKIARVIVYFVALIYMFLGVSIIADRFMASIEVITSQEREVTIKKPNGETSTTTIRVWNETVSNLTLMALGSSAPEILLSLIEVCGHGFIAGDLGPSTIVGSAAFNMFIIIGICVYVIPDGETRKIKHLRVFFITAAWSIFAYIWLYMILAVFSPGVVQVWEGLLTLFFFPVCVLLAWVADKRLLFYKYMHKKYRTDKHRGIIIETEGDHPKGIEMDGKMMNSHFLDGNLVPLEGKEVDESRREMIRILKDLKQKHPEKDLDQLVEMANYYALSHQQKSRAFYRIQATRMMTGAGNILKKHAAEQAKKASSMSEVHTDEPEDFISKVFFDPCSYQCLENCGAVLLTVVRKGGDMSKTMYVDYKTEDGSANAGADYEFTEGTVVLKPGETQKEFSVGIIDDDIFEEDEHFFVRLSNVRIEEEQPEEGMPPAIFNSLPLPRAVLASPCVATVTILDDDHAGIFTFECDTIHVSESIGVMEVKVLRTSGARGTVIVPFRTVEGTAKGGGEDFEDTYGELEFKNDETVKTIRVKIVDEEEYERQENFFIALGEPKWMERGISALLLSPDVTDRKLTMEEEEAKRIAEMGKPVLGEHPKLEVIIEESYEFKTTVDKLIKKTNLALVVGTHSWRDQFMEAITVSAAGDEDEDESGEERLPSCFDYVMHFLTVFWKVLFACVPPTEYCHGWACFAVSILIIGMLTAIIGDLASHFGCTIGLKDSVTAVVFVAFGTSVPDTFASKAAALQDVYADASIGNVTGSNAVNVFLGIGLAWSVAAIYWALQGQEFHVSAGTLAFSVTLFTIFAFVCISVLLYRRRPHLGGELGGPRGCKLATTWLFVSLWLLYILFATLEAYCYIKGF

SEQ ID NO: 332424 - DNA, 2784 bp, Artificial Sequence
  derived and/or modified sequence
atggcctggctgagactgcagcccctgaccagcgccttcctgcacttcggcctggtgaccttcgtgctgttcctgaacggcctgagagccgaggccggcggcagcggcgacgtgcccagcaccggccagaacaacgagagctgcagcggcagcagcgactgcaaggagggcgtgatcctgcccatctggtaccccgagaaccccagcctgggcgacaagatcgccagagtgatcgtgtacttcgtggccctgatctacatgttcctgggcgtgagcatcatcgccgacagattcatggccagcatcgaggtgatcaccagccaggagagagaggtgaccatcaagaagcccaacggcgagaccagcaccaccaccatcagagtgtggaacgagaccgtgagcaacctgaccctgatggccctgggcagcagcgcccccgagatcctgctgagcctgatcgaggtgtgcggccacggcttcatcgccggcgacctgggccccagcaccatcgtgggcagcgccgccttcaacatgttcatcatcatcggcatctgcgtgtacgtgatccccgacggcgagaccagaaagatcaagcacctgagagtgttcttcatcaccgccgcctggagcatcttcgcctacatctggctgtacatgatcctggccgtgttcagccccggcgtggtgcaggtgtgggagggcctgctgaccctgttcttcttccccgtgtgcgtgctgctggcctgggtggccgacaagagactgctgttctacaagtacatgcacaagaagtacagaaccgacaagcacagaggcatcatcatcgagaccgagggcgaccaccccaagggcatcgagatggacggcaagatgatgaacagccacttcctggacggcaacctggtgcccctggagggcaaggaggtggacgagagcagaagagagatgatcagaatcctgaaggacctgaagcagaagcaccccgagaaggacctggaccagctggtggagatggccaactactacgccctgagccaccagcagaagagcagagccttctacagaatccaggccaccagaatgatgaccggcgccggcaacatcctgaagaagcacgccgccgagcaggccaagaaggccagcagcatgagcgaggtgcacaccgacgagcccgaggacttcatcagcaaggtgttcttcgacccctgcagctaccagtgcctggagaactgcggcgccgtgctgctgaccgtggtgagaaagggcggcgacatgagcaagaccatgtacgtggactacaagaccgaggacggcagcgccaacgccggcgccgactacgagttcaccgagggcaccgtggtgctgaagcccggcgagacccagaaggagttcagcgtgggcatcatcgacgacgacatcttcgaggaggacgagcacttcttcgtgagactgagcaacgtgagaatcgaggaggagcagcccgaggagggcatgccccccgccatcttcaacagcctgcccctgcccagagccgtgctggccagcccctgcgtggccaccgtgaccatcctggacgacgaccacgccggcatcttcaccttcgagtgcgacaccatccacgtgagcgagagcatcggcgtgatggaggtgaaggtgctgagaaccagcggcgccagaggcaccgtgatcgtgcccttcagaaccgtggagggcaccgccaagggcggcggcgaggacttcgaggacacctacggcgagctggagttcaagaacgacgagaccgtgaagaccatcagagtgaagatcgtggacgaggaggagtacgagagacaggagaacttcttcatcgccctgggcgagcccaagtggatggagagaggcatcagcgccctgctgctgagccccgacgtgaccgacagaaagctgaccatggaggaggaggaggccaagagaatcgccgagatgggcaagcccgtgctgggcgagcaccccaagctggaggtgatcatcgaggagagctacgagttcaagaccaccgtggacaagctgatcaagaagaccaacctggccctggtggtgggcacccacagctggagagaccagttcatggaggccatcaccgtgagcgccgccggcgacgaggacgaggacgagagcggcgaggagagactgcccagctgcttcgactacgtgatgcacttcctgaccgtgttctggaaggtgctgttcgcctgcgtgccccccaccgagtactgccacggctgggcctgcttcgccgtgagcatcctgatcatcggcatgctgaccgccatcatcggcgacctggccagccacttcggctgcaccatcggcctgaaggacagcgtgaccgccgtggtgttcgtggccttcggcaccagcgtgcccgacaccttcgccagcaaggccgccgccctgcaggacgtgtacgccgacgccagcatcggcaacgtgaccggcagcaacgccgtgaacgtgttcctgggcatcggcctggcctggagcgtggccgccatctactgggccctgcagggccaggagttccacgtgagcgccggcaccctggccttcagcgtgaccctgttcaccatcttcgccttcgtgtgcatcagcgtgctgctgtacagaagaagaccccacctgggcggcgagctgggcggccccagaggctgcaagctggccaccacctggctgttcgtgagcctgtggctgctgtacatcctgttcgccaccctggaggcctactgctacatcaagggcttctag

SEQ ID NO: 332425 - DNA, 1863 bp, Artificial Sequence
  derived and/or modified sequence
atggcctggctgagactgcagcccctgaccagcgccttcctgcacttcggcctggtgaccttcgtgctgttcctgaacggcctgagagccgaggccggcggcagcggcgacgtgcccagcaccggccagaacaacgagagctgcagcggcagcagcgactgcaaggagggcgtgatcctgcccatctggtaccccgagaaccccagcctgggcgacaagatcgccagagtgatcgtgtacttcgtggccctgatctacatgttcctgggcgtgagcatcatcgccgacagattcatggccagcatcgaggtgatcaccagccaggagagagaggtgaccatcaagaagcccaacggcgagaccagcaccaccaccatcagagtgtggaacgagaccgtgagcaacctgaccctgatggccctgggcagcagcgcccccgagatcctgctgagcctgatcgaggtgtgcggccacggcttcatcgccggcgacctgggccccagcaccatcgtgggcagcgccgccttcaacatgttcatcatcatcggcatctgcgtgtacgtgatccccgacggcgagaccagaaagatcaagcacctgagagtgttcttcatcaccgccgcctggagcatcttcgcctacatctggctgtacatgatcctggccgtgttcagccccggcgtggtgcaggtgtgggagggcctgctgaccctgttcttcttccccgtgtgcgtgctgctggcctgggtggccgacaagagactgctgttctacaagtacatgcacaagaagtacagaaccgacaagcacagaggcatcatcatcgagaccgagggcgaccaccccaagggcatcgagatggacggcaagatgatgaacagccacttcctggacggcaacctggtgcccctggagggcaaggaggtggacgagagcagaagagagatgatcagaatcctgaaggacctgaagcagaagcaccccgagaaggacctggaccagctggtggagatggccaactactacgccctgagccaccagcagaagagcagagccttctacagaatccaggccaccagaatgatgaccggcgccggcaacatcctgaagaagcacgccgccgagcaggccaagaaggccagcagcatgagcgaggtgcacaccgacgagcccgaggacttcatcagcaaggtgttcttcgacccctgcagctaccagtgcctggagaactgcggcgccgtgctgctgaccgtggtgagaaagggcggcgacatgagcaagaccatgtacgtggactacaagaccgaggacggcagcgccaacgccggcgccgactacgagttcaccgagggcaccgtggtgctgaagcccggcgagacccagaaggagttcagcgtgggcatcatcgacgacgacatcttcgaggaggacgagcacttcttcgtgagactgagcaacgtgagaatcgaggaggagcagcccgaggagggcatgccccccgccatcttcaacagcctgcccctgcccagagccgtgctggccagcccctgcgtggccaccgtgaccatcctggacgacgaccacgccggcatcttcaccttcgagtgcgacaccatccacgtgagcgagagcatcggcgtgatggaggtgaaggtgctgagaaccagcggcgccagaggcaccgtgatcgtgcccttcagaaccgtggagggcaccgccaagggcggcggcgaggacttcgaggacacctacggcgagctggagttcaagaacgacgagaccgtgtgcgacagacaggaggccgactacggcagaagaggcggccaggaggacagcagagacggcaaggccagcatcggctag

SEQ ID NO: 332426 - DNA, 2784 bp, Artificial Sequence
  derived and/or modified sequence
atggcgtggttaagactgcagcctctcaccagtgcctttttacatttcggtctggtgacgttcgtcctctttctgaacggactcagggccgaagcaggagggtccggggatgttccaagtaccggccaaaataatgaaagttgttcaggctccagtgactgtaaggagggggtgattctgcctatctggtatccggagaacccaagccttggcgacaagatcgccagggttatagtgtactttgtcgctttgatttatatgtttctaggcgtgtccattatcgctgatcgcttcatggccagtatcgaggtcattacgtctcaagagcgagaggtgactattaaaaagccaaatggtgagacatcaacaacaacaattcgcgtctggaacgagacagttagtaatctgacgctcatggccctcggatcctcggcccctgagatcctcctgtccctcatagaggtttgcggccatggcttcatcgctggcgatctgggcccatcaactatagttggcagtgccgcattcaatatgtttattatcatcggcatttgcgtttatgtgatccccgacggcgagaccagaaagattaagcaccttagggtgttctttatcaccgcagcctggagcatcttcgcctacatctggctgtacatgatcctggccgtgtttagtcctggcgttgtgcaggtttgggaggggttgttaactcttttcttcttcccggtttgcgtccttctcgcctgggtcgccgataagaggctcttattctataagtatatgcataagaaataccggactgacaagcatagggggatcattattgaaaccgaaggagaccacccaaagggaatcgagatggacggtaagatgatgaactcacactttctggatggtaatctggtgcctctggagggaaaagaagtggatgaaagcaggcgcgaaatgattcgaatactgaaggatctgaaacagaaacacccagagaaagatctggaccagctcgtggaaatggccaactactacgccctaagccatcagcaaaaatcccgggctttttaccggattcaggctacccgcatgatgactggcgccggcaatatcctgaagaagcacgcagccgaacaggccaaaaaagcatccagcatgagcgaagtgcatactgatgagccagaggactttatttcgaaagtattctttgatccttgtagttatcagtgtcttgagaactgcggggcggtgctgctcaccgtggtgagaaagggaggagacatgagcaagactatgtacgtcgattacaaaacagaggatggcagcgccaatgccggagcggactatgaatttacagagggcacagttgttctcaagcctggagagacccagaaagaattcagcgttggcatcatcgacgacgatatttttgaagaagatgagcatttttttgtgaggctctccaacgtgcggatcgaggaggagcagccagaagaaggaatgccgcccgcgatatttaactcattacccctgccacgggctgtactcgcctccccttgcgtggccaccgtcactattttggatgatgaccacgccggcatattcacattcgagtgtgacaccatccacgtttcagaatcaattggcgtgatggaagtcaaggtccttcggactagtggagcaaggggaaccgtcatcgttccatttaggactgtcgagggcaccgcgaagggaggtggcgaagacttcgaggacacatacggtgagctagagtttaaaaatgacgaaactgtcaagacgatcagggttaagatcgtcgatgaagaagaatacgagagacaggagaatttttttatcgcactgggcgagcccaagtggatggagcgcgggatctccgctctcctgctgagcccggatgtcaccgatcgtaagctgacaatggaggaagaagaggctaagcggatagctgagatggggaagcctgttttgggggaacacccgaagctggaagtaatcattgaagagtcctatgaatttaagactactgttgacaagctgatcaagaaaacaaacctggcactcgtagtcggtacccattcctggcgggaccagtttatggaggcaattacggtgagtgctgccggcgatgaggatgaagacgagtctggagaagaacgcctgccttcctgttttgactacgtcatgcacttcttaaccgtgttctggaaggtgctgtttgcttgcgtgccccccaccgaatactgccacggctgggcttgttttgccgtaagcattttgataataggtatgctgaccgctatcatcggcgatttggcaagccactttggctgcacgattggactgaaagatagcgtgacagcagtcgtcttcgtggccttcggcaccagcgttccagacaccttcgcctcaaaggcagccgccctccaggacgtgtacgccgacgcatctataggcaacgtaacaggatcaaacgctgtcaacgtctttctgggaatagggctggcttggagtgtagctgcgatttattgggctctgcaggggcaggagtttcatgtgtcagcaggcactcttgcttttagcgtgaccctattcacaatctttgcgttcgtgtgcatcagcgtccttctctatcgccgaagaccccacttaggtggagaacttggcggcccgcgtggttgtaagctggcaacaacctggctctttgtctccctttggctgttgtacatcctgtttgctacgttggaggcctactgctatattaagggcttttag

SEQ ID NO: 332427 - DNA, 1863 bp, Artificial Sequence
  derived and/or modified sequence
atggcttggcttcgattgcagcctctgacatctgcattccttcatttcggccttgtgacctttgtgctgtttctgaacggccttagagccgaagcggggggtagcggagacgttcccagcaccgggcagaacaacgagagttgcagcggctcctccgactgcaaggagggggtgatactgcctatatggtatcctgagaacccaagtctgggggacaaaattgcccgtgttattgtgtattttgtggcactgatctacatgtttctgggcgtgagcattatcgcagatcggttcatggcctctattgaagtgatcaccagtcaggaaagagaggttactataaagaaaccaaacggggagacttctacaactacaatcagggtgtggaacgaaacagtgtctaaccttactttgatggctctcgggtcatcggccccagagatactgctgtctctgattgaggtgtgcgggcacggttttattgccggagatctcggcccatcaaccatcgtgggatccgcggcgtttaatatgtttattatcatcggcatttgcgtatatgtgatccccgatggcgagacgcgcaagattaaacacctcagggtgttctttattactgccgcctggagcatttttgcgtacatctggttgtacatgattctggcagtgttttccccgggcgtggtccaggtgtgggaaggcctgctaaccctgtttttttttcctgtttgtgtactcctggcatgggttgccgataaacgcctgttattttacaagtatatgcataagaagtaccggaccgataagcacagaggcatcattatcgaaactgagggggaccatcccaagggcattgagatggatggcaaaatgatgaattcccatttcctcgatggaaatctggtgcccctggagggaaaagaggtcgacgagagtcgcagggagatgatccgaatcttgaaggacctgaagcagaagcacccagagaaggacctggaccagctggttgagatggctaactactatgcactctctcaccagcagaaatcacgagccttttatcgtatccaggccacgagaatgatgacaggagccggcaatatcctgaagaaacatgcggcagaacaggcgaagaaagcatcgtcaatgagtgaagtgcatacagacgagccagaggacttcatctccaaggtgtttttcgatccatgtagttaccagtgtctggaaaactgcggtgccgtgcttttgaccgtagttcgaaaggggggcgacatgtccaaaaccatgtacgtagattataagactgaggatggatccgcaaacgccggggccgactacgaatttactgaaggaacggtggtgctaaagcctggcgaaacgcaaaaagagttttctgtaggtattattgacgacgatatttttgaggaggatgagcattttttcgtgcgtttgtctaacgtgaggattgaggaggagcagcctgaggaaggtatgccaccggcaatctttaactccctgcctctgccacgggcagtgctcgcctctccgtgcgtagctactgttaccatcctggatgacgaccacgccggaatttttacatttgagtgtgacacaatccacgtgagcgagagtattggtgttatggaagtaaaggtgctcaggacctccggtgcgaggggcacggttatagttccgtttcggaccgtcgagggaaccgcaaaaggggggggggaggactttgaagatacctatggcgagctcgaattcaagaatgacgaaactgtctgcgatagacaagaggccgactacggccggcgtggtggccaggaggatagccgagatgggaaagccagtatcggctag

SEQ ID NO: 332428 - DNA, 2784 bp, Artificial Sequence
  derived and/or modified sequence
atggcctggctgcggctgcagcccctgaccagcgccttcctgcacttcggcctggtgacctttgtgctcttcctgaatggcctgcgggcagaggccggcggcagcggagatgtgcccagcacaggccagaacaatgaaagctgcagcggcagcagtgactgcaaggagggcgtcatcctgcccatctggtacccagagaaccccagcctgggggacaagatcgcccgggtcatcgtgtactttgtggccctgatctacatgttcctgggcgtgtccatcatcgctgaccgcttcatggccagcattgaggtgatcaccagccaggagcgggaggtgaccatcaagaagcccaacggggagaccagcaccaccaccatccgggtgtggaatgagaccgtgagcaacctgaccctgatggccctgggcagcagcgcccctgagatcctgctgagcctgattgaggtgtgtggccacggcttcatcgccggggacctgggccccagcaccatcgtgggcagcgctgccttcaacatgttcatcatcatcggcatctgtgtgtatgtgatcccagatggagagaccaggaagatcaagcacctgcgggtcttcttcatcacagctgcctggagcatctttgcctacatctggctgtacatgatcctggccgtgttcagccctggggtggtgcaggtgtgggagggcctgctgaccctcttcttcttccctgtgtgtgtgctgctggcctgggtggccgacaagaggctgctcttctacaagtacatgcacaagaagtacagaacagacaagcaccggggcatcatcattgaaacagaaggagaccaccccaagggcatcgagatggatggcaagatgatgaacagccacttcctggatggcaacctggtgcccctggagggcaaggaggtggatgagagcagaagagagatgatccgcatcctgaaggacctgaagcagaagcaccctgagaaggacctggaccagctggtggagatggccaactactatgccctgagccaccagcagaagagccgggccttctaccgcatccaggccaccaggatgatgactggagctggcaacatcctgaagaagcatgctgctgagcaggccaagaaggccagctccatgtctgaggtgcacacagatgagcctgaggacttcatcagcaaggtgttctttgacccctgcagctaccagtgcctggagaactgtggggctgtgctgctgactgtggtgaggaaaggaggagacatgagcaagaccatgtatgtggactacaagacagaagatggcagcgccaatgctggagctgactatgagttcacagagggcaccgtggtgctgaagccaggagagacccagaaggagttctctgtgggcatcattgatgatgacatctttgaggaggatgagcacttctttgtgcggctgagcaatgtgagaattgaggaggagcagcctgaggagggcatgcccccagccatcttcaacagcctgcccctgcccagggctgtgctggccagcccctgtgtggccaccgtgaccatcctggatgatgaccatgctggcatcttcacctttgaatgtgacaccatccacgtgtctgagagcattggagtgatggaggtgaaggtgctgcggaccagcggggcccggggcaccgtgattgtgcccttcagaacagtggagggcacagccaagggcggcggggaggactttgaggacacctacggggagctggagttcaagaatgatgagaccgtgaagaccatccgggtgaagatcgtggatgaggaggagtatgaaaggcaggagaacttcttcatcgccctgggggagcccaagtggatggagcggggcatcagcgccctgctgctgagcccagatgtgacagacaggaagctgaccatggaggaggaggaggccaagagaattgctgagatgggcaagcctgtgctgggggagcaccccaagctggaggtgatcatcgaggagagctatgagttcaagaccaccgtggacaagctgatcaagaagaccaacctggccctggtggtgggcacccacagctggagggaccagttcatggaggccatcaccgtgtctgctgctggagatgaagatgaagatgaaagtggagaggagcggctgcccagctgctttgattatgtgatgcacttcctgaccgtcttctggaaggtgctgtttgcctgtgtgcccccaacagagtactgccacggctgggcctgctttgctgtgtccatcctgatcatcggcatgctgacagccatcatcggggacctggccagccacttcggctgcaccatcggcctgaaggacagcgtgacagctgtggtgtttgtggccttcggcacctctgtgcctgacacctttgccagcaaggccgccgccctgcaggatgtgtatgcagatgccagcattggaaatgtgacaggcagcaatgctgtgaatgtgttcctgggcatcggcctggcctggagcgtggccgccatctactgggccctgcagggccaggagttccacgtgtctgctggcaccctggccttctctgtgaccctcttcaccatctttgcctttgtgtgcatctctgtgctgctgtacagaagaagaccccacctgggcggggagctgggcggcccccggggctgcaagctggccaccacctggctgtttgtgtccctgtggctgctgtacatcctgtttgccaccctggaggcctactgctacatcaagggcttctag

SEQ ID NO: 332429 - DNA, 1863 bp, Artificial Sequence
  derived and/or modified sequence
atggcctggctgcggctgcagcccctgaccagcgccttcctgcacttcggcctggtgacctttgtgctcttcctgaatggcctgcgggcagaggccggcggcagcggagatgtgcccagcacaggccagaacaatgaaagctgcagcggcagcagtgactgcaaggagggcgtcatcctgcccatctggtacccagagaaccccagcctgggggacaagatcgcccgggtcatcgtgtactttgtggccctgatctacatgttcctgggcgtgtccatcatcgctgaccgcttcatggccagcattgaggtgatcaccagccaggagcgggaggtgaccatcaagaagcccaacggggagaccagcaccaccaccatccgggtgtggaatgagaccgtgagcaacctgaccctgatggccctgggcagcagcgcccctgagatcctgctgagcctgattgaggtgtgtggccacggcttcatcgccggggacctgggccccagcaccatcgtgggcagcgctgccttcaacatgttcatcatcatcggcatctgtgtgtatgtgatcccagatggagagaccaggaagatcaagcacctgcgggtcttcttcatcacagctgcctggagcatctttgcctacatctggctgtacatgatcctggccgtgttcagccctggggtggtgcaggtgtgggagggcctgctgaccctcttcttcttccctgtgtgtgtgctgctggcctgggtggccgacaagaggctgctcttctacaagtacatgcacaagaagtacagaacagacaagcaccggggcatcatcattgaaacagaaggagaccaccccaagggcatcgagatggatggcaagatgatgaacagccacttcctggatggcaacctggtgcccctggagggcaaggaggtggatgagagcagaagagagatgatccgcatcctgaaggacctgaagcagaagcaccctgagaaggacctggaccagctggtggagatggccaactactatgccctgagccaccagcagaagagccgggccttctaccgcatccaggccaccaggatgatgactggagctggcaacatcctgaagaagcatgctgctgagcaggccaagaaggccagctccatgtctgaggtgcacacagatgagcctgaggacttcatcagcaaggtgttctttgacccctgcagctaccagtgcctggagaactgtggggctgtgctgctgactgtggtgaggaaaggaggagacatgagcaagaccatgtatgtggactacaagacagaagatggcagcgccaatgctggagctgactatgagttcacagagggcaccgtggtgctgaagccaggagagacccagaaggagttctctgtgggcatcattgatgatgacatctttgaggaggatgagcacttctttgtgcggctgagcaatgtgagaattgaggaggagcagcctgaggagggcatgcccccagccatcttcaacagcctgcccctgcccagggctgtgctggccagcccctgtgtggccaccgtgaccatcctggatgatgaccatgctggcatcttcacctttgaatgtgacaccatccacgtgtctgagagcattggagtgatggaggtgaaggtgctgcggaccagcggggcccggggcaccgtgattgtgcccttcagaacagtggagggcacagccaagggcggcggggaggactttgaggacacctacggggagctggagttcaagaatgatgagaccgtgtgtgaccggcaggaggccgactatggaagaagaggaggccaggaggacagcagagatggcaaggccagcattggatag

SEQ ID NO: 332430 - DNA, 2784 bp, Artificial Sequence
  derived and/or modified sequence
atggcctggctgcggctgcagcccctgaccagcgccttcctgcacttcggacttgttacctttgttctcttcttaaatggcctgcgagcagaagccggcggctcgggcgacgtgcccagcacaggccagaacaatgagagttgtagcggaagctccgattgcaaagagggggtcattctgcccatttggtatcccgaaaacccttctttaggggataaaattgcaagggtgatcgtgtatttcgttgctctcatctacatgttcctgggagtgagcatcattgccgatcgcttcatggcctccattgaagttattacatcccaggaaagggaagtgacaatcaaaaaaccaaacggcgaaacctccaccacaacgattcgagtctggaatgagactgttagtaatctcaccctgatggccctcgggagttcagcacccgaaatcttgctctctcttattgaagtgtgtggccatggcttcatcgctggggacctgggtccgagtaccatcgttggaagtgcagccttcaatatgtttataatcattggcatctgtgtgtacgtgatccccgatggggaaactagaaaaatcaaacatcttagggttttcttcattactgctgcctggagcatcttcgcctatatatggttatatatgatcttagcagtcttttcgcccggagtggtgcaggtgtgggaagggctgttgactctctttttcttcccggtgtgtgtccttctagcgtgggttgccgacaagaggctgttattctataaatacatgcataagaagtacaggactgataaacaccgaggcattattatagagaccgagggcgaccacccaaagggaatagagatggacggcaaaatgatgaattcacattttctggacggcaatttagtacctctcgagggtaaggaggtggacgagagcagacgggagatgattagaatcctcaaagatctgaagcagaagcacccggagaaggacctcgaccagctggtggagatggccaattattatgctctatcacaccagcaaaaaagcagagctttctaccgaattcaggccacgcgcatgatgactggggccggaaatatcttgaagaagcatgcggcggaacaagccaagaaggcctcatcgatgtcggaagtacacaccgacgaacccgaggatttcatctctaaagtgtttttcgatccctgcagctatcagtgcctggagaattgcggtgctgtgctcttgacagtggtccgcaaaggtggcgatatgtctaaaacaatgtacgtggactacaaaacagaagacggatccgcaaatgcaggggctgattacgaattcaccgaaggtactgtcgtgttgaagcctggcgaaacccaaaaggagttttcagtgggaattattgatgatgatatcttcgaagaggacgagcactttttcgtccgcctatctaatgtcaggatcgaggaagagcagcctgaggagggtatgcccccggccatatttaatagcctgcccttgccacgtgccgtgttggcatccccatgcgtggccactgtcaccatcctggacgatgatcacgccggaatttttacctttgagtgcgatactattcacgtcagtgagtccataggcgttatggaggtcaaagttctccgcacctctggggcccggggcactgtcatcgttccctttaggaccgtggaggggacagctaaagggggtggcgaagacttcgaggacacatacggcgagctggaatttaagaacgacgagaccgtgaaaactatccgtgtgaaaatcgtggatgaggaagaatatgagaggcaagagaacttctttattgctctgggcgaacctaaatggatggaacgaggtatcagtgccctcctactttcccccgacgtcaccgacagaaagctgactatggaagaggaagaggctaagcgcatcgccgagatgggcaaaccagtgctcggcgagcaccctaagctcgaagttattatcgaggagtcttatgagttcaagacaacagtcgacaaactgattaagaagaccaatctggctttagtcgtgggaacacacagctggcgcgaccagtttatggaagcaatcaccgtgtccgcagctggcgatgaagacgaggacgagtctggagaggagaggctcccctcctgtttcgattacgtcatgcattttctgaccgttttctggaaggtgctttttgcttgtgtcccgcccacggagtattgccacggctgggcgtgctttgcagttagtatcctgataattggaatgctgactgctattattggggacctggccagccacttcggatgcacaattggcctgaaggactcagtgacagccgtcgtcttcgtcgcgttcggcaccagtgtgcccgacacatttgcttccaaggcagcggcgctgcaggacgtctacgcagacgccagcattgggaacgtgacaggatccaatgctgttaacgtttttttgggaatcgggcttgcctggtcagtggccgccatctactgggcactgcagggccaggagtttcatgtatctgcaggcaccctggccttctcagtgacactcttcaccatattcgctttcgtatgcatatccgtgcttctgtatcgcagaaggcctcatctgggaggcgagctgggcggccccagagggtgcaagctggctaccacctggctgttcgtgtccctctggctgttatatatattgtttgcgacgctagaggcgtactgttatattaagggcttttag

SEQ ID NO: 332431 - DNA, 1863 bp, Artificial Sequence
  derived and/or modified sequence
atggcctggctgcggctgcagcccctgaccagcgccttcctgcacttcgggctagtgacatttgttctgttcctgaatggcctgagggccgaggccggcgggtccggggatgtgccatccacgggccagaacaatgagtcctgtagtggaagcagcgactgtaaggagggagtgattctgccaatttggtatcctgagaaccctagcttaggggataaaatcgcaagagtaattgtatacttcgtcgcgctaatatatatgtttttaggggtgtcaataatcgcagacagattcatggcgagcatagaggtgataacaagtcaggagcgcgaagtgaccatcaagaagcccaacggtgagacgagcaccacgaccatcagggtgtggaacgagaccgtgagcaacctgacccttatggctctcggcagctcagcccctgaaatacttctgtctctcattgaagtgtgtggtcacggctttatcgccggagatctcggacccagtacgatcgtggggagcgcggccttcaatatgttcataattattggcatctgtgtgtatgtgattccggacggagaaactagaaagataaagcatctgcgagtgtttttcattacggccgcttggtccattttcgcttacatttggctgtatatgatccttgctgtgtttagcccgggggtcgtgcaggtgtgggagggcctgctgaccttattcttttttcccgtctgtgttctcctggcttgggtggctgataagcgcctgctcttctacaagtatatgcacaagaagtatcgaactgacaagcatagagggatcatcatcgagacagagggtgaccaccccaaaggcattgaaatggacggtaaaatgatgaacagtcatttcttagacggaaatctggttccgctggagggcaaagaggtagatgaatccagacgcgaaatgatcaggatcctaaaagatcttaaacagaagcaccctgagaaggatctggaccagttggtcgaaatggctaattactatgctctaagtcaccagcagaaatccagggccttctacagaattcaggcgactcgaatgatgacaggcgccgggaacattctgaaaaaacacgcagcagaacaggctaagaaggcctcctctatgagcgaagtccacactgacgagcctgaagacttcatatcaaaagtttttttcgacccgtgcagttaccaatgtctagaaaattgcggagccgtgctgctcacagtcgtgcgcaagggcggcgacatgagcaaaactatgtacgtggattacaagaccgaggatggttccgcaaatgccggggccgactatgagttcaccgaagggaccgtcgtgctgaagcctggcgaaacacagaaggagttttctgtgggcataatagatgatgacatctttgaagaggacgagcatttcttcgtgcggctgtctaacgtccggattgaagaagagcaacccgaggagggcatgccacccgctatctttaattccctcccgctaccacgagctgtactagcctctccgtgcgtggctacagttactatacttgatgatgatcatgcagggatctttacgtttgaatgcgacaccatccatgtgtccgaatccatcggggtcatggaagttaaggtcttgcgaaccagcggcgcgaggggcaccgttatagttccttttcggacggtcgaaggaactgcaaaaggcggtggcgaagacttcgaggacacctacggcgaattggagttcaaaaatgatgagaccgtgtgtgaccgccaggaggctgactacggccgcagaggcggtcaggaggattctagggacggaaaggcttcaattggttag

SEQ ID NO: 332432 - DNA, 2784 bp, Artificial Sequence
  derived and/or modified sequence
atggcttggctgcgactgcaacccctgacctccgcctttctgcatttcggcctggtgactttcgtgctttttctgaatgggctaagggccgaggcaggcggtagtggggacgttcctagcacaggacagaacaatgaatcgtgttccggctcgtctgattgcaaggagggagtgattctgcctatatggtatccagagaatccttccctgggagacaaaatcgcaagggtcattgtctattttgttgctctgatttacatgttcctgggcgtgagtataatcgcggataggttcatggcaagcatcgaggtgattacatcccaagaaagagaggtcacaattaagaagcctaatggcgagacttctacaaccaccattagagtctggaacgagacagtgtctaacctgacactgatggccctggggagctctgccccagaaattttactctccctgatagaggtttgcggacacggatttattgccggagatctggggccatccacaattgtcgggagcgctgctttcaatatgttcatcattatcggcatatgcgtttacgtgattccggatggcgaaacgcgcaagatcaagcatctgcgcgtctttttcatcacagccgcttggtccatttttgcttatatttggctgtatatgattttggctgttttctctcctggagtcgtacaggtctgggagggcttactgacactcttcttcttccctgtctgtgtacttctggcatgggtcgctgataaaagacttctgttttataagtatatgcataaaaaatatcgaactgacaaacaccgtggaatcatcatcgagactgagggcgatcaccctaagggaatagagatggacgggaagatgatgaattcacattttctcgacggcaacctggttcctcttgagggaaaggaagtggacgaaagtcgtcgggagatgatccggattcttaaggatcttaaacagaaacatccggaaaaagacctggaccagcttgtcgaaatggccaattactacgctctgagccaccagcagaaatctcgtgcattctaccgcatacaagccacccggatgatgacgggcgcaggtaacattctgaagaagcacgccgctgaacaagccaagaaagcgagttctatgagcgaggtgcacaccgacgaacctgaagactttatctcaaaagtcttttttgatccttgttcctaccagtgtctggagaactgcggtgctgtcctactgaccgtggtgagaaaaggcggagacatgtcaaagactatgtatgtcgattacaagactgaagatggaagcgccaatgcaggtgctgattatgaatttacggagggcaccgttgtgctgaagcccggtgagactcagaaggagttctcagtgggcattatcgatgatgacatattcgaggaggacgagcacttttttgtgcgcctgtctaacgtgcggatcgaggaagaacagccagaggagggcatgccgccagctatctttaattccctgcctctcccacgggctgtgctggcctctccgtgcgtcgcaaccgtgacaatcctcgacgacgaccacgctggaatttttacctttgaatgcgacaccatccatgtgtctgaatccatcggagtgatggaagtgaaggttcttcgaacatccggcgctaggggcacggtgatagtacccttccgaacggtggagggcaccgcaaaggggggaggcgaagattttgaagacacctacggcgaattggaattcaagaatgacgaaaccgtgaaaacgatcagagtgaagatcgttgacgaagaggagtacgaacggcaagagaactttttcatcgctttgggcgagcccaagtggatggaacgcggaattagcgccctcctcctgtcgccagacgttactgatcgtaaactcaccatggaagaagaggaggcaaagaggattgccgaaatgggcaagcctgtactcggcgaacatccaaagttggaggtgatcattgaggagtcctacgaattcaaaaccacggtggataaattgatcaagaaaaccaatctggccctggttgtggggacacacagctggcgggaccagtttatggaggccattacagtgagcgccgcaggcgatgaggacgaagatgaaagcggcgaggagagactgccaagttgttttgactacgtgatgcattttctgactgtattctggaaggtgctctttgcgtgtgtgcctcctaccgaatattgccatggttgggcgtgtttcgcagtaagtatcctcataatcggaatgctcaccgccatcatcggggatctggcttcacattttggctgcacgatcgggctgaaggactccgtgactgccgttgtcttcgtggcctttggcacttctgttccagacacattcgctagcaaagcagctgccctgcaagacgtgtacgcagacgcatcaattggtaatgtgaccggcagcaacgcggttaatgtattcctggggataggactggcctggtccgtggctgccatctattgggcattgcagggacaggaatttcatgtcagtgctgggaccctcgccttcagcgtgaccctgttcactatttttgctttcgtgtgtatctctgtgcttttgtaccgtcgaaggccacatcttggaggcgagctggggggtccccgtgggtgcaagctcgccaccacttggctcttcgtttcattgtggctgctctatatactgtttgctaccctggaggcctattgttatatcaaaggattttag

SEQ ID NO: 332433 - DNA, 1863 bp, Artificial Sequence
  derived and/or modified sequence
atggcgtggctccgcctacaacccctaactagcgcctttctgcactttggccttgtgacattcgtgctgttccttaacggattgcgggctgaggctggaggaagcggagacgtgccctccactgggcaaaataatgagtcttgctctgggtcttccgactgcaaagaaggagtgatactacccatttggtaccccgaaaacccttcactgggcgataagatcgccagggtgatcgtttatttcgtggctctcatttacatgttcttgggcgtcagcattatagctgatcgcttcatggccagcatcgaagtgatcacttcccaagaaagagaggtcacaattaaaaaacccaatggtgagacttccacaaccaccattcgagtgtggaacgagacagtgtccaatcttacgctgatggctctcggatcaagcgcacctgaaatattgctgagcttaattgaggtctgtgggcatgggttcatcgccggtgatctgggacctagcacgatagttgggtctgcggcatttaacatgttcattatcattggaatctgcgtctacgtcatcccagacggcgaaactagaaagattaaacatctccgagtgttttttattacagctgcatggagtatcttcgcatacatctggctttacatgatactggcagtcttttctccaggagtggtccaggtgtgggaagggctcctcactctcttcttttttccggtttgtgttctcctggcctgggtagctgataagaggctcctgttctataagtacatgcacaaaaaatacagaacggacaaacatagaggtatcataatagagacggagggtgatcatcccaagggcatcgagatggacggaaagatgatgaacagccatttcctagatggaaacctggtccccctcgagggcaaggaggtggatgagtcccgacgcgaaatgattcgcatcctaaaggatctgaagcagaagcaccctgagaaagacctggaccagctcgtagagatggcgaactactacgcactctctcatcaacaaaagtcccgggctttctaccgcatccaagctacacggatgatgactggagctggcaatatcctaaagaagcacgctgccgagcaggcgaagaaggcctctagcatgtctgaagtgcacactgacgaaccggaggacttcatcagtaaggtctttttcgatccttgttcataccagtgcctcgaaaactgtggggctgtgcttctgacagttgtgagaaaagggggtgatatgtccaaaacaatgtatgtggattataaaacggaagacggctccgccaatgcaggggctgattatgagttcaccgaaggcactgtggtattgaaacctggggagacccagaaggagttcagtgtggggatcatcgatgatgacatctttgaggaagacgaacacttctttgtgcggctgagcaacgtgcggatagaggaagaacagcccgaagaggggatgccacctgccatattcaattctctacctttacctcgtgcggtcttggctagcccctgtgtcgcaaccgtgaccatacttgatgacgatcacgcaggcattttcacattcgagtgcgacaccattcatgtgtcggagtcgatcggggtgatggaggtgaaagttttacgcacttccggagccaggggaacggtgatagttccttttagaactgttgaaggaaccgctaagggaggcggagaggacttcgaggacacatatggtgagctggaattcaaaaatgacgagacagtgtgcgacaggcaggaggcggactatggtcgcaggggtggccaggaagactctcgtgacggcaaggcttctatcggctag

SEQ ID NO: 332434 - DNA, 5268 bp, Artificial Sequence
  derived and/or modified sequence
cggcgctgtctcccagctgatagggtgacgttccgtttggaggcttggagattggctttttgatttggcttcttccggcagcttaatgggcaaagctctccgctcgcccagaaaccagcctctccgcgcgtcccctctgcgcgcggcgaggccgagacgtctcccgcggtgacagcgtgcaaggcggagacccggcgcgctcccagcccagggaaagcccaggcgacgcgaccgcaagcccgagcccaggtccctcggagccgccagggcgcgccgggctgcttgccttcctgccccttcctgcaggaatcccccgccgcccgcggccgggactccgggcctctcccgggcgtagattccagtcaccgctctgggtcggggtttccctctttctgaaatccgtgcggaaggacccctcccggggcccctcgccctggccccagacaccctccctcccagaccccgcgctccagatgcgctgccccgcagctccctgacagctgcgagcccacgaaccccggcgggagggcggcggcggcggactgacatgccccggacgcggctgcggccggcgggcagcccgcgggggcgatgagccgctgcgaccggtgaggcgccgggcggcgggggcatcgcgtaccttcctcacccccctcccttgcccactccgctcgggaggccgagaggaaacggtctctggcctatcaggaggacaactggtgctgcaatagaagccagtggctaagtctcgtgtatggcgtggttaaggttgcagcctctcacctctgccttcctccattttgggctggttacctttgtgctcttcctgaatggtcttcgagcagaggctggtggctcaggggacgtgccaagcacagggcagaacaatgagtcctgttcagggtcatcggactgcaaggagggtgtcatcctgccaatctggtacccggagaacccttcccttggggacaagattgccagggtcattgtctattttgtggccctgatatacatgttccttggggtgtccatcattgctgaccgcttcatggcatctattgaagtcatcacctctcaagagagggaggtgacaattaagaaacccaatggagaaaccagcacaaccactattcgggtctggaatgaaactgtctccaacctgacccttatggccctgggttcctctgctcctgagatactcctctctttaattgaggtgtgtggtcatgggttcattgctggtgatctgggaccttctaccattgtagggagtgcagccttcaacatgttcatcatcattggcatctgtgtctacgtgatcccagacggagagactcgcaagatcaagcatctacgagtcttcttcatcaccgctgcttggagtatctttgcctacatctggctctatatgattctggcagtcttctcccctggtgtggtccaggtttgggaaggcctcctcactctcttcttctttccagtgtgtgtccttctggcctgggtggcagataaacgactgctcttctacaaatacatgcacaaaaagtaccgcacagacaaacaccgaggaattatcatagagacagagggtgaccaccctaagggcattgagatggatgggaaaatgatgaattcccattttctagatgggaacctggtgcccctggaagggaaggaagtggatgagtcccgcagagagatgatccggattctcaaggatctgaagcaaaaacacccagagaaggacttagatcagctggtggagatggccaattactatgctctttcccaccaacagaagagccgtgccttctaccgtatccaagccactcgtatgatgactggtgcaggcaatatcctgaagaaacatgcagcagaacaagccaagaaggcctccagcatgagcgaggtgcacaccgatgagcctgaggactttatttccaaggtcttctttgacccatgttcttaccagtgcctggagaactgtggggctgtactcctgacagtggtgaggaaagggggagacatgtcaaagaccatgtatgtggactacaaaacagaggatggttctgccaatgcaggggctgactatgagttcacagagggcacggtggttctgaagccaggagagacccagaaggagttctccgtgggcataattgatgacgacatttttgaggaggatgaacacttctttgtaaggttgagcaatgtccgcatagaggaggagcagccagaggaggggatgcctccagcaatattcaacagtcttcccttgcctcgggctgtcctagcctccccttgtgtggccacagttaccatcttggatgatgaccatgcaggcatcttcacttttgaatgtgatactattcatgtcagtgagagtattggtgttatggaggtcaaggttctgcggacatcaggtgcccggggtacagtcatcgtcccctttaggacagtagaagggacagccaagggtggcggtgaggactttgaagacacatatggggagttggaattcaagaatgatgaaactgtgaaaaccataagggttaaaatagtagatgaggaggaatacgaaaggcaagagaatttcttcattgcccttggtgaaccgaaatggatggaacgtggaatatcagcgctcctgttatctccagatgtgacagacaggaagctgactatggaagaagaggaggccaagaggatagcagagatgggaaagccagtattgggtgaacaccccaaactagaagtcatcattgaagagtcctatgagttcaagactacggtggacaaactgatcaagaagacaaacctggccttggttgtggggacccattcctggagggaccagttcatggaggccatcaccgtcagtgcagcaggggatgaggatgaggatgaatccggggaggagaggctgccctcctgctttgactacgtcatgcacttcctgactgtcttctggaaggtgctgtttgcctgtgtgccccccacagagtactgccacggctgggcctgcttcgccgtctccatcctcatcattggcatgctcaccgccatcattggggacctggcctcgcacttcggctgcaccattggtctcaaagattcagtcacagctgttgttttcgtggcatttggcacctctgtcccagatacgtttgccagcaaagctgctgccctccaggatgtatatgcagacgcctccattggcaacgtgacgggcagcaacgccgtcaatgtcttcctgggcatcggcctggcctggtccgtggccgccatctactgggctctgcagggacaggagttccacgtgtcggccggcacactggccttctccgtcaccctcttcaccatctttgcatttgtctgcatcagcgtgctcttgtaccgaaggcggccgcacctgggaggggagcttggtggcccccgtggctgcaagctcgccacaacatggctctttgtgagcctgtggctcctctacatactctttgccacactagaggcctattgctacatcaaggggttctaagccacacaacagagcctccagcagggcaggcctaggacttctcctaagagaagggcacttccccaccagtgatctctcccgactgcactgccctggagaggcagcatcaggacctaagccccaggaacttcacccaacttaggccctggcaattaactgaaagggcaaagtcttaatcaatcaaacaatggaggaatcaccgactttacacagtatttaattgaatacaaacaagcaacagcaacaaatccacctccaccccatctccccctcatatccctgacccaaagcaaaggtcagagcctttcgcctccttctattccatcttttgattattcctttgcctctcatttctttggaagcagggtttctcctctctgcccaattccatatgtccctattatctcactcagctgacaagacgtgaaaatgagtcacattcatgtggctggggtggggttcttttttcattgtaatcattattgtggttgctttcgttttgccattaggttttgcttattattttgttttgtcttttttttctgaagtgagtgaaaaaggtgccacaaaggaattccaggtccgagccaacagagagaaacatgaatttttagacacatgctctcctgccacctcttggctccatcaagatccagttccccatctcactgttttctctgagttcttgggaggagtgatggtgttggggtagaaataagctcactcacccacgcagggtactaaagatcttacaggagcttcaactggagcaggaggagctttttatgcttatgttgaatcaagtcagatacaaaaagcaattgtccctctttgcccaagcctttccaattctgtgtgtcttgttgtgtcagtgtccacttgtgtatccttctgcaggaagacccgccaaatagaagagatgggacaaaaataggaatggtgtgtgacgacaaagggctactggaagaacaaaagggatacaggccttcttgattatctttggctttgtacctgaggcaggagagaagagatgtccaaccagtgagatctttaagagaaaagtttgtattttaaatgtcaatgtgcctgagaaatgtcagcttcaccacgctcttgcttcctaatgctctatacaaagagggctgactatatttcttgaagtggtgtaaaaacttagagattttataagagaaccaggggctcccttcacctctcctggtccctcaggtcacatatgaaagcatttttacaagataggaactggaattcctcatttctcccatgttcctgcttgttcttaaacttcatgaagctatttttccagcctatggggtagttcttgctccagtaagaggaatcttagttgtcataatcccttggagcctgggtttttggagaaagagatctccgtgccctacagaccttttctcaacgaatgtgggaaggacctggctttaaaacacgcacacaaacacacaaataaacagacataagatgtcatcacgaaactgcccacggatctttaggctttctgcattgacataaatacattttctaagggggggggggaagaaattaaaaaacacctgttaattttaaacacattttttaagaaaaaaataattaaaaaagaaacagtgctcatgtcataagctatgttgacagttgccagtggaaatgttgggttggttcaaaaaaaaaataaaagctatactatatctctctacata

SEQ ID NO: 332435 - DNA, 5146 bp, Artificial Sequence
  derived and/or modified sequence
cggcgctgtctcccagctgatagggtgacgttccgtttggaggcttggagattggctttttgatttggcttcttccggcagcttaatgggcaaagctctccgctcgcccagaaaccagcctctccgcgcgtcccctctgcgcgcggcgaggccgagacgtctcccgcggtgacagcgtgcaaggcggagacccggcgcgctcccagcccagggaaagcccaggcgacgcgaccgcaagcccgagcccaggtccctcggagccgccagggcgcgccgggctgcttgccttcctgccccttcctgcaggaatcccccgccgcccgcggccgggactccgggcctctcccgggcgtagattccagtcaccgctctgggtcggggtttccctctttctgaaatccgtgcggaaggacccctcccggggcccctcgccctggccccagacaccctccctcccagaccccgcgctccagatgcgctgccccgcagctccctgacagctgcgagcccacgaaccccggcgggagggcggcggcggcggactgacatgccccggacgcggctgcggccggcgggcagcccgcgggggcgatgagccgctgcgaccggtgaggcgccgggcggcgggggcatcgcgtaccttcctcacccccctcccttgcccactccgctcgggaggccgagaggaaacggtctctggcctatcaggaggacaactggtgctgcaatagaagccagtggctaagtctcgtgtatggcgtggttaaggttgcagcctctcacctctgccttcctccattttgggctggttacctttgtgctcttcctgaatggtcttcgagcagaggctggtggctcaggggacgtgccaagcacagggcagaacaatgagtcctgttcagggtcatcggactgcaaggagggtgtcatcctgccaatctggtacccggagaacccttcccttggggacaagattgccagggtcattgtctattttgtggccctgatatacatgttccttggggtgtccatcattgctgaccgcttcatggcatctattgaagtcatcacctctcaagagagggaggtgacaattaagaaacccaatggagaaaccagcacaaccactattcgggtctggaatgaaactgtctccaacctgacccttatggccctgggttcctctgctcctgagatactcctctctttaattgaggtgtgtggtcatgggttcattgctggtgatctgggaccttctaccattgtagggagtgcagccttcaacatgttcatcatcattggcatctgtgtctacgtgatcccagacggagagactcgcaagatcaagcatctacgagtcttcttcatcaccgctgcttggagtatctttgcctacatctggctctatatgattctggcagtcttctcccctggtgtggtccaggtttgggaaggcctcctcactctcttcttctttccagtgtgtgtccttctggcctgggtggcagataaacgactgctcttctacaaatacatgcacaaaaagtaccgcacagacaaacaccgaggaattatcatagagacagagggtgaccaccctaagggcattgagatggatgggaaaatgatgaattcccattttctagatgggaacctggtgcccctggaagggaaggaagtggatgagtcccgcagagagatgatccggattctcaaggatctgaagcaaaaacacccagagaaggacttagatcagctggtggagatggccaattactatgctctttcccaccaacagaagagccgtgccttctaccgtatccaagccactcgtatgatgactggtgcaggcaatatcctgaagaaacatgcagcagaacaagccaagaaggcctccagcatgagcgaggtgcacaccgatgagcctgaggactttatttccaaggtcttctttgacccatgttcttaccagtgcctggagaactgtggggctgtactcctgacagtggtgaggaaagggggagacatgtcaaagaccatgtatgtggactacaaaacagaggatggttctgccaatgcaggggctgactatgagttcacagagggcacggtggttctgaagccaggagagacccagaaggagttctccgtgggcataattgatgacgacatttttgaggaggatgaacacttctttgtaaggttgagcaatgtccgcatagaggaggagcagccagaggaggggatgcctccagcaatattcaacagtcttcccttgcctcgggctgtcctagcctccccttgtgtggccacagttaccatcttggatgatgaccatgcaggcatcttcacttttgaatgtgatactattcatgtcagtgagagtattggtgttatggaggtcaaggttctgcggacatcaggtgcccggggtacagtcatcgtcccctttaggacagtagaagggacagccaagggtggcggtgaggactttgaagacacatatggggagttggaattcaagaatgatgaaactgtatgtgacagacaggaagctgactatggaagaagaggaggccaagaggatagcagagatgggaaagccagtattgggtgaacaccccaaactagaagtcatcattgaagagtcctatgagttcaagactacggtggacaaactgatcaagaagacaaacctggccttggttgtggggacccattcctggagggaccagttcatggaggccatcaccgtcagtgcagcaggggatgaggatgaggatgaatccggggaggagaggctgccctcctgctttgactacgtcatgcacttcctgactgtcttctggaaggtgctgtttgcctgtgtgccccccacagagtactgccacggctgggcctgcttcgccgtctccatcctcatcattggcatgctcaccgccatcattggggacctggcctcgcacttcggctgcaccattggtctcaaagattcagtcacagctgttgttttcgtggcatttggcacctctgtcccagatacgtttgccagcaaagctgctgccctccaggatgtatatgcagacgcctccattggcaacgtgacgggcagcaacgccgtcaatgtcttcctgggcatcggcctggcctggtccgtggccgccatctactgggctctgcagggacaggagttccacgtgtcggccggcacactggccttctccgtcaccctcttcaccatctttgcatttgtctgcatcagcgtgctcttgtaccgaaggcggccgcacctgggaggggagcttggtggcccccgtggctgcaagctcgccacaacatggctctttgtgagcctgtggctcctctacatactctttgccacactagaggcctattgctacatcaaggggttctaagccacacaacagagcctccagcagggcaggcctaggacttctcctaagagaagggcacttccccaccagtgatctctcccgactgcactgccctggagaggcagcatcaggacctaagccccaggaacttcacccaacttaggccctggcaattaactgaaagggcaaagtcttaatcaatcaaacaatggaggaatcaccgactttacacagtatttaattgaatacaaacaagcaacagcaacaaatccacctccaccccatctccccctcatatccctgacccaaagcaaaggtcagagcctttcgcctccttctattccatcttttgattattcctttgcctctcatttctttggaagcagggtttctcctctctgcccaattccatatgtccctattatctcactcagctgacaagacgtgaaaatgagtcacattcatgtggctggggtggggttcttttttcattgtaatcattattgtggttgctttcgttttgccattaggttttgcttattattttgttttgtcttttttttctgaagtgagtgaaaaaggtgccacaaaggaattccaggtccgagccaacagagagaaacatgaatttttagacacatgctctcctgccacctcttggctccatcaagatccagttccccatctcactgttttctctgagttcttgggaggagtgatggtgttggggtagaaataagctcactcacccacgcagggtactaaagatcttacaggagcttcaactggagcaggaggagctttttatgcttatgttgaatcaagtcagatacaaaaagcaattgtccctctttgcccaagcctttccaattctgtgtgtcttgttgtgtcagtgtccacttgtgtatccttctgcaggaagacccgccaaatagaagagatgggacaaaaataggaatggtgtgtgacgacaaagggctactggaagaacaaaagggatacaggccttcttgattatctttggctttgtacctgaggcaggagagaagagatgtccaaccagtgagatctttaagagaaaagtttgtattttaaatgtcaatgtgcctgagaaatgtcagcttcaccacgctcttgcttcctaatgctctatacaaagagggctgactatatttcttgaagtggtgtaaaaacttagagattttataagagaaccaggggctcccttcacctctcctggtccctcaggtcacatatgaaagcatttttacaagataggaactggaattcctcatttctcccatgttcctgcttgttcttaaacttcatgaagctatttttccagcctatggggtagttcttgctccagtaagaggaatcttagttgtcataatcccttggagcctgggtttttggagaaagagatctccgtgccctacagaccttttctcaacgaatgtgggaaggacctggctttaaaacacgcacacaaacacacaaataaacagacataagatgtcatcacgaaactgcccacggatctttaggctttctgcattgacataaatacattttctaagggggggggggaagaaattaaaaaacacctgttaattttaaacacattttttaagaaaaaaataattaaaaaagaaacagtgctcatgtcataagctatgttgacagttgccagtggaaatgttgggttggttcaaaaaaaaaataaaagctatactatatctctctacata

SEQ ID NO: 332436 - DNA, 2031 bp, Artificial Sequence
  derived and/or modified sequence
atgaagaaccagcagagcagcagcctgagcctggccgtgagcagcagccccaccgccgtggccttcagcaccaacggccagagagccgccgtgggcaccgccaacggcaccgtgtacctgctggacctgagaacctggcaggaggagaagagcgtggtgagcggctgcgacggcatcagcgcctgcctgttcctgagcgacgacaccctgttcctgaccgccttcgacggcctgctggagctgtgggacctgcagcacggctgcagagtgctgcagaccaaggcccaccagtaccagatcaccggctgctgcctgagccccgactgcagactgctggccaccgtgtgcctgggcggctgcctgaagctgtgggacaccgtgagaggccagctggccttccagcacacctaccccaagagcctgaactgcgtggccttccaccccgagggccaggtgatcgccaccggcagctgggccggcagcatcagcttcttccaggtggacggcctgaaggtgaccaaggacctgggcgcccccggcgccagcatcagaaccctggccttcaacgtgcccggcggcgtggtggccgtgggcagactggacagcatggtggagctgtgggcctggagagagggcgccagactggccgccttccccgcccaccacggcttcgtggccgccgccctgttcctgcacgccggctgccagctgctgaccgccggcgaggacggcaaggtgcaggtgtggagcggcagcctgggcagacccagaggccacctgggcagcctgagcctgagccccgccctgagcgtggccctgagccccgacggcgacagagtggccgtgggctacagagccgacggcatcagaatctacaagatcagcagcggcagccagggcgcccagggccaggccctggacgtggccgtgagcgccctggcctggctgagccccaaggtgctggtgagcggcgccgaggacggcagcctgcagggctgggccctgaaggagtgcagcctgcagagcctgtggctgctgagcagattccagaagcccgtgctgggcctggccaccagccaggagctgctggccagcgccagcgaggacttcaccgtgcagctgtggcccagacagctgctgaccagaccccacaaggccgaggacttcccctgcggcaccgagctgagaggccacgagggccccgtgagctgctgcagcttcagcaccgacggcggcagcctggccaccggcggcagagacagaagcctgctgtgctgggacgtgagaacccccaagacccccgtgctgatccacagcttccccgcctgccacagagactgggtgaccggctgcgcctggaccaaggacaacctgctgatcagctgcagcagcgacggcagcgtgggcctgtgggaccccgagagcggccagagactgggccagttcctgggccaccagagcgccgtgagcgccgtggccgccgtggaggagcacgtggtgagcgtgagcagagacggcaccctgaaggtgtgggaccaccagggcgtggagctgaccagcatccccgcccacagcggccccatcagccactgcgccgccgccatggagcccagagccgccggccagcccggcagcgagctgctggtggtgaccgtgggcctggacggcgccaccagactgtggcaccccctgctggtgtgccagacccacaccctgctgggccacagcggccccgtgagagccgccgccgtgagcgagaccagcggcctgatgctgaccgccagcgaggacggcagcgtgagactgtggcaggtgcccaaggaggccgacgacacctgcatccccagaagcagcgccgccgtgaccgccgtggcctgggcccccgacggcagcatggccgtgagcggcaaccaggccggcgagctgatcctgtggcaggaggccaaggccgtggccaccgcccagagcagccccgagcccaacagcaccggcggcctgagaggcgccgacaagagcggcctgggcagctag

SEQ ID NO: 332437 - DNA, 2031 bp, Artificial Sequence
  derived and/or modified sequence
atgaagaaccagcagtcttcctctctttccctggcggtctcaagctctccaaccgcggtggcatttagcaccaacggccaaagggccgctgtgggtaccgcaaatggcaccgtgtaccttctagatctcagaacatggcaggaagagaagtcagtcgtttccgggtgtgacggcatcagcgcctgcctatttctcagcgatgataccctctttcttaccgccttcgatggcctcctggagttgtgggatctacaacacggctgtagagtactccaaaccaaagctcaccaataccaaatcacaggctgttgtctgtcacctgattgccgtctcctcgctaccgtgtgcctgggagggtgtctgaaactgtgggacactgtccgaggccaactcgcctttcagcacacctaccccaagagcctgaattgcgtggcattccatccagaaggtcaggttatagcaaccggcagttgggctggatccattagcttcttccaagtggacggactcaaggtgacaaaggatctcggcgcacccggtgcatctatacgtacattagctttcaacgtgccagggggggtagtggcagtcggtaggctggattctatggtggagctttgggcttggcgggaaggggctagactggccgccttccctgcccaccacgggttcgtcgccgccgccttattcctgcatgctggctgtcaattgctcaccgctggagaggacgggaaggtacaggtttggtcaggcagtctgggccgaccaagaggacacctgggtagcttgagcctctcacccgctctctctgtcgcccttagtcccgacggcgacagagtggccgtgggatatcgcgcggatggcataagaatctacaaaatttccagtggtagtcagggggcccaggggcaggcactggacgttgcggtgtctgccctggcctggctgtctcctaaggtactggtgtcgggagctgaggatggatcattacagggctgggcactgaaagagtgctctttgcaatcattatggctactttctaggttccaaaaacccgtccttggtctggccaccagccaggagttgctcgctagcgcctccgaggattttaccgtacagttgtggcctcggcaacttttaacacggccccataaagccgaagattttccctgtggtactgagttgagaggccacgagggaccagtgtcctgttgctctttcagtactgatgggggatctctcgcaacaggaggccgggatcggagtctgctgtgctgggacgtgagaacccccaaaacgccagtgctgattcattcattccccgcatgtcaccgcgattgggtgactggttgcgcatggaccaaagataacttgctgatcagttgttcctcagacggatcggttggactctgggacccagagtccgggcagcgcctcggtcagttcctcggacatcagagcgcagtgtctgcagtcgccgccgtggaagaacacgtcgtgagcgtttcccgggatggaaccctgaaggtgtgggaccatcagggcgttgagttgactagtattcccgcacactctgggcctatcagccactgtgccgctgcaatggagccccgcgcggccggccagccgggaagtgagctgctcgtggtaactgtgggcttagacggggcaacccgcctttggcaccctctgttggtttgtcaaacgcatacactcctagggcactccgggccagtccgcgccgctgccgtgtctgaaacatccggattaatgctgaccgcttctgaagacggtagcgtccggctgtggcaagtccctaaggaagctgacgacacctgtatccccagatctagcgcggcagtcaccgcggtggcatgggctccagacggcagcatggccgtttctggtaaccaagccggcgagctcatactctggcaagaagcaaaagccgtcgctacggcccagagttctcccgagcccaattcgacgggaggcttacgcggagctgacaaatccggtctggggtcgtag

SEQ ID NO: 332438 - DNA, 2031 bp, Artificial Sequence
  derived and/or modified sequence
atgaagaaccagcagagcagcagcctgagcctggccgtgagcagcagccccacagctgtggccttcagcaccaacggccagagagctgctgtgggcacagccaatggaacagtgtacctgctggacctgcggacctggcaggaggagaagtctgtggtgtctggctgtgatggcatcagcgcctgcctcttcctgagtgatgacaccctcttcctgacagcctttgatggcctgctggagctgtgggacctgcagcacggctgccgggtgctgcagaccaaggcccaccagtaccagatcaccggctgctgcctgagcccagactgccgcctgctggccaccgtgtgcctgggcggctgcctgaagctgtgggacacagtgcggggccagctggccttccagcacacctaccccaagagcctgaactgtgtggccttccaccctgagggccaggtgattgccaccggctcctgggccggcagcatctccttcttccaggtggatggcctgaaggtgaccaaggacctgggcgcccctggggccagcatccgcaccctggccttcaacgtgcctggaggagtggtggccgtgggccgcctggacagcatggtggagctgtgggcctggagggagggcgcccggctggccgccttccctgcccaccacggctttgtggccgccgccctcttcctgcatgctggctgccagctgctgacagctggggaggatggcaaggtgcaggtgtggagcggcagcctgggccggccccggggccacctgggcagcctgagcctgagccctgccctgtctgtggccctgagcccagatggagacagagtggccgtgggctacagagcagatggcatccgcatctacaagatcagcagcggcagccagggcgcccagggccaggccctggatgtggccgtgtctgccctggcctggctgagccccaaggtgctggtgtctggagcagaagatggcagcctgcagggctgggccctgaaggaatgttccctgcagagcctgtggctgctgagccgcttccagaagcctgtgctgggcctggccaccagccaggagctgctggccagcgccagcgaggacttcaccgtgcagctgtggccccggcagctgctgacccggccccacaaggccgaggacttcccctgtggcacagagctgcggggccacgagggccctgtgtcctgctgcagcttcagcacagatggcggcagcctggccaccggcggccgggacaggagcctgctgtgctgggatgtgaggacccccaagacccctgtgctgatccacagcttccctgcctgccaccgggactgggtgacaggctgtgcctggaccaaggacaacctgctgatcagctgcagcagtgatggctctgtgggcctgtgggaccctgagagcggccagaggctgggccagttcctgggccaccagagcgctgtgtctgctgtggccgctgtggaggagcacgtggtgtctgtgtccagagatggcaccctgaaggtgtgggaccaccagggcgtggagctgaccagcatcccagcccacagcggccccatcagccactgtgccgccgccatggagcccagggctgctggccagcccggcagcgagctgctggtggtgacagtgggcctggatggagccacccggctgtggcaccccctgctggtgtgccagacccacaccctgctgggccacagcggccctgtgcgggctgctgctgtgtctgagaccagcggcctgatgctgacagcctctgaagatggctctgtgcggctgtggcaggtgcccaaggaggctgatgacacctgcatccccaggagcagcgctgctgtgacagctgtggcctgggccccagatggctccatggctgtgtctggcaaccaggccggggagctgatcctgtggcaggaggccaaggctgtggccacagcccagagcagccctgagcccaacagcactggaggcctgcggggagctgacaagagcggcctgggcagctag

SEQ ID NO: 332439 - DNA, 2031 bp, Artificial Sequence
  derived and/or modified sequence
atgaagaaccagcagagcagcagcctgagcctggccgtgagcagctcccctactgcagtcgcattctcaaccaatgggcagcgtgcggcggtcgggactgccaacggcacagtgtatttgttagatctaagaacgtggcaagaggagaaatcggtagtgtcaggctgcgatggcatttctgcttgcctgtttctgagcgatgatacgttgtttctgactgcctttgacggcctcctggagctgtgggatcttcagcatgggtgccgcgtgctacagaccaaggcccaccagtaccagataacaggctgttgcctgtccccagactgtcgtctattagctaccgtatgcctcggtggttgcttaaaattgtgggataccgtgcggggacagctcgcatttcagcacacatatcccaagagcttgaactgcgtggcctttcatccggagggccaggttatagccacagggtcctgggccggcagtatttcctttttccaggttgatgggctaaaggtgactaaggatctgggggccccaggggctagtattcggactcttgcattcaacgtacctggcggagtggtcgcggtcggacgtctggacagcatggtcgagctgtgggcctggcgcgagggtgcgagattggcagccttccccgcccatcacgggtttgtggcagctgccctctttttgcacgctggctgtcaacttctgaccgccggggaagacggaaaggttcaggtttggtcaggatccctgggccggcccagaggacatttgggctccttgagcctgagccctgcattgtcagtggcgctctctcctgacggcgacagagtggcagtgggataccgtgctgatggtatccggatatataagattagctcagggtcacagggcgcacaaggccaggcactagatgtagctgtgagtgctttggcttggttgagtcctaaagttctggtttcaggcgcagaggatggttctctgcagggatgggctctgaaggaatgcagccttcagtccctctggctcctgtcgagatttcagaagccggttcttggcctcgccacctcccaagagctgctggcaagcgcctcagaagacttcaccgttcagctgtggcctcgccagctgctgactaggccacataaagccgaagacttcccttgtgggaccgagttacgggggcacgagggacctgtgagttgttgcagcttctccaccgatgggggctccctcgccacggggggcagagacagatctctcctgtgttgggatgtccggactccaaaaaccccagtgttaattcatagctttcccgcatgtcacagggactgggtcactggttgtgcctggacaaaagacaatttactgattagctgctccagcgacggctccgtgggactgtgggaccccgagtccggacagcgcctgggccagttcctcgggcaccagtctgcagtgagcgctgtggctgcagtggaggagcatgtggtgagtgtaagcagagacgggacattgaaagtgtgggatcaccaaggcgtggagcttaccagcatcccagcccatagcggtccaataagtcactgtgcggcagctatggaacctcgggccgctgggcaacctggaagtgaattgctggttgtaacagtaggcctcgatggcgctaccaggctgtggcacccactgctggtgtgccaaacacacaccctgttgggccattctggcccagtgagagctgccgcggtatctgagacttccggactcatgttaacagcatctgaagacgggagtgtgagactgtggcaagtgccaaaagaggctgacgacacctgcatcccgcggtcctccgctgccgtgacggccgtcgcttgggctcccgacggatccatggcggtgagcggcaaccaggctggagagctgatcctgtggcaggaagctaaggccgttgccacagcgcagtcttcgccggaacctaacagcaccggcggtctgcgcggtgcagacaagagcggactgggctcttag

SEQ ID NO: 332440 - DNA, 2031 bp, Artificial Sequence
  derived and/or modified sequence
atgaagaaccagcaaagctcatccctctccctagctgtaagcagttcaccaactgcagtagcattctccacaaatggccaacgtgccgcagtggggacagccaacgggactgtataccttctcgatctcaggacctggcaggaagaaaaaagcgtcgtctcagggtgtgacggaatctctgcatgtcttttcctcagtgacgacactttatttctgacagcttttgacggccttctcgaactctgggacctgcagcacggatgccgggtgctgcagaccaaagcccaccagtaccaaattaccgggtgttgccttagccccgattgtcgccttctcgccaccgtgtgcctcggaggatgcctgaaattatgggatactgtgcggggacagctagcattccagcacacctatccaaagagcctcaactgtgtggcctttcaccccgaaggacaggtgattgctacaggatcgtgggccggttccatttccttcttccaggttgacggattaaaagtcaccaaagacctaggcgctccaggggcttccatccgaacactggctttcaacgtacctggaggggtggtggccgtcggacgcctggattcgatggtggagctgtgggcttggagggaaggtgctcgcctcgccgcattcccagcgcaccatggattcgtggcggcagctctcttcttgcacgcagggtgccagctgcttacagcgggtgaggacggaaaggtccaggtgtggtcggggagcctgggaaggcctcgtggccatctgggctctctgagcctcagccccgcattgtcagtagctctgtctccagatggcgatcgagtcgctgtcggttaccgagctgacgggattcggatttacaaaatctcctcaggctcacaaggcgcacagggccaagccctagacgtagctgtgagtgccctggcttggttatcgcccaaagtgctcgtgagtggggctgaggacgggtctctgcagggctgggctctgaaggagtgttctctccaatctctgtggctgttatctaggtttcagaagcctgtactcggcttggctacatctcaagaattgctcgcgagcgcatccgaagattttacggttcagctgtggcccagacagctgctgacacggcctcacaaagctgaggacttcccatgcggaaccgaattgcgagggcacgaaggtccggttagctgctgctccttcagcacagatggaggctcattggcaacaggagggagggataggtctctgctgtgttgggatgtgaggactcctaaaacacctgtgctgattcactcatttccagcctgccacagggattgggtgactggatgcgcctggaccaaggataacctgctcattagttgctccagtgacgggtctgtgggactttgggatcctgagagcggacagcggctcggacagttcctgggccatcagtctgccgtgtcagccgtggccgcagttgaagaacacgtagtgtccgtgtctcgcgatgggacactgaaggtgtgggaccaccagggcgtcgaactgacttctatcccagcccacagcggcccaatttctcattgtgccgcagctatggagcccagggctgctggacagcctggatccgagctgctggtcgtcacggtggggctcgacggtgcgacccgcctgtggcatccgcttctggtgtgccagacccataccttgctaggtcacagtgggcctgtgagagccgctgctgtctcagaaacgtccggactaatgctgaccgccagtgaggacggctcagtgaggttatggcaggtccccaaagaagccgatgatacatgtatcccccgaagcagtgctgccgtcacagccgtggcctgggcaccagacgggagcatggcagtgagtgggaaccaggctggcgaactgatcctctggcaggaagccaaggccgtcgcaaccgcccagagtagcccagagcctaattccacgggaggcctgcggggagccgataaatcagggttaggatcctag

SEQ ID NO: 332441 - DNA, 2698 bp, Artificial Sequence
  derived and/or modified sequence
ttccccaggccttgactgccctagaagtcacacggagtggtttgactgtggaccagctgcacggagtgctgagtgtgtggcggacactaccgaaggggactaagagctgggaagaagcagtggctgctggtaacagtggagacccctaccccatgggcccgtttgcctgcctcgtccagagtctgcgcagctcagctctggaagacatgtgacgctgatgcctcaggcaccttccgaagttgccctcctgaggctctgggagacctgccttaccacctgctccagagcgggaaccgtggacttctttcgaagttccttaccaacctccatgtggtggctgcacacttggaattgggtctggtctctcggctcttggaggcccatgccctctatgcttcttcagtccccaaagaggaacaaaagctccccgaggctgacgttgcagtgtttcgcaccttcctgaggcagcaggcttcaatcctcagccagtacccccggctcctgccccagcaggcagccaaccagcccctggactcacctctttgccaccaagcctcgctgctctcccggagatggcacctccaacacacactacgatggcttaataaaccccggaccatgaaaaatcagcaaagctccagcctgtctctggcagtttcctcatcccctactgctgtggccttctccaccaatgggcaaagagcagctgtgggcactgccaatgggacagtttacctgttggacctgagaacttggcaggaggagaagtctgtggtgagtggctgtgatggaatctctgcttgtttgttcctctccgatgatacactctttcttactgccttcgacgggctcctggagctctgggacctgcagcatggttgtcgggtgctgcagactaaggctcaccagtaccaaatcactggctgctgcctgagcccagactgccggctgctagccaccgtgtgcttgggaggatgcctaaagctgtgggacacagtccgtgggcagctggccttccagcacacctaccccaagtccctgaactgtgttgccttccacccagaggggcaggtaatagccacaggcagctgggctggcagcatcagcttcttccaggtggatgggctcaaagtcaccaaggacctgggggcacccggagcctctatccgtaccttggccttcaatgtgcctgggggggttgtggctgtgggccggctggacagtatggtggagctgtgggcctggcgagaaggggcacggctggctgccttccctgcccaccatggctttgttgctgctgcgcttttcctgcatgcgggttgccagttactgacggctggagaggatggcaaggttcaggtgtggtcagggtctctgggtcggccccgtgggcacctgggttccctttctctctctcctgccctctctgtggcactcagcccagatggtgatcgggtggctgttggatatcgagcggatggcattaggatctacaaaatctcttcaggttcccagggggctcagggtcaggcactggatgtggcagtgtccgccctggcctggctaagccccaaggtattggtgagtggtgcagaagatgggtccttgcagggctgggcactcaaggaatgctcccttcagtccctctggctcctgtccagattccagaagcctgtgctaggactggccacttcccaggagctcttggcttctgcctcagaggatttcacagtgcagctgtggccaaggcagctgctgacgcggccacacaaggcagaagactttccctgtggcactgagctgcggggacatgagggccctgtgagctgctgtagtttcagcactgatggaggcagcctggccaccgggggccgggatcggagtctcctctgctgggacgtgaggacacccaaaacccctgttttgatccactccttccctgcctgtcaccgtgactgggtcactggctgtgcctggaccaaagataacctactgatatcctgctccagtgatggctctgtggggctctgggacccagagtcaggacagcggcttggtcagttcctgggtcatcagagtgctgtgagcgctgtggcagctgtggaggagcacgtggtgtctgtgagccgggatgggaccttgaaagtgtgggaccatcaaggcgtggagctgaccagcatccctgctcactcaggacccattagccactgtgcagctgccatggagccccgtgcagctggacagcctgggtcagagcttctggtggtaaccgtcgggctagatggggccacacggttatggcatccactcttggtgtgccaaacccacaccctcctgggacacagcggcccagtccgtgctgctgctgtttcagaaacctcaggcctcatgctgaccgcctctgaggatggttctgtacggctctggcaggttcctaaggaagcagatgacacatgtataccaaggagttctgcagccgtcactgctgtggcttgggcaccagatggttccatggcagtatctggaaatcaagctggggaactaatcttgtggcaggaagctaaggctgtggccacagcacagtcttcacctgaaccgaattctacaggaggacttaggggtgctgacaagtctggattgggctcctgatggtcactttctcatcttggccaaagcagatttgaagttactttgcatg

SEQ ID NO: 332442 - DNA, 501 bp, Artificial Sequence
  derived and/or modified sequence
atggagaagctgcacggccacgtgagcgcccaccccgacatcctgagcctggagaacagatgcctggccatgctgcccgacctgcagcccctggagaagctgcaccagcacgtgagcacccacagcgacatcctgagcctgaagaaccagtgcctggccaccctgcccgacctgaagaccatggagaagccccacggctacgtgagcgcccaccccgacatcctgagcctggagaaccagtgcctggccaccctgagcgacctgaagaccatggagaagccccacggccacgtgagcgcccaccccgacatcctgagcctggagaacagatgcctggccaccctgagcagcctgaagagcaccgtgagcgccagccccctgttccagagcctgcagatcagccacatgacccaggccgacctgtacagagtgaacaacagcaactgcctgctgagcgagccccccagctggagagcccagcacttcagcaagggcctgtag

SEQ ID NO: 332443 - DNA, 501 bp, Artificial Sequence
  derived and/or modified sequence
atggagaagttacacggacacgtgagtgctcaccctgatattttgagcctggagaacagatgcctcgcaatgcttcctgacctccagcctctggaaaaattacaccagcacgtgagcacccactcggacatccttagcctcaaaaaccagtgcttggccactctgccagatttgaaaactatggaaaaacctcatggatacgtttctgcccacccggacatccttagcctggaaaatcagtgcctggcaaccctctcggacttgaaaactatggagaagcctcacggacatgtttccgctcaccctgatatcctctccctggagaaccggtgtctggccactctgtcatccctcaagtctaccgtgagcgccagccccctgtttcagagcctgcagattagccacatgacacaggcagacctttaccgggtgaataactccaactgtctgctaagcgaaccgccgtcatggagagctcagcacttcagcaaaggtctctag

SEQ ID NO: 332444 - DNA, 501 bp, Artificial Sequence
  derived and/or modified sequence
atggagaagctgcacggccacgtgtctgcccacccagacatcctgagcctggagaaccgctgcctggccatgctgcctgacctgcagcccctggagaagctgcaccagcacgtgtccacccacagcgacatcctgagcctgaagaaccagtgcctggccaccctgcctgacctgaagaccatggagaagccccacggctacgtgtctgcccacccagacatcctgagcctggagaaccagtgcctggccaccctgagtgacctgaagaccatggagaagccccacggccacgtgtctgcccacccagacatcctgagcctggagaaccgctgcctggccaccctgagcagcctgaagagcacagtgtctgccagccccctcttccagagcctgcagatcagccacatgacccaggccgacctgtacagagtgaacaacagcaactgcctgctgtctgagccccccagctggagggcccagcacttcagcaagggcctgtag

SEQ ID NO: 332445 - DNA, 501 bp, Artificial Sequence
  derived and/or modified sequence
atggagaagctgcacggccacgtgagcgcccaccccgacatcctgagtctggagaacagatgtctggcgatgctccccgaccttcagcccctggaaaagttgcatcaacacgtgtccactcactctgatatactctctctcaaaaatcagtgtttggcaaccctgccagatctaaaaacaatggagaagccgcacggatatgtctcggcacacccggacattctctcattggagaatcaatgcctggctactctctccgacctgaaaactatggaaaaaccacacggccacgtctctgcccacccagatatccttagtttggaaaatcggtgtctcgccaccctgtcttcgctgaaaagtactgtctccgccagcccactcttccagtccttgcagattagtcacatgacccaggccgatctgtatcgggtaaataatagcaattgtctgttgtctgaacctcctagctggagagctcagcacttcagcaagggcctgtag

SEQ ID NO: 332446 - DNA, 501 bp, Artificial Sequence
  derived and/or modified sequence
atggaaaaactgcacggccacgtgtccgcccacccagatatcctctcattggaaaatagatgtctggctatgcttcccgatctccaacctctggagaagctccatcaacatgtgtcaacacactccgatattctgtccctaaagaatcagtgtttagccactttgccggaccttaagaccatggagaaacctcatgggtacgtgagtgcccacccagatattctttctttggaaaaccagtgcttagccaccttgtctgatctgaagaccatggagaagccacacggccatgttagcgctcacccagatatcttgtccctggaaaatcgatgtctggcgacgctgtcgtctcttaaaagcaccgtctcagcatctcctctcttccagtcactccagatctcccatatgacccaggcagatttgtatcgcgtcaataattcgaattgccttctgtccgaaccaccttcctggagagctcagcacttttccaagggactgtag

SEQ ID NO: 332447 - DNA, 581 bp, Artificial Sequence
  derived and/or modified sequence
ctgctgcgggaatcggacgccccaggtcaggcacccagggtttccagccccagtctaaggcatatacaagctgagtttcagccatggaaaaactccatgggcatgtgtctgcccatccagacatcctctccttggagaaccggtgcctggctatgctccctgacttacagcccttggagaaactacatcagcatgtatctacccactcagatatcctctccttgaagaaccagtgcctagccacgcttcctgacctgaagaccatggaaaaaccacatggatatgtgtctgcccacccagacatcctctccttggagaaccagtgcctggccacactttctgacctgaagaccatggagaaaccacatggacatgtttctgcccacccagacatcctctccttggagaaccggtgcctggccaccctctctagtctaaagagcactgtgtctgccagccccttgttccagagtctacagatatctcacatgacgcaagctgatttgtaccgtgtgaacaacagcaattgcctgctctctgagcctccaagttggagggctcagcatttctctaagggacta

SEQ ID NO: 332448 - protein, 199 aa, Artificial Sequence
  derived and/or modified sequence
MEALHLHLVKEYIIQLSKGRLVLKTAEQQQQLAGYILANADTIQHFCTQHGSPATWLQPALPTLAEIIRLQDPSAIKIEVATYATCYPDFSKGHLSAILAIKGNLSNSEVKRIRSILDVSMGAQEPSRPLFSLIKPRAAVSGIQQWWNGRQNWKRKKEKMSSRLAGAFRVLWRAVSTASIRRHIQVAPRPLQAGPAMGP

SEQ ID NO: 332449 - DNA, 600 bp, Artificial Sequence
  derived and/or modified sequence
atggaggccctgcacctgcacctggtgaaggagtacatcatccagctgagcaagggcagactggtgctgaagaccgccgagcagcagcagcagctggccggctacatcctggccaacgccgacaccatccagcacttctgcacccagcacggcagccccgccacctggctgcagcccgccctgcccaccctggccgagatcatcagactgcaggaccccagcgccatcaagatcgaggtggccacctacgccacctgctaccccgacttcagcaagggccacctgagcgccatcctggccatcaagggcaacctgagcaacagcgaggtgaagagaatcagaagcatcctggacgtgagcatgggcgcccaggagcccagcagacccctgttcagcctgatcaagcccagagccgccgtgagcggcatccagcagtggtggaacggcagacagaactggaagagaaagaaggagaagatgagcagcagactggccggcgccttcagagtgctgtggagagccgtgagcaccgccagcatcagaagacacatccaggtggcccccagacccctgcaggccggccccgccatgggcccctag

SEQ ID NO: 332450 - DNA, 120 bp, Artificial Sequence
  derived and/or modified sequence
atgagcgaggccagcagcgaggacctggtgccccccctggaggccggcgccgccccctacagagaggaggaggaggccgccaagaagaagaaggagaagaagaagaagagcaagggctag

SEQ ID NO: 332451 - DNA, 600 bp, Artificial Sequence
  derived and/or modified sequence
atggaagcattacacttgcacttggtaaaagagtacattatccaactcagcaagggaagactggttctcaagacggcggaacagcaacagcagctggcagggtatatactggccaacgcagacactatccagcacttttgtacacagcatggttcaccggctacctggctgcaaccagctctgcccacgctggctgagatcatacgacttcaggacccctctgccatcaagatcgaggtcgccacttacgccacctgctacccagatttttcaaagggccacctcagcgctattcttgcaataaaaggaaatttatccaatagcgaggtgaagcggattcggagcatcctggacgtgtcaatgggcgcacaggaaccctctcggcccttgtttagcctgattaaaccgagagccgccgtgtcgggcattcagcagtggtggaacgggaggcagaattggaaacgcaagaaagagaagatgagtagtcgtttagccggggcttttcgggtcttgtggagagccgtcagcacggccagtatccgaagacatattcaggtggctcccaggcccctgcaggctgggcccgctatggggccctag

SEQ ID NO: 332452 - DNA, 120 bp, Artificial Sequence
  derived and/or modified sequence
atgagtgaggcgtcctccgaggacttggttcctccactggaggcgggcgccgccccgtacagggaagaagaggaggcagcaaagaagaaaaaggaaaaaaagaagaaatcaaaggggtag

SEQ ID NO: 332453 - DNA, 600 bp, Artificial Sequence
  derived and/or modified sequence
atggaggccctgcacctgcacctggtgaaggagtacatcatccagctgagcaagggccgcctggtgctgaagacagctgagcagcagcagcagctggccggctacatcctggccaatgctgacaccatccagcacttctgcacccagcacggcagccctgccacctggctgcagcctgccctgcccaccctggccgagatcatccggctgcaggaccccagcgccatcaagattgaggtggccacctacgccacctgctacccagacttcagcaagggccacctgagcgccatcctggccatcaagggcaacctgagcaacagcgaggtgaagaggatccgcagcatcctggatgtgtccatgggcgcccaggagcccagccggcccctcttcagcctcatcaagcccagggctgctgtgtctggcatccagcagtggtggaatggccggcagaactggaagaggaagaaggagaagatgagcagccggctggccggggccttccgggtgctgtggagggctgtgtccacagccagcatcagaagacacatccaggtggccccccggcccctgcaggccggccctgccatgggcccctag

SEQ ID NO: 332454 - DNA, 120 bp, Artificial Sequence
  derived and/or modified sequence
atgtctgaggccagcagcgaggacctggtgccccccctggaggccggggccgccccctaccgggaggaggaggaggccgccaagaagaagaaggagaagaagaagaagagcaagggctag

SEQ ID NO: 332455 - DNA, 600 bp, Artificial Sequence
  derived and/or modified sequence
atggaggccctgcacctgcacctggtgaaggagtacatcatccagctctcaaaggggcgtcttgtactgaaaactgctgaacagcagcaacaactggccggatatatcttggctaacgctgatactattcagcacttttgcacgcaacatgggagtcccgctacgtggctgcagcctgcccttccaaccctggccgagatcattaggctgcaggacccaagcgcaataaagattgaagtggccacctatgctacatgctaccccgatttttctaagggccacctgtccgctatcttagctataaagggaaacctgtctaactcagaggtcaaaagaatcagatccatcttggatgtatcaatgggggcccaggagccgtcgaggccgcttttctcgctgattaaacctagagcagctgtgtcggggatccagcagtggtggaacggccgccaaaattggaaaaggaagaaagagaaaatgagcagccgccttgccggcgcatttcgggtgctttggagggcggtgtctacagcttctattagacgccacatccaggtggctccacgccctctccaggctggacctgctatgggcccatag

SEQ ID NO: 332456 - DNA, 120 bp, Artificial Sequence
  derived and/or modified sequence
atgagcgaggccagcagcgaggacctggtgccccccctggaggccggtgcggccccctatcgcgaggaggaggaagccgccaagaaaaagaaggagaagaagaagaaatccaagggatag

SEQ ID NO: 332457 - DNA, 600 bp, Artificial Sequence
  derived and/or modified sequence
atggaggcacttcacctgcatctggtcaaagaatatataattcaactcagcaaaggacggctggtgttaaagacagcagaacagcagcagcaattagctgggtacattttggctaacgctgatacaatacagcatttttgcacacagcatggaagtcccgctacatggctgcagccagccctccctacactcgctgagattatccgcctgcaggacccatctgcaattaagattgaagtggctacgtacgccacctgttaccctgactttagcaaaggccacctgtcagcgatccttgccatcaaaggaaatctgtctaactccgaggtcaagcgaatacggagcatcctggatgtcagcatgggtgctcaggagcccagccgccctctgttcagtctcatcaagccaagagctgccgtgagtgggatacagcagtggtggaacggacggcagaattggaaacgtaaaaaggagaaaatgtcaagccgtcttgctggagcctttagggtactctggagggcagtttccactgcgagtatccggagacatatccaggtcgcccctaggcctttgcaggcgggaccagccatgggcccatag

SEQ ID NO: 332458 - DNA, 120 bp, Artificial Sequence
  derived and/or modified sequence
atgagtgaggcttcttccgaggacctcgtgcctcccctggaggccggagccgctccctatcgggaggaggaagaggccgctaagaagaagaaggaaaagaagaaaaagtctaaggggtag

SEQ ID NO: 332459 - DNA, 1002 bp, Artificial Sequence
  derived and/or modified sequence
agccactgttcaagaggttcacgcacacccgctgggcggcccctgtggagaccctggaaaacatcatcgccactgtagacacgaggctgcctgagttctcagagctgcagggctgtttccgggaggagctcatggaggccttgcacctgcacctggtgaaggagtacatcatccaactcagcaaggggcgcctggtcctcaagacggccgagcagcagcagcagctggctgggtacatcctggccaatgctgacaccatccagcacttctgcacccagcacggctccccggcgacctggctgcagcctgctctccctacgctggccgagatcattcgcctgcaggaccccagtgccatcaagattgaggtggccacttatgccacctgctaccctgacttcagcaaaggccacctgagcgctatcctggccatcaaggggaacctatccaacagtgaggtcaagcgcatccggagcatcttggacgtcagcatgggggcgcaggagccctcccggcccctattttcccttataaagcccagggccgccgtgagcgggattcagcaatggtggaatggaagacagaactggaagagaaagaaggaaaagatgagctctcgtctggcaggggcttttagggtcctgtggcgagctgtgagcaccgccagcattagacgtcacatccaggtggccccacggcccctacaggctggccctgcaatggggccctgagccctccctcttcatcccccaaggcctcaactagagggtggtcccccgagggcttggtgtctactaccgaagggcccaagacctcctgggtcctctcaggctcccccttccccaaggcagggacaggccctgggggtgccaccgtgggccctgccacccagaagtctggctgaggtctgggcaggggcagggcaagcttgacctctcactgttgaccctttggcctctgtatttgtttcctattgccgtgacaggtttccacaaacttcgt

SEQ ID NO: 332460 - DNA, 421 bp, Artificial Sequence
  derived and/or modified sequence
agtggcggccaggccgggacacgctgcctcggagagcggagacctggggcgaggcccagggggctgcagcaggaccttcaggcgctctgggtttcgtgtcacagaggggagaaggcggtgatgctgtgggggtcctgcgggagctgtgcctggaggagcctgcaggcctgaaccagggtgatgctgaagatgatgaccttcttccaaggcctctagagccatcagcctgtgccaggcaccctcgacttgcctagaggcccccaaaagttgcagtccacatcagaggcagagtcagaggcctccatgtcggaggcctcctctgaggacctggtgccacccctggaggctggggcagccccatatagggaggaggaagaggcggcgaagaagaagaaggagaagaagaagaagtccaaaggcc

SEQ ID NO: 332461 - protein, 94 aa, Artificial Sequence
  derived and/or modified sequence
MESSKKMDSPGALQTNPPLKLHTDRSAGTPVFVPEQGGYKEKFVKTVEDKYKCEKCHLVLCSPKQTECGHRFCESCMAALLSSSSPKCTACQES

SEQ ID NO: 332462 - DNA, 1236 bp, Artificial Sequence
  derived and/or modified sequence
atgagacccgccgacctgctgcagctggtgctgctgctggacctgcccagagacctgggcggcatgggctgcagcagccccccctgcgagtgccaccaggaggaggacttcagagtgacctgcaaggacatccagagaatccccagcctgccccccagcacccagaccctgaagctgatcgagacccacctgagaatcgtggtgtggttcgtgagcctgctggccctgctgggcaacgtgttcgtgctgctgatcctgctgaccagccactacaagctgaacgtgcccagattcctgatgtgcaacctggccttcgccgacttctgcatgggcatgtacctgctgctgatcgccagcgtggacctgtacacccacagcgagtactacaaccacgccatcgactggcagaccggccccggctgcaacaccgccggcttcttcaccgtgttcgccagcgagctgagcgtgtacaccctgaccgtgatcaccctggagagatggtacgccatcaccttcgccatgagactggacagaaagatcagactgagacacgcctgcgccatcatggtgggcggctgggtgtgctgcttcctgctggccctgctgcccctggtgggcatcagcagctacgccaaggtgagcatctgcctgcccatggacaccgagacccccctggccctggcctacatcgtgttcgtgctgaccctgaacatcgtggccttcgtgatcgtgtgctgctgctacgtgaagatctacatcaccgtgagaaacccccagtacaaccccggcgacaaggacaccaagatcgccaagagaatggccgtgctgatcttcaccgacttcatctgcatggcccccatcagcttctacgccctgagcgccatcctgaacaagcccctgatcaccgtgagcaacagcaagatcctgctggtgctgttctaccccctgaacagctgcgccaaccccttcctgtacgccatcttcaccaaggccttccagagagacgtgttcatcctgctgagcaagttcggcatctgcaagagacaggcccaggcctacagaggccagagagtgccccccaagaacagcaccgacatccaggtgcagaaggtgacccacgagatgagacagggcctgcacaacatggaggacgtgtacgagctgatcgagaacagccacctgacccccaagaagcagggccagatcagcgaggagtacatgcagaccgtgctgtag

SEQ ID NO: 332463 - DNA, 1236 bp, Artificial Sequence
  derived and/or modified sequence
atgaggccagctgacctgcttcaactagtgttgctccttgaccttccgcgagacttggggggcatgggttgctcttcccctccatgcgagtgtcatcaagaagaagattttcgcgtaacttgcaaagatattcaaagaatccctagtctaccgccctccacacaaacgctgaagctaattgaaactcaccttaggattgtggtctggttcgtatcactcctggctctcctaggcaatgtgtttgtgcttttgattctcttgaccagccattacaagcttaacgtacctcgcttcctgatgtgcaatctggcttttgcagatttctgtatgggtatgtacttgctgctgattgcctctgttgatctctatactcacagcgaatattataaccatgcgatagattggcagaccggcccgggatgcaacaccgctggcttcttcacggtgttcgctagcgaattaagcgtttacaccctgactgtaatcactcttgaacggtggtacgcaataactttcgccatgagactcgatcgcaagattaggctgcgacatgcctgcgccataatggtgggaggttgggtttgttgtttcctccttgcattgttgcctctagtggggataagttcctacgcaaaggtcagcatttgcctccccatggatacggaaaccccccttgccctggcttatatcgtgtttgtcctgactctgaacatcgtcgcctttgttatagtctgttgctgttacgttaagatctatattacggtccggaacccccaatacaaccccggtgacaaggacacaaagatagccaaaaggatggcagtcttaatctttactgacttcatctgcatggcccccatctcgttttacgccctctctgccatccttaataaacccttgatcacggttagtaacagcaagatccttcttgtcctgttttatccactgaactcgtgtgccaatcctttcttgtatgctattttcacaaaggcatttcagcgcgacgtattcatcctgctttccaagtttggaatatgtaagaggcaggcgcaagcatatcgtggtcagcgagtcccccccaaaaactccactgacattcaggtccaaaaggtgacacacgagatgcgacagggcctgcacaatatggaggacgtgtatgagttaatcgaaaattctcacctgacccctaaaaagcaaggacagatatctgaagagtatatgcaaacagtgctgtag

SEQ ID NO: 332464 - DNA, 1236 bp, Artificial Sequence
  derived and/or modified sequence
atgaggcctgctgacctgctgcagctggtgctgctgctggacctgccccgggacctgggcggcatgggctgcagcagccccccctgtgagtgccaccaggaggaggacttccgggtgacctgcaaggacatccagaggatccccagcctgccccccagcacccagaccctgaagctgattgagacccacctgcgcatcgtggtgtggtttgtgtccctgctggccctgctgggcaatgtgtttgtgctgctgatcctgctgaccagccactacaagctgaatgtgccccgcttcctgatgtgcaacctggcctttgctgacttctgcatgggcatgtacctgctgctgattgcctctgtggacctgtacacccacagcgagtactacaaccacgccatcgactggcagacaggccctggctgcaacacagctggcttcttcaccgtgtttgccagcgagctgtctgtgtacaccctgaccgtcatcaccctggagcgctggtacgccatcacctttgccatgaggctggacaggaagatccggctgcggcatgcctgtgccatcatggtgggcggctgggtgtgctgcttcctgctggccctgctgcccctggtgggcatcagcagctatgccaaggtgtccatctgcctgcccatggacacagagacccccctggccctggcctacatcgtgtttgtgctgaccctgaacatcgtggcctttgtgattgtgtgctgctgctacgtgaagatctacatcaccgtgaggaacccccagtacaaccctggggacaaggacaccaagatcgccaagaggatggctgtgctgatcttcacagacttcatctgcatggcccccatctccttctacgccctgagcgccatcctgaacaagcccctcatcaccgtgagcaacagcaagatcctgctggtgctcttctaccccctgaacagctgtgccaaccccttcctgtatgccatcttcaccaaggccttccagagagatgtgttcatcctgctgagcaagtttggcatctgcaagaggcaggcccaggcctaccggggccagagggtgccccccaagaacagcacagacatccaggtgcagaaggtgacccatgagatgaggcagggcctgcacaacatggaggatgtgtatgagctgattgagaacagccacctgacccccaagaagcagggccagatcagcgaggagtacatgcagacagtgctgtag

SEQ ID NO: 332465 - DNA, 1236 bp, Artificial Sequence
  derived and/or modified sequence
atgcggcccgccgacctgctgcagctggtgctgctgctggacctgcctcgggatctcggtggaatgggctgttcctcccctccctgtgaatgtcatcaggaggaggatttcagagtgacctgtaaggatatacagcgaataccgagtctgccgccctccacgcaaacactcaagctgattgagacgcacttgcggatcgtggtatggtttgtgtcacttctggctctgttggggaatgtcttcgtgctacttatactactgacatcccactacaagctgaatgtccctcggttcctcatgtgtaatctagcattcgccgatttctgtatggggatgtacctactgttgatcgcttcagtggatctgtatacacactcagagtactacaaccatgccattgactggcagactggtccaggttgcaatactgctggcttctttactgtattcgcctcagaactatctgtgtatacccttaccgtgatcaccctggaacggtggtacgccataacattcgcgatgcgcctggatcgaaaaattcggttaagacacgcatgcgcgataatggtgggcggttgggtatgctgcttcctccttgcgctgcttcccctagtaggcatctctagctatgcaaaggtctccatctgcctgcccatggataccgaaactccacttgctctggcctatatcgtcttcgtgctgactctgaatatcgttgcctttgtcatagtctgttgttgttacgtgaaaatctacatcaccgtgcgtaaccctcagtataatccaggggacaaggataccaaaattgccaagcgtatggccgtgcttatctttaccgacttcatttgcatggcaccgatctccttctacgccttaagcgcaattctgaacaagccgctgattaccgtttccaactcgaaaatccttctggtgcttttttacccactgaacagctgtgccaatcctttcctgtatgccatttttactaaagcctttcagagggatgtgttcatcctgttgagcaagttcgggatatgtaaacggcaggctcaggcgtatcgtggtcagcgggtgccaccgaaaaactctacagacattcaggtccaaaaagtgacccacgaaatgaggcagggtctccacaatatggaggacgtgtacgaactgattgaaaactcccacctgactccgaagaaacaggggcagatctctgaggaatacatgcagacagttctctag

SEQ ID NO: 332466 - DNA, 1236 bp, Artificial Sequence
  derived and/or modified sequence
atgcgtcccgctgatctgttgcagctggttttactactggacctgccgagagatctgggagggatggggtgcagctctccaccatgtgagtgtcaccaggaagaagatttccgagttacttgcaaagatatacagagaattccaagcctgcctccttctacacagacgctgaaattaattgagacacacttgaggatagtggtctggttcgtctccttgttggccctcctaggcaacgtgtttgtgctgctcattttgctaaccagccactacaagctgaatgtccctagatttctcatgtgtaatttggcctttgcagacttctgtatggggatgtatctgctcttaatcgcgagcgtggatctttacacccacagtgagtattacaaccatgccattgactggcagacggggcctggatgtaacaccgctggatttttcactgtattcgcctcagagctgagcgtttatactctgactgttatcactctagaaagatggtacgccatcaccttcgccatgcgcctcgaccgaaagatcagactgcgacacgcttgtgccatcatggttggaggctgggtgtgctgctttcttcttgccctccttcccctggtgggcatctcttcctacgctaaggtgagcatatgcttgcctatggatactgagacacctctggccttagcttacattgtgttcgtcctgactttaaacatagtcgccttcgtcatcgtgtgttgctgctatgttaaaatctatattactgtgaggaatcctcagtacaaccccggagacaaagacacaaagatcgccaagagaatggcggtgctgatttttaccgattttatttgcatggcccctatatcgttctacgctctgtcagccattcttaacaagcccctcatcaccgtttctaattctaaaatcctcttggtgttattttaccccctgaacagctgcgcaaacccctttctgtacgcaatctttacaaaggcatttcagagagacgtgtttattcttctgtcgaagtttgggatctgcaagcggcaggctcaagcataccgcggacagcgcgtaccgccaaagaacagcactgatattcaggtccagaaagtcacacacgagatgagacagggactacacaacatggaagacgtgtacgaactgatcgaaaacagccatcttaccccaaagaagcagggacagattagcgaggagtacatgcagacagtactgtag

SEQ ID NO: 332467 - DNA, 1664 bp, Artificial Sequence
  derived and/or modified sequence
ggaaaacagaggggacagccaggactggtgttgggtgtcagggaacagacggagcggactgcgtgggtccagccaaggaaagtgaagcaagcagacttgtttgggtcaaggttgcctagggaagcggagcacttaagtgcctctttttccccttctccagcctcctccacagtggtgaggtcacagccccttggagccctccctcttcccacccctcccgctcccgggtctcctttggcctggggtaacccgaggtgcagagctgagaatgaggcgatttcggaggatggagaaatagccccgagtcccgtggaaaatgaggccggcggacttgctgcagctggtgctgctgctcgacctgcccagggacctgggcggaatggggtgttcgtctccaccctgcgagtgccatcaggaggaggacttcagagtcacctgcaaggatattcaacgcatccccagcttaccgcccagtacgcagactctgaagcttattgagactcacctgagaattgtggtgtggttcgttagtctgctggctctcctgggcaatgtctttgtcctgcttattctcctcaccagccactacaaactgaacgtcccccgctttctcatgtgcaacctggcctttgcggatttctgcatggggatgtacctgctcctcatcgcctctgtagacctctacactcactctgagtactacaaccatgccatcgactggcagacaggccctgggtgcaacacggctggtttcttcactgtctttgcaagcgagttatcggtgtatacgctgacggtcatcaccctggagcgctggtatgccatcaccttcgccatgcgcctggaccggaagatccgcctcaggcacgcatgtgccatcatggttgggggctgggtttgctgcttccttctcgccctgcttcctttggtgggaataagtagctatgccaaagtcagtatctgcctgcccatggacaccgagacccctcttgctctggcatatattgtttttgttctgacgctcaacatagttgccttcgtcatcgtctgctgctgttatgtgaagatctacatcacagtccgaaatccgcagtacaacccaggggacaaagataccaaaattgccaagaggatggctgtgttgatcttcaccgacttcatatgcatggccccaatctcattctatgctctgtcagcaattctgaacaagcctctcatcactgttagcaactccaaaatcttgctggtactcttctatccacttaactcctgtgccaatccattcctctatgctattttcaccaaggccttccagagggatgtgttcatcctactcagcaagtttggcatctgtaaacgccaggctcaggcataccgggggcagagggttcctccaaagaacagcactgatattcaggttcaaaaggttacccacgagatgaggcagggtctccacaacatggaagatgtctatgaactgattgaaaactcccatctaaccccaaagaagcaaggccaaatctcagaagagtatatgcaaacggttttgtaagttaacactacactactcacaatggtaggggaacttacaaaataatagtttcttgaatatgcattccaatcccatgacacccccaacacatagctgccctcactcttgtgca

SEQ ID NO: 332468 - DNA, 1293 bp, Artificial Sequence
  derived and/or modified sequence
atgctggtgagcctgaagatgagctacaaggccgccgccggcgaggactacaaggccgactgcccccccggcaaccccgcccccaccagcaaccacggccccgacgccaccgaggccgaggaggacttcgtggacccctggaccgtgcagaccagcagcgccaagggcatcgactacgacaagctgatcgtgagattcggcagcagcaagatcgacaaggagctgatcaacagaatcgagagagccaccggccagagaccccaccacttcctgagaagaggcatcttcttcagccacagagacatgaaccaggtgctggacgcctacgagaacaagaagcccttctacctgtacaccggcagaggccccagcagcgaggccatgcacgtgggccacctgatccccttcatcttcaccaagtggctgcaggacgtgttcaacgtgcccctggtgatccagatgaccgacgacgagaagtacctgtggaaggacctgaccctggaccaggcctacagctacgccgtggagaacgccaaggacatcatcgcctgcggcttcgacatcaacaagaccttcatcttcagcgacctggactacatgggcatgagcagcggcttctacaagaacgtggtgaagatccagaagcacgtgaccttcaaccaggtgaagggcatcttcggcttcaccgacagcgactgcatcggcaagatcagcttccccgccatccaggccgcccccagcttcagcaacagcttcccccagatcttcagagacagaaccgacatccagtgcctgatcccctgcgccatcgaccaggacccctacttcagaatgaccagagacgtggcccccagaatcggctaccccaagcccgccctgctgcacagcaccttcttccccgccctgcagggcgcccagaccaagatgagcgccagcgaccccaacagcagcatcttcctgaccgacaccgccaagcagatcaagaccaaggtgaacaagcacgccttcagcggcggcagagacaccatcgaggagcacagacagttcggcggcaactgcgacgtggacgtgagcttcatgtacctgaccttcttcctggaggacgacgacaagctggagcagatcagaaaggactacaccagcggcgccatgctgaccggcgagctgaagaaggccctgatcgaggtgctgcagcccctgatcgccgagcaccaggccagaagaaaggaggtgaccgacgagatcgtgaaggagttcatgacccccagaaagctgagcttcgacttccagtag

SEQ ID NO: 332469 - DNA, 684 bp, Artificial Sequence
  derived and/or modified sequence
atgctggtgagcctgaagatgagctacaaggccgccgccggcgaggactacaaggccgactgcccccccggcaaccccgcccccaccagcaaccacggccccgacgccaccgaggccgaggaggacttcgtggacccctggaccgtgcagaccagcagcgccaagggcatcgactacgacaagctgatcgtgagattcggcagcagcaagatcgacaaggagctgatcaacagaatcgagagagccaccggccagagaccccaccacttcctgagaagaggcatcttcttcagccacagagacatgaaccaggtgctggacgcctacgagaacaagaagcccttctacctgtacaccggcagaggccccagcagcgaggccatgcacgtgggccacctgatccccttcatcttcaccaagtggctgcaggacgtgttcaacgtgcccctggtgatccagatgaccgacgacgagaagtacctgtggaaggacctgaccctggaccaggcctacagctacgccgtggagaacgccaaggacatcatcgcctgcggcttcgacatcaacaagaccttcatcttcagcgacctggactacatgggcatgagcagcggcttctacaagaacgtggtgaagatccagaagcacgtgaccttcaaccaggtgaagggcatcttcggctag

SEQ ID NO: 332470 - DNA, 423 bp, Artificial Sequence
  derived and/or modified sequence
atgctggtgagcctgaagatgagctacaaggccgccgccggcgaggactacaaggccgactgcccccccggcaaccccgcccccaccagcaaccacggccccgacgccaccgaggccgaggaggacttcgtggacccctggaccgtgcagaccagcagcgccaagggcatcgactacgacaagctgatcgtgagattcggcagcagcaagatcgacaaggagctgatcaacagaatcgagagagccaccggccagagaccccaccacttcctgagaagaggcatcttcttcagccacagagacatgaaccaggtgctggacgcctacgagaacaagaagcccttctacctgtacaccggcagaggccccagcagcgaggccatgcacgtgggccacctgatccccttcatcttcaccaagtag

SEQ ID NO: 332471 - DNA, 462 bp, Artificial Sequence
  derived and/or modified sequence
atgctggtgagcctgaagatgagctacaaggccgccgccggcgaggactacaaggccgactgcccccccggcaaccccgcccccaccagcaaccacggccccgacgccaccgaggccgaggaggacttcgtggacccctggaccgtgcagaccagcagcgccaagggcatcgactacgacaagctgatcgtgagattcggcagcagcaagatcgacaaggagctgatcaacagaatcgagagagccaccggccagagaccccaccacttcctgagaagaggcatcttcttcagccacagagacatgaaccaggtgctggacgcctacgagaacaagaagcccttctacctgtacaccggcagaggccccagcagcgaggccatgcacgtgggccacctgatccccttcatcttcaccaagtggctgcaggacgtgttcaacgtgcccctggtgatccagtag

SEQ ID NO: 332472 - DNA, 675 bp, Artificial Sequence
  derived and/or modified sequence
atgctggtgagcctgaagatgagctacaaggccgccgccggcgaggactacaaggccgactgcccccccggcaaccccgcccccaccagcaaccacggccccgacgccaccgaggccgaggaggacttcgtggacccctggaccgtgcagaccagcagcgccaagggcatcgactacgacaagctgatcgtgagattcggcagcagcaagatcgacaaggagctgatcaacagaatcgagagagccaccggccagagaccccaccacttcctgagaagaggcatcttcttcagccacagagacatgaaccaggtgctggacgcctacgagaacaagaagcccttctacctgtacaccggcagaggccccagcagcgaggccatgcacgtgggccacctgatccccttcatcttcaccaagtggctgcaggacgtgttcaacgtgcccctggtgatccagatgaccgacgacgagaagtacctgtggaaggacctgaccctggaccaggcctacagctacgccgtggagaacgccaaggacatcatcgcctgcggcttcgacatcaacaagaccttcatcttcagcgacctggactacatgggcatgagcagcggcttctacaagaacgtggtgaagatccagaagcacgtgaccttcaaccaggtgaagggctag

SEQ ID NO: 332473 - DNA, 465 bp, Artificial Sequence
  derived and/or modified sequence
atgctggtgagcctgaagatgagctacaaggccgccgccggcgaggactacaaggccgactgcccccccggcaaccccgcccccaccagcaaccacggccccgacgccaccgaggccgaggaggacttcgtggacccctggaccgtgcagaccagcagcgccaagggcatcgactacgacaagctgatcgtgagattcggcagcagcaagatcgacaaggagctgatcaacagaatcgagagagccaccggccagagaccccaccacttcctgagaagaggcatcttcttcagccacagagacatgaaccaggtgctggacgcctacgagaacaagaagcccttctacctgtacaccggcagaggccccagcagcgaggccatgcacgtgggccacctgatccccttcatcttcaccaagtggctgcaggacgtgttcaacgtgcccctggtgatccagatgtag

SEQ ID NO: 332474 - DNA, 1293 bp, Artificial Sequence
  derived and/or modified sequence
atgcttgtctcattaaagatgagttacaaagccgccgcaggtgaggattataaggccgattgcccccctgggaaccccgccccaacgtcaaaccacggccccgatgcaacagaagccgaagaagattttgtcgacccgtggaccgtgcagacaagcagcgcaaaaggcatcgactacgataaactcattgtccgattcggctcttctaaaattgacaaagagttgatcaaccgaatcgaaagggctactggacaacgccctcaccactttctacggagaggaatcttcttctcccatcgggatatgaaccaggtgttggatgcctacgaaaacaaaaaaccattctatttgtacacaggaaggggtccttcaagcgaggctatgcacgtcgggcacctcattccattcattttcaccaaatggctgcaggatgtctttaatgtgccgttagtcatccaaatgactgacgacgaaaaatacttatggaaagatcttaccctggaccaggcctactcttacgcagtggagaacgccaaggacattattgcctgcggtttcgatataaataaaacatttatcttttccgaccttgattatatgggcatgtcgtctggcttctataaaaacgtggttaagatccagaagcacgtaacctttaatcaggtgaaggggatcttcggctttactgattcagattgtatcggcaagatttctttccctgccatccaggctgcgccaagtttctctaacagctttccacagatcttcagggacagaacagatattcaatgtctgataccctgtgccatcgatcaggacccctactttcgcatgacacgagacgtggctcccagaattggatatcccaaaccggcactgctgcacagtacgttctttccagctctgcagggcgcccaaacgaagatgtccgcgagtgaccctaactccagcatttttttaaccgatactgccaaacaaatcaagacaaaggtcaataaacatgcgttttccggaggcagagatacaattgaggagcacaggcagttcggcgggaattgcgacgttgacgtgagctttatgtatcttacattcttccttgaggatgatgataaactagagcagatccggaaagattacacaagcggagctatgctgaccggagagttaaagaaggcgttgatcgaggtgctgcagcctttaatagccgaacaccaggctaggcgcaaagaagtcacggatgagattgtcaaagagtttatgactccaaggaaactctccttcgactttcagtag

SEQ ID NO: 332475 - DNA, 1293 bp, Artificial Sequence
  derived and/or modified sequence
atgctggtcagtctgaagatgtcatataaagctgccgccggcgaggattacaaggccgattgtccaccaggcaaccccgcccccactagtaatcacggaccggacgcaacggaggccgaagaggatttcgtggatccttggaccgtgcagacatccagtgcaaaaggaatcgattacgataaactgatcgtcaggtttgggagttccaaaattgataaggaactgataaaccggatcgagagagcgacgggtcagcgtccgcaccatttcctgagaagagggatattctttagtcacagggatatgaaccaggttctcgacgcttatgagaataagaaacctttctacttatatactggcaggggacccagctcggaagccatgcacgtgggacacctgattccttttattttcaccaagtggcttcaggacgtcttcaacgttcctctggtcatacagatgaccgatgatgaaaaatatctctggaaggacttgaccttagatcaggcctatagttacgctgtcgagaacgccaaggacatcattgcatgtggattcgacataaataaaacatttatcttctcagaccttgattacatggggatgtcttctggcttctataagaatgtggtgaagattcagaaacatgtgacattcaatcaggttaaaggcatcttcggcttcacggactcagattgtatcggaaaaatttcattccccgcaatccaagccgctccgagcttttcaaactccttccctcaaatatttcgagaccggactgacatacagtgcttgattccttgtgctattgaccaggatccctactttcgaatgactagggatgtggcccctcgcatcggatatcctaaaccagcgctgctgcacagtaccttttttcctgctctacaaggagcgcagacaaagatgagcgcctcagatccgaattcatccatttttctgaccgatactgcaaaacaaattaaaacgaaagtgaataagcacgctttttccggtgggcgggataccattgaggaacatcggcaatttggtggcaactgtgacgtggacgtatcatttatgtatctaacgttcttcctcgaggacgacgataagctcgaacaaattagaaaagactatacaagcggggcaatgttaactggtgagctgaagaaggccctgattgaagtcttgcagccccttatcgccgagcatcaggccagacgcaaggaagttactgatgagattgtgaaggagttcatgacccctcggaagttatcttttgactttcagtag

SEQ ID NO: 332476 - DNA, 684 bp, Artificial Sequence
  derived and/or modified sequence
atgttggtctcactgaagatgagctataaggccgctgctggcgaagattataaggcagattgtccacccggcaaccctgctcctactagcaatcacggacccgatgccacagaggccgaggaagactttgttgatccctggaccgtacagactagtagcgccaagggcatcgattacgacaagctcattgttcgttttggatcttccaagatcgataaagagctgataaaccgcattgaacgggccactgggcaacggccacaccatttcttgcggcgaggtattttcttcagtcacagggacatgaaccaggtgcttgatgcatacgagaataagaaaccattttatctttacaccggacgggggccttcatccgaggccatgcacgtggggcacctcatccccttcatctttaccaaatggttgcaggacgtttttaacgtacctttggtgatccagatgacagacgacgaaaagtacctgtggaaagacctgacccttgaccaggcgtacagctacgccgtcgaaaatgccaaggacatcattgcttgtggtttcgacataaacaaaacgttcatattctctgacctggactacatgggaatgagttctggattttacaaaaacgtggtcaaaatccagaaacacgtgaccttcaaccaggttaaagggatctttggatag

SEQ ID NO: 332477 - DNA, 423 bp, Artificial Sequence
  derived and/or modified sequence
atgctggtttccctcaagatgagctacaaagcagcagccggagaggattacaaggctgattgccctcctggcaaccctgcacccacatctaaccacggccccgatgctaccgaggccgaagaagacttcgtcgatccgtggacagtgcagacctctagcgccaagggaatagactatgataagctcatcgtcagattcggctctagcaaaatagataaggaactcattaatcgcatcgagcgggccactggccagagaccccaccacttcctgcggaggggcatttttttctctcaccgagacatgaatcaagtattagacgcctacgagaataagaagcctttctatctttacacaggcagaggcccctcgagcgaagccatgcatgtgggccatctgatcccattcatatttaccaagtag

SEQ ID NO: 332478 - DNA, 462 bp, Artificial Sequence
  derived and/or modified sequence
atgctggtttcattgaaaatgagctataaagctgccgctggcgaggactacaaagctgattgccctcctggcaaccctgccccgacgtccaaccatggacctgacgccaccgaggctgaggaggactttgtggatccttggactgtgcaaaccagcagtgctaaaggtattgattacgataagctgatcgttcgcttcgggtcttccaaaattgataaggagctcatcaatcggatcgaacgggcaacaggacagagaccccaccattttctgagaagaggtatttttttctctcaccgggatatgaaccaggtgcttgacgcgtacgaaaacaagaagccgttttacctctacacaggacggggacctagctcagaagccatgcacgtcggacatctgatccccttcatcttcaccaagtggcttcaggacgtatttaacgtaccgctggtcattcagtag

SEQ ID NO: 332479 - DNA, 675 bp, Artificial Sequence
  derived and/or modified sequence
atgctcgtctcacttaagatgtcctacaaagctgctgccggggaggattacaaggcagactgtccgcctggcaaccctgccccaacgtccaaccatgggccagacgccaccgaagccgaagaggattttgttgatccctggacggtgcagaccagcagcgccaaggggatcgactatgacaaactcatcgtccgttttggctcgtccaagattgacaaagaactgattaataggatcgagagagcaacagggcagcgtccccaccacttcttgcgtcgcgggatattcttttcccaccgcgatatgaatcaagtgctggatgcttacgaaaacaagaagccattctatctctacaccggccggggaccctcctctgaggctatgcatgtggggcacctgattccattcatctttacaaagtggctccaggacgtgttcaatgtgccccttgtcatccagatgacagacgatgaaaagtacctgtggaaggacctgaccctcgatcaggcatatagctatgcagtcgagaacgctaaggacatcatcgcatgtggatttgacatcaacaagacatttatctttagcgatcttgattacatggggatgtctagtggattttataaaaatgtcgtgaagatccagaagcatgtgacatttaaccaggtgaagggctag

SEQ ID NO: 332480 - DNA, 1293 bp, Artificial Sequence
  derived and/or modified sequence
atgctggttagcctcaaaatgtcctataaagccgccgcaggggaggactataaggcggactgtccgccaggaaaccccgcaccgacttccaaccacggaccagacgccacagaggcagaagaggattttgtcgacccttggactgtccagacttcctcggcaaagggcatcgactatgataaactgattgtgcgatttgggtcttccaagatcgacaaggagctgattaaccgcatagagcgagcgaccggccaaagaccccaccactttctgcgacgtgggatctttttttcgcacagggatatgaaccaagtactggacgcgtacgagaataagaagccattttatctttatactggtcgcgggccaagttccgaagcgatgcacgtcggacatttgatcccttttatttttacaaagtggctgcaggatgtgttcaatgtgcccctagtgatccagatgaccgatgacgagaaatatctctggaaggaccttactttggatcaggcctattcctacgccgtagaaaacgctaaggatatcattgcctgcggttttgacattaataaaacattcattttcagcgacttggactacatgggtatgtcctctggcttctacaaaaacgttgtaaagattcagaaacatgtcacctttaaccaggtgaaggggattttcgggtttacagactcggattgcataggaaaaatctcttttcctgccatacaggctgccccctccttcagcaactccttcccacagatattcagggatcggacggatatccaatgcttaataccatgtgcaattgaccaggacccatactttcgtatgacccgagatgtcgcaccacggattggttacccaaagcctgctctgctgcactcaaccttttttcctgctctacaaggggcccagacaaaaatgtccgcctccgatcctaattcatcaatatttttaaccgacacagccaagcagattaaaacgaaggtcaacaagcacgcctttagtggcggaagagataccatcgaagagcaccgtcagttcggcggcaattgtgacgttgatgtgagcttcatgtacctaaccttctttttggaggatgacgacaagcttgagcagatccgcaaagattacacttctggcgccatgctgaccggcgagcttaagaaggccctcattgaggtgttgcagcccctgatcgccgagcaccaggcccggcgaaaggaggtcacagacgaaatcgtgaaggaattcatgaccccacgcaagctgtcgtttgacttccagtag

SEQ ID NO: 332481 - DNA, 465 bp, Artificial Sequence
  derived and/or modified sequence
atgctggtgtcgcttaaaatgtcctataaagcagcagccggcgaggattacaaagcagattgtcctcctggtaaccccgctccaacctcgaaccacggtcccgatgccaccgaggcggaggaagatttcgttgacccctggaccgtgcagacctccagcgcaaaggggatagattatgataaactgatcgtgcggttcggcagttcaaagattgataaggagcttattaatagaatagagcgcgcaacagggcaacggccgcaccatttcctgcggagaggtatttttttttctcacagagatatgaatcaggtactggacgcttacgaaaataagaaaccattctacctctacacaggaagaggcccttcttcagaggcaatgcatgtcggccatcttattccattcatctttactaagtggctacaagacgtgtttaatgttcccctggtgatccagatgtag

SEQ ID NO: 332482 - DNA, 1293 bp, Artificial Sequence
  derived and/or modified sequence
atgctggtgtccctgaagatgagctacaaggctgctgctggggaggactacaaggctgactgccccccaggcaacccagcccccaccagcaaccacggcccagatgccacagaagcagaagaagattttgtggacccctggacagtgcagaccagcagcgccaagggcattgattatgacaagctgattgtgcgcttcggcagcagcaagattgacaaggagctgatcaacagaattgagcgggccaccggccagaggccccaccacttcctgcggcggggcatcttcttcagccaccgggacatgaaccaggtgctggatgcctatgagaacaagaagcccttctacctgtacacaggccggggccccagcagcgaggccatgcacgtgggccacctgatccccttcatcttcaccaagtggctgcaggatgtgttcaacgtgcccctggtgatccagatgacagatgatgagaagtacctgtggaaggacctgaccctggaccaggcctacagctatgctgtggagaatgccaaggacatcatcgcctgtggctttgacatcaacaagaccttcatcttcagtgacctggactacatgggcatgagcagcggcttctacaagaatgtggtgaagatccagaagcacgtgaccttcaaccaggtgaagggcatcttcggcttcacagacagcgactgcatcggcaagatctccttccctgccatccaggccgcccccagcttcagcaacagcttcccccagatcttccgggacagaacagacatccagtgcctgatcccctgtgccatcgaccaggacccctacttcaggatgaccagagatgtggccccccgcatcggctaccccaagccagccctgctgcacagcaccttcttccctgccctgcagggcgcccagaccaagatgtctgccagtgaccccaacagcagcatcttcctgacagacacagccaagcagatcaagaccaaggtgaacaagcacgccttcagcggcggccgggacaccatcgaggagcaccggcagtttggaggcaactgtgatgtggatgtgtccttcatgtacctgaccttcttcctggaggatgatgacaagctggagcagatcaggaaggactacaccagcggggccatgctgaccggggagctgaagaaggccctgattgaggtgctgcagcccctgattgctgagcaccaggcccggaggaaggaggtgacagatgaaattgtgaaggagttcatgacccccaggaagctgagctttgacttccagtag

SEQ ID NO: 332483 - DNA, 684 bp, Artificial Sequence
  derived and/or modified sequence
atgctggtgtccctgaagatgagctacaaggctgctgctggggaggactacaaggctgactgccccccaggcaacccagcccccaccagcaaccacggcccagatgccacagaagcagaagaagattttgtggacccctggacagtgcagaccagcagcgccaagggcattgattatgacaagctgattgtgcgcttcggcagcagcaagattgacaaggagctgatcaacagaattgagcgggccaccggccagaggccccaccacttcctgcggcggggcatcttcttcagccaccgggacatgaaccaggtgctggatgcctatgagaacaagaagcccttctacctgtacacaggccggggccccagcagcgaggccatgcacgtgggccacctgatccccttcatcttcaccaagtggctgcaggatgtgttcaacgtgcccctggtgatccagatgacagatgatgagaagtacctgtggaaggacctgaccctggaccaggcctacagctatgctgtggagaatgccaaggacatcatcgcctgtggctttgacatcaacaagaccttcatcttcagtgacctggactacatgggcatgagcagcggcttctacaagaatgtggtgaagatccagaagcacgtgaccttcaaccaggtgaagggcatcttcggctag

SEQ ID NO: 332484 - DNA, 423 bp, Artificial Sequence
  derived and/or modified sequence
atgctggtgtccctgaagatgagctacaaggctgctgctggggaggactacaaggctgactgccccccaggcaacccagcccccaccagcaaccacggcccagatgccacagaagcagaagaagattttgtggacccctggacagtgcagaccagcagcgccaagggcattgattatgacaagctgattgtgcgcttcggcagcagcaagattgacaaggagctgatcaacagaattgagcgggccaccggccagaggccccaccacttcctgcggcggggcatcttcttcagccaccgggacatgaaccaggtgctggatgcctatgagaacaagaagcccttctacctgtacacaggccggggccccagcagcgaggccatgcacgtgggccacctgatccccttcatcttcaccaagtag

SEQ ID NO: 332485 - DNA, 462 bp, Artificial Sequence
  derived and/or modified sequence
atgctggtgtccctgaagatgagctacaaggctgctgctggggaggactacaaggctgactgccccccaggcaacccagcccccaccagcaaccacggcccagatgccacagaagcagaagaagattttgtggacccctggacagtgcagaccagcagcgccaagggcattgattatgacaagctgattgtgcgcttcggcagcagcaagattgacaaggagctgatcaacagaattgagcgggccaccggccagaggccccaccacttcctgcggcggggcatcttcttcagccaccgggacatgaaccaggtgctggatgcctatgagaacaagaagcccttctacctgtacacaggccggggccccagcagcgaggccatgcacgtgggccacctgatccccttcatcttcaccaagtggctgcaggatgtgttcaacgtgcccctggtgatccagtag

SEQ ID NO: 332486 - DNA, 675 bp, Artificial Sequence
  derived and/or modified sequence
atgctggtgtccctgaagatgagctacaaggctgctgctggggaggactacaaggctgactgccccccaggcaacccagcccccaccagcaaccacggcccagatgccacagaagcagaagaagattttgtggacccctggacagtgcagaccagcagcgccaagggcattgattatgacaagctgattgtgcgcttcggcagcagcaagattgacaaggagctgatcaacagaattgagcgggccaccggccagaggccccaccacttcctgcggcggggcatcttcttcagccaccgggacatgaaccaggtgctggatgcctatgagaacaagaagcccttctacctgtacacaggccggggccccagcagcgaggccatgcacgtgggccacctgatccccttcatcttcaccaagtggctgcaggatgtgttcaacgtgcccctggtgatccagatgacagatgatgagaagtacctgtggaaggacctgaccctggaccaggcctacagctatgctgtggagaatgccaaggacatcatcgcctgtggctttgacatcaacaagaccttcatcttcagtgacctggactacatgggcatgagcagcggcttctacaagaatgtggtgaagatccagaagcacgtgaccttcaaccaggtgaagggctag

SEQ ID NO: 332487 - DNA, 465 bp, Artificial Sequence
  derived and/or modified sequence
atgctggtgtccctgaagatgagctacaaggctgctgctggggaggactacaaggctgactgccccccaggcaacccagcccccaccagcaaccacggcccagatgccacagaagcagaagaagattttgtggacccctggacagtgcagaccagcagcgccaagggcattgattatgacaagctgattgtgcgcttcggcagcagcaagattgacaaggagctgatcaacagaattgagcgggccaccggccagaggccccaccacttcctgcggcggggcatcttcttcagccaccgggacatgaaccaggtgctggatgcctatgagaacaagaagcccttctacctgtacacaggccggggccccagcagcgaggccatgcacgtgggccacctgatccccttcatcttcaccaagtggctgcaggatgtgttcaacgtgcccctggtgatccagatgtag

SEQ ID NO: 332488 - DNA, 1293 bp, Artificial Sequence
  derived and/or modified sequence
atgctggtgagcctgaagatgagctacaaggccgccgccggcgaggactataaagctgactgtcctccgggcaacccagcacccacatctaatcatgggccggacgcaaccgaagctgaggaggactttgtggatccttggaccgtgcagacctcatccgctaaaggaattgactacgacaaactgatcgtcagattcggctcttctaaaatagacaaagagctgataaaccggatcgaacgggcgacaggccaacgtccccatcatttcctccggagagggatcttcttttcacaccgcgatatgaaccaggtccttgacgcttatgagaacaaaaaacctttttacttgtacactggccggggaccgtcatccgaagccatgcacgtgggtcacctgatcccctttattttcaccaagtggctgcaggacgtctttaacgtgcccctggttatccaaatgaccgacgatgagaagtatttgtggaaggacctgaccctggatcaggcttattcttatgcagtggaaaacgcaaaggacattatcgcatgcggtttcgatataaacaaaactttcatctttagcgatctagattacatgggcatgtcttctggattctacaagaatgttgtcaaaatacagaagcacgtgacttttaatcaggtgaaaggtatattcgggtttaccgacagcgactgcatcgggaaaatctcattcccagccatccaggctgcaccctcgttttcaaattcatttccccaaatctttcgggatcgcaccgacatccagtgccttatcccatgcgcaatcgatcaagatccctacttccggatgacacgggacgtggccccacgaattggttaccctaagccagcattgcttcatagcacctttttccccgcccttcaaggggcccaaacaaagatgtccgcttcagatcccaacagttccatctttctgacggacaccgcaaagcagatcaagacgaaggtgaacaaacatgccttcagcgggggacgcgacacaatcgaggaacatcgacagtttggaggcaactgcgatgtggacgtgtcttttatgtatctgacttttttcctggaagatgatgataaactcgagcagatcagaaaggactacaccagcggcgccatgctgacaggggaacttaagaaggctctgatcgaggtgctgcagccactcatcgctgaacaccaggcgcggagaaaagaggtaacagacgagatcgtgaaggagttcatgaccccccgaaagctctcgtttgattttcagtag

SEQ ID NO: 332489 - DNA, 1293 bp, Artificial Sequence
  derived and/or modified sequence
atgctggtgagcctgaagatgagctacaaggccgccgccggcgaggactacaaggctgactgtccccctggaaatcccgctccaacttctaatcacggccctgatgcaacggaggccgaagaggactttgttgacccttggactgtgcagacatccagtgcgaaggggatcgattacgataaactgatagtccggtttgggagttccaagatcgataaagaactcatcaatcggattgagcgtgccactggacagaggcctcatcacttcctgagacggggaatcttttttagccaccgggatatgaatcaggtgcttgacgcatatgagaataagaagcccttttacctgtacaccgggcggggcccttcatccgaggccatgcacgtgggccatcttattcctttcatctttacaaagtggctgcaggacgtcttcaacgtgccactggtgattcagatgactgacgacgaaaagtacctatggaaggatttgactttagaccaggcctattcatacgctgttgaaaacgctaaggacattattgcatgtggattcgatatcaataaaacgtttatcttcagcgacctggactacatgggcatgtcgtcaggtttttataaaaacgtggttaaaattcagaagcacgtcaccttcaaccaggtgaagggcatcttcgggtttactgatagcgattgcattggtaagatatcttttccagcaatccaggccgctccttccttcagcaattctttcccacagatctttagagatcggaccgatattcagtgcctcatcccctgtgccatcgaccaggacccatacttcagaatgacccgggacgttgcgccccgcatcggatatcccaagcccgctctgctgcactccaccttctttccagccctccagggagcacagaccaaaatgtccgcaagtgatcccaactcttctatattcctgaccgacacagctaaacagataaaaacaaaggtgaacaagcacgccttcagcgggggccgggatacaatcgaagagcatagacagttcggcggtaattgcgacgtggacgtaagcttcatgtatctcactttcttcctggaagatgacgacaagctggagcaaattcgtaaggattacacttctggggccatgttgacaggtgagcttaaaaaggcactcatcgaagtcctgcagcccctgatcgctgagcaccaggcccgacggaaggaggtgaccgacgagatcgtgaaggaattcatgacaccccggaaattgtcatttgactttcaatag

SEQ ID NO: 332490 - DNA, 684 bp, Artificial Sequence
  derived and/or modified sequence
atgctggtgagcctgaagatgagctacaaggccgccgccggcgaggactacaaggctgactgccctcctggtaatcccgcccctacatccaaccacgggcctgacgctaccgaggcagaggaggatttcgtggacccatggacagtgcagacttcatcagccaagggtatcgactacgataaactgattgtcagatttggctctagcaagatcgacaaggagcttatcaatagaatagagagagccaccggccagagacctcatcatttccttaggagggggattttttttagccatagagatatgaaccaagtgcttgacgcgtatgagaacaagaagccgttttacctatatactggtagggggccttcatcagaagccatgcatgttggtcaccttattccgtttatttttaccaagtggcttcaagatgtgttcaacgttcccctagtcatccagatgaccgatgacgagaagtatctgtggaaagacttgaccctggaccaggcatactcatatgccgtcgaaaacgctaaggatattattgcctgcggcttcgatatcaataagacattcatcttcagcgacctggactatatgggcatgagcagcgggttctacaaaaatgtcgttaaaattcagaaacacgtaacgtttaatcaagtcaagggcattttcggatag

SEQ ID NO: 332491 - DNA, 423 bp, Artificial Sequence
  derived and/or modified sequence
atgctggtgagcctgaagatgagctacaaggccgccgccggcgaggattataaggctgactgtccccccggaaatcccgcccccactagcaatcacgggcctgatgctaccgaagctgaggaggactttgtggacccttggacagttcagaccagcagcgccaaaggaatcgactacgacaaactcatagttcggttcggaagttctaaaatcgacaaagagctgataaaccgaatcgaaagagccaccggacagcgcccacatcactttctgcggcgtggaatatttttctcacacagagatatgaaccaggtgctcgacgcctacgaaaacaagaaacccttttatctgtacactggtcgcggaccatcaagtgaagccatgcacgtggggcatctcatacctttcatctttaccaagtag

SEQ ID NO: 332492 - DNA, 462 bp, Artificial Sequence
  derived and/or modified sequence
atgctggtgagcctgaagatgagctacaaggccgccgccggcgaggactataaggctgattgccctcccggcaatcccgctccaaccagcaaccatggtccggacgctaccgaagctgaagaagatttcgtcgatccttggaccgtgcagacatcttccgccaaggggatcgattacgacaaactgatagttaggttcggttcctcaaagattgataaggagctcatcaacaggatcgagcgcgcgaccggccagcgacctcaccattttctgaggcgcggaatttttttctctcatagggatatgaaccaggtactggacgcctatgaaaacaagaaacctttttatttgtatactggccgtggcccatcatccgaagcaatgcatgtgggccatctgatcccattcatcttcactaagtggctgcaagatgtgttcaatgtcccactagttatccagtag

SEQ ID NO: 332493 - DNA, 675 bp, Artificial Sequence
  derived and/or modified sequence
atgctggtgagcctgaagatgagctacaaggccgccgccggcgaggattataaggccgattgtccacccggcaacccagcgcctacatctaaccatggccccgatgccaccgaagctgaagaggattttgtagatccctggacggtgcagaccagttccgccaagggcatcgattacgataaactaattgtgaggttcggctcctctaaaattgacaaagagctgataaatcgcattgagagggccaccgggcaacgcccacaccacttccttaggcgaggcatctttttctcccacagggacatgaaccaggtcttagacgcctacgagaataaaaagcccttctatctctatacaggacgaggcccttccagcgaagccatgcacgtggggcatctgattccatttattttcactaagtggctgcaggatgtgttcaatgtgcctctcgttatccagatgaccgacgatgaaaagtatctgtggaaagacctgacccttgatcaagcctacagctacgcagtcgagaatgcgaaagacatcatcgcctgcggctttgacataaataaaacattcatcttctccgaccttgattatatgggaatgtctagcggcttctacaaaaacgtggtgaaaatccaaaagcatgtcacattcaatcaggtgaaaggatag

SEQ ID NO: 332494 - DNA, 1293 bp, Artificial Sequence
  derived and/or modified sequence
atgctggtgagcctgaagatgagctacaaggccgccgccggcgaggactacaaagctgactgcccacccggtaaccccgccccaacaagtaatcatggacccgatgccaccgaagccgaagaggatttcgtcgatccctggactgtacagaccagttctgcaaagggtattgattatgacaaactgattgttcgttttggttcttctaaaattgataaggagcttatcaaccgtatagagagagctaccggtcagaggccacaccactttctccggcgcggtattttctttagtcatcgggatatgaatcaggttttggatgcctatgaaaataagaagcccttctacctatatactggcagggggccatcttctgaagcgatgcatgttggccacctaattccctttatttttactaaatggctgcaggacgtttttaatgtgccgctggtcatacaaatgactgatgacgaaaagtatctctggaaagatctgacattggatcaggcttactcttacgcagttgaaaacgccaaagatattatcgcatgcggattcgacatcaacaaaacatttatttttagtgatttggactacatgggtatgtcaagtgggttttacaagaatgttgtgaaaatccagaaacacgtgacctttaatcaggtgaaaggaatctttggctttactgactcggactgtatcggaaaaatctcctttcctgccattcaggccgcaccttcttttagcaacagctttccacagattttcagagatcggaccgacatccaatgtttaattccatgcgccattgatcaggacccttacttccgtatgactcgggacgttgctccgaggatcggatatcccaagcccgccctgcttcactctactttcttccccgctttgcagggcgcacaaacaaagatgtctgcctcagaccccaattctagcatttttttaacagacaccgcgaaacagatcaaaactaaggtgaataagcacgccttctccggtgggagggatacaattgaggaacatagacagtttggcggtaactgcgatgtcgacgtgagcttcatgtatctcacatttttcctggaagatgatgacaaattagagcagatccggaaggactacaccagcggagccatgttaacaggggagctcaaaaaggcactgattgaggtgctgcaacccttgattgctgaacaccaagcccgtagaaaggaggtcaccgacgaaattgtgaaagagttcatgacccctaggaaactgagtttcgactttcagtag

SEQ ID NO: 332495 - DNA, 465 bp, Artificial Sequence
  derived and/or modified sequence
atgctggtgagcctgaagatgagctacaaggccgccgccggcgaggattacaaagcagactgcccccctggaaatccagcacctactagcaaccatggtcctgatgccaccgaagccgaagaggactttgtcgacccctggacggtccagacctcctcggctaaaggcatcgattacgacaaactaatcgtccggttcgggtcctctaagatagataaggaactgatcaaccggatcgagagagcaacgggacagcgccctcatcatttcctcaggaggggcatcttcttttcccaccgcgacatgaatcaggtcctggatgcctatgaaaataagaagcctttctatctgtatacaggaagagggcctagcagcgaagcaatgcacgtcggccatttgattccattcatattcacaaaatggctacaagatgtgtttaacgtgcccctggtcattcagatgtag

SEQ ID NO: 332496 - DNA, 1293 bp, Artificial Sequence
  derived and/or modified sequence
atgttggttagtctaaagatgtcctacaaagcagcagccggtgaggactacaaagccgactgcccaccaggcaatccagcacccacctctaatcacggacccgacgctactgaagccgaggaagatttcgtggacccttggactgttcagaccagctccgctaaggggatagactacgataagctgattgtgcgtttcgggtctagcaagatcgataaagagctcatcaaccggatcgagcgtgcaaccggccagcggcctcaccacttccttcggagagggatcttcttttcgcacagggacatgaatcaggttcttgatgcctatgaaaataaaaagccattttatctgtacacaggcaggggtccgagtagcgaggccatgcatgtcgggcacctgatcccgttcattttcacaaaatggctccaagacgtgttcaacgtgccattggtgatccagatgaccgatgatgaaaagtatctgtggaaagacctgacccttgatcaggcatactcctacgccgtggagaatgcaaaagatatcattgcttgcggctttgatataaacaaaacctttattttcagcgatctggactacatgggcatgtcttcaggtttttataaaaacgtcgtgaaaattcaaaagcatgtcaccttcaatcaggtcaaaggcatttttggatttaccgacagcgactgtattggcaagatttccttcccagccatccaggcggctccctccttttcaaatagcttcccacagatcttcagagatagaacagatatacaatgtctgattccgtgcgccatcgaccaggacccatactttcggatgacgcgggacgttgccccacgcattgggtatcctaaacctgccttgttacatagcacttttttccccgcattacagggtgcccagactaagatgagcgcctccgatccaaatagtagcatcttcctgactgataccgcaaagcagatcaagacaaaggtgaataagcatgcgtttagcggaggtcgagacacgatcgaagagcatcgtcaattcgggggtaattgtgacgtggatgtgtcctttatgtatttaactttcttcctggaggatgacgataaactcgagcagattagaaaggattatacatctggtgctatgctgactggcgagctgaagaaagcgttgattgaagttctgcagcctctaattgccgaacaccaagcccgacggaaggaggtaacggatgaaattgtgaaggagttcatgaccccgcgtaaactatccttcgattttcagtag

SEQ ID NO: 332497 - DNA, 1293 bp, Artificial Sequence
  derived and/or modified sequence
atgctcgtgagtctaaagatgagctataaggcggcagcgggtgaagattacaaggccgactgtccgccaggcaaccctgccccaacttctaaccacggcccagacgccaccgaggctgaggaggacttcgtggacccttggaccgtccaaacgagcagcgcaaagggcatcgactacgacaaactgatcgttcgttttggcagctccaaaattgacaaagaactaatcaataggatcgagcgcgctacagggcagagaccccaccactttctcagacgcggtatcttcttttctcaccgagacatgaaccaagtgctagacgcctacgaaaataagaagccgttctatctttatacagggagaggcccaagttcagaagctatgcacgttggccacttaatccctttcatatttacgaagtggctccaggatgtattcaatgtgccacttgttattcagatgacagatgatgagaaatatttatggaaagatcttacattggatcaagcttatagctatgccgtcgagaatgcaaaagacattattgcatgtggtttcgatattaataagacattcatcttttcagacctggattatatggggatgtcttcagggttctataaaaacgtggtgaaaattcagaagcacgttaccttcaatcaagtgaaaggaatcttcggatttactgatagcgactgcattggtaaaatctcattccctgcaattcaggccgctccgtccttctctaattccttcccacagatcttcagagacaggacagatatccagtgtctcataccttgcgccatcgaccaagatccttatttcagaatgacacgggacgtggcccctcgcatcggctaccctaaaccagcgctgctccacagcacatttttcccagctctgcagggcgctcagacaaagatgtccgcctccgatcccaactcttccatcttcttgacggacaccgctaagcaaatcaagaccaaagttaataaacacgcctttagtggcggacgggatacaatagaggaacatcgtcagttcgggggaaattgtgatgtggacgtgagctttatgtacctgacattcttcctggaagatgatgataagctcgaacagatcaggaaggactacaccagtggagccatgctgacaggggagttaaagaaggccctcatcgaagtcttgcagccactaattgcggagcatcaggcaagacggaaggaagtcaccgatgaaattgtgaaagaattcatgaccccaaggaagctgtccttcgacttccagtag

SEQ ID NO: 332498 - DNA, 684 bp, Artificial Sequence
  derived and/or modified sequence
atgctcgttagcctcaagatgtcttataaggcagcagcgggagaagactacaaggcagactgtccacctgggaacccagctccgaccagtaaccacggccctgatgctaccgaggcagaggaggacttcgtagatccgtggactgtgcagacttcaagcgcgaaaggcattgactacgacaagctgattgttaggttcggttctagcaagatagataaagaattgatcaacagaatagagcgtgccaccggccagcgcccacatcacttcctgaggcgcggaattttcttctctcatcgcgacatgaaccaggtgttagatgcttatgaaaacaaaaagcctttctacctgtacaccgggaggggccctagtagcgaagccatgcacgtgggccatcttatcccattcatcttcacaaaatggcttcaagacgtattcaatgtgcctttggtgatccaaatgaccgatgacgagaaatacctctggaaggatcttaccctcgaccaggcatattcttatgcagtggagaacgcgaaggatatcatcgcctgtggattcgatatcaataagaccttcatcttcagcgacttggactacatggggatgagctcagggttctacaaaaacgtggtgaaaatacagaaacatgttacatttaatcaggtcaagggcatcttcggctag

SEQ ID NO: 332499 - DNA, 423 bp, Artificial Sequence
  derived and/or modified sequence
atgctcgtgtctctaaagatgtcctataaggctgccgcaggtgaagattataaggctgattgtccacctggcaatccagccccaactagtaaccacggccctgatgcaacagaggccgaggaagacttcgtagacccttggactgtgcagacctctagcgccaagggcatagattatgacaagttgatcgttagatttggaagtagtaagatagataaagagttgatcaaccggatcgaaagggccactgggcagcggcctcatcatttcctgcgacggggaatctttttctcccatcgggatatgaaccaggtgctggacgcatacgaaaacaaaaagcctttctatctttacacggggagaggcccatcttccgaagctatgcacgtcggtcatctcatccccttcattttcaccaagtag

SEQ ID NO: 332500 - DNA, 462 bp, Artificial Sequence
  derived and/or modified sequence
atgctagttagtttgaaaatgagttataaagccgcagcgggtgaggactataaagctgattgtccccctgggaatccagcacctacttccaatcacggccctgatgcaacagaggccgaagaggattttgtagacccttggacagtccagacatcctccgctaaggggatcgactacgacaagctgatcgtgaggtttgggtcatctaagattgacaaggaattgataaatcgcattgagagggccacagggcaacgccctcatcacttcttgagaagaggcatcttttttagccaccgcgatatgaatcaagtgctggatgcatatgaaaacaagaaaccgttttatctgtataccgggagggggccttccagtgaggccatgcacgtcgggcatctgattcccttcatctttacaaagtggcttcaggacgtgtttaacgtccccctcgttattcagtag

SEQ ID NO: 332501 - DNA, 675 bp, Artificial Sequence
  derived and/or modified sequence
atgctcgtgtctctaaagatgtcatataaagccgctgccggagaggactacaaagctgactgccctcctgggaaccccgcaccaaccagcaaccatggcccagatgccacagaggccgaggaagatttcgtggatccgtggactgttcaaacgtcaagcgcaaaagggatagactacgacaagctgatcgtgcgcttcggctccagcaagatagacaaggaacttataaacagaatagagcgagcaactggacagagacctcaccatttcttacgcagggggatctttttttcacaccgggatatgaaccaggtgctggacgcatatgaaaacaagaaacctttctacctatacacaggcagaggcccaagtagcgaagctatgcatgttgggcatctgattccttttatttttacaaaatggctgcaggacgtctttaatgttcctctcgttatacaaatgacagacgacgagaagtatctgtggaaggatttgaccctcgatcaagcctattcctacgctgtggaaaacgccaaagatatcattgcgtgcggttttgatattaacaagacatttatattctcggatctcgattacatggggatgtcgagtggcttttacaaaaatgttgtaaagattcagaagcacgtgacatttaatcaggtgaagggctag

SEQ ID NO: 332502 - DNA, 1293 bp, Artificial Sequence
  derived and/or modified sequence
atgttagtctccttgaagatgtcctataaagcggctgctggtgaggactacaaagcagattgtcctcctggcaacccagcaccaacttcaaaccacggccctgacgcgactgaagcggaagaggattttgtcgacccatggaccgtgcaaacaagctcagcaaaaggtatcgactatgacaagttgattgtgcggtttgggtcctcaaaaatcgataaggagctaattaatcggatcgagagagccactggacagcgacctcatcattttttgcgccgagggattttcttctcccatagagatatgaaccaggtgcttgatgcatacgagaacaagaaaccattctacctatataccgggagaggaccatcgtcggaagcaatgcatgttggccacttgatcccctttatcttcacaaagtggttgcaggatgtctttaacgtacctctggtgattcagatgacagacgacgagaaatatttgtggaaagatttgaccctggatcaggcttactcctatgcagtggaaaacgctaaagacatcatcgcctgcggattcgatattaacaaaacgttcatttttagcgacctcgattatatgggaatgtcttcggggttctacaaaaacgttgtcaaaatccaaaagcatgtaacatttaaccaggtgaaaggcatcttcgggtttacagactccgactgcattgggaaaatatctttccctgctatccaagccgcacccagcttttccaattcttttcctcagatattcagagatcggactgacattcagtgtctgatcccatgcgcaatcgaccaggacccctactttagaatgaccagagatgtcgccccacggatcggataccccaaaccggctttgttgcacagtaccttttttcctgcccttcagggagcacaaactaagatgtcagccagcgacccaaactccagtatctttctcacggacactgcgaagcagattaagacgaaggtcaataaacatgcattttccggcggaagggatacaatcgaagaacatcggcagttcggcggtaactgcgacgttgacgtctctttcatgtatctcacattcttcctggaggatgatgataagcttgaacagatacggaaagactatacctccggggctatgctcacgggcgaactcaagaaagccctgattgaagtgctacagccgcttatagcagagcatcaggctagacggaaggaggtcactgatgagatcgtgaaggaattcatgacacctagaaagctgtcttttgattttcagtag

SEQ ID NO: 332503 - DNA, 465 bp, Artificial Sequence
  derived and/or modified sequence
atgctggtgtctctgaagatgagctacaaggcggcagctggtgaagactataaggccgactgtccgcctggaaaccctgccccaacctccaaccacggtcccgatgcgacagaagctgaggaggatttcgtcgacccatggacagtacagacaagctctgccaaaggcatcgattacgacaaactgattgtgaggttcgggtcatccaagatagataaggaactgattaaccggatcgaaagggcaacggggcagcggcctcaccacttccttcggagggggatattcttttcgcacagggacatgaaccaggttctggacgcttatgagaataaaaagccattctacctgtataccggcagagggccaagctccgaagccatgcacgtcgggcacttgatcccgtttatctttactaagtggctgcaggacgtgttcaacgtgccacttgtgatccagatgtag

SEQ ID NO: 332504 - DNA, 219 bp, Artificial Sequence
  derived and/or modified sequence
atggtgatggtggccaacaagaagagccaggaccagatgaccgaggacctgagcctgttcctgggcaacaacaccatcagattcaccgtgtggctgcacggcgtgctggacaagctgagaagcgtgaccaccgagcccagcagcctgaagagcagcgacaccaacatcttcgacagcaacgtgcccagcaacaagagcaacttcagcagaggcgactag

SEQ ID NO: 332505 - DNA, 285 bp, Artificial Sequence
  derived and/or modified sequence
atggtgatggtggccaacaagaagagccaggaccagatgaccgaggacctgagcctgttcctgggcaacaacaccatcagattcaccgtgtggctgcacggcgtgctggacaagctgagaagcgtgaccaccgagcccagcagcctgaagagcagcgacaccaacatcttcgacagcaacgtgcccagcaacaagagcaacttcagcagaggcgacgagagaagacacgaggccgccgtgccccccctggccatccccagcgccagacccgagaagagagactag

SEQ ID NO: 332506 - DNA, 648 bp, Artificial Sequence
  derived and/or modified sequence
atggtgatggtggccaacaagaagagccaggaccagatgaccgaggacctgagcctgttcctgggcaacaacaccatcagattcaccgtgtggctgcacggcgtgctggacaagctgagaagcgtgaccaccgagcccagcagcctgaagagcagcgacaccaacatcttcgacagcaacgtgcccagcaacaagagcaacttcagcagaggcgacgagagaagacacgaggccgccgtgccccccctggccatccccagcgccagacccgagaagagagacagcagagtgagcaccagcagccaggagagcaagaccaccaacgtgagacagacctacgacgacggcgccgccaccagactgatgagcaccgtgaagcccctgagagagcccgcccccagcgaggacgtgatcgacatcaagcccgagcccgacgacctgatcgacgaggacctgaacttcgtgcaggagaaccccctgagccagaagaagcccaccgtgaccctgacctacggcagcagcagacccagcatcgagatctacagaccccccgccagcagaaacgccgacagcggcgtgcacctgaacagactgcagttccagcagcagcagaacagcatccacgccgccaagcagctggacatgtag

SEQ ID NO: 332507 - DNA, 402 bp, Artificial Sequence
  derived and/or modified sequence
atggtgatggtggccaacaagaagagccaggaccagatgaccgaggacctgagcctgttcctgggcaacaacaccatcagattcaccgtgtggctgcacggcgtgctggacaagctgagaagcgtgaccaccgagcccagcagcctgaagagcagcgacaccaacatcttcgacagcaacgtgcccagcaacaagagcaacttcagcagaggcgacgagagaagacacgaggccgccgtgccccccctggccatccccagcgccagacccgagaagagagacagcagagtgagcaccagcagccaggagagcaagaccaccaacgtgagacagacctacgacgacggcgccgccaccagactgatgagcaccgtgaagcccctgagagagcccgccccctag

SEQ ID NO: 332508 - DNA, 219 bp, Artificial Sequence
  derived and/or modified sequence
atggtcatggtcgcaaacaaaaagagccaggaccagatgaccgaagatctgtctctcttcctaggaaataacacaattcgcttcacggtatggcttcatggcgtcttggacaagctacgctccgtcacaacggagccttcttcactcaagtccagcgataccaacatattcgactcaaatgtgccatctaacaagagcaatttctcccgtggcgactag

SEQ ID NO: 332509 - DNA, 285 bp, Artificial Sequence
  derived and/or modified sequence
atggtgatggtagctaacaaaaagtcccaggaccagatgacagaagacctgtccctgttcctggggaataatactatccggttcactgtgtggctccacggcgtactcgataagttgcggagtgtcacgacagagccttccagtctgaagagctctgatacaaatatcttcgactctaatgttcctagcaataaatcaaatttcagccgaggggatgaacgccgacacgaagccgctgtccctccattggctatcccaagtgcaaggcccgagaagcgagattag

SEQ ID NO: 332510 - DNA, 648 bp, Artificial Sequence
  derived and/or modified sequence
atggttatggttgccaacaaaaagtctcaggaccaaatgacagaagatctgagcctattcttgggaaataataccatcagatttactgtctggttgcacggcgttctcgataagctgcggtctgtcaccacagagccaagctcactgaagagttctgacaccaacatttttgatagcaatgtgccatcgaataaaagtaacttcagccgtggggatgagaggcggcacgaggccgccgtgcctccattggctatccccagtgcacggccagaaaagagggacagccgcgtgtctactagctctcaagagagcaagactacaaatgtccgacagacttacgatgatggggccgctactcgcctgatgtccaccgtgaagcctctcagagaaccggctcccagcgaagatgttattgatatcaaacccgagccagacgatctgattgatgaggatctgaactttgtccaggaaaatcctctgtctcagaagaagccaactgtaaccttgacctatggctcatcacgcccatcaattgaaatttaccggccacctgcctctcggaatgcagatagtggagtgcacttgaaccggttgcaatttcaacagcagcaaaactcaattcatgccgctaaacaactggacatgtag

SEQ ID NO: 332511 - DNA, 402 bp, Artificial Sequence
  derived and/or modified sequence
atggttatggtggcaaataagaaatcacaagaccagatgacggaggatctgagcctcttcctgggcaacaacaccataaggtttactgtgtggctgcacggcgttctcgataagctcagatccgtgaccacggagccatctagtctgaagagctccgataccaacattttcgactctaacgtgcccagcaataagtcaaacttctcacgtggtgacgagcgtagacacgaagccgccgtcccaccgctggcaataccctctgctcggcctgagaaaagggacagtagggtttccactagttctcaggagagcaaaactacgaatgtcaggcagacctacgatgatggggcagcaaccagactgatgagcacagtgaagccattgcgggaacctgccccctag

SEQ ID NO: 332512 - DNA, 219 bp, Artificial Sequence
  derived and/or modified sequence
atggtgatggtggccaacaagaagagccaggaccagatgacagaggacctgagcctcttcctgggcaacaacaccatccgcttcaccgtgtggctgcatggagtgctggacaagctgcggtctgtgaccacagagcccagcagcctgaagagcagtgacaccaacatctttgacagcaatgtgcccagcaacaagagcaacttcagcagaggagactag

SEQ ID NO: 332513 - DNA, 285 bp, Artificial Sequence
  derived and/or modified sequence
atggtgatggtggccaacaagaagagccaggaccagatgacagaggacctgagcctcttcctgggcaacaacaccatccgcttcaccgtgtggctgcatggagtgctggacaagctgcggtctgtgaccacagagcccagcagcctgaagagcagtgacaccaacatctttgacagcaatgtgcccagcaacaagagcaacttcagcagaggagatgagaggagacatgaggccgctgtgccccccctggccatccccagcgcccggcctgagaagagggactag

SEQ ID NO: 332514 - DNA, 648 bp, Artificial Sequence
  derived and/or modified sequence
atggtgatggtggccaacaagaagagccaggaccagatgacagaggacctgagcctcttcctgggcaacaacaccatccgcttcaccgtgtggctgcatggagtgctggacaagctgcggtctgtgaccacagagcccagcagcctgaagagcagtgacaccaacatctttgacagcaatgtgcccagcaacaagagcaacttcagcagaggagatgagaggagacatgaggccgctgtgccccccctggccatccccagcgcccggcctgagaagagggacagccgggtgtccaccagcagccaggagagcaagaccaccaacgtgcggcagacctatgatgatggagctgccacccggctgatgagcacagtgaagcccctgcgggagcccgcccccagtgaagatgtgattgacatcaagccagagccagatgacctgattgatgaggacctgaactttgtgcaggagaaccccctgagccagaagaagcccaccgtgaccctgacctacggcagcagccggcccagcattgagatctacagacctccagccagcagaaatgctgacagcggcgtgcacctgaaccggctgcagttccagcagcagcagaacagcatccatgctgccaagcagctggacatgtag

SEQ ID NO: 332515 - DNA, 402 bp, Artificial Sequence
  derived and/or modified sequence
atggtgatggtggccaacaagaagagccaggaccagatgacagaggacctgagcctcttcctgggcaacaacaccatccgcttcaccgtgtggctgcatggagtgctggacaagctgcggtctgtgaccacagagcccagcagcctgaagagcagtgacaccaacatctttgacagcaatgtgcccagcaacaagagcaacttcagcagaggagatgagaggagacatgaggccgctgtgccccccctggccatccccagcgcccggcctgagaagagggacagccgggtgtccaccagcagccaggagagcaagaccaccaacgtgcggcagacctatgatgatggagctgccacccggctgatgagcacagtgaagcccctgcgggagcccgccccctag

SEQ ID NO: 332516 - DNA, 219 bp, Artificial Sequence
  derived and/or modified sequence
atggtgatggtggccaacaagaagagccaggaccagatgaccgaggatctgtcactcttcctcggaaacaatacaatcagattcacagtatggctgcacggcgtcctagataagcttcgatctgtgacaactgagccaagtagccttaaaagctctgacacaaatatctttgactcgaatgtgccctccaacaagagtaacttctcgcgcggggactag

SEQ ID NO: 332517 - DNA, 285 bp, Artificial Sequence
  derived and/or modified sequence
atggtgatggtggccaacaagaagagccaggaccagatgaccgaggacttaagcttatttctcggaaacaataccatccggtttaccgtttggcttcatggcgtccttgacaagcttcgaagcgtaaccactgaacccagcagtctgaaaagctcggatacgaacatttttgactcgaatgtgcccagcaacaaatccaacttcagtcgcggagacgagagacgccacgaggccgctgtgcctcccctggcaatccctagtgcacgaccagaaaagcgagactag

SEQ ID NO: 332518 - DNA, 648 bp, Artificial Sequence
  derived and/or modified sequence
atggtgatggtggccaacaagaagagccaggaccagatgaccgaggacctttccctgtttcttggcaataacacgattcgctttactgtttggctgcatggcgtacttgataagcttcgttccgttacaaccgagccctcctcactgaaatccagtgatacgaatatcttcgactcgaatgtgcctagcaacaaaagcaatttctccaggggcgacgaaaggaggcatgaagcggcggttcccccccttgcgattccatccgccaggcccgaaaaacgagattcccgggtcagcacctcctcccaggaatccaagaccacaaacgtaaggcagacttatgacgacggcgcggccactcgattaatgagcacagttaaaccccttcgggaaccagccccctctgaggatgtgatcgacatcaaacccgaaccagacgacctgatcgacgaggatctgaatttcgtccaggaaaaccccctgagccaaaagaagcctaccgtcaccctgacctatggatcttcaagaccttcgatagagatataccggccccctgcatctcgtaacgccgacagtggggtacacctcaataggctgcagtttcagcagcagcagaacagtattcatgccgctaagcagctggacatgtag

SEQ ID NO: 332519 - DNA, 402 bp, Artificial Sequence
  derived and/or modified sequence
atggtgatggtggccaacaagaagagccaggaccagatgaccgaggatctctccttgttcctgggtaataataccatccgatttaccgtctggttgcatggtgttctcgacaagctgaggtccgttacgactgagccgtcttccctcaaatctagtgatactaatatcttcgattcgaatgtaccatcaaataaatccaatttcagtcgcggcgacgaaaggcgccatgaggcagccgttccgcccttagccatcccttccgctcgtcctgagaaacgggacagccgcgtgagcacgagcagtcaagaatctaaaaccaccaacgtacgacagacatacgacgatggagccgccaccaggctgatgtcaaccgtcaaacccctacgggagcccgccccatag

SEQ ID NO: 332520 - DNA, 219 bp, Artificial Sequence
  derived and/or modified sequence
atggtcatggtggccaacaaaaagtcccaagaccagatgacagaagacctgagcctctttctgggcaacaacactatccgctttacggtatggctgcacggagtgcttgataaactcagaagtgtgacaaccgagccatcttccctgaagagctcggatactaacatatttgactcaaacgtcccaagcaacaaaagcaacttcagccgcggtgactag

SEQ ID NO: 332521 - DNA, 285 bp, Artificial Sequence
  derived and/or modified sequence
atggtaatggtggccaacaagaagtcacaggaccagatgacagaggacctgagcttgtttctcggaaacaacaccattagatttacggtgtggcttcatggcgtgctggacaaactcaggagtgtgaccaccgagccctcatcccttaagtccagcgacacaaacattttcgactctaacgtgccatcaaataaaagcaacttcagcagaggcgacgaacgacgccatgaggccgctgtccctccactggctattccctccgctaggccggagaagagggactag

SEQ ID NO: 332522 - DNA, 648 bp, Artificial Sequence
  derived and/or modified sequence
atggtcatggtcgccaacaaaaaaagtcaagaccagatgaccgaagatctcagcctatttctcggaaataacaccataagatttacagtttggcttcatggagtcctcgataagctgcggtccgttaccaccgaaccctcctcactcaaatcctctgataccaatatttttgattctaacgtaccttctaacaaaagtaacttctcccgtggcgacgagcgcaggcatgaggctgctgttccaccgctggctataccgtctgctaggcccgagaaaagagattctcgggtctcaacatcatcacaagaaagcaagacaactaatgttcgacagacctatgacgacggggcagctactagattaatgtctacagtgaagccactccgggagccagccccaagtgaagacgtgattgatatcaaacctgagcccgacgacctgatcgacgaagatcttaattttgtacaggaaaatccacttagccaaaaaaagcctacggtaactctgacttacggtagcagcagacctagcatcgaaatttatcgccctccagccagccgcaatgccgactccggggttcacctcaacagactgcaatttcagcagcagcaaaatagtatccacgccgctaagcagctcgatatgtag

SEQ ID NO: 332523 - DNA, 402 bp, Artificial Sequence
  derived and/or modified sequence
atggtgatggtggcaaataaaaaatcgcaagatcaaatgactgaggatctgtctctctttttaggtaacaataccatccgcttcactgtctggttgcacggcgtgctggataagcttagatccgtgaccactgagcccagctccctgaagtcatctgatactaacatcttcgacagtaacgtaccctctaacaaatcaaatttctctagaggggacgagagacgccacgaagccgctgtgcctccactggccattccgtccgcaaggcccgagaaacgagactcccgtgtgtctacttctagtcaggagtcaaagactacaaacgtacgccagacgtacgatgatggcgctgctacgcgattaatgtctactgtgaagcctctccgggagcctgcgccatag

SEQ ID NO: 332524 - DNA, 652 bp, Artificial Sequence
  derived and/or modified sequence
agtgccggccggggcggggatacgccgtgtgcgcggccgggggcggaacggaggaggaggcggtggtgtcccggctgcggggtaggagtccgcggcagcctccgggtaagccaagcgccgcgcagtgctgagttcccgcacgccgcagagccatggagatcggcaccgagatcagccgcaagatccggagtgccattaaggggaaattacaagaattaggagcttatgttgtatttgaaatacctgtggaatgaagagaaaaaaattaaagctaagccatcttgtccaatgtaattccagtagagctctgcgactctaaagcttagagctacatctatattttcaagcacatcaactttaagaagaaagttttgaggaaacaaagttttgatctacctttccttttaaatagatgaagaacttcctgattacattatggtgatggtggccaacaagaaaagtcaggaccaaatgacagaggatctgtccctgtttctagggaacaacacaattcgattcaccgtatggcttcatggtgtattagataaacttcgctctgttacaactgaaccctctagtctgaagtcttctgataccaacatctttgatagtaacgtgccttcaaacaagagcaatttcagtcggggagatg

SEQ ID NO: 332525 - DNA, 580 bp, Artificial Sequence
  derived and/or modified sequence
ttttcctagagccgcctttctcacatgcacgtttgctctttttctctcagagtgccattaaggggaaattacaagaattaggagcttatgttgtatttgaaatacctgtggaatgaagagaaaaaaattaaagctaagccatcttgtccaatgtaattccagtagagctctgcgactctaaagcttagagctacatctatattttcaagcacatcaactttaagaagaaagttttgaggaaacaaagttttgatctacctttccttttaaatagatgaagaacttcctgattacattatggtgatggtggccaacaagaaaagtcaggaccaaatgacagaggatctgtccctgtttctagggaacaacacaattcgattcaccgtatggcttcatggtgtattagataaacttcgctctgttacaactgaaccctctagtctgaagtcttctgataccaacatctttgatagtaacgtgccttcaaacaagagcaatttcagtcggggagatgagaggaggcatgaagctgcagtgccaccacttgccattcctagcgcgagacctgaaaaaagagatt

SEQ ID NO: 332526 - DNA, 813 bp, Artificial Sequence
  derived and/or modified sequence
ggaacggaggaggaggcggtggtgtcccggctgcggggtaggagtccgcggcagcctccgggtaagccaagcgccgcgcagtgctgagttcccgcacgccgcagagccatggagatcggcaccgagatcagccgcaagatccggatgaagaacttcctgattacattatggtgatggtggccaacaagaaaagtcaggaccaaatgacagaggatctgtccctgtttctagggaacaacacaattcgattcaccgtatggcttcatggtgtattagataaacttcgctctgttacaactgaaccctctagtctgaagtcttctgataccaacatctttgatagtaacgtgccttcaaacaagagcaatttcagtcggggagatgagaggaggcatgaagctgcagtgccaccacttgccattcctagcgcgagacctgaaaaaagagattccagagtttctacaagttcgcaggagtcaaaaaccacaaatgtcagacagacttacgatgatggagctgcaacccgactaatgtcaacagtgaaacctttgagggagccagcaccctctgaagatgtgattgatattaagccagaaccagatgatctcattgacgaagacctcaactttgtgcaggagaatcccttatctcagaaaaaacctacagtgacacttacatatggttcttctcgcccttctattgaaatttatcgaccacctgcaagtagaaatgcagatagtggtgttcatttaaacaggttgcaatttcaacagcagcagaatagtattcatgctgccaagcagcttgatatgc

SEQ ID NO: 332527 - DNA, 593 bp, Artificial Sequence
  derived and/or modified sequence
ctcctcccagcccccgcccgggggatccgaggtgcgcgcaccagcaaagtggcctcagccgctgcagagtccggtcttgttttcctagagccgcctttctcacatgcacgtttgctctttttctctcagagtgccattaaggggaaattacaagaattaggagcttatgttgatgaagaacttcctgattacattatggtgatggtggccaacaagaaaagtcaggaccaaatgacagaggatctgtccctgtttctagggaacaacacaattcgattcaccgtatggcttcatggtgtattagataaacttcgctctgttacaactgaaccctctagtctgaagtcttctgataccaacatctttgatagtaacgtgccttcaaacaagagcaatttcagtcggggagatgagaggaggcatgaagctgcagtgccaccacttgccattcctagcgcgagacctgaaaaaagagattccagagtttctacaagttcgcaggagtcaaaaaccacaaatgtcagacagacttacgatgatggagctgcaacccgactaatgtcaacagtgaaacctttgagggagccagcacc

SEQ ID NO: 332528 - protein, 420 aa, Artificial Sequence
  derived and/or modified sequence
  misc_feature (1)..(1): Xaa can be any naturally occurring amino acid
XTQAMALETPTPGPPREGQSPASQAGTQHPPAQATAHSQSSPEFKGSLASLSDSLGVSVMATDQDSYSTSSTEEELEQFSSPSVKKKPSMILGKARHRLSFASFSSMFHAFLSNNRKLYKKVVELAQDKGSYFGSLVQDYKVYSLEMMARQTSSTEMLQEIRTMMTQLKSYLLQSTELKALVDPALHSEEELEAIVESALYKCVLKPLKEAINSCLHQIHSKDGSLQQLKENQLVILATTTTDLGVTTSVPEVPMMEKILQKFTSMHKAYSPEKKISILLKTCKLIYDSMALGNPGKPYGADDFLPVLMYVLARSNLTEMLLNVEYMMELMDPALQLGEGSYYLTTTYGALEHIKSYDKITVTRQLSVEVQDSIHRWERRRTLNKARASRSSVQVRPESGRGPVGPCPRHHPCCLLAKEP

SEQ ID NO: 332529 - DNA, 2730 bp, Artificial Sequence
  derived and/or modified sequence
atgatcagacacgccggcgcccccgccagaggcgaccccaccggccccgtgcccgtggtgggcaagggcgaggaggaggaggaggaggacggcatgagactgtgcctgcccgccaaccccaagaactgcctgccccacagaagaggcatcagcatcctggagaagctgatcaagacctgccccgtgtggctgcagctgagcctgggccaggccgaggtggccagaatcctgcacagagtggtggccggcatgttcctggtgagaagagacagcagcagcaagcagctggtgctgtgcgtgcacttccccagcctgaacgagagcagcgccgaggtgctggagtacaccatcaaggaggagaagagcatcctgtacctggagggcagcgccctggtgttcgaggacatcttcagactgatcgccttctactgcgtgagcagagacctgctgcccttcaccctgagactgccccaggccatcctggaggccagcagcttcaccgacctggagaccatcgccaacctgggcctgggcttctgggacagcagcctgaaccccccccaggagagaggcaagcccgccgagccccccagagacagagcccccggcttccccctggtgagcagcctgagacccaccgcccacgacgccaactgcgcctgcgagatcgagctgagcgtgggcaacgacagactgtggttcgtgaaccccatcttcatcgaggactgcagcagcgccctgcccaccgaccagccccccctgggcaactgccccgccagacccctgccccccaccagcgacgccaccagccccaccagcagatgggcccccagaagaccccccccccccccccccgtgctgcccctgcagccctgcagccccgcccagcccccccccctgcccgccaagaagaacctgcccaccgccccccccagaagaagagtgagcgagagagtgagcctggaggaccagagccccggcatggccgccgagggcgaccagctgagcctgcccccccagggcaccagcgacggccccgaggacacccccagagagagcaccgagcagggccaggacaccgaggtgaaggccagcgacccccacagcatgcccgagctgcccagaaccgccaagcagccccccgtgcccccccccagaaagaagagaatcagcagacagctggccagcaccctgcccgcccccctggagaacgccgagctgtgcacccaggccatggccctggagacccccacccccggcccccccagagagggccagagccccgccagccaggccggcacccagcacccccccgcccaggccaccgcccacagccagagcagccccgagttcaagggcagcctggccagcctgagcgacagcctgggcgtgagcgtgatggccaccgaccaggacagctacagcaccagcagcaccgaggaggagctggagcagttcagcagccccagcgtgaagaagaagcccagcatgatcctgggcaaggccagacacagactgagcttcgccagcttcagcagcatgttccacgccttcctgagcaacaacagaaagctgtacaagaaggtggtggagctggcccaggacaagggcagctacttcggcagcctggtgcaggactacaaggtgtacagcctggagatgatggccagacagaccagcagcaccgagatgctgcaggagatcagaaccatgatgacccagctgaagagctacctgctgcagagcaccgagctgaaggccctggtggaccccgccctgcacagcgaggaggagctggaggccatcgtggagagcgccctgtacaagtgcgtgctgaagcccctgaaggaggccatcaacagctgcctgcaccagatccacagcaaggacggcagcctgcagcagctgaaggagaaccagctggtgatcctggccaccaccaccaccgacctgggcgtgaccaccagcgtgcccgaggtgcccatgatggagaagatcctgcagaagttcaccagcatgcacaaggcctacagccccgagaagaagatcagcatcctgctgaagacctgcaagctgatctacgacagcatggccctgggcaaccccggcaagccctacggcgccgacgacttcctgcccgtgctgatgtacgtgctggccagaagcaacctgaccgagatgctgctgaacgtggagtacatgatggagctgatggaccccgccctgcagctgggcgagggcagctactacctgaccaccacctacggcgccctggagcacatcaagagctacgacaagatcaccgtgaccagacagctgagcgtggaggtgcaggacagcatccacagatgggagagaagaagaaccctgaacaaggccagagccagcagaagcagcgtgcaggacttcatctgcgtgagctacctggagcccgagcagcaggccagaaccctggccagcagagccgacacccaggcccaggccctgtgcgcccagtgcgccgagaagttcgccgtggagagaccccaggcccacagactgttcgtgctggtggacggcagatgcttccagctggccgacgacgccctgccccactgcatcaagggctacctgctgagaagcgagcccaagagagacttccacttcgtgtacagacccctggacggcggcggcggcggcggcggcggcagccccccctgcctggtggtgagagagcccaacttcctgtag

SEQ ID NO: 332530 - DNA, 1263 bp, Artificial Sequence
  derived and/or modified sequence
tgaacccaggccatggccctggagacccccacccccggcccccccagagagggccagagccccgccagccaggccggcacccagcacccccccgcccaggccaccgcccacagccagagcagccccgagttcaagggcagcctggccagcctgagcgacagcctgggcgtgagcgtgatggccaccgaccaggacagctacagcaccagcagcaccgaggaggagctggagcagttcagcagccccagcgtgaagaagaagcccagcatgatcctgggcaaggccagacacagactgagcttcgccagcttcagcagcatgttccacgccttcctgagcaacaacagaaagctgtacaagaaggtggtggagctggcccaggacaagggcagctacttcggcagcctggtgcaggactacaaggtgtacagcctggagatgatggccagacagaccagcagcaccgagatgctgcaggagatcagaaccatgatgacccagctgaagagctacctgctgcagagcaccgagctgaaggccctggtggaccccgccctgcacagcgaggaggagctggaggccatcgtggagagcgccctgtacaagtgcgtgctgaagcccctgaaggaggccatcaacagctgcctgcaccagatccacagcaaggacggcagcctgcagcagctgaaggagaaccagctggtgatcctggccaccaccaccaccgacctgggcgtgaccaccagcgtgcccgaggtgcccatgatggagaagatcctgcagaagttcaccagcatgcacaaggcctacagccccgagaagaagatcagcatcctgctgaagacctgcaagctgatctacgacagcatggccctgggcaaccccggcaagccctacggcgccgacgacttcctgcccgtgctgatgtacgtgctggccagaagcaacctgaccgagatgctgctgaacgtggagtacatgatggagctgatggaccccgccctgcagctgggcgagggcagctactacctgaccaccacctacggcgccctggagcacatcaagagctacgacaagatcaccgtgaccagacagctgagcgtggaggtgcaggacagcatccacagatgggagagaagaagaaccctgaacaaggccagagccagcagaagcagcgtgcaggtgagacccgagagcggcagaggccccgtgggcccctgccccagacaccacccctgctgcctgctggccaaggagccctag

SEQ ID NO: 332531 - DNA, 2730 bp, Artificial Sequence
  derived and/or modified sequence
atgattcggcacgcgggtgctcccgcacgcggtgatccaaccggccctgtcccagtggtgggcaagggagaggaggaggaagaggaggacgggatgcggctgtgcttgcccgccaatccaaaaaactgcttaccccacaggagaggcatttcaattttagaaaaactgatcaaaacctgtccggtctggttgcagctatcattaggacaggccgaagtagcaagaatcctacatcgagtggtggcgggcatgtttcttgtgcgcagggactcgagtagcaagcagctggtcttgtgtgtgcattttccatcactgaacgagtcaagcgctgaagtgctggaatataccataaaggaggaaaagagcattctttacctggagggatctgccctggttttcgaagacattttcaggttaatcgcattttactgcgtgagcagagatcttctgcccttcacgctgagactgccacaggcaatcctggaggcatcgtccttcaccgatttggagactattgccaatctaggtctgggtttctgggactctagtctcaacccccctcaggaacgtggcaaacccgccgaacccccccgggacagggctcccggattccccctggtgagctccttaaggccaaccgctcacgatgccaactgcgcctgtgaaattgagctctcagttggaaatgaccggttgtggtttgtgaaccccatctttattgaggactgttcttccgcgctgccaaccgaccagccacccttagggaattgtcccgctcgccctctgccaccgacatctgacgctaccagccctacatcccggtgggcacccaggagaccccctcctccgccgcctgtgctgcccctgcagccctgctctcctgcccaaccgccgccccttcccgctaaaaagaatctgccaactgctccacctcggcgccgcgtttctgaaagagtctcgcttgaggaccagtctcctggaatggccgctgagggagatcagctatccctaccacctcaaggaacctctgacggcccagaagacacgccaagggagtctaccgaacagggccaggataccgaagtgaaggcctccgatccacacagcatgcctgaattgcctagaaccgccaagcagcctcctgtacccccaccgcgcaagaaacggatctctcgacagctggcgtcgacactgccagcgcccttagagaacgctgaactgtgcactcaagccatggcgctggagacccctacgcccgggccccctcgcgagggacagagtcctgctagtcaggctggcacacagcacccccctgcacaggctaccgcccacagccagtccagcccggagttcaaggggagcctggcatccctgtctgactccctcggagtttcagtcatggcaacagatcaggattcctacagcacgtcttccacagaagaagaactggagcagttctcctccccgtccgtcaagaaaaaaccatcaatgatccttggcaaggcgaggcaccgtctgtcctttgcttctttcagcagtatgtttcatgccttcttaagtaacaaccgcaaactctataaaaaagtggtggagctggctcaggataaggggtcatactttgggtccctggtgcaggactataaagtttatagtttagaaatgatggcgcggcagacaagcagtaccgagatgctacaagagattagaacaatgatgactcagctgaaatcgtatctgctgcagagtactgaactgaaggctctggtcgatccagcacttcacagcgaagaagaactcgaagcaatcgttgaaagcgcgctgtataaatgcgtcctcaaacctctcaaagaagcgattaactcgtgcctacaccagatccattccaaagacggttctctccagcagctaaaggagaatcagctagtaatcctggctactaccacaaccgacctgggagttacaacctctgtgcctgaagtgccgatgatggaaaagatcctgcagaagtttacctccatgcataaagcatactcccctgagaaaaagataagtatactgttgaagacatgcaagctaatttatgattctatggccctggggaaccccgggaagccctacggggccgacgatttcctgcctgttttgatgtatgtgcttgcacggagtaatctgacagaaatgctgctgaacgtggagtatatgatggagcttatggaccctgcgctgcagctgggggagggcagctattatctgacaaccacatacggcgcactagaacacattaagagctatgacaagatcactgtgacccgccagctgtcagtggaggtgcaggattccatccacaggtgggaaaggcgtagaactctgaataaggctagggcatctcggagcagcgtgcaggattttatatgtgtcagttatctagaacccgaacagcaagcacggaccctggcttccagggccgatactcaagcccaagccctgtgcgcgcaatgtgccgaaaagttcgctgtcgagagaccccaggctcaccggctgtttgtgctcgtagacggccggtgtttccaactggctgatgatgccctcccacactgtataaagggatacctcctcagaagcgagcccaagagggatttccattttgtgtaccggcccttagacggtggaggcggcggagggggaggctcaccaccatgtttggtcgttcgtgagccaaattttctctag

SEQ ID NO: 332532 - DNA, 1263 bp, Artificial Sequence
  derived and/or modified sequence
tgaacccaagccatggctcttgagacccccacccccgggccccctcgggaagggcagtctcctgcctcccaggccggtacccaacatccccccgcacaagcaactgcacattctcagtcaagccccgagttcaagggctcacttgcgtccctgagcgacagcctaggcgtaagtgtcatggccacggaccaggactcctacagcacctcatcaactgaggaagagctggaacagttttcctctccttcagtgaaaaagaagccaagcatgattcttggcaaagctcggcataggctatccttcgcaagcttctcttctatgtttcatgcgttcctaagcaacaacaggaagttgtacaaaaaggtggtggagctcgcccaggacaaaggttcctattttggaagtctggtccaggattacaaggtgtattctcttgagatgatggccaggcagacctcatccacagagatgcttcaggaaattagaaccatgatgacccagctgaaatcttacctgctgcaaagcaccgaactgaaggccctagtggaccccgccctgcactccgaggaggagttagaggcaattgtggaatctgctctgtataagtgtgtgctcaagccactgaaagaggccatcaatagctgtctgcaccaaatccatagtaaagacggtagcttacaacagctcaaggaaaatcagctggtgattctggctaccacaaccaccgaccttggagtaaccacaagtgttcccgaggttcctatgatggaaaagatcctccagaagttcacttccatgcataaggcttacagccccgagaagaagatctctattctgctgaagacatgcaagcttatctatgattcgatggccctaggcaaccctgggaaaccctatggcgctgacgatttcttacccgttctgatgtacgtccttgcacggtcaaatcttaccgaaatgctcttaaacgtggagtacatgatggagcttatggatcctgcgctgcagctgggtgagggtagctactacttgaccactacgtacggagctctcgagcacattaagtcctacgacaaaatcactgtgaccaggcagttgagtgtggaggtgcaagattccattcataggtgggaacgacgtagaacgctcaacaaggcacgggccagtcggagttcagtgcaagtacggcccgaaagcggccgcgggcccgtcggaccctgtccccggcaccacccgtgctgcctgttggccaaggaaccttag

SEQ ID NO: 332533 - DNA, 2730 bp, Artificial Sequence
  derived and/or modified sequence
atgatcagacatgctggggccccagcccggggggaccccaccggccctgtgcctgtggtgggcaagggggaggaggaggaggaggaggatggcatgaggctgtgcctgcctgccaaccccaagaactgcctgccccacagaagaggcatcagcatcctggagaagctgatcaagacctgccctgtgtggctgcagctgagcctgggccaggccgaggtggcccgcatcctgcaccgggtggtggccggcatgttcctggtgcggcgggacagcagcagcaagcagctggtgctgtgtgtgcacttccccagcctgaatgaatcttctgctgaggtgctggagtacaccatcaaggaggagaagagcatcctgtacctggagggcagcgccctggtgtttgaggacatcttccgcctcatcgccttctactgtgtgtcccgggacctgctgcccttcaccctgcggctgccccaggccatcctggaggccagcagcttcacagacctggagaccatcgccaacctgggcctgggcttctgggacagcagcctgaaccccccccaggagcggggcaagccagctgagcccccccgggaccgggcccctggcttccccctggtgagcagcctgcggcccacagcccatgatgccaactgtgcctgtgaaattgagctgtctgtgggcaatgaccggctgtggtttgtgaaccccatcttcatcgaggactgcagcagcgccctgcccacagaccagccccccctgggcaactgcccagcccggcccctgccccccaccagtgatgccaccagccccaccagccgctgggccccccggcggcccccacctcctcctcctgtgctgcccctgcagccctgcagccctgcccagcccccacccctgcctgccaagaagaacctgcccacagccccacccaggagaagagtgtctgagcgggtgtccctggaggaccagagccctggcatggctgctgagggggaccagctgagcctgcccccccagggcaccagtgatggccctgaggacaccccccgggagagcacagagcagggccaggacacagaggtgaaggccagtgacccccacagcatgcctgagctgcccaggacagccaagcagccccctgtgcccccacccaggaagaagaggatcagccggcagctggccagcaccctgcctgcccccctggagaatgctgagctgtgcacccaggccatggccctggagacccccaccccaggccccccccgggagggccagagccctgccagccaggccggcacccagcaccccccagcccaggccacagcccacagccagagcagccctgagttcaagggcagcctggccagcctgagtgacagcctgggcgtgtctgtgatggccacagaccaggacagctacagcaccagcagcacagaggaggagctggagcagttcagcagccccagcgtgaagaagaagcccagcatgatcctgggcaaggcccggcaccggctgagctttgccagcttcagctccatgttccacgccttcctgagcaacaacaggaagctgtacaagaaggtggtggagctggcccaggacaagggcagctacttcggcagcctggtgcaggactacaaggtgtacagcctggagatgatggcccggcagaccagcagcacagagatgctgcaggagatccgcaccatgatgacccagctgaagagctacctgctgcagagcacagagctgaaggccctggtggaccctgccctgcacagcgaggaggagctggaggccatcgtggagagcgccctgtacaagtgtgtgctgaagcccctgaaggaggccatcaacagctgcctgcaccagatccacagcaaggatggcagcctgcagcagctgaaggagaaccagctggtgatcctggccaccaccaccacagacctgggcgtgaccacctctgtgcctgaggtgcccatgatggagaagatcctgcagaagttcacctccatgcacaaggcctacagccctgagaagaagatcagcatcctgctgaagacctgcaagctgatctatgacagcatggccctgggcaaccctgggaagccctacggggctgatgacttcctgcctgtgctgatgtatgtgctggcccggagcaacctgacagagatgctgctgaatgtggagtacatgatggagctgatggaccctgccctgcagctgggggagggcagctactacctgaccaccacctatggagccctggagcacatcaagagctatgacaagatcaccgtgacccggcagctgtctgtggaggtgcaggacagcatccaccgctgggagaggaggaggaccctgaacaaggcccgggccagccgcagctctgtgcaggacttcatctgtgtgtcctacctggagcctgagcagcaggcccggaccctggccagcagagctgacacccaggcccaggccctgtgtgcccagtgtgccgagaagtttgctgtggagcggccccaggcccaccggctgtttgtgctggtggatggccgctgcttccagctggctgatgatgccctgccccactgcatcaagggctacctgctgcggtctgagcccaagagggacttccactttgtgtaccggcccctggatggcggcggcggcggcggcggcggcagccccccctgcctggtggtgcgggagcccaacttcctgtag

SEQ ID NO: 332534 - DNA, 1263 bp, Artificial Sequence
  derived and/or modified sequence
tgaacccaggccatggccctggagacccccaccccaggccccccccgggagggccagagccctgccagccaggccggcacccagcaccccccagcccaggccacagcccacagccagagcagccctgagttcaagggcagcctggccagcctgagtgacagcctgggcgtgtctgtgatggccacagaccaggacagctacagcaccagcagcacagaggaggagctggagcagttcagcagccccagcgtgaagaagaagcccagcatgatcctgggcaaggcccggcaccggctgagctttgccagcttcagctccatgtttcatgccttcctgagcaacaacaggaagctgtacaagaaggtggtggagctggcccaggacaagggcagctacttcggcagcctggtgcaggactacaaggtgtacagcctggagatgatggcccggcagaccagcagcacagagatgctgcaggagatccgcaccatgatgacccagctgaagagctacctgctgcagagcacagagctgaaggccctggtggaccctgccctgcacagcgaggaggagctggaggccatcgtggagagcgccctgtacaagtgtgtgctgaagcccctgaaggaggccatcaacagctgcctgcaccagatccacagcaaggatggcagcctgcagcagctgaaggagaaccagctggtgatcctggccaccaccaccacagacctgggcgtgaccacctctgtgcctgaggtgcccatgatggagaagatcctgcagaagttcacctccatgcacaaggcctacagccctgagaagaagatcagcatcctgctgaagacctgcaagctgatctatgacagcatggccctgggcaaccctgggaagccctatggagcagatgacttcctgcctgtgctgatgtatgtgctggcccggagcaacctgacagagatgctgctgaatgtggagtacatgatggagctgatggaccctgccctgcagctgggggagggcagctactacctgaccaccacctacggggccctggagcacatcaagagctatgacaagatcaccgtgacccggcagctgtctgtggaggtgcaggacagcatccaccgctgggagaggaggaggaccctgaacaaggcccgggccagccgcagctctgtgcaggtgcggcctgagagcggccggggccctgtgggcccctgccccaggcaccacccctgctgcctgctggccaaggagccctag

SEQ ID NO: 332535 - DNA, 2730 bp, Artificial Sequence
  derived and/or modified sequence
atgatccggcacgccggcgcccccgcccggggcgaccccaccggcccagtgcccgtagtggggaaaggggaagaggaggaggaagaagatggtatgcgtctgtgcctgcctgctaaccctaagaactgcctgccccacagacggggcatcagcatactggaaaaacttatcaaaacctgcccagtgtggctgcagttgtccctgggtcaagccgaggttgcccgtatcctgcaccgggttgtggcggggatgttcctcgtgcggagggattcctctagcaaacagctggtgctgtgcgtgcactttcctagcctgaatgagtcttctgcagaggtgctcgagtatactattaaagaagagaagagcatcctatatctggagggctccgccctcgtcttcgaagacatcttcaggctgatcgcattctactgcgtgagtcgggatctcctgccattcacactgcggctaccccaggccattctggaagccagcagcttcactgatctggaaacaatcgctaaccttggattgggattctgggatagtagcctcaaccccccacaagaaagaggcaaacccgctgaacctcctagagaccgcgctcccggattccctctcgtgtcgagtctgaggcccactgcccacgacgctaattgtgcatgcgagatagagctatctgtgggtaatgatagactctggttcgtgaatccgatcttcattgaagactgttccagcgcactgccaacagaccaaccccccctgggaaattgccctgccagacccctcccgcctacgtccgatgctacaagccccacctctaggtgggcccctagacgacctcccccaccaccgccagtgctaccattgcagccctgtagcccagcacagccacctccgcttcctgctaaaaagaatctacccaccgctccgcccaggcgacgcgtatctgaacgggtttcacttgaggaccagtccccagggatggcagcagagggggaccaattatcacttcccccccagggaacatctgacggcccagaggatacgcccagagaatctaccgaacagggccaggatactgaggtcaaggctagcgatcctcactctatgcccgagctgccccgtacagctaagcagcccccagttcctcccccccgcaaaaagaggatttctcgccagttagcttctacactccccgccccacttgagaatgctgaactctgtacacaggccatggcgctagagacccccacacctggccctcctagggaaggtcaatctccggccagccaggccggcacccaacatcctcctgcacaagccacagctcatagtcagtccagtccagagttcaagggtagtctggcctccctatccgactctctgggagtctcagtcatggcgaccgatcaggattcctacagtaccagtagtacagaagaggagctggaacagtttagttcaccttctgtaaagaagaaaccttccatgatcctgggtaaggccagacatcgcctgagctttgccagcttttcgtccatgttccacgccttcctatccaacaaccgcaaactttacaagaaggtcgtcgaactcgcccaggataaggggagctatttcggatctctggtgcaggactacaaagtatatagcctggagatgatggcccgtcagaccagctccaccgagatgctccaagaaatacgtaccatgatgacacagctaaaatcttatttgctccaatcgactgaactcaaagctcttgtggatccagccctgcatagcgaggaggagctcgaggcgattgtggagtccgcactctataagtgcgttctcaagccattaaaggaagcaatcaactcttgcctccatcagatccattcgaaagatggttccctgcaacagctaaaagaaaaccaactagttattctggccactacaactacagatctgggagtgactacctctgtgcccgaggtgccaatgatggagaaaatacttcaaaaattcactagcatgcataaagcttactcccctgaaaaaaagattagcattctgttaaaaacgtgtaaattgatatacgactccatggcgctgggcaatcctggcaagccgtacggcgcagatgatttcctgccggtgctgatgtatgtgctggcccgctccaacttaacagaaatgctcctgaatgtggaatacatgatggaactaatggaccccgccctgcagctgggagaagggtcttattatcttactactacatacggcgcactggaacacatcaagagttatgacaagatcaccgtgactagacaattatccgtggaggttcaggactcaattcaccgctgggagaggagaagaaccctgaataaggctcgggcgagccgctccagtgtccaggattttatctgcgtgagttacttggagcctgaacagcaggccaggacgctagccagccgcgctgacactcaggctcaagcgttgtgtgcccagtgcgccgagaagtttgctgtggagcgcccccaggcccatagactgtttgtccttgtggacgggaggtgctttcaactcgctgacgatgctctgccgcactgcattaaaggctatctgctcaggtccgagccgaaaagagacttccacttcgtttataggcccttggatggtggaggaggagggggcggagggagccccccatgcctcgtggttagggagcccaatttcctctag

SEQ ID NO: 332536 - DNA, 1263 bp, Artificial Sequence
  derived and/or modified sequence
tgaacccaggccatggccctggagacccccacccccggcccccccagagaaggacagtccccagccagccaggcaggcacccagcatccaccagcccaggcgacggcccattcccaaagcagccccgagttcaaaggttctctagctagtctgtcggatagtttaggcgtttccgtgatggccactgaccaggactcgtacagcactagctccacagaagaggagctggaacagtttagctctcccagcgtgaagaaaaaacccagcatgatcctcggaaaagcgcggcataggttgtcattcgcttcattctcctcgatgttccacgccttcctttccaataaccgaaagctgtataagaaggtggtcgagctcgctcaggacaagggctcctattttggaagcctggtgcaagattacaaggtgtactcactggaaatgatggcccgccaaacaagcagcaccgaaatgctgcaagaaatccggactatgatgacccagctcaagtcttacttattacaatctactgaactgaaagctttggtcgacccagccctgcactctgaagaagagctcgaagctattgttgagagtgccctttataagtgcgtgctcaagccgctcaaggaggctataaactcctgtctccaccaaatacactctaaggacgggagtctccagcaactgaaggagaaccagctggtcattctggctacaacaaccactgacctaggagtcaccacatcagtgccagaggtgccaatgatggagaaaatcttgcaaaagtttacatctatgcacaaggcgtactccccagaaaagaagatctctatcttgctgaagacctgtaagcttatctatgactccatggctctaggaaatccaggaaagccatacggcgctgatgatttcctgcccgtactcatgtatgtcctggctcgctctaatctcaccgaaatgctcctgaacgtggaatacatgatggagctgatggaccctgccctccaactgggtgaaggatcttactaccttacaacaacatacggtgcgctggagcacatcaaaagctacgacaagattacagtgacgcggcaactgtccgtggaggtgcaggactcgatccacagatgggagcgcagaaggaccctgaacaaggcaagggcttcaaggagctctgtgcaagtcagacccgagtctggcaggggtcccgtgggaccttgccctaggcaccatccatgttgtctcctggccaaagaaccttag

SEQ ID NO: 332537 - DNA, 2730 bp, Artificial Sequence
  derived and/or modified sequence
atgataaggcatgcaggggctcccgctcggggagacccaactggcccagttccagtcgttgggaagggcgaagaggaagaggaagaagacggtatgcggctgtgcttacccgcaaatcctaagaactgtctccctcaccggcgaggtatcagcatcctagagaaattgatcaaaacttgtcccgtctggctgcagctgtcgttaggacaggctgaagttgccaggatacttcaccgagtcgttgctgggatgttcttggtgaggagagactcatccagtaaacagctggtcttgtgcgtgcattttccaagtctcaacgagtcctctgcagaagtcctggaatatacaattaaagaagaaaaaagcattctctacttggaaggaagcgctcttgtgttcgaggacatcttcagacttatcgcattctactgtgtctctagagacctgctccccttcacactgagacttccgcaggccattttggaggcaagcagctttacggatctggaaacaatagcaaacctcggcctagggttttgggactcctcactgaatccccctcaggaacgcggaaaacccgcagagccccctagggaccgggctcccggattcccattggtgtctagtcttcggcctaccgctcatgacgccaattgcgcatgcgagatcgaactctcagttggcaatgatagactttggtttgttaatcctattttcatagaggactgtagtagcgcactccctacagatcagccaccgcttggcaattgtccagcacggcctctacctcctacctccgatgctactagccccacatcccgatgggctcccagacggccaccccctcctccaccagtgctgcccctgcagccctgctctcctgcccagcctcccccactgccagctaagaaaaacctacccaccgcccctccacggagacgcgttagtgagagagtgagtctggaggatcagagcccgggaatggcagctgagggggatcagctctcccttccaccacagggcaccagtgatggacccgaagacacacctagagaatcaacagagcagggacaggacacagaagttaaggccagtgatccccattccatgcccgaactcccgcgaactgcaaagcagccccctgtcccgccacccaggaagaagcggataagccggcagctggctagcacgttgccagccccattggagaatgccgaactttgtactcaggctatggccctggaaactcctacaccagggcctccccgagagggtcagtctccagctagtcaggcgggtactcagcaccctcccgcacaggccaccgcccactcccagagcagccccgagttcaagggctccctagcaagtctcagtgactccctgggggtatctgtgatggcaacagatcaggatagttactccacctcgtctacagaggaagaattggaacagttcagtagtccttctgtcaaaaaaaagccgagcatgatcctcggaaaagcccgtcatcgcctgtcctttgcgtccttcagcagcatgttccatgcctttctaagcaacaaccggaaactctataaaaaagtcgttgagctggctcaggacaaaggctcttattttggaagcctcgttcaggattacaaggtgtattcactggaaatgatggcacgccagacgtcctctaccgagatgctacaggagattaggacgatgatgacacagctgaagtcatatctcttgcaatcaaccgagctgaaagctctggttgaccctgcactccactctgaagaggagctggaggccattgttgagtccgctctctacaagtgcgtcctcaagcccctgaaggaggctattaattcctgcctgcatcagatccatagcaaggatggtagcctacagcagctgaaagagaatcagttggtaatcctggcaacaaccacgaccgacctgggtgttacgactagtgttccagaagtgccaatgatggagaaaatcctccaaaaattcacttctatgcataaagcatattctccagaaaaaaagatttccattctgctgaaaacttgcaaacttatttacgattcaatggccctgggcaaccctggcaaaccatatggggcagatgacttcttaccagttctgatgtacgtgttggcccgatccaatttgactgaaatgctgctgaatgtggaatacatgatggaactgatggacccggctttacagctcggtgaggggtcttactatctgaccacgacatacggtgcactcgaacacattaaaagttatgataaaatcacagtgactcgtcagctatccgtcgaagtgcaggattccatacacaggtgggagagaagaagaaccctaaacaaggccagggcttcgcgatcctccgtgcaggactttatttgtgtcagctatttagaaccagagcagcaggccaggacgctggcttcccgcgctgatacccaggcgcaggcactctgtgcacagtgcgcggagaagttcgctgtcgaacgccctcaggcccaccgactctttgtgttggttgacgggcgatgtttccagcttgcagacgatgctctgccacattgcatcaagggctatttactcagaagcgagcctaaacgcgacttccacttcgtttatagaccactcgatggaggcggaggcggtgggggtggctcccctccatgcctagtggttcgagaacctaacttcttgtag

SEQ ID NO: 332538 - DNA, 3605 bp, Artificial Sequence
  derived and/or modified sequence
gagccccagagcgcggcggcagcggcggcctggcccttccagagggccagagccagggacatgcgggcgcccgggactccgcgttccgcgcggcccggcgcctgagcgcctccgttccccgtcccggagctgccggcggcatgatccgacacgccggggcgcccgcgcgcggggaccccacgggtccggttccagttgttggcaaaggagaggaagaggaagaggaagatggcatgcggctttgtctgccagccaacccgaaaaactgccttcctcaccgccggggcatcagcatcctggagaagctcatcaaaacatgcccggtgtggctgcagctgagtctgggccaggcagaggtggccaggatcctgcaccgggtggtggctgggatgttcctggttcgccgggacagcagctcgaagcagctggtgctctgtgtccactttccttctctgaacgaaagctcggccgaggtgctcgaatacaccattaaggaagaaaagtcgatattgtacctggaaggctcggctcttgtgtttgaggacatcttcagattgattgcgttctactgtgtcagtagagacttactgcccttcacactgcggctaccccaggccatccttgaggccagcagcttcacggaccttgagaccatcgccaacctgggtctgggtttctgggactcctcgctgaatcctccacaagaaagagggaagccagcagagcccccaagagaccgggcccccggattccccctagtctccagcctcaggcccacagcccatgacgcaaactgtgcctgtgaaatcgagctgtcggtaggaaatgaccgcctgtggtttgtgaatcctattttcatcgaggactgcagcagcgccctgcccaccgaccagccacctcttggaaattgccctgcacgccctttgccgcccacctctgatgccacctcacccacctccaggtgggccccacgccgcccaccaccccctcccccagtgctgcccctgcagccctgcagcccagcccagcccccgccactgcctgcgaagaagaaccttcccactgcccctcccagacgccgcgtttccgagagggtgtccttagaagaccaaagtccggggatggcggcagagggggaccagctcagcctgcctccccaagggacctcagacggccctgaggacacgccccgggagagcacggagcaaggccaggacacagaggtgaaagccagcgatcctcacagcatgccagagctgcccaggacagccaaacaacccccagtcccgccccccaggaaaaaacggatctctcgacaactggcctcgaccctcccagctcccttagagaacgctgagctctgcacacaggcgatggccttggagacacccacgccgggtccacccagagagggccaaagccctgcttctcaggctgggactcagcaccctcctgcccaggccactgcccattcccagagctctccagagttcaagggctccctggcctccctctcagacagcttgggggtgtctgtcatggccaccgaccaggactcctactccaccagcagcacggaggaggagctggagcagttcagcagccccagcgtgaagaagaagccctccatgatcctgggcaaggctcggcaccggctgagctttgccagtttcagcagcatgttccacgctttcctctccaacaaccgcaagctgtacaagaaggtggtggagctggcgcaggacaagggctcgtactttggcagcctggtgcaggactacaaggtgtacagcctggagatgatggcgcgccagacctccagcacggagatgctgcaggagattcgcaccatgatgacccagctcaagagctacctgctgcagagcaccgagctcaaggccctggtggaccccgccctgcactccgaggaggagctcgaagcaattgtagagtctgccttgtacaaatgtgtcctgaagcccctgaaggaagccatcaactcatgcctgcatcagatccacagcaaggatggttcgctgcagcagctcaaggagaaccagttagtgatcctggccaccaccaccactgacctaggtgtgaccaccagcgtgccggaggtgcccatgatggagaagatcctgcagaagttcaccagcatgcacaaggcctactcacctgagaagaagatctccatcctgctcaagacctgcaaactcatctacgactccatggccctcggcaacccagggaagccctatggggcggatgacttcctgcctgtgctcatgtatgtgctggcccgcagcaacctcacggagatgcttctcaatgtggagtacatgatggagctcatggaccccgccctgcagctgggggagggttcctactatctgaccaccacctacggggccctggagcacatcaagagctacgacaagatcacggtgacccggcagctgagtgtggaggtgcaggactccatccaccgctgggagcgccggcgtactctcaacaaggcccgggcctcccgctcctccgtacaggacttcatctgcgtgtcgtacctggagcccgagcagcaggcgcggacgctggcgtcgcgggcggacacccaggcccaggcgctgtgcgcgcagtgcgcggagaagttcgcggtggagcggccgcaggcgcaccggctgttcgtgctggtggacgggcgctgcttccagctggcggacgacgcgctgccgcactgcatcaagggctacctgctgcgcagcgagcccaagcgcgacttccactttgtctaccggcccctggacggtggtggcggcggcggcggcgggagcccgccctgcctggtggtgcgggagcccaacttcctgtgaggccctcccggggcgcctcccctcacccccaggcgcacgtctggccccgcctctggctgcgcactcccgaccgcgacgtccacgcagcagagggacatgggccattccatgacgtgcccaggccaacgtcgcaggacagttgtgaaaataacatgacgctcgtccaaggccacttcctgagggcaagtcctaatagccctgagacaccgagacggcatgttcttcattagacggaaagggaaactgaggctcaggagagaggcgctccaggccgctgcagccaacaaaccggcgccctcttcacacgtagctcctcaggccattccccatgagtcccccacacccaccccatcctcggtctttgcaaagaagggcccgagcttagtttccccaggactggcctaggaaggagcaccggccacagctgctccccgtgccactcagggtggacccagcatctcaggagcacctcagggtgtcggttaagagacaggcctccacccctgcaccagagcctgctcttagctcccggtgcccccagaccccgcagctctgtgcccggcaagaagcagctagacacacgccagggcgccaagcacggccagctccgcggacccatggacaagcccagccccgcctcagggaaaacagggcctttccctacaggacacgccccagagctgtggcagattgcaggagccatcgtgtggggagaatttaataaaagcccttttg

SEQ ID NO: 332539 - DNA, 1263 bp, Artificial Sequence
  derived and/or modified sequence
taaacacaggcgatggcgctggagacccccactccaggacctcctagggaaggccagagccccgctagtcaggctgggacacagcacccacccgcacaggctactgcccatagccagtcctctcccgagtttaaaggttctctcgcaagcctgagtgattccctgggcgtaagtgtgatggcaacagaccaggactcgtactccacgtcctctactgaggaggaactggagcagttttcgagtccatccgttaaaaaaaaaccttctatgatcctcgggaaggccagacatcgcctatccttcgcgagcttttccagtatgtttcatgcattcctgtctaacaatcgtaagctgtacaaaaaggtggttgaacttgctcaggacaaaggatcttatttcggcagtctcgtgcaggattacaaggtgtattcattggagatgatggcacgccagacaagttctactgagatgctgcaagaaattcggacaatgatgacacagctaaagtcttacctgctccagagcacggaacttaaggcgcttgtcgaccccgctctccattccgaggaagagctggaggctatcgtggagtccgcattgtataagtgtgtgctcaagccacttaaggaggcaataaactcctgtctgcatcagattcactccaaggacggctccctgcaacagttgaaagaaaatcaattggtcatattagccaccacaacaaccgatcttggggtcaccaccagcgtccccgaagttcccatgatggagaaaatcctgcagaaattcacgtccatgcataaggcttacagtcccgagaagaaaatctctattctgctgaagacgtgtaaactaatttatgactctatggcactggggaatcccggaaaaccttacggcgcagacgattttctccccgtcctgatgtacgttttagcccgttctaaccttaccgagatgctcctgaatgtggaatacatgatggaactcatggaccccgctctgcagctgggtgaggggtcttactacctcactaccacatacggggcactcgaacacatcaagtcctatgacaagataacagtgactagacaattaagtgtggaagtgcaggactcgattcatcgctgggaacggcgacgtacattgaataaagcaagggcctccagatcatccgttcaggtgaggcccgaatccggacggggacctgtcggcccttgcccaagacatcacccctgctgccttctagctaaagaaccatag

SEQ ID NO: 332540 - DNA, 4079 bp, Artificial Sequence
  derived and/or modified sequence
cacacaggcgatggccttggagacacccacgccgggtccacccagagagggccaaagccctgcttctcaggctgggactcagcaccctcctgcccaggccactgcccattcccagagctctccagagttcaagggctccctggcctccctctcagacagcttgggggtgtctgtcatggccaccgaccaggactcctactccaccagcagcacggaggaggagctggagcagttcagcagccccagcgtgaagaagaagccctccatgatcctgggcaaggctcggcaccggctgagctttgccagtttcagcagcatgttccacgctttcctctccaacaaccgcaagctgtacaagaaggtggtggagctggcgcaggacaagggctcgtactttggcagcctggtgcaggactacaaggtgtacagcctggagatgatggcgcgccagacctccagcacggagatgctgcaggagattcgcaccatgatgacccagctcaagagctacctgctgcagagcaccgagctcaaggccctggtggaccccgccctgcactccgaggaggagctcgaagcaattgtagagtctgccttgtacaaatgtgtcctgaagcccctgaaggaagccatcaactcatgcctgcatcagatccacagcaaggatggttcgctgcagcagctcaaggagaaccagttagtgatcctggccaccaccaccactgacctaggtgtgaccaccagcgtgccggaggtgcccatgatggagaagatcctgcagaagttcaccagcatgcacaaggcctactcacctgagaagaagatctccatcctgctcaagacctgcaaactcatctacgactccatggccctcggcaacccagggaagccctatggggcggatgacttcctgcctgtgctcatgtatgtgctggcccgcagcaacctcacggagatgcttctcaatgtggagtacatgatggagctcatggaccccgccctgcagctgggggagggttcctactatctgaccaccacctacggggccctggagcacatcaagagctacgacaagatcacggtgacccggcagctgagtgtggaggtgcaggactccatccaccgctgggagcgccggcgtactctcaacaaggcccgggcctcccgctcctccgtacaggtgaggcctgagagcgggaggggcccggtggggccatgtcccagacaccatccctgctgcctgctggctaaggagccgtgacatcacctggctgctccagccgcccagccctgccttaggggagcagtgagactccccacaccagaggaagggcccccagcccctgctgccagtgtgtgtccaggacttgggtgcgtctagaaacatatcagcaggcattggtgttctccctgggcaagcaggaagggtgcaggaggaatgagacacacccatcattccttagcccctcctaggacccagcaccctgcaggggctggagatggggacttgtcatcccagtccctgctttaaggagcccacaggctcatctacagccttgctccttagtccctggacaaatgcagcagctgccaagggtctgcgtaacccccaccaacccagtggcccacccctccccatacctctctctatacagactcagtattcaaaccagtcccgcccctccccaactccatcaccccacccacccccaggctgcatcaaatccagctgcccccagttccccaaacatgcccagcccagttcactggctgctcaaccgctgccctcactggtcaatctccccttcttcactggctgtcactgcccatcctttaagacgactcagtttctccaacagcccctcctctgagaagccttccctgatacacacacacaccgtttcacacaggctgggtggggtgccctcctctgggcttcctgcggcctccccttttacagtgcatatcacatcctatcatcctctgcatatgaagctgtcacctctgggagggcacagcccatggttcacatgcctcaggggcgccaagcccagggcctgggacagagcaggactgggtgtgtaaaaaagggtgagagttggactagtgagccaggcacatccagagctgtgagcagctatgcagactcactcctctgacacccagagcagaccagtcctgagccacactcctggctttcaagatggtgcatctataataagcagagcccaggcctgggagacaggaggcttgagttctggccccagccctgtactagcttgctgtgtgaccctcagcaatccctgccccactctgggactcagttttcctgcccacacaggctgactatggctaatcaatttaataactgactctctggggagaaaacaaaagctctgattttagcttctgtccatttccatggtgtgagtcctccatggccaacttcaacttggcatcactgaatgtggagttggaaagaagtgtatgcagtcggctctccctggcgggtgtgagccagctccagcacacctctgttcccatcccctcccaacaccccggactcccacagactgtagggacatggacactcttggtccaagcctggcccaggcatcccgtacttcctgcttctaccttaggggttcctgatgctgagccaggcagagtatggatgaaacggaccacccactgtttgggagacggaagcttcggaggggggtcccctcagcaccacatctgggatctggggagggcaccaccctctgccccctcccagtgcctcctccgcacaccatgccttggggggtgggcacccttccctggggaggggaagcccagagctggacagtcactagcaggtggatagtgccctgggaggcctaatggaggacaaggagccctgaggcagccactaagacggagggagtgggccgggcttttcccctcctggaagaaatgggcggtccccgtgaagctcttgacaggagcccggcctcgcctaagccctagccaccagttgccatcacggtctccgccgagccgggatcctcagccgcttcccgcgcaggcctgctgttcccaatccggccacaagggggcagccccgcgcgcagcctctctgcctgcagccctgagccccggggaaggcgaggccgctccgggccggagcttccagcgcctgctcgcccatttatgggaggcgggcgctatccccactttacagccggggctcgacgaatcaaggccacacaggcagtgggagcaaaggcaaagcccggcaggtgtggggctgggtccctaggggtggaggacggcgggcgggcgccctgctcgtgctgcgagtgcccagccccagcccgcaggcgtcgcctcgccttgcccgccctgctcatgccgggccttccccacccgactgcgcccagcctccttcacccggtcccctcccgctttaccaatccctgccccacgcagctcctcagagccccagggctcttgcagccctaaggggctggactgtgttgcccgcccgcactatgggatgcccgggcgggctcgcacctcccttcttatctgtgctgccctccgtgcccagcattgcgcctggggtgcagggaactcacctggagggagggagggagggaatgaatgaatgaatgaatgatggggagcctgtggaccagcagccaggggacgcgccggctcctctttgcagggactccgagacgcgccttaattcatctcccagaactgtcggcccagctgggaagccaggcagggagggggacgggccccccgcaggctcgcggcagagacgggaaaggcgcaggtgccggactcgcagacagcttggcgcccgccacccgctatccatccagggaggggcctgggccgggagagggcgcctgaggagacagggccccgccgtgaccacaggcccctcgcgtctccgcaggacttcatctgcgtgtcgtacctggagcccgagcagcaggcgcggacgctggcgtcgcgggcggacacccaggcccaggcgctgtgcgcgcagtgcgcggagaagttcgcggtggagcggccgc

SEQ ID NO: 332541 - protein, 265 aa, Artificial Sequence
  derived and/or modified sequence
MQLVQQRSQIQTLQKKVVNLETALSYMTKEFESEVLKLQQHAMIENQAGQVEIDKLQHLLQMKDREMNRVKKLAKNILDERTEVERFFLDALHQVKQQILISRKHYKQIAQAAFNLKMRAACTGRTEYPKIRTFDGREHSTNSVNQDLLEAEKWTHIEGNVDIGDLTWEQKEKVLRLLFAKMNGCPSRKYNQSSRPPVPDYVVSDSGETKEFGDESKLQDKIFITQQIAISDSSGEVVLPTIPKEPQESDTSTQKPSDENFSTSY

SEQ ID NO: 332542 - DNA, 1715 bp, Artificial Sequence
  derived and/or modified sequence
aacataggattttttgggttcacacatacagctcatagcagtccctttttgatggatagttgggttgtttccagtctttttctattacaatgaatgtgccagtaaagagcttcatgaacaaaagtataccaggcaaattaatgaactagagggacagttccatcaaaaagccaaagaaattggcatgattcacacagagctgaaagcagtaagacaattccagaagagaaaaatccaagtggagagagagttagatgatctgaaagagaatttaagaaacacagagcggatacatcaggagactcttagaagactggaaagcagattttttgaagaaaaggcaattgaacgatgctggaagaaatgtttttaaagagaatgattatcttcagaaagctctggcatatcacctgaaggaaactgacgctctacaaaaaaactcccagaagttgcaagagagtcatactttacttttacatcaaaagagttggtccctgagtcacttaggaatacatttagcggtgagtaacagtcctgacatcagtggcatcaccacacaagggtttattctttcacctaaaggaggcctggaggagatcaatgatctgttggttaaggaaaagattatgcaacttgtccagcagagatcacaaatccaaacccttcagaagaaggtagtaaacttggagactgctctgagttacatgaccaaagagtttgagagtgaagttttaaaactgcagcaacacgcaatgatagagaaccaagcaggtcaggtagaaattgacaagctgcagcaccttcttcagatgaaggacagggaaatgaatcgtgtgaagaagctggccaagaacatactggatgagagaacagaagtggaaagattctttttagatgctctgcaccaagtgaagcaacagatcctaattagcaggaagcattataagcagatagcacaagctgctttcaatttaaaaatgagagcagcatgtacaggaagaacagaatatcccaaaatcagaacatttgatggcagagagcacagcaccaatagtgtgaatcaggatcttctggaggccgaaaaatggacacatattgaaggaaatgtggatattggagatttgacctgggagcagaaggaaaaagtattgcgattgctctttgcaaaaatgaatggctgtccttctaggaaatacaaccagagttctaggcctccagttccagactatgttgtttctgacagtggggaaacaaaggaatttggggatgaaagtaagcttcaagataaaatcttcatcacccagcaaattgcaatatcagactcttctggtgaagtggtgctacccactattccaaaagaacctcaggagtctgacacaagcacacagaaaccatcagatgagaacttctcaacttcctactagcaaacctacaaaactgaactcaacctaatggagaaggtagccagcaagctccatgcaggaaaagtgaccgagacagtggtgcacgatcaatatatgtggactggatgaagaggtccccactcagccatcatcactttctctaggaagtctcaacctcaggtctatggtcactagattgttgtgtccccagcccctagcacaattcctggaagagagtcacttcagaagtttctccaaatgaatcagaaaatacatagtgtctgtttctgaaataaaagtacatggaaagag

SEQ ID NO: 332543 - DNA, 798 bp, Artificial Sequence
  derived and/or modified sequence
atgcagctggtgcagcagagaagccagatccagaccctgcagaagaaggtggtgaacctggagaccgccctgagctacatgaccaaggagttcgagagcgaggtgctgaagctgcagcagcacgccatgatcgagaaccaggccggccaggtggagatcgacaagctgcagcacctgctgcagatgaaggacagagagatgaacagagtgaagaagctggccaagaacatcctggacgagagaaccgaggtggagagattcttcctggacgccctgcaccaggtgaagcagcagatcctgatcagcagaaagcactacaagcagatcgcccaggccgccttcaacctgaagatgagagccgcctgcaccggcagaaccgagtaccccaagatcagaaccttcgacggcagagagcacagcaccaacagcgtgaaccaggacctgctggaggccgagaagtggacccacatcgagggcaacgtggacatcggcgacctgacctgggagcagaaggagaaggtgctgagactgctgttcgccaagatgaacggctgccccagcagaaagtacaaccagagcagcagaccccccgtgcccgactacgtggtgagcgacagcggcgagaccaaggagttcggcgacgagagcaagctgcaggacaagatcttcatcacccagcagatcgccatcagcgacagcagcggcgaggtggtgctgcccaccatccccaaggagccccaggagagcgacaccagcacccagaagcccagcgacgagaacttcagcaccagctactag

SEQ ID NO: 332544 - DNA, 798 bp, Artificial Sequence
  derived and/or modified sequence
atgcaacttgtgcagcagcgatcgcagattcagacgctgcagaaaaaggtggtcaacctggaaactgctctctcatatatgactaaggagttcgaaagcgaggttctgaaactgcagcaacacgccatgattgagaatcaagccggtcaggtggagattgacaaactccagcacctgctgcaaatgaaggatcgcgaaatgaatcgtgttaaaaaactcgctaaaaatattctcgatgaacgtacagaagtggaacggttttttctggacgctctgcatcaagtaaagcaacagatcctgatctctcgtaagcattacaaacagattgcacaggccgcgtttaacctgaagatgagagcggcatgcactggccgtaccgagtacccaaagattcgtacctttgatgggcgtgagcattccacgaacagcgtcaaccaggatctgctagaggccgaaaagtggacgcacattgaaggaaacgtcgatatcggggatcttacctgggagcaaaaagagaaagttctgagattactctttgcaaaaatgaacgggtgcccttcacgcaagtataatcagtcatctagaccccccgtcccagactacgtggtgagcgactctggagagaccaaggagttcggcgatgagtcaaagctacaggacaagattttcataacccagcagattgcaatttctgatagttcaggcgaagtggtgctgcctacaatccctaaagaaccccaagaatctgatacgagcacgcagaaaccctccgatgaaaacttttccacttcatactag

SEQ ID NO: 332545 - DNA, 798 bp, Artificial Sequence
  derived and/or modified sequence
atgcagctggtgcagcagaggagccagatccagaccctgcagaagaaggtggtgaacctggagacagccctgagctacatgaccaaggagtttgaaagtgaggtgctgaagctgcagcagcacgccatgattgagaaccaggccggccaggtggagattgacaagctgcagcacctgctgcagatgaaggaccgggagatgaacagagtgaagaagctggccaagaacatcctggatgagaggacagaggtggagcgcttcttcctggatgccctgcaccaggtgaagcagcagatcctgatcagcaggaagcactacaagcagatcgcccaggccgccttcaacctgaagatgagagctgcctgcaccggccgcacagagtaccccaagatccgcacctttgatggccgggagcacagcaccaacagcgtgaaccaggacctgctggaggccgagaagtggacccacatcgagggcaatgtggacattggagacctgacctgggagcagaaggagaaggtgctgcggctgctgtttgccaagatgaatggctgccccagcaggaagtacaaccagagcagccggccccctgtgcctgactatgtggtgtctgacagcggggagaccaaggagtttggagatgagagcaagctgcaggacaagatcttcatcacccagcagatcgccatcagtgacagcagcggggaggtggtgctgcccaccatccccaaggagccccaggagagtgacaccagcacccagaagcccagtgatgagaacttcagcaccagctactag

SEQ ID NO: 332546 - DNA, 798 bp, Artificial Sequence
  derived and/or modified sequence
atgcagctggtgcagcagcggagccagatccagaccctgcagaagaaggtggtgaacctggaaacagccctaagttatatgacaaaggagttcgaatccgaggtgctgaagttgcaacagcacgcaatgatagaaaaccaggccggtcaggtcgagatcgacaaattacagcacctactccaaatgaaggatcgggagatgaaccgcgttaaaaagttagccaagaacattttggatgagcgcaccgaagtcgaacgcttctttttagatgctctgcatcaggtcaagcagcaaatcttgatcagtcggaaacattataagcagattgcccaggcagcttttaacctcaaaatgagagcagcttgcacgggacggacagagtacccaaaaataagaacctttgacggccgtgagcactccaccaacagcgtgaaccaagacctcctagaggcggaaaagtggacacacattgaaggcaacgttgatattggtgacctgacttgggagcagaaagagaaggtacttagattgcttttcgccaaaatgaacggctgtcccagtagaaagtacaatcaatcctcccggccacctgtgcctgactacgtagtgagtgatagcggggaaaccaaagagttcggagacgaaagcaagctgcaagataaaatcttcatcactcaacagattgctatctctgattcatctggtgaggtcgtcctccccaccattcctaaagaaccacaggaatccgacacatctactcagaagcctagcgatgaaaacttctccactagttattag

SEQ ID NO: 332547 - DNA, 798 bp, Artificial Sequence
  derived and/or modified sequence
atgcagctggtccaacagaggagtcagatccagaccctgcagaaaaaggtagtcaacctggagaccgccctgagttacatgaccaaggagttcgagtcagaagtcctcaagctccagcagcatgccatgatcgaaaaccaggcagggcaagttgaaattgataagctgcagcatctcctccaaatgaaagaccgcgagatgaacagagtcaagaagctggctaagaacattctcgacgaaagaactgaagtggagcgattctttctggatgctttacaccaagttaaacaacagatccttatttctcgtaagcactacaaacagatcgcccaggccgcatttaacctcaagatgcgggcagcttgcactggtcgtacagaatatccaaagattcgaacatttgatggcagggagcattctaccaactccgtgaaccaggacttgctggaggccgagaagtggacacacatcgagggcaatgtggacataggcgacctgacgtgggagcagaaagaaaaagtgcttcggctcctatttgccaagatgaacgggtgcccatccaggaagtacaatcagtcctcgaggccccctgtgcctgattacgtcgtgtcagattcaggagagaccaaggaattcggggatgaatcaaaattacaggacaaaatcttcataacccagcagatcgccatttctgactcctctggtgaggtggtgctccctaccatccccaaggaaccgcaggagtccgacactagcacccagaagcctagtgatgagaatttctctaccagttattag

SEQ ID NO: 332548 - protein, 375 aa, Artificial Sequence
  derived and/or modified sequence
MRSVAPSGPKMGNITADNSSMSCTIDHTIHQTLAPVVYVTVLVVGFPANCLSLYFGYLQIKARNELGVYLCNLTVADLFYICSLPFWLQYVLQHDNWSHGDLSCQVCGILLYENIYISVGFLCCISVDRYLAVAHPFRFHQFRTLKAAVGVSVVIWAKELLTSIYFLMHEEVIEDENQHRVCFEHYPIQAWQRAINYYRFLVGFLFPICLLLASYQGILRAVRRSHGTQKSRKDQIQRLVLSTVVIFLACFLPYHVLLLVRSVWEASCDFAKGVFNAYHFSLLLTSFNCVADPVLYCFVSETTHRDLARLRGACLAFLTCSRTGRAREAYPLGAPEASGKSGAQGEEPELLTKLHPAFQTPNSPGSGGFPTGRLA

SEQ ID NO: 332549 - protein, 338 aa, Artificial Sequence
  derived and/or modified sequence
MGNITADNSSMSCTIDHTIHQTLAPVVYVTVLVVGFPANCLSLYFGYLQIKARNELGVYLCNLTVADLFYICSLPFWLQYVLQHDNWSHGDLSCQVCGILLYENIYISVGFLCCISVDRYLAVAHPFRFHQFRTLKAAVGVSVVIWAKELLTSIYFLMHEEVIEDENQHRVCFEHYPIQAWQRAINYYRFLVGFLFPICLLLASYQGILRAVRRSHGTQKSRKDQIQRLVLSTVVIFLACFLPYHVLLLVRSVWEASCDFAKGVFNAYHFSLLLTSFNCVADPVLYCFVSETTHRDLARLRGACLAFLTCSRTGRAREAYPLGAPEASGKSGAQGEEP

SEQ ID NO: 332550 - protein, 365 aa, Artificial Sequence
  derived and/or modified sequence
MGNITADNSSMSCTIDHTIHQTLAPVVYVTVLVVGFPANCLSLYFGYLQIKARNELGVYLCNLTVADLFYICSLPFWLQYVLQHDNWSHGDLSCQVCGILLYENIYISVGFLCCISVDRYLAVAHPFRFHQFRTLKAAVGVSVVIWAKELLTSIYFLMHEEVIEDENQHRVCFEHYPIQAWQRAINYYRFLVGFLFPICLLLASYQGILRAVRRSHGTQKSRKDQIQRLVLSTVVIFLACFLPYHVLLLVRSVWEASCDFAKGVFNAYHFSLLLTSFNCVADPVLYCFVSETTHRDLARLRGACLAFLTCSRTGRAREAYPLGAPEASGKSGAQGEEPELLTKLHPAFQTPNSPGSGGFPTGRLA

SEQ ID NO: 332551 - DNA, 1128 bp, Artificial Sequence
  derived and/or modified sequence
atgagaagcgtggcccccagcggccccaagatgggcaacatcaccgccgacaacagcagcatgagctgcaccatcgaccacaccatccaccagaccctggcccccgtggtgtacgtgaccgtgctggtggtgggcttccccgccaactgcctgagcctgtacttcggctacctgcagatcaaggccagaaacgagctgggcgtgtacctgtgcaacctgaccgtggccgacctgttctacatctgcagcctgcccttctggctgcagtacgtgctgcagcacgacaactggagccacggcgacctgagctgccaggtgtgcggcatcctgctgtacgagaacatctacatcagcgtgggcttcctgtgctgcatcagcgtggacagatacctggccgtggcccaccccttcagattccaccagttcagaaccctgaaggccgccgtgggcgtgagcgtggtgatctgggccaaggagctgctgaccagcatctacttcctgatgcacgaggaggtgatcgaggacgagaaccagcacagagtgtgcttcgagcactaccccatccaggcctggcagagagccatcaactactacagattcctggtgggcttcctgttccccatctgcctgctgctggccagctaccagggcatcctgagagccgtgagaagaagccacggcacccagaagagcagaaaggaccagatccagagactggtgctgagcaccgtggtgatcttcctggcctgcttcctgccctaccacgtgctgctgctggtgagaagcgtgtgggaggccagctgcgacttcgccaagggcgtgttcaacgcctaccacttcagcctgctgctgaccagcttcaactgcgtggccgaccccgtgctgtactgcttcgtgagcgagaccacccacagagacctggccagactgagaggcgcctgcctggccttcctgacctgcagcagaaccggcagagccagagaggcctaccccctgggcgcccccgaggccagcggcaagagcggcgcccagggcgaggagcccgagctgctgaccaagctgcaccccgccttccagacccccaacagccccggcagcggcggcttccccaccggcagactggcctag

SEQ ID NO: 332552 - DNA, 1128 bp, Artificial Sequence
  derived and/or modified sequence
atgaggtctgtcgcccctagtggccccaaaatggggaatatcacagctgacaactcctccatgtcctgcactatcgatcacacaatacatcaaacattggccccagtggtttatgtgactgtgctggttgttggcttccccgcaaattgcctgagcctctactttggctacctgcaaatcaaggccagaaatgaacttggggtatatttgtgtaatttgactgtggccgaccttttctacatctgctcattacccttctggctgcaatatgtgctgcagcacgacaactggtctcatggtgacctttcgtgccaggtgtgcggcatccttctgtatgaaaatatctatatcagcgtggggtttttgtgctgtatctcggtggacagatacttagcagtggcccacccatttcgctttcaccagtttcgcacactgaaagccgctgttggagtaagcgtagtgatttgggcaaaagagctgctgacgtccatttatttcctgatgcatgaagaagtgattgaagatgagaaccagcacagggtctgctttgaacactaccctatccaggcctggcagcgggccatcaactattatcggttcctcgttggatttctgttccccatttgtctgctgttggcctcttatcaaggaattcttagagccgtgcgccgaagtcatggaacccaaaagagtaggaaagaccaaatccagagactggttctcagcaccgtagtcatcttccttgcctgcttcctaccataccatgtgctgctgctggtacggagcgtgtgggaggcaagttgcgacttcgccaagggcgttttcaatgcctaccatttcagcctccttctcactagctttaattgtgttgcagacccagtgctgtactgttttgtgagtgaaacaacccaccgggacctggctaggctgaggggggcctgtttagcctttctcacttgttcacggacaggccgggcccgggaggcctacccactgggtgcgccagaggcctccggaaagtctggagcccagggcgaggaacccgaactcttaacaaaactccaccccgcgttccagacgccaaacagccccggcagtggtggatttcccaccggccgcctcgcctag

SEQ ID NO: 332553 - DNA, 2813 bp, Artificial Sequence
  derived and/or modified sequence
tgcccgacgtgggtggggggggcgtggaatcggagcacaacttggccctgcgttcccaggaagggacccgaagacctccccaggccaccccgccatctgcgtgcgcgctggcaagaggaggggcgcggggtaatggtggccggcgccacagccccgcgccgcgcagggtcttgcccaccaccagcgatgcccagcccttggtagagcttgaaccaccttctataaacaggatggcggtggagagacaggcccagtccctgagcccatgaggagtgtggccccttcaggcccaaagatggggaacatcactgcagacaactcctcgatgagctgtaccatcgaccataccatccaccagacgctggccccggtggtctatgttaccgtgctggtggtgggcttcccggccaactgcctgtccctctacttcggctacctgcagatcaaggcccggaacgagctgggcgtgtacctgtgcaacctgacggtggccgacctcttctacatctgctcgctgcccttctggctgcagtacgtgctgcagcacgacaactggtctcacggcgacctgtcctgccaggtgtgcggcatcctcctgtacgagaacatctacatcagcgtgggcttcctctgctgcatctccgtggaccgctacctggctgtggcccatcccttccgcttccaccagttccggaccctgaaggcggccgtcggcgtcagcgtggtcatctgggccaaggagctgctgaccagcatctacttcctgatgcacgaggaggtcatcgaggacgagaaccagcaccgcgtgtgctttgagcactaccccatccaggcatggcagcgcgccatcaactactaccgcttcctggtgggcttcctcttccccatctgcctgctgctggcgtcctaccagggcatcctgcgcgccgtgcgccggagccacggcacccagaagagccgcaaggaccagatccagcggctggtgctcagcaccgtggtcatcttcctggcctgcttcctgccctaccacgtgttgctgctggtgcgcagcgtctgggaggccagctgcgacttcgccaagggcgttttcaacgcctaccacttctccctcctgctcaccagcttcaactgcgtcgccgaccccgtgctctactgcttcgtcagcgagaccacccaccgggacctggcccgcctccgcggggcctgcctggccttcctcacctgctccaggaccggccgggccagggaggcctacccgctgggtgcccccgaggcctccgggaaaagcggggcccagggtgaggagcccgagctgttgaccaagctccacccggccttccagacccctaactcgccagggtcgggcgggttccccacgggcaggttggcctagcctgggtcctccgcgggtggctccacgtgaggcctgagccttcagcccacgggcctcagggcctgccgcctcctgcttccctcgctgcggaggcagggaagcccctgtaactccggaagcctgctctcgcttgctgagcccgctgggaccgccgagggtgggaataagccccggttggctcgtgggaataagccgtgtcctctgccgcggctgcgatgtggccaggctggggctgctggtcgggggaagacagtgaactgcgttccctggcctgcttcctgcagagtttgtgcatggggagtgtgaggacatggagggtgggaggctgggcgttcagctgccagggccttccaatgccaccgttgtcacagacaatgcctgtccaaacgtcccggtgggatcagcactgcagcccgcccacaacagggtgggaagggaagactggagggggaaggaaggcaggagggggaaggaagaaagagggggaaggaaagaaagaggggggaaggaaaggaggaaggggagaaggaagggaggaggaaagaaggaaggtagggggtgttgggttgggagaattgagggagttataggcagaggaggatcctagctccagccataagaactgggagagccgcctgctgctccagaagacctgcccacctccacagaaatgctagcccttcagaccttctggtcagtgaactgggaccagctctgactaaggatgccttccatggcctgggactcgagttcttcagaaccaagaggctaactgggcttcctccaagaagggaccaggggctagaagcagaagttggcatcagcaaacatttctggaatctaccaaagggaggcccaggcagaaccccttcctcagtctcccttcccctcttccccccagccttgaagaggttgatcctttgtgctgtgtctcttagccctttcatcggggatgcccagaggcaacagcccaggctggaggtgccccagggaagggtgctcacagtggtcccagggctacacttggctttgactgcacagcccctgctcagatccttgtggagggtgtccgatgacttggggaggttctcttccccttcctagaggaggaagtgaccaagtttgaaggcggcagaaatggccacacagccaagaagagcccatgcaactcagtccaggattttactgggtcagtgacattggtggaagccttcatgcctcctcattccacagcacttcctcctatgttgaccttaaacactggcttcccactgatacagactgggatgagctgagggcagtctcatttactgtcaagagttgtatttttgtattgtcctttttgccaagtctacatgtgttgactctgtaatggatttatgtagcccacttcagtctgcaaataaagcaaagtaactgg

SEQ ID NO: 332554 - DNA, 1355 bp, Artificial Sequence
  derived and/or modified sequence
gctcctcacctggttgcagagaccacactgccttcctggggccctgaggctctaggagaagctggaaagcacaggtgggggtccatccagctgtttccaaactgcgggttgtgacccattcatgggtcagtaaatcaacttcatagctcatgacctgcatttaaaaaattgaaatagaatagaaatgatcagagtgcgtggcaagaagtaggggtcttgcccaccaccagcgatgcccagcccttggtagagcttgaaccaccttctataaacaggatggcggtggagagacaggcccagtccctgagcccatgaggagtgtggccccttcaggcccaaagatggggaacatcactgcagacaactcctcgatgagctgtaccatcgaccataccatccaccagacgctggccccggtggtctatgttaccgtgctggtggtgggcttcccggccaactgcctgtccctctacttcggctacctgcagatcaaggcccggaacgagctgggcgtgtacctgtgcaacctgacggtggccgacctcttctacatctgctcgctgcccttctggctgcagtacgtgctgcagcacgacaactggtctcacggcgacctgtcctgccaggtgtgcggcatcctcctgtacgagaacatctacatcagcgtgggcttcctctgctgcatctccgtggaccgctacctggctgtggcccatcccttccgcttccaccagttccggaccctgaaggcggccgtcggcgtcagcgtggtcatctgggccaaggagctgctgaccagcatctacttcctgatgcacgaggaggtcatcgaggacgagaaccagcaccgcgtgtgctttgagcactaccccatccaggcatggcagcgcgccatcaactactaccgcttcctggtgggcttcctcttccccatctgcctgctgctggcgtcctaccagggcatcctgcgcgccgtgcgccggagccacggcacccagaagagccgcaaggaccagatccagcggctggtgctcagcaccgtggtcatcttcctggcctgcttcctgccctaccacgtgttgctgctggtgcgcagcgtctgggaggccagctgcgacttcgccaagggcgttttcaacgcctaccacttctccctcctgctcaccagcttcaactgcgtcgccgaccccgtgctctactgcttcgtcagcgagaccacccaccgggacctggcccgcctccgcggggcctgcctggccttcctcacctgctccaggaccggccgggccagggaggcctacccgctgggtgcccccgaggcctccgggaaaagcggggcccagggtgaggagccc

SEQ ID NO: 332555 - DNA, 2859 bp, Artificial Sequence
  derived and/or modified sequence
gtcagcgtgaaaggcagggcatggaccctcactcagggctgcgtgtgcccgacgtgggtggggggggcgtggaatcggagcacaacttggccctgcgttcccaggaagggacccgaagacctccccaggccaccccgccatctgcgtgcgcgctggcaagaggaggggcgcggggtaatggtggccggcgccacagccccgcgccgcgcagggtcttgcccaccaccagcgatgcccagcccttggtagagcttgaaccaccttctataaacaggatggcggtggagagacaggcccagtccctgagcccatgaggagtgtggccccttcaggcccaaagatggggaacatcactgcagacaactcctcgatgagctgtaccatcgaccataccatccaccagacgctggccccggtggtctatgttaccgtgctggtggtgggcttcccggccaactgcctgtccctctacttcggctacctgcagatcaaggcccggaacgagctgggcgtgtacctgtgcaacctgacggtggccgacctcttctacatctgctcgctgcccttctggctgcagtacgtgctgcagcacgacaactggtctcacggcgacctgtcctgccaggtgtgcggcatcctcctgtacgagaacatctacatcagcgtgggcttcctctgctgcatctccgtggaccgctacctggctgtggcccatcccttccgcttccaccagttccggaccctgaaggcggccgtcggcgtcagcgtggtcatctgggccaaggagctgctgaccagcatctacttcctgatgcacgaggaggtcatcgaggacgagaaccagcaccgcgtgtgctttgagcactaccccatccaggcatggcagcgcgccatcaactactaccgcttcctggtgggcttcctcttccccatctgcctgctgctggcgtcctaccagggcatcctgcgcgccgtgcgccggagccacggcacccagaagagccgcaaggaccagatccagcggctggtgctcagcaccgtggtcatcttcctggcctgcttcctgccctaccacgtgttgctgctggtgcgcagcgtctgggaggccagctgcgacttcgccaagggcgttttcaacgcctaccacttctccctcctgctcaccagcttcaactgcgtcgccgaccccgtgctctactgcttcgtcagcgagaccacccaccgggacctggcccgcctccgcggggcctgcctggccttcctcacctgctccaggaccggccgggccagggaggcctacccgctgggtgcccccgaggcctccgggaaaagcggggcccagggtgaggagcccgagctgttgaccaagctccacccggccttccagacccctaactcgccagggtcgggcgggttccccacgggcaggttggcctagcctgggtcctccgcgggtggctccacgtgaggcctgagccttcagcccacgggcctcagggcctgccgcctcctgcttccctcgctgcggaggcagggaagcccctgtaactccggaagcctgctctcgcttgctgagcccgctgggaccgccgagggtgggaataagccccggttggctcgtgggaataagccgtgtcctctgccgcggctgcgatgtggccaggctggggctgctggtcgggggaagacagtgaactgcgttccctggcctgcttcctgcagagtttgtgcatggggagtgtgaggacatggagggtgggaggctgggcgttcagctgccagggccttccaatgccaccgttgtcacagacaatgcctgtccaaacgtcccggtgggatcagcactgcagcccgcccacaacagggtgggaagggaagactggagggggaaggaaggcaggagggggaaggaagaaagagggggaaggaaagaaagaggggggaaggaaaggaggaaggggagaaggaagggaggaggaaagaaggaaggtagggggtgttgggttgggagaattgagggagttataggcagaggaggatcctagctccagccataagaactgggagagccgcctgctgctccagaagacctgcccacctccacagaaatgctagcccttcagaccttctggtcagtgaactgggaccagctctgactaaggatgccttccatggcctgggactcgagttcttcagaaccaagaggctaactgggcttcctccaagaagggaccaggggctagaagcagaagttggcatcagcaaacatttctggaatctaccaaagggaggcccaggcagaaccccttcctcagtctcccttcccctcttccccccagccttgaagaggttgatcctttgtgctgtgtctcttagccctttcatcggggatgcccagaggcaacagcccaggctggaggtgccccagggaagggtgctcacagtggtcccagggctacacttggctttgactgcacagcccctgctcagatccttgtggagggtgtccgatgacttggggaggttctcttccccttcctagaggaggaagtgaccaagtttgaaggcggcagaaatggccacacagccaagaagagcccatgcaactcagtccaggattttactgggtcagtgacattggtggaagccttcatgcctcctcattccacagcacttcctcctatgttgaccttaaacactggcttcccactgatacagactgggatgagctgagggcagtctcatttactgtcaagagttgtatttttgtattgtcctttttgccaagtctacatgtgttgactctgtaatggatttatgtagcccacttcagtctgcaaataaagcaaagtaactgga

SEQ ID NO: 332556 - DNA, 2859 bp, Artificial Sequence
  derived and/or modified sequence
gctcctcacctggttgcagagaccacactgccttcctggggccctgaggctctaggagaagctggaaagcacaggtgggggtccatccagctgtttccaaactgcgggttgtgacccattcatgggtcagtaaatcaacttcatagctcatgacctgcatttaaaaaattgaaatagaatagaaatgatcagagtgcgtggcaagaagtaggggtcttgcccaccaccagcgatgcccagcccttggtagagcttgaaccaccttctataaacaggatggcggtggagagacaggcccagtccctgagcccatgaggagtgtggccccttcaggcccaaagatggggaacatcactgcagacaactcctcgatgagctgtaccatcgaccataccatccaccagacgctggccccggtggtctatgttaccgtgctggtggtgggcttcccggccaactgcctgtccctctacttcggctacctgcagatcaaggcccggaacgagctgggcgtgtacctgtgcaacctgacggtggccgacctcttctacatctgctcgctgcccttctggctgcagtacgtgctgcagcacgacaactggtctcacggcgacctgtcctgccaggtgtgcggcatcctcctgtacgagaacatctacatcagcgtgggcttcctctgctgcatctccgtggaccgctacctggctgtggcccatcccttccgcttccaccagttccggaccctgaaggcggccgtcggcgtcagcgtggtcatctgggccaaggagctgctgaccagcatctacttcctgatgcacgaggaggtcatcgaggacgagaaccagcaccgcgtgtgctttgagcactaccccatccaggcatggcagcgcgccatcaactactaccgcttcctggtgggcttcctcttccccatctgcctgctgctggcgtcctaccagggcatcctgcgcgccgtgcgccggagccacggcacccagaagagccgcaaggaccagatccagcggctggtgctcagcaccgtggtcatcttcctggcctgcttcctgccctaccacgtgttgctgctggtgcgcagcgtctgggaggccagctgcgacttcgccaagggcgttttcaacgcctaccacttctccctcctgctcaccagcttcaactgcgtcgccgaccccgtgctctactgcttcgtcagcgagaccacccaccgggacctggcccgcctccgcggggcctgcctggccttcctcacctgctccaggaccggccgggccagggaggcctacccgctgggtgcccccgaggcctccgggaaaagcggggcccagggtgaggagcccgagctgttgaccaagctccacccggccttccagacccctaactcgccagggtcgggcgggttccccacgggcaggttggcctagcctgggtcctccgcgggtggctccacgtgaggcctgagccttcagcccacgggcctcagggcctgccgcctcctgcttccctcgctgcggaggcagggaagcccctgtaactccggaagcctgctctcgcttgctgagcccgctgggaccgccgagggtgggaataagccccggttggctcgtgggaataagccgtgtcctctgccgcggctgcgatgtggccaggctggggctgctggtcgggggaagacagtgaactgcgttccctggcctgcttcctgcagagtttgtgcatggggagtgtgaggacatggagggtgggaggctgggcgttcagctgccagggccttccaatgccaccgttgtcacagacaatgcctgtccaaacgtcccggtgggatcagcactgcagcccgcccacaacagggtgggaagggaagactggagggggaaggaaggcaggagggggaaggaagaaagagggggaaggaaagaaagaggggggaaggaaaggaggaaggggagaaggaagggaggaggaaagaaggaaggtagggggtgttgggttgggagaattgagggagttataggcagaggaggatcctagctccagccataagaactgggagagccgcctgctgctccagaagacctgcccacctccacagaaatgctagcccttcagaccttctggtcagtgaactgggaccagctctgactaaggatgccttccatggcctgggactcgagttcttcagaaccaagaggctaactgggcttcctccaagaagggaccaggggctagaagcagaagttggcatcagcaaacatttctggaatctaccaaagggaggcccaggcagaaccccttcctcagtctcccttcccctcttccccccagccttgaagaggttgatcctttgtgctgtgtctcttagccctttcatcggggatgcccagaggcaacagcccaggctggaggtgccccagggaagggtgctcacagtggtcccagggctacacttggctttgactgcacagcccctgctcagatccttgtggagggtgtccgatgacttggggaggttctcttccccttcctagaggaggaagtgaccaagtttgaaggcggcagaaatggccacacagccaagaagagcccatgcaactcagtccaggattttactgggtcagtgacattggtggaagccttcatgcctcctcattccacagcacttcctcctatgttgaccttaaacactggcttcccactgatacagactgggatgagctgagggcagtctcatttactgtcaagagttgtatttttgtattgtcctttttgccaagtctacatgtgttgactctgtaatggatttatgtagcccacttcagtctgcaaataaagcaaagtaactgg

SEQ ID NO: 332557 - DNA, 1128 bp, Artificial Sequence
  derived and/or modified sequence
atgaggtctgtggcccccagcggccccaagatgggcaacatcacagctgacaacagctccatgagctgcaccatcgaccacaccatccaccagaccctggcccctgtggtgtatgtgacagtgctggtggtgggcttccctgccaactgcctgagcctgtacttcggctacctgcagatcaaggccagaaatgagctgggcgtgtacctgtgcaacctgactgtggccgacctcttctacatctgcagcctgcccttctggctgcagtatgtgctgcagcacgacaactggagccatggagacctgagctgccaggtgtgtggcatcctgctgtatgagaacatctacatctctgtgggcttcctgtgctgcatctctgtggaccgctacctggccgtggcccaccccttccgcttccaccagttccgcaccctgaaggctgctgtgggcgtgtctgtggtgatctgggccaaggagctgctgaccagcatctacttcctgatgcatgaggaggtgattgaagatgagaaccagcaccgggtgtgctttgagcactaccccatccaggcctggcagagggccatcaactactaccgcttcctggtgggcttcctgttccccatctgcctgctgctggccagctaccagggcatcctgcgggctgtgagaagaagccacggcacccagaagagcaggaaggaccagatccagaggctggtgctgagcacagtggtgatcttcctggcctgcttcctgccctaccacgtgctgctgctggtgcgctctgtgtgggaggccagctgtgactttgccaagggcgtcttcaatgcctaccacttcagcctgctgctgaccagcttcaactgtgtggccgaccctgtgctgtactgctttgtgtctgagaccacccaccgggacctggcccggctgcggggggcctgcctggccttcctgacctgcagcaggacaggccgggcccgggaggcctaccccctgggcgcccctgaggccagcggcaagagcggggcccagggcgaggagcctgagctgctgaccaagctgcacccagccttccagacccccaacagccctggcagcggcggcttccccaccggccgcctggcctag

SEQ ID NO: 332558 - DNA, 1128 bp, Artificial Sequence
  derived and/or modified sequence
atgcggagcgtggcccccagcggccccaagatgggcaacatcaccgccgataattccagcatgagctgtaccatcgaccacactatccaccagacgttggccccggtagtgtatgtgacagtgctcgttgttggttttccagctaattgtctttcactttacttcgggtatctgcagatcaaagcaagaaatgagctgggcgtgtatctttgcaatttaaccgtggccgaccttttttacatctgttcgctgccattctggcttcaatatgttctccagcacgataactggtctcacggagatctcagttgccaggtgtgtggtatcctattgtacgaaaacatctacatttccgtcggcttcctgtgttgtatatctgttgacagataccttgccgtcgcacacccattccgattccaccaatttcgcacccttaaggctgcggtcggggtgtctgttgtaatctgggcaaaggagctgctgaccagcatctattttctgatgcatgaagaggtcattgaagacgaaaaccagcatagggtctgtttcgaacattaccccattcaagcctggcagcgtgcaatcaactactatcggttcctggtgggttttcttttccctatttgcctactcctcgcctcataccaggggatcctcagagcagtcagacggtctcacgggacacagaaatctcgtaaggatcagatccagcgcctcgtgctttcaacagttgtcattttcctcgcttgttttctgccctaccatgtgctcctgctggtccgaagtgtttgggaagccagttgcgattttgcaaaaggggtttttaacgcttaccacttcagtttattgttaactagctttaactgcgtcgctgaccccgttttgtactgttttgtcagcgaaaccacacatagggatctcgctagactgcgcggagcctgcttagcctttctgacatgttctaggacagggcgggcccgggaagcatatcccctgggtgcccccgaagcctccgggaagtccggtgcgcagggcgaggagccagaattattgacaaaactgcacccagctttccagactccaaactcgcccggatccggcggttttccaactggaaggctggcttag

SEQ ID NO: 332559 - DNA, 1128 bp, Artificial Sequence
  derived and/or modified sequence
atgcgatcagtggctccctctgggcctaagatgggcaatatcactgctgataattcttctatgagctgcacaatcgaccacactattcatcagacgctggcccctgtggtctacgtaacggtcctagtagtgggcttcccagccaattgcctcagcctctacttcgggtatctgcagattaaggcacgcaacgaattgggggtatacctctgtaatcttacagtggccgacctgttctatatatgctccctgccattttggctgcagtacgtgctgcagcatgataattggtcccacggcgatctgtcatgtcaagtctgtggcattctgctatatgagaacatctacatttccgtgggcttcctgtgctgtatcagtgtagatcgttaccttgctgttgcacatcccttcagatttcaccagtttcggacccttaaggccgcagttggggtgagcgtggttatatgggcaaaggagcttttaactagcatctacttcttaatgcatgaggaagtgattgaggacgaaaaccagcaccgggtctgcttcgagcattaccccatccaggcatggcaacgagccatcaattactaccgcttcctggtgggcttcctcttccccatctgcttgttactggcctcctaccagggaattttgagggcagtgcgccgttcgcatgggacgcagaaatcgcggaaagatcagattcagcggctcgtgttgagtacagtggttatcttcctcgcgtgtttcctgccgtatcatgtcttgctgctggtacgcagcgtgtgggaggcgtcatgcgactttgccaaaggcgtgtttaacgcataccatttcagcttattactcacctcctttaattgcgtcgcagacccagtgctgtactgctttgtgtccgagaccacccaccgggatctggccagactgaggggagcctgtctcgcctttctaacctgctccagaactggtcgcgctagagaggcttatccactgggcgctcctgaggctagcgggaaatccggtgctcagggtgaggagccagaactgctaactaaactgcatccggcattccagacaccaaacagtcccggttctggcggttttcccacgggtcgcttagcttag

SEQ ID NO: 332560 - DNA, 234 bp, Artificial Sequence
  derived and/or modified sequence
atgaaaaaactaaagatcttgtacatgagcaacaatctcgtcaaagattgggcggagtttgtaaagctcgcggaactgccttgtctagaagacctcgtgttcgtgggtaatccgttggaggagaagcattctgctgagaacaactggattgaagaagccaccaagcgcgtacccaagttgaagaaacttgacgggactcccgtcatcaaaggagacgaggaagaagacaactag

SEQ ID NO: 332561 - DNA, 456 bp, Artificial Sequence
  derived and/or modified sequence
atggatgccagcctatctatgctcgcgaactgtgagaagctgagcctcagtaccaattgcatagagaagattgcaaacttaaatgggttaaaaaatctccggatcctttctcttggccggaacaatattaagaatctgaatggactggaagccgtcggtgatacactcgaagaactgtggatctcttataactttatcgagaagctgaaaggtatccacattatgaagaagcttaaaatattgtacatgtccaacaatctggtgaaggattgggccgaatttgtgaaactcgctgagctaccgtgtttggaagatctggttttcgtggggaatccactcgaggagaaacactccgcagagaacaactggatcgaggaggcaacaaaaagggtcccaaagctcaagaagttggacggcactcctgtgatcaaaggcgatgaagaggaggacaactag

SEQ ID NO: 332562 - DNA, 174 bp, Artificial Sequence
  derived and/or modified sequence
atgaaaaaactgaaaattctttacatgtcaaacaacttggtgaaagattgggctgaattcgtcaagttggcagagctgccctgcctggaggacctggtcttcgtcggtaacccccttgaggagaaacactctgctgagaataactggatcgaagaggctacaaagcgggtgtag

SEQ ID NO: 332563 - DNA, 456 bp, Artificial Sequence
  derived and/or modified sequence
atggatgcctcactgtccatgctggcgaattgcgaaaaactcagtctgtctaccaattgtatcgagaaaattgcaaatctcaatgggctgaaaaatctgcggatcctttcactggggcgaaataacataaaaaacctgaacgggctggaggctgttggggataccctggaggagttatggatctcctacaacttcatagaaaagctgaaagggatacacatcatgaaaaagctcaagatactttacatgtctaacaacctggtcaaggactgggcggagttcgtcaagctggccgagctgccctgtctggaggatctggtgtttgtggggaatcctctcgaggagaagcatagcgccgaaaataactggattgaagaggctacaaaaagggttcccaagttgaaaaaacttgacggcaccccagtgatcaagggggatgaggaagaagataactag

SEQ ID NO: 332564 - DNA, 195 bp, Artificial Sequence
  derived and/or modified sequence
atgaagaagttaaagattctctacatgtccaacaatttagtgaaggactgggccgagttcgttaagctggctgaactcccttgcctggaggatctggtgtttgttgggaatccactggaggagaagcacagcgctgagaataattggatcgaagaggcaactaaaagggttcccaaattgaagaagctggactag

SEQ ID NO: 332565 - DNA, 159 bp, Artificial Sequence
  derived and/or modified sequence
atggatgcctctttatctatgctggccaattgtgagaaactgagtctgtcgacgaactgtatcgaaaagatagcaaacctgaacggattgaagaatcttagaatcttgtccttgggacgaaataacattaagaacctcaacggcttggaggccgtatag

SEQ ID NO: 332566 - DNA, 198 bp, Artificial Sequence
  derived and/or modified sequence
atgaagaaactgaaaattctgtatatgtccaacaatcttgtgaaggattgggccgaattcgtcaaacttgctgaattaccttgcctggaggatctggtgtttgtgggaaaccccctggaagagaaacacagcgctgaaaacaattggatcgaagaggctactaaacgggtgcctaaacttaagaaattagatggatag

SEQ ID NO: 332567 - DNA, 234 bp, Artificial Sequence
  derived and/or modified sequence
atgaagaagctgaagatcctgtacatgagcaacaacctggtgaaggactgggccgagtttgtgaagctggccgagctgccctgcctggaggacctggtgtttgtgggcaaccccctggaggagaagcacagcgctgagaacaactggattgaggaggccaccaagagggtgcccaagctgaagaagctggatggcacccctgtgatcaagggagatgaggaggaggacaactag

SEQ ID NO: 332568 - DNA, 456 bp, Artificial Sequence
  derived and/or modified sequence
atggatgccagcctgtccatgctggccaactgtgagaagctgagcctgagcaccaactgcatcgagaagatcgccaacctgaatggcctgaagaacctgcgcatcctgagcctgggcaggaacaacatcaagaacctgaatggcctggaggccgtgggggacaccctggaggagctgtggatctcctacaacttcatcgagaagctgaagggcatccacatcatgaagaagctgaagatcctgtacatgagcaacaacctggtgaaggactgggccgagtttgtgaagctggccgagctgccctgcctggaggacctggtgtttgtgggcaaccccctggaggagaagcacagcgctgagaacaactggattgaggaggccaccaagagggtgcccaagctgaagaagctggatggcacccctgtgatcaagggagatgaggaggaggacaactag

SEQ ID NO: 332569 - DNA, 174 bp, Artificial Sequence
  derived and/or modified sequence
atgaagaagctgaagatcctgtacatgagcaacaacctggtgaaggactgggccgagtttgtgaagctggccgagctgccctgcctggaggacctggtgtttgtgggcaaccccctggaggagaagcacagcgctgagaacaactggattgaggaggccaccaagagggtgtag

SEQ ID NO: 332570 - DNA, 195 bp, Artificial Sequence
  derived and/or modified sequence
atgaagaagctgaagatcctgtacatgagcaacaacctggtgaaggactgggccgagtttgtgaagctggccgagctgccctgcctggaggacctggtgtttgtgggcaaccccctggaggagaagcacagcgctgagaacaactggattgaggaggccaccaagagggtgcccaagctgaagaagctggactag

SEQ ID NO: 332571 - DNA, 159 bp, Artificial Sequence
  derived and/or modified sequence
atggatgccagcctgtccatgctggccaactgtgagaagctgagcctgagcaccaactgcatcgagaagatcgccaacctgaatggcctgaagaacctgcgcatcctgagcctgggcaggaacaacatcaagaacctgaatggcctggaggccgtgtag

SEQ ID NO: 332572 - DNA, 198 bp, Artificial Sequence
  derived and/or modified sequence
atgaagaagctgaagatcctgtacatgagcaacaacctggtgaaggactgggccgagtttgtgaagctggccgagctgccctgcctggaggacctggtgtttgtgggcaaccccctggaggagaagcacagcgctgagaacaactggattgaggaggccaccaagagggtgcccaagctgaagaagctggatggatag

SEQ ID NO: 332573 - DNA, 234 bp, Artificial Sequence
  derived and/or modified sequence
atgaagaagctgaagatcctgtacatgagcaacaacctggtgaaggattgggccgagttcgtgaagctggccgaactgccttgccttgaggatttagtgtttgtggggaacccattagaagagaagcactcggccgaaaataactggatcgaagaagctacaaaacgcgtgcccaagctcaaaaagctcgacggcacgccggtaatcaaaggggacgaagaggaggataattag

SEQ ID NO: 332574 - DNA, 456 bp, Artificial Sequence
  derived and/or modified sequence
atggacgccagcctgagcatgctggccaactgcgagaagctgagcttatcgacaaactgcattgagaaaattgccaatttgaacggactgaagaacctaaggatcctgtctctgggtaggaacaatatcaaaaatctgaacgggttggaggcagttggggacacactggaagaactctggatttcgtacaactttatcgagaagttgaagggtatacacatcatgaaaaagctcaaaattctttacatgagcaataacttagttaaagactgggccgagtttgtcaagctggcagaattgccttgtctcgaggacttagttttcgtgggtaaccccttagaagaaaagcactctgcggagaataactggatagaggaggccactaaacgcgtgccaaagctgaagaagctggacgggacaccagtgatcaaaggcgacgaggaagaagataattag

SEQ ID NO: 332575 - DNA, 174 bp, Artificial Sequence
  derived and/or modified sequence
atgaagaagctgaagatcctgtacatgagcaacaacctggtgaaggactgggccgaatttgtgaagctggcagagctcccttgtctggaggatctcgtctttgtgggcaatcctttggaggaaaagcattccgcagaaaacaactggatcgaagaggcaaccaagcgcgtgtag

SEQ ID NO: 332576 - DNA, 456 bp, Artificial Sequence
  derived and/or modified sequence
atggacgccagcctgagcatgctggccaactgcgagaagctgagcctgtctacaaactgcatcgaaaaaattgctaatctgaatgggctaaagaacctgaggatactctccttggggcggaacaacattaagaatctaaatggtcttgaagctgtaggggacacacttgaagagctttggataagctataactttattgaaaaactgaaaggaattcacatcatgaagaaacttaagatactgtacatgtccaataacctggtgaaggattgggccgagtttgtaaaactcgcggaactcccatgcctcgaagacttggtgttcgtaggcaaccctctcgaggagaagcacagcgccgaaaacaactggatcgaggaagccactaagagagtccctaagctgaagaaattagacggcacgccagtcatcaagggagacgaggaggaggataactag

SEQ ID NO: 332577 - DNA, 195 bp, Artificial Sequence
  derived and/or modified sequence
atgaagaagctgaagatcctgtacatgagcaacaacctggtgaaggattgggcagaattcgtgaagttggccgaactgccatgtctcgaagatctagtcttcgtagggaatccactcgaggagaagcacagcgctgaaaataactggatcgaggaagcaaccaaaagagtgccaaagctcaagaaactggactag

SEQ ID NO: 332578 - DNA, 159 bp, Artificial Sequence
  derived and/or modified sequence
atggacgccagcctgagcatgctggccaactgcgagaagctgagcctgtcgacaaattgcattgaaaaaatagccaatcttaatggcttaaaaaacctcagaattttgagcttgggtcgcaataacattaaaaacctcaacggactggaggcagtctag

SEQ ID NO: 332579 - DNA, 198 bp, Artificial Sequence
  derived and/or modified sequence
atgaagaagctgaagatcctgtacatgagcaacaacctggtgaaggactgggccgaatttgtcaagttggctgagctgccctgcctggaggacctggtcttcgttggcaatcccctcgaggaaaagcactcagccgaaaataactggattgaagaagctacaaagagggtgcccaaattgaagaagctcgacggatag

SEQ ID NO: 332580 - DNA, 234 bp, Artificial Sequence
  derived and/or modified sequence
atgaagaagctgaagattctatacatgtccaacaaccttgtcaaagactgggctgaattcgtgaagctggccgaattaccttgcctggaagatctcgtctttgtggggaaccccctggaagaaaaacattctgccgagaacaactggattgaagaggccactaaacgggtacctaagctgaagaaactagacgggacacccgtaattaagggagatgaggaggaagacaattag

SEQ ID NO: 332581 - DNA, 456 bp, Artificial Sequence
  derived and/or modified sequence
atggatgcctccctttctatgctcgccaactgcgaaaagctaagcctgtccactaattgtattgaaaaaattgctaacctcaacggtctgaagaatcttcggatcctgtccttgggcaggaacaacataaaaaatctaaatgggctggaagccgtcggagataccctggaggagctctggattagctataattttatagagaagctcaagggaattcacatcatgaaaaagctcaaaattctttatatgagcaacaatcttgtcaaggattgggccgaattcgtcaaactggctgaactgccttgcctcgaagatctggtgttcgtggggaaccccctagaggagaaacattcagcagaaaataattggatcgaagaggcaaccaagcgggttcccaaactgaagaaactggacgggacaccggtaattaaaggtgacgaagaggaagataactag

SEQ ID NO: 332582 - DNA, 174 bp, Artificial Sequence
  derived and/or modified sequence
atgaagaaactgaagatcctgtatatgtctaataatttagtaaaagattgggccgagtttgtgaagctggccgagcttccctgcctggaagatttagttttcgtcggcaaccccctagaggagaaacattcagctgaaaacaactggatagaggaggccaccaagagagtatag

SEQ ID NO: 332583 - DNA, 456 bp, Artificial Sequence
  derived and/or modified sequence
atggatgccagcctcagtatgctggctaattgcgaaaagctctcgttgtctactaactgtattgagaaaatcgcgaatctgaacgggctaaaaaaccttcgtatactttcccttggcaggaacaatataaaaaacttaaatggcctcgaagccgtaggcgatactctcgaggagctttggatcagttataacttcattgagaaactcaaggggattcatatcatgaagaaattaaaaatcttatatatgagcaacaaccttgtcaaggactgggcggaatttgtcaagttagcagagcttccttgtctggaggacctcgtgttcgtaggcaatcctctggaggaaaagcattccgccgagaataactggatagaggaggccactaagagagtcccaaagctgaagaagctggacggtactcccgtgataaaaggagacgaggaggaagacaactag

SEQ ID NO: 332584 - DNA, 195 bp, Artificial Sequence
  derived and/or modified sequence
atgaagaagctgaagatcctttacatgagtaataatctcgtcaaagactgggcggagttcgttaaactcgcagaactgccctgcctggaagacctggtttttgtgggtaacccactcgaggagaagcattccgccgagaacaactggatagaggaggcaaccaagagggtcccaaaattgaagaagttagactag

SEQ ID NO: 332585 - DNA, 159 bp, Artificial Sequence
  derived and/or modified sequence
atggacgccagtctgagcatgctggccaattgtgagaagctcagcctctctaccaactgtatagagaagattgcaaatctcaatggcctcaaaaacctgcgtattctcagtctggggcgaaacaatatcaaaaatttgaacggactggaggcggtgtag

SEQ ID NO: 332586 - DNA, 198 bp, Artificial Sequence
  derived and/or modified sequence
atgaaaaaactgaagattttgtacatgtccaacaacctggttaaggactgggccgaattcgtaaagctggcagagctgccatgtctggaggatttggtgttcgtggggaacccgctagaagagaagcattccgccgaaaataactggatagaggaggctactaaacgagtgcccaagcttaagaagctagacggttag

SEQ ID NO: 332587 - DNA, 234 bp, Artificial Sequence
  derived and/or modified sequence
atgaagaagctgaagatcctgtacatgagcaacaacctggtgaaggactgggccgagttcgtgaagctggccgagctgccctgcctggaggacctggtgttcgtgggcaaccccctggaggagaagcacagcgccgagaacaactggatcgaggaggccaccaagagagtgcccaagctgaagaagctggacggcacccccgtgatcaagggcgacgaggaggaggacaactag

SEQ ID NO: 332588 - DNA, 456 bp, Artificial Sequence
  derived and/or modified sequence
atggacgccagcctgagcatgctggccaactgcgagaagctgagcctgagcaccaactgcatcgagaagatcgccaacctgaacggcctgaagaacctgagaatcctgagcctgggcagaaacaacatcaagaacctgaacggcctggaggccgtgggcgacaccctggaggagctgtggatcagctacaacttcatcgagaagctgaagggcatccacatcatgaagaagctgaagatcctgtacatgagcaacaacctggtgaaggactgggccgagttcgtgaagctggccgagctgccctgcctggaggacctggtgttcgtgggcaaccccctggaggagaagcacagcgccgagaacaactggatcgaggaggccaccaagagagtgcccaagctgaagaagctggacggcacccccgtgatcaagggcgacgaggaggaggacaactag

SEQ ID NO: 332589 - DNA, 174 bp, Artificial Sequence
  derived and/or modified sequence
atgaagaagctgaagatcctgtacatgagcaacaacctggtgaaggactgggccgagttcgtgaagctggccgagctgccctgcctggaggacctggtgttcgtgggcaaccccctggaggagaagcacagcgccgagaacaactggatcgaggaggccaccaagagagtgtag

SEQ ID NO: 332590 - DNA, 195 bp, Artificial Sequence
  derived and/or modified sequence
atgaagaagctgaagatcctgtacatgagcaacaacctggtgaaggactgggccgagttcgtgaagctggccgagctgccctgcctggaggacctggtgttcgtgggcaaccccctggaggagaagcacagcgccgagaacaactggatcgaggaggccaccaagagagtgcccaagctgaagaagctggactag

SEQ ID NO: 332591 - DNA, 159 bp, Artificial Sequence
  derived and/or modified sequence
atggacgccagcctgagcatgctggccaactgcgagaagctgagcctgagcaccaactgcatcgagaagatcgccaacctgaacggcctgaagaacctgagaatcctgagcctgggcagaaacaacatcaagaacctgaacggcctggaggccgtgtag

SEQ ID NO: 332592 - DNA, 198 bp, Artificial Sequence
  derived and/or modified sequence
atgaagaagctgaagatcctgtacatgagcaacaacctggtgaaggactgggccgagttcgtgaagctggccgagctgccctgcctggaggacctggtgttcgtgggcaaccccctggaggagaagcacagcgccgagaacaactggatcgaggaggccaccaagagagtgcccaagctgaagaagctggacggctag

SEQ ID NO: 332593 - DNA, 2312 bp, Artificial Sequence
  derived and/or modified sequence
aaccagagcagtgacagtagcaaccgccggaatggcgaaagcaacaacaatcaaagaagccttagcgagatgggaagctttcactgtctacaaactgcattgaaaaaattgccaacctgaatggcttaaaaaacttgaggatattatctttaggaagaaacaacataaagaacttaaatggactggaggcagtaggggacacattagaagaactgtggatctcctacaattttattgagaagttgaaagggatccacataatgaagaaattgaagattctctacatgtctaataacctggtaaaagactgggctgagtttgtgaagctggcagaactgccatgcctcgaagacctggtgtttgtaggcaatcccttggaagagaaacattctgctgagaataactggattgaagaagcaaccaagagagtgcccaaactgaaaaagctggatggtactccagtaattaaaggggatgaggaagaagacaactaatgccacgctttccactgtgtgttaacttatttaaatgtcataagaacaatagataaattttatataattgtctattttaaagattctgtatgggacaaaagtttcttaagataaaacagatcactcattctcatctttttttttcctttaacttattcagtgtttctccccaaaactggtaatgccaaccttatatatcctatttctctttttagaaaccacaaattttcgatttttgtcttcagtctcagttacgtactgtgtagccccatctactaaaacaaaacctttgtagaccagtcatttttaataacaaaggaacaaatgtttttttcagtttgttcattttttttaggttagacattttaaaagatgtacatttgaaaattcagaacatttttcctgaaggtctgtctctgtacaattcagaagcacatgcctttagctcagaaggcagcatggtgatgggaagagttcctcttagaaatacagcaggtccggaaccaagactccaaagttccattggaaaagatatggtgaaaaaaggaaaaagtagtatctcagagaccttctagtctatattatacttatttgtttttccaaaaatgtgcacattgtcaactggaatttaggttgtttttatatgcatggccacttgagtcattgtgtacagtcattctgtgatctcagttagtggttaaaatgactgtcatgatcatttctttgactgataatgtggcaatgttactcatgtggacctcgccttaagcacacattttggttttatagttccttatgtgtttaaagcattagttatatttgaattcctagactaaatgctggccattgatgtatgtcaaaatttaccctaattatttggtctggtgaccctcattgttgggaaaagtgactaccatggttataagtaagggtataatgaaacttagtatttcaaaatatattttttgagaagttctaagttaaacagctcttaaaatgtattatgtacgtggttgtggagggaagggagatgtttcattatgagatcccaggcaaatggcaatatgtttgaggattgtctcctacataaagcagtgtaggtgatttaacctcaaaattgcaaagcaatagttagatgcagaggttagaatttatcatgtaaacaaaaaatccttcaggaaaatgtaagacattgtagtcagtaagcagatgaggtcataggaggccatggctggatcactattagattgcagaaaagaagtcaggggccctctgccaaattgtgcctaaagtccctcagagactgttgattctggtttccccatctacttgtgtgattttacttgcataaaatcacagtgaaagagggaagaatcatctttaaaaagtgattgcataagtagtcctgggtttcagaagatttcagctatcatttacataggaattacttgatttttctaagttactctgatcaaaagggaccactgctttgacaatcaactctaaatacaaacaagaggccaggcgtggtggctcatgcctgtcatcccagcactttgggaggccgaggcgggcggatcatctgagatcaggagttcaagaccagcctgaccaacatggtgaaaccccgtctctactaaaaatacaaaaattagccagtcctggtggtgggcgcctgtagtcccaactactcgggaggctgaggcaggagaatcatttgaacccgggaggcggaggttgcagtgagccgagattgcgccattgcactccagcctgggcaatagagcgagactccatatttaaaaaaaaaaaaaaaaa

SEQ ID NO: 332594 - DNA, 526 bp, Artificial Sequence
  derived and/or modified sequence
gcggccgccacgcagtcccacaatgccccgctcgcaccaccctgagggcggagagaaaggaccgctgccggggatagggcttccgccgagagcgccgagaagtgcgcacgcgcactgaccccgcgggccctagcaaccagagcagtgacagtagcaaccgccggaatggaagctttcactgtctacaaactgcattgaaaaaattgccaacctgaatggcttaaaaaacttgaggatattatctttaggaagaaacaacataaagaacttaaatggactggaggcagtaggggacacattagaagaactgtggatctcctacaattttattgagaagttgaaagggatccacataatgaagaaattgaagattctctacatgtctaataacctggtaaaagactgggctgagtttgtgaagctggcagaactgccatgcctcgaagacctggtgtttgtaggcaatcccttggaagagaaacattctgctgagaataactggattgaagaagcaaccaagagagtg

SEQ ID NO: 332595 - protein, 594 aa, Artificial Sequence
  derived and/or modified sequence
MGKKSRVKTQKSGTGATATVSPKEILNLTSELLQKCSSPAPGPGKEWEEYVQIRTLVEKIRKKQKGLSVTFDGKREDYFPDLMKWASENGASVEGFEMVNFKEEGFGLRATRDIKAEELFLWVPRKLLMTVESAKNSVLGPLYSQDRILQAMGNIALAFHLLCERASPNSFWQPYIQTLPSEYDTPLYFEEDEVRYLQSTQAIHDVFSQYKNTARQYAYFYKVIQTHPHANKLPLKDSFTYEDYRWAVSSVMTRQNQIPTEDGSRVTLALIPLWDMCNHTNGLITTGYNLEDDRCECVALQDFRAGEQIYIFYGTRSNAEFVIHSGFFFDNNSHDRVKIKLGVSKSDRLYAMKAEVLARAGIPTSSVFALHFTEPPISAQLLAFLRVFCMTEEELKEHLLGDSAIDRIFTLGNSEFPVSWDNEVKLWTFLEDRASLLLKTYKTTIEEDKSVLKNHDLSVRAKMAIKLRLGEKEILEKAVKSAAVNREYYRQQMEEKAPLPKYEESNLGLLESSVGDSRLPLVLRNLEEEAGVQDALNIREAISKAKATENGLVNGENSIPNGTRSENESLNQESKRAVEDAKGSSSDSTAGVKE

SEQ ID NO: 332596 - DNA, 2878 bp, Artificial Sequence
  derived and/or modified sequence
cgcggtcgcggggccgtctcaggctgccgtcccgcccctcccgtccggccgccgccgccgccaccgccgccaccgcctgggggttggttgaggcggacggcggggtccgggccggagtacgtcgttcccgctgcgctaggggaagcgggcagtcagaaaaatgggtaagaagagtcgagtaaaaactcagaaatctggcactggtgctacagcaactgtgtcaccaaaggaaatcttgaacctgaccagtgagctgctgcagaaatgcagcagtccggcgcctggcccaggaaaagagtgggaagagtatgtgcagatccggactctggttgagaaaatacggaaaaagcaaaaaggtctgtccgttacttttgatggaaaaagagaagattactttcctgatctaatgaaatgggcctctgaaaatggggcttctgtcgagggttttgaaatggttaacttcaaagaagagggctttggtttgagagcaacaagagatatcaaggcagaagaattgtttttatgggttccacgaaaattgctaatgactgttgaatctgctaaaaattcagtgttggggcccttatattctcaagaccgaatccttcaagccatgggaaacatcgcactggcctttcatttgctgtgtgagcgagccagccctaactccttctggcagccctatattcaaaccctccccagtgaatatgacactcctctctactttgaagaagatgaagttcggtatcttcagtccacacaagctatacatgatgtcttcagccagtataaaaacacagctcgacagtacgcctacttctataaagtcatccagacccatcctcatgccaacaaactacccttgaaggattctttcacttacgaggactacaggtgggcagtctcttctgttatgacgaggcaaaaccaaattcccacagaggatggttcccgcgtgaccctggctctgattcctttatgggatatgtgtaaccacaccaacggcctgatcactactggttacaacctggaagatgaccgctgtgagtgtgtggctctgcaggattttcgggctggagagcagatttacattttttatggcactcgatccaacgcagagtttgtgatccacagtggttttttctttgacaataactcacacgacagagtgaaaataaagcttggagtgagtaaaagtgacagactctacgccatgaaggccgaggtcttggctcgtgccggcatccccacttccagtgtttttgcattgcattttaccgagccgcccatctctgctcagcttttggcttttctccgagtattctgtatgactgaagaagaactgaaagaacacttgctgggagacagcgctattgatagaatcttcaccttggggaactcggaatttcctgttagctgggacaacgaggtcaaactttggacatttcttgaagatagagcctcacttcttttaaaaacatataaaacaactattgaggaagataaatccgtcttgaaaaaccacgatctttctgttcgtgcaaaaatggccatcaaattgcgcttaggtgagaaagagattttggaaaaagcagtaaagagtgcagctgtcaaccgggaatactatcgccaacagatggaggaaaaggctccgcttcccaaatatgaagagagtaaccttgggctgttggagagcagcgtgggggactcgaggctccccctggtcttgagaaacctcgaggaggaggctggagtgcaggatgccttgaacatcagagaggcaatcagcaaagcaaaggccacagaaaacgggcttgtaaacggtgaaaactctatccctaatgggaccaggtccgaaaatgaaagtctcaatcaagaaagtaaaagagcagttgaagacgccaaaggatcttcttcagacagcactgctggagttaaggagtagctcgaggtgaagctggatgggggatccagtggagcaggagttgacggacagtccgttcacatcgctgtgtttccttgttaacatttttctttctgcagagaggaagatatgtttttgctgctttatataaaaatggtttttttaagttattttaaaaatctagcttccctttttgattaagattgccatcttgcttttaggcaaaacaaaccaattaacaaacaaccacaagaaagggagaagaggtgcctgtgggagattttgcagacctattgtgggtataggtattttcttcctggggaagaattcagttcccgtctcagctgtacttttgtgggcctgtcatcttgatgaccagaatgaaagcttgctctgcctcctgccagccagaattggtggcgggacttggggatacagcgtgaaggtggggaagttgcacagcagaaaacagaattgaagttgggaaactctagagtctgggcaaaatgtttggttttttctcttaaaaaaaataacaccccattaccaaaagaaaaggtaaggtggcaaccttatttttaatagtttgaaatgatgataatcctaattatataaaaatatatatataaacacacatatatatagtgatttctaaagatttgtttacttttgtgttttgttttactgtactaagaacttgtcctttctccttgaatcaaagtaggacatgcatcatcctcctaattttaaatgttggctctgattttaaagtggtgcatttgattccagccttggtaatggagagtttgcaaacacacagcggcccacagcttcacgtggtggtgtgcagtgtgaggcagctccttggctttcctggttttcacaacaagctagagattttcaaagctacacttttgagtaaaaacccttattaaaagaaaaacatgattaata

SEQ ID NO: 332597 - DNA, 1785 bp, Artificial Sequence
  derived and/or modified sequence
atgggaaagaagtcacgggtgaaaacccagaagtcagggactggcgctacagcaactgtgagccccaaggaaattcttaatttaacatccgagcttctacagaagtgtagcagtcccgcaccagggccaggtaaggaatgggaggaatacgttcagattcgcacgctggttgagaaaattcgcaaaaaacaaaagggtctgtcagtgacttttgacggaaaaagagaagactacttcccagatctaatgaaatgggcttcggagaatggggcttccgtggagggctttgagatggtgaactttaaggaggaaggatttgggctgcgggcaacaagggacatcaaggcagaggagctctttctgtgggtacccagaaaattgttgatgacagtggagtcggctaagaactcagtattggggcctctgtattcacaggatcgcatcttgcaagctatgggcaatatcgccctggcctttcatcttctttgcgaacgtgcttcacccaattctttttggcagccttatatccagactcttccaagcgagtatgataccccgctgtacttcgaggaagacgaggttaggtacctccaaagtacccaggctatccatgatgtgttctcccagtacaaaaacaccgcacgccagtacgcctatttttacaaggtaatccaaacccacccgcacgcaaacaaactcccattaaaagattccttcacatatgaggactaccgttgggcagtttcctctgtcatgacacgccaaaaccagataccaaccgaagatggatcaagagttacgctcgccctgatccctctttgggatatgtgcaaccacactaacgggctgatcaccactggatacaacctcgaagatgaccggtgcgaatgtgttgctctgcaggattttcgcgccggggaacagatctacatcttctatggcactcgtagtaacgccgaatttgttattcattctggctttttttttgacaataattcgcacgatcgggtgaaaattaaacttggcgtaagtaaatctgatagattatacgctatgaaagccgaggtgctggctagagcaggaatacctacctcctctgtttttgcactccattttactgagccaccaatcagtgctcagctactcgctttcctgagagtattttgtatgaccgaagaggaactcaaggagcaccttcttggagatagcgcgatcgacaggatatttactctgggcaattcagagttcccagtgagctgggataatgaggtgaagttgtggactttcctcgaggaccgggcatccctcctcctaaagacctacaaaacgactatagaggaagataaatcagtcctgaagaatcacgacctgagtgtccgggcgaagatggccatcaaactgcgactcggggaaaaagaaatccttgagaaagccgtgaagtcagctgccgttaatagagagtattaccggcagcagatggaagagaaggcaccgttacccaagtatgaagagtctaacctgggtctactggagtcttcagtcggagactctcgattgcccctggtactgagaaacctggaggaagaggcgggtgtgcaggacgccttgaacatccgcgaagcaatttccaaggccaaggccacggaaaacgggttagttaatggtgagaactcaatccccaacggcacgcgaagcgagaacgagagtctgaaccaggaaagcaagcgagctgtggaagacgctaaggggtcttcctccgattcaacagccggcgttaaggagtag

SEQ ID NO: 332598 - DNA, 1785 bp, Artificial Sequence
  derived and/or modified sequence
atgggcaagaagagccgggtgaagacccagaagagcggcaccggggccacagccaccgtgagccccaaggagatcctgaacctgaccagcgagctgctgcagaagtgcagcagccctgcccctggccctgggaaggagtgggaggagtatgtgcagatccgcaccctggtggagaagatcaggaagaagcagaagggcctgtctgtgacctttgatggcaagcgggaggactacttcccagacctgatgaagtgggcctctgaaaatggagcctctgtggagggctttgagatggtgaacttcaaggaggagggcttcggcctgcgggccacccgggacatcaaggccgaggagctgttcctgtgggtgcccaggaagctgctgatgacagtggagagcgccaagaacagcgtgctgggccccctgtacagccaggaccgcatcctgcaggccatgggcaacatcgccctggccttccacctgctgtgtgagcgggccagccccaacagcttctggcagccctacatccagaccctgcccagtgaatatgacacccccctgtactttgaagaagatgaggtgcgctacctgcagagcacccaggccatccatgatgtgttcagccagtacaagaacacagcccggcagtatgcctacttctacaaggtgatccagacccacccccacgccaacaagctgcccctgaaggacagcttcacctatgaggactaccgctgggccgtgtcctctgtgatgacccggcagaaccagatccccacagaagatggcagccgggtgaccctggccctgatccccctgtgggacatgtgcaaccacaccaacggcctcatcaccaccggctacaacctggaggatgacagatgtgaatgtgtggccctgcaggacttccgggccggggagcagatctacatcttctacggcaccaggagcaatgctgagtttgtgatccacagcggcttcttctttgacaacaacagccatgacagagtgaagatcaagctgggcgtgtccaagagtgaccggctgtatgccatgaaggccgaggtgctggcccgggccggcatccccaccagctctgtgtttgccctgcacttcacagagccccccatcagcgcccagctgctggccttcctgcgggtcttctgcatgacagaggaggagctgaaggagcacctgctgggggacagcgccatcgaccgcatcttcaccctgggcaacagcgagttccctgtgtcctgggacaatgaggtgaagctgtggaccttcctggaggaccgggccagcctgctgctgaagacctacaagaccaccatcgaggaggacaagtctgtgctgaagaaccacgacctgtctgtgcgggccaagatggccatcaagctgcggctgggggagaaggagatcctggagaaggctgtgaagtctgctgctgtgaaccgggagtactaccggcagcagatggaggagaaggcccccctgcccaagtatgaggagagcaacctgggcctgctggagagctctgtgggggacagccggctgcccctggtgctgaggaacctggaggaggaggccggcgtgcaggatgccctgaacatccgggaggccatcagcaaggccaaggccacagaaaatggcctggtgaatggagagaacagcatccccaacggcaccaggagtgaaaatgaaagcctgaaccaggagagcaagagagctgtggaggatgccaagggcagcagcagtgacagcacagctggggtgaaggagtag

SEQ ID NO: 332599 - DNA, 1785 bp, Artificial Sequence
  derived and/or modified sequence
atgggcaagaagagccgggtgaagacccagaagagcggcaccggcgctacagccacagtgagccctaaagagattctgaacctgacatccgagctgcttcagaagtgttctagtcccgcaccaggacctggaaaagagtgggaggaatacgtccagatccgcacacttgtcgagaagattcggaagaagcagaaaggactgagcgtgacttttgacggtaaacgtgaagattatttccctgatctgatgaagtgggcctcggagaacggagcctcggtggagggctttgagatggtcaattttaaagaagagggatttggtctaagggccacgagagatatcaaagcagaggagctcttcctttgggtgcccagaaaactgctgatgaccgtcgagtctgcaaagaacagcgtcttaggccccctctattctcaggaccgcatcctgcaggccatgggcaacattgctctggcctttcatcttctttgcgaaagagcgagtccaaacagtttctggcagccctacattcagacgctcccaagcgaatatgatacacccttgtactttgaggaggatgaggtgagatatctgcagagtactcaggccatccatgacgtatttagccagtataagaacacggctaggcaatacgcttacttctataaagtgatccagacccaccctcatgctaacaagctacccctgaaggattcttttacttatgaagattacaggtgggccgtgagcagcgtgatgactcgacaaaaccagattcccacagaggacggttctagagtgactctggcactgatccccctatgggacatgtgtaatcatactaatggcctcataacgacaggatacaacctcgaagatgaccggtgcgagtgtgtcgctctccaggatttccgagcaggagaacagatttacatcttctatggcaccaggtcaaatgccgagttcgtgattcatagcggtttcttctttgataataactctcatgaccgcgtcaagattaagctgggtgtgtccaagagcgataggctgtatgcaatgaaggctgaagtactggcccgagctgggatacccacaagctccgtgtttgcactacatttcaccgaacctcctatatctgctcaactgcttgcatttctccgtgtgttctgtatgaccgaggaggagctgaaagagcacctccttggcgattctgctatcgacagaatcttcactcttggcaactccgagtttcccgtgtcttgggataatgaggtgaaactgtggacatttctggaagatagggccagcctgctcttaaaaacctataagaccactattgaagaagataagagtgtccttaagaaccacgatctgtctgtacgggccaagatggcaattaagttgaggttaggagagaaggaaatcctggagaaggcagtgaagagcgccgccgtcaatagggagtattatcgccagcagatggaggagaaagcccccctaccaaaatacgaggagagcaatctcggacttctcgaatcaagcgtgggtgacagccgcctacccctggtcttaagaaatctcgaggaagaggccggggtgcaggatgccttgaatatccgggaggctatcagcaaggccaaggcaactgagaacgggctggtgaacggtgagaattctattcccaacggtacaagaagcgaaaatgagtccctgaaccaggagtctaagagagctgtggaagacgctaaaggcagcagctccgactccaccgcaggcgtaaaagagtag

SEQ ID NO: 332600 - DNA, 1785 bp, Artificial Sequence
  derived and/or modified sequence
atggggaagaaatccagggtaaaaacccagaagtcaggcacaggagccacagcaaccgtatcacccaaggaaatactcaaccttacttccgaacttctgcaaaaatgtagtagtccagcacctggccctggcaaggagtgggaagaatatgttcagattcggacccttgtagaaaaaatacggaaaaagcagaaagggctcagtgtgacgtttgatggaaaacgggaggactatttccctgaccttatgaaatgggcctctgagaacggcgctagtgttgaaggatttgagatggtgaatttcaaggaagaaggattcggcctgcgagccacacgggacatcaaagccgaagaactattcctatgggtccccagaaagctgctgatgactgttgagagtgccaagaattctgtgctgggaccactgtacagccaggatcgcatcttgcaggcaatgggcaatatcgcattggccttccacttgctgtgtgaaagagcttcccctaattctttttggcagccttacattcagaccctgccctccgaatacgatacacctctgtacttcgaagaagatgaagtgcgctatttacaatctacccaggctatccatgatgtgttcagtcagtacaagaacaccgcgaggcagtatgcctatttttacaaagtcatccagacccacccccacgccaataagttgcccttgaaagattcttttacatacgaggattaccgctgggctgtcagttctgtgatgacccgtcagaaccaaatacccaccgaggacggctcgcgcgtgacactggctctgatacctctttgggatatgtgcaaccacacaaacggcctgattaccactgggtataacctggaggacgaccgctgcgagtgtgtggcccttcaggatttcagagccggagagcagatttacattttctatggtactcgctccaacgcggagttcgtgatccatagcggattcttcttcgacaataattcacatgatagggtcaagatcaaattgggtgtgagcaaatctgatagactttatgccatgaaagcagaggttttggcaagagctggtattcccaccagttctgtctttgccctccacttcactgaacctccgatttccgcccagcttttggcttttcttagagtgttttgtatgaccgaggaagaactgaaggagcacttactgggggactctgccattgatcggatttttacactgggcaactctgagttcccggtctcttgggacaacgaagttaaattatggacattcctggaggacagggcatccttgctgcttaagacctataaaactacaattgaggaggacaaatccgtgttgaaaaatcacgatttgtctgtgcgtgctaagatggccatcaagcttaggctgggcgaaaaggagattctggagaaagccgtgaagtcagctgcggttaaccgagaatactacagacaacagatggaagaaaaggcgccactgccgaaatatgaagaatcaaatctgggactactcgagtcaagcgtcggagattcccgtctccctctggtgctgagaaacctcgaggaagaggccggtgtccaggatgccctgaatatccgcgaggctatctctaaggccaaggccaccgaaaacggtctagtgaatggcgaaaacagtatccccaacggcactagatctgagaacgaatccctgaatcaagagtccaagcgggcagttgaagacgccaaggggtcgagtagcgatagcaccgccggagtcaaggagtag

SEQ ID NO: 332601 - DNA, 1785 bp, Artificial Sequence
  derived and/or modified sequence
atgggcaagaagagcagagtgaagacccagaagagcggcaccggcgccaccgccaccgtgagccccaaggagatcctgaacctgaccagcgagctgctgcagaagtgcagcagccccgcccccggccccggcaaggagtgggaggagtacgtgcagatcagaaccctggtggagaagatcagaaagaagcagaagggcctgagcgtgaccttcgacggcaagagagaggactacttccccgacctgatgaagtgggccagcgagaacggcgccagcgtggagggcttcgagatggtgaacttcaaggaggagggcttcggcctgagagccaccagagacatcaaggccgaggagctgttcctgtgggtgcccagaaagctgctgatgaccgtggagagcgccaagaacagcgtgctgggccccctgtacagccaggacagaatcctgcaggccatgggcaacatcgccctggccttccacctgctgtgcgagagagccagccccaacagcttctggcagccctacatccagaccctgcccagcgagtacgacacccccctgtacttcgaggaggacgaggtgagatacctgcagagcacccaggccatccacgacgtgttcagccagtacaagaacaccgccagacagtacgcctacttctacaaggtgatccagacccacccccacgccaacaagctgcccctgaaggacagcttcacctacgaggactacagatgggccgtgagcagcgtgatgaccagacagaaccagatccccaccgaggacggcagcagagtgaccctggccctgatccccctgtgggacatgtgcaaccacaccaacggcctgatcaccaccggctacaacctggaggacgacagatgcgagtgcgtggccctgcaggacttcagagccggcgagcagatctacatcttctacggcaccagaagcaacgccgagttcgtgatccacagcggcttcttcttcgacaacaacagccacgacagagtgaagatcaagctgggcgtgagcaagagcgacagactgtacgccatgaaggccgaggtgctggccagagccggcatccccaccagcagcgtgttcgccctgcacttcaccgagccccccatcagcgcccagctgctggccttcctgagagtgttctgcatgaccgaggaggagctgaaggagcacctgctgggcgacagcgccatcgacagaatcttcaccctgggcaacagcgagttccccgtgagctgggacaacgaggtgaagctgtggaccttcctggaggacagagccagcctgctgctgaagacctacaagaccaccatcgaggaggacaagagcgtgctgaagaaccacgacctgagcgtgagagccaagatggccatcaagctgagactgggcgagaaggagatcctggagaaggccgtgaagagcgccgccgtgaacagagagtactacagacagcagatggaggagaaggcccccctgcccaagtacgaggagagcaacctgggcctgctggagagcagcgtgggcgacagcagactgcccctggtgctgagaaacctggaggaggaggccggcgtgcaggacgccctgaacatcagagaggccatcagcaaggccaaggccaccgagaacggcctggtgaacggcgagaacagcatccccaacggcaccagaagcgagaacgagagcctgaaccaggagagcaagagagccgtggaggacgccaagggcagcagcagcgacagcaccgccggcgtgaaggagtag

SEQ ID NO: 332602 - protein, 296 aa, Artificial Sequence
  derived and/or modified sequence
MGKKSRVKTQKSGTGATATVSPKEILNLTSELLQKCSSPAPGPGKEWEEYVQIRTLVEKIRKKQKGLSVTFDGKREDYFPDLMKWASENGASVEGFEMVNFKEEGFGLRATRDIKAEELFLWVPRKLLMTVESAKNSVLGPLYSQDRILQAMGNIALAFHLLCERASPNSFWQPYIQTLPSEYDTPLYFEEDEVRYLQSTQAIHDVFSQYKNTARQYAYFYKVIQTHPHANKLPLKDSFTYEDYRWAVSSVMTRQNQIPTEDGSRVTLALIPLWDMCNHTNGLTPEDSFALAVASA

SEQ ID NO: 332603 - DNA, 891 bp, Artificial Sequence
  derived and/or modified sequence
atgggaaagaagtccagggttaagacccagaagtccggcacaggcgccacagccactgtctctcctaaggagatactgaacctcacgagcgagctactgcagaagtgctccagccccgctccaggccccggaaaagaatgggaggagtatgtacagataagaacactggtcgagaagattcgaaagaaacagaaagggctgagtgtgacattcgacggcaagagagaggattacttcccagatctcatgaaatgggcttcagagaatggcgcctctgtggaagggtttgaaatggtgaacttcaaggaggagggttttggcctgagagcgacccgcgacatcaaagccgaagagttgtttctttgggtgccccgaaaactcctgatgactgtggagtctgccaagaattcagtgttggggccgttgtattcacaggaccgcattcttcaggccatgggaaacattgcgcttgcatttcacctgttatgcgagcgggcctcaccaaactctttctggcagccgtacatccagaccctgccatccgaatatgatacacccctttacttcgaagaagatgaggtcaggtacctccaaagcacgcaagctatccacgacgtgttcagtcagtacaagaacactgcccgtcagtacgcatatttttataaggtgatccagacgcatcctcacgcgaacaagctcccacttaaagactctttcacttacgaagattatagatgggcagtttccagcgtaatgacacggcagaatcagattcccactgaagatgggagtcgtgtcacactagcgctgatccctctatgggacatgtgtaaccacaccaacggactcactcctgaggactcattcgccttagctgtggcctctgcctag

SEQ ID NO: 332604 - DNA, 891 bp, Artificial Sequence
  derived and/or modified sequence
atgggcaagaagagccgggtgaagacccagaagagcggcaccggggccacagccaccgtgagccccaaggagatcctgaacctgaccagcgagctgctgcagaagtgcagcagccctgcccctggccctgggaaggagtgggaggagtatgtgcagatccgcaccctggtggagaagatcaggaagaagcagaagggcctgtctgtgacctttgatggcaagcgggaggactacttcccagacctgatgaagtgggcctctgaaaatggagcctctgtggagggctttgagatggtgaacttcaaggaggagggcttcggcctgcgggccacccgggacatcaaggccgaggagctgttcctgtgggtgcccaggaagctgctgatgacagtggagagcgccaagaacagcgtgctgggccccctgtacagccaggaccgcatcctgcaggccatgggcaacatcgccctggccttccacctgctgtgtgagcgggccagccccaacagcttctggcagccctacatccagaccctgcccagtgaatatgacacccccctgtactttgaagaagatgaggtgcgctacctgcagagcacccaggccatccatgatgtgttcagccagtacaagaacacagcccggcagtatgcctacttctacaaggtgatccagacccacccccacgccaacaagctgcccctgaaggacagcttcacctatgaggactaccgctgggccgtgtcctctgtgatgacccggcagaaccagatccccacagaagatggcagccgggtgaccctggccctgatccccctgtgggacatgtgcaaccacaccaacggcctgaccccagaggacagctttgccctggccgtggccagcgcctag

SEQ ID NO: 332605 - DNA, 891 bp, Artificial Sequence
  derived and/or modified sequence
atgggcaagaagagccgggtgaagacccagaagagcggcaccggcgcaactgccacagtgagccctaaggagattctcaatctcacttctgaactgttacagaagtgttcgtctcctgctcctggtccaggcaaggagtgggaggagtacgtgcagattcgcactttagttgaaaaaatacggaagaaacagaagggcttaagtgtgacgttcgacggaaagagggaagattatttccccgatcttatgaagtgggctagtgagaatggggcctctgtggagggtttcgaaatggttaacttcaaagaagaagggtttggactgagagccacacgcgacatcaaggccgaagaacttttcctttgggtgcctcggaagcttcttatgacagtggagtctgccaagaactccgtattgggcccgctgtattcacaggaccgcatcctgcaggccatggggaacatcgctttagcattccacttgctctgtgaaagggcatcccccaattcgttctggcaaccatatatccagaccctgccatccgagtatgatacaccactgtattttgaggaggacgaggttcgctatctgcagtccacacaggctatccatgatgtgttttctcagtacaagaacactgccaggcaatacgcatacttctacaaggtcatccaaacacacccccacgctaacaagttaccgcttaaggatagtttcacctatgaagattacagatgggccgttagttcagtgatgactagacagaaccaaatacccacggaggacggctctcgcgtgaccctcgcattgataccgttgtgggacatgtgcaaccatacaaatggtctgacccccgaggatagtttcgccttggctgtcgcttccgcatag

SEQ ID NO: 332606 - DNA, 1330 bp, Artificial Sequence
  derived and/or modified sequence
ggcggacggcggggtccgggccggagtacgtcgttcccgctgcgctaggggaagcgggcagtcagaaaaatgggtaagaagagtcgagtaaaaactcagaaatctggcactggtgctacagcaactgtgtcaccaaaggaaatcttgaacctgaccagtgagctgctgcagaaatgcagcagtccggcgcctggcccaggaaaagagtgggaagagtatgtgcagatccggactctggttgagaaaatacggaaaaagcaaaaaggtctgtccgttacttttgatggaaaaagagaagattactttcctgatctaatgaaatgggcctctgaaaatggggcttctgtcgagggttttgaaatggttaacttcaaagaagagggctttggtttgagagcaacaagagatatcaaggcagaagaattgtttttatgggttccacgaaaattgctaatgactgttgaatctgctaaaaattcagtgttggggcccttatattctcaagaccgaatccttcaagccatgggaaacatcgcactggcctttcatttgctgtgtgagcgagccagccctaactccttctggcagccctatattcaaaccctccccagtgaatatgacactcctctctactttgaagaagatgaagttcggtatcttcagtccacacaagctatacatgatgtcttcagccagtataaaaacacagctcgacagtacgcctacttctataaagtcatccagacccatcctcatgccaacaaactacccttgaaggattctttcacttacgaggactacaggtgggcagtctcttctgttatgacgaggcaaaaccaaattcccacagaggatggttcccgcgtgaccctggctctgattcctttatgggatatgtgtaaccacaccaacggcctgacaccagaagattccttcgctcttgctgtcgcctctgcctaagaccctccattccttaggcacttacgggactcactcatagacctcctccagcgtggctgccctgagcaccctatgtggaatgactacgcctccagctcatccgccctcctgccctgtcctgttacatttccctctattgtccagatccgcttgtttctgcctttttaaaaaattattgttggttcacccccccgcctcccattagaatggaagatccatgaacgcagggtgattttgggggagggtctgttttgctcattgctatatcgctgtggtttttaatgaattcatgaccggtaaataaatgactgtaaaagccccatgcctaggaaaaaagatcagaaagaaataaaccaaaatgttaacgtga

SEQ ID NO: 332607 - DNA, 891 bp, Artificial Sequence
  derived and/or modified sequence
atgggcaagaagtcccgcgtgaagacacaaaaaagtggaacaggcgcaaccgccactgtcagcccaaaggaaattttaaacctgactagcgaattactccagaaatgtagtagtccagcccctgggcctggaaaggaatgggaagagtacgtccagatacgaacactggtggagaaaattaggaagaaacagaaagggctgagcgtgaccttcgacggaaaacgcgaggactacttcccggacttaatgaaatgggcatccgaaaacggcgcatcagttgaaggattcgaaatggtgaacttcaaagaagagggctttgggcttagggccacacgggatatcaaggccgaggaactgttcctgtgggtgcctcgcaaattgcttatgaccgtggaatcagccaagaatagcgttcttggccctctgtactcccaggaccgaatactgcaggcaatggggaacatcgcgctggccttccacctgctgtgcgagagagccagtcctaacagtttttggcagccctacatacaaacactgccaagcgaatacgacactcctctgtactttgaggaagacgaggtcaggtatctccagtccacccaggccatccatgacgtgttctctcagtataagaatactgcgaggcagtatgcttacttttataaagtcattcagactcatccccacgccaacaagcttcctttgaaggactcttttacctatgaagattatcgctgggccgtgtccagtgtgatgactcgccagaaccaaatcccaacagaggacggatccagggtgaccctcgcattgataccgctttgggacatgtgtaatcataccaacggcctgacaccagaggatagcttcgctctcgctgtggcaagcgcctag

SEQ ID NO: 332608 - DNA, 891 bp, Artificial Sequence
  derived and/or modified sequence
atgggcaagaagagcagagtgaagacccagaagagcggcaccggcgccaccgccaccgtgagccccaaggagatcctgaacctgaccagcgagctgctgcagaagtgcagcagccccgcccccggccccggcaaggagtgggaggagtacgtgcagatcagaaccctggtggagaagatcagaaagaagcagaagggcctgagcgtgaccttcgacggcaagagagaggactacttccccgacctgatgaagtgggccagcgagaacggcgccagcgtggagggcttcgagatggtgaacttcaaggaggagggcttcggcctgagagccaccagagacatcaaggccgaggagctgttcctgtgggtgcccagaaagctgctgatgaccgtggagagcgccaagaacagcgtgctgggccccctgtacagccaggacagaatcctgcaggccatgggcaacatcgccctggccttccacctgctgtgcgagagagccagccccaacagcttctggcagccctacatccagaccctgcccagcgagtacgacacccccctgtacttcgaggaggacgaggtgagatacctgcagagcacccaggccatccacgacgtgttcagccagtacaagaacaccgccagacagtacgcctacttctacaaggtgatccagacccacccccacgccaacaagctgcccctgaaggacagcttcacctacgaggactacagatgggccgtgagcagcgtgatgaccagacagaaccagatccccaccgaggacggcagcagagtgaccctggccctgatccccctgtgggacatgtgcaaccacaccaacggcctgacccccgaggacagcttcgccctggccgtggccagcgcctag

SEQ ID NO: 332609 - protein, 862 aa, Artificial Sequence [sequence omitted]

SEQ ID NO: 332610 - protein, 100 aa, Artificial Sequence
  derived and/or modified sequence
MATLNSASTTGTTPSPGHNAPSLPSDTFSSSTPSDPVTKDPPAASSTSENMRSSEPGGQLLESGCGLVPPKEIGEPQEGPDCGHFPPNDPGVEKDKEQEE

SEQ ID NO: 332611 - protein, 2572 aa, Artificial Sequence
  derived and/or modified sequence
MATLNSASTTGTTPSPGHNAPSLPSDTFSSSTPSDPVTKDPPAASSTSENMRSSEPGGQLLESGCGLVPPKEIGEPQEGPDCGHFPPNDPGVEKDKEQEEEEEGLPPMDLSNHLFFTAGGEAYLVAKLSLPGGSELLLPKGFPWGEAGIKEEPSLPFLAYPPPSHLTALHIQHGFDPIQGFSSSDQILSHDTSAPSPAACEERHGAFWSYQLAPNPPGDPKDGPMGNSGGNHVAVFWLCLLCRLGFSKPQAFMDHTQSHGVKLTPAQYQGLSGSPAVLQEGDEGCKALISFLEPKLPARPSSDIPLDNSSTVNMEANVAQTEDGPPEAEVQALILLDEEVMALSPPSPPTATWDPSPTQAKESPVAAGEAGPDWFPEGQEEDGGLCPPLNQSSPTSKEGGTLPAPVGSPEDPSDPPQPYRLADDYTPAPAAFQGLSLSSHMSLLHSRNSCKTLKCPKCNWHYKYQQTLDVHMREKHPESNSHCSYCSAGGAHPRLARGESYNCGYKPYRCDVCNYSTTTKGNLSIHMQSDKHLANLQGFQAGPGGQGSPPEASLPPSAGDKEPKTKSSWQCKVCSYETNISRNLRIHMTSEKHMQNVLMLHQGLPLGLPPGLMGPGPPPPPGATPTSPPELFQYFGPQALGQPQTPLAGPGLRPDKPLEAQLLLNGFHHVGAPARKFPTSAPGSLSPDAHLPPSQLLGSSSDSLPTSPPPDDSLSLKVFRCLVCQAFSTDSLELLLYHCSIGRSLPEAEWKEVAGDTHRCKLCCYGTQLKANFQLHLKTDKHAQKYQLAAHLREGGGAMGTPSPASLGDGAPYGSVSPLHLRCNICDFESNSKEKMQLHARGAAHEENSQIYKFLLDMEGAEAGAELGLYHCLLCAWETPSRLAVLQHLRTPAHRDAQAQRRLQLLQNGPTTEEGLAALQSILSFSHGQLRTPGKAPVTPLAEPPTPEKDAQNKTEQLASEETENKTGPSRDSANQTTVYCCPYCSFLSPESSQVRAHTLSQHAVQPKYRCPLCQEQLVGRPALHFHLSHLHNVVPECVEKLLLVATTVEMTFTTKVLSAPTLSPLDNGQEPPTHGPEPTPSRDQAAEGPNLTPEASPDPLPEPPLASVEVPDKPSGSPGQPPSPAPSPVPEPDAQAEDVAPPPTMAEEEEGTTGELRSAEPAPADSRHPLTYRKTTNFALDKFLDPARPYKCTVCKESFTQKNILLVHYNSVSHLHKMKKAAIDPSAPARGEAGAPPTTTAATDKPFKCTVCRVSYNQSSTLEIHMRSVLHQTRSRGTKTDSKIEGPERSQEEPKEGETEGEVGTEKKGPDTSGFISGLPFLSPPPPPLDLHRFPAPLFTPPVLPPFPLVPESLLKLQQQQLLLPFYLHDLKVGPKLTLAGPAPVLSLPAATPPPPPQPPKAELAEREWERPPMAKEGNEAGPSSPPDPLPNEAARTAAKALLENFGFELVIQYNEGKQAVPPPPTPPPPEALGGGDKLACGACGKLFSNMLILKTHEEHVHRRFLPFEALSRYAAQFRKSYDSLYPPLAEPPKPPDGSLDSPVPHLGPPFLVPEPEAGGTRAPEERSRAGGHWPIEEEESSRGNLPPLVPAGRRFSRTKFTEFQTQALQSFFETSAYPKDGEVERLASLLGLASRVVVVWFQNARQKARKNACEGGSMPTGGGTGGASGCRRCHATFSCVFELVRHLKKCYDDQTLEEEEEEAERGEEEEEVEEEEVEEEQGLEPPAGPEGPLPEPPDGEELSQAEATKAGGKEPEEKATPSPSPAHTCDQCAISFSSQDLLTSHRRLHFLPSLQPSAPPQLLDLPLLVFGERNPLVAATSPMPGPPLKRKHEDGSLSPTGSEAGGGGEGEPPRDKRLRTTILPEQLEILYRWYMQDSNPTRKMLDCISEEVGLKKRVVQVWFQNTRARERKGQFRSTPGGVPSPAVKPPATATPASLPKFNLLLGKVDDGTGREAPKREAPAFPYPTATLASGPQPFLPPGKEATTPTPEPPLPLLPPPPPSEEEGPEEPPKASPESEACSLSAGDLSDSSASSLAEPESPGAGGTSGGPGGGTGVPDGMGQRRYRTQMSSLQLKIMKACYEAYRTPTMQECEVLGEEIGLPKRVIQVWFQNARAKEKKAKLQGTAAGSTGGSSEGLLAAQRTDCPYCDVKYDFYVSCRGHLFSRQHLAKLKEAVRAQLKSESKCYDLAPAPEAPPALKAPPATTPASMPLGAAPTLPRLAPVLLSGPALAQPPLGNLAPFNSGPAASSGLLGLATSVLPTTTVVQTAGPGRPLPQRPMPDQTNTSTAGTTDPVPGPPTEPLGDKVSSERKPVAGPTSSSNDALKNLKALKTTVPALLGGQFLPFPLPPAGGTAPPAVFGPQLQGAYFQQLYGMKKGLFPMNPMIPQTLIGLLPNALLQPPPQPPEPTATAPPKPPELPAPGEGEAGEVDELLTGSTGISTVDVTHRYLCRQCKMAFDGEAPATAHQRSFCFFGRGSGGSMPPPLRVPICTYHCLACEVLLSGREALASHLRSSAHRRKAAPPQGGPPISITNAATAASAAVAFAKEEARLPHTDSNPKTTTTSTLLAL

SEQ ID NO: 332612 - DNA, 5428 bp, Artificial Sequence
  derived and/or modified sequence
ggagcgagcgagtgcccagggtgaatcaatggaaaccccctcacgaagccggggaaacacttcagccgcagccaaatagcattgattattttccttcacttccctcaccgccgtgaatttatttatttatttttttccgtctccgtccctgacgccccggagcgagcgctggagggagggaggaggaggggaaaaaagaggaatcaacacatcggagaagtcccttccaagagccgccccctcccctccccgcctcgcgctgctcggtggccgcggttcgactcccgtccctgcttccagctgaggtggtactggctgtcacgctgacatgagcccccagcactcctccgtctaccatggccacccttaactcagcctctaccactggtaccaccccctcccctgggcacaatgccccgtccctgccttcggacaccttctcctccagcaccccctctgatcctgtcaccaaagatccccctgctgcctcctccacctctgagaacatgaggtcctcagagccagggggacagctcctggagtcgggctgtggcctcgtcccaccaaaggagattggggagccccaggaagggcctgactgtggtcacttcccaccaaatgacccaggggtggaaaaggacaaggagcaggaggaggaagaagaagggctccctcccatggacctaagcaaccacttattcttcacagctggaggtgaggcctacctagtggccaagctgtccctgccaggtggcagtgaactcctgttaccaaagggcttcccctggggtgaggcgggcatcaaggaagagcccagtctgcccttccttgcctacccacccccctcacacctcactgcccttcacatccaacatggctttgacccaatccaaggctttagctcttctgaccaaattctgtcccatgatacctcagcaccatctccggctgcctgtgaggaaaggcatggagctttctggagctaccagctggctccaaatccacccggagatcccaaagatggccccatggggaacagcgggggcaaccacgtggcggtcttctggctctgccttctgtgccgcctgggtttcagcaagccccaggcctttatggatcacacacagtctcatggggtgaagctaacccctgcccaatatcagggcctgtcaggtagcccagctgtactccaggagggagatgaaggctgcaaggccctcataagctttctggagccaaaactccctgctcgcccctcttctgacataccccttgacaacagcagcacagtgaacatggaggcgaatgtggcccagacagaggatggcccccctgaggcagaagtccaggcccttatcctcctggatgaagaagttatggccctcagcccaccctctccacccacagccacctgggaccccagcccaacccaagccaaagaatcgccagtagcagcaggcgaggcagggccagattggttccctgaggggcaagaagaggatggagggctctgccccccactcaaccaaagctcacccacctccaaggaggggggcactctccctgccccagtgggctcccccgaagaccccagtgacccaccccagccctatcgcctagctgatgactacaccccagcccctgcagccttccagggcctcagcctgtccagccacatgtccctgctccactcacgcaactcctgcaagacactcaagtgtcccaagtgcaactggcactacaagtaccagcagaccctggatgtgcacatgcaagagaagcaccctgagagcaacagtcactgcagctactgcagtgctgggggcgcccacccccgccttgctcgtggagagagctacaactgtggctacaaaccctaccgctgtgacgtctgcaactactctacaaccaccaaaggcaacctcagcatccatatgcagtctgacaagcacctggccaacctacagggcttccaggcgggccctggtgggcagggaagtccaacagaggcatcactcccaccctccgcgggagacaaagagcctaagaccaaatcatcctggcagtgcaaggtgtgcagctacgagacaaacatctcccgtaacctgcgcatccatatgacctctgagaagcacatgcagaatgtcctaatgctgcaccaggggctgccgctgggcctgccacctggattgatggggccaggccctcctcccccaccaggggctacccccactagcccccctgaactcttccagtactttgggccccaggccctagggcagcctcagactcccttggctggcccggggctgaggccagacaagcccctggaagcccagctacttctcaatggtttccaccacgtaggagcacctgcccgcaagttccccacatccgcccctggaagcctatcccctgatgcccacctgcctccaagtcagctcctgggttcctcatctgacagcctgcccacctcaccacccccagacgacagcctgtccctgaaggtgttccgctgcctagtgtgccaggccttcagcacagacagcctggagctgctgctctaccactgcagcataggccggagcctcccggaagctgaatggaaggaggtggctggtgacacccaccgctgcaagctttgctgctatggcacccagctcaaggccaacttccaactccacctcaagactgacaaacatgctcagaagtaccagctggcagcccacctgcgggaggggggtggagccatgggcaccccttccccagcatccctgggagatggggctccttatgggtctgtctccccactacacctgcgctgcaacatctgtgactttgagtccaacagcaaggagaagatgcagctgcatgccaggggtgcagcccacgaagaaaacagccaaatctataaaaggacagaaactggactcttaataaaatgatctcttaggccctaccagttctaatactgtaattttccctctatcttctgtgtgggtgtttctttttgttggcttttcatactctcctacctgctgattgagccatccattttctccttcattgactggctgcttgtcctgcttcctctgtcctatgtcctcccttccctgatgccacacctctttaagctgactctccccccatcctacacagggaaggctcctgtcacccccttagctgagccacccacccctgagaaagatgcccagaacaagacagaacaattgggtgagttttccctcccttccccccagtcctcctaccttctgagacgctcacgggaccttgcagtaatccaggagcccagcaatgtctgtgctcaaggagcaaaactgattaaagaaagggctcatcagggggaagggaggctgagccacgagaggctaggcacttccgccctctttgagaactcagacctgaccatcctactgacccggagtcagcccttgccaagcctcacctatctactgagtttcctgccctttctctagtgcccaactccctaccctggaagctctctgctacaaatcatcttgagggctgtcagggttccttaatctcctcttctttcatcctcagcttcagaagagacagaaaacaagactggcccttccagagacagtgccaaccagaccacggtcagaattggggtaactgggaagagctgaagtgggggcctggctttactgagatctgctcatattctaaaggcagacgtaattttgtcatgctttgacttatttcactcagaatagcacagttaagaaattccacccagatccagttccacatgttcagcactttcgggggcagagctggcccagcagggtcaagcacagagggagatgataggagggagacagcaggaacttgagggaaagatgaataaaggaattgtgctgagagtaggaaagagtgggggtacatgctggaaggaggggaggagaaaggcaaaagcaaacaaccagctactgcccagctctttatcccttagttaggagcagaaagacaagacaccggtgttcctaccctacaaaacgccctgagcctggatggaactgtcctggcatcctcttactaagggtaggggcaccaaccaaatgattcacactgacagcatgtgccacaaatctctaaatccccaggactcagacctaggcagcacccaggaatggcagctctgtgttctgaggggattcccagcctctggtttgagatgccatcctgtgcctcacagctctccaaactggactacaatatgtaacatttattgttattgcaatacgcagtgttactgcattactgcaagctgaagtaatgccttatgtcctcagcatcttttcttcctaactcctgctcccgccaacagacctcttccagatgtctgctccaggggctaggtgcgttaagatgagcatctggatccccttcctttacagtcatcccctccctgacacacaggcctgtgccactggtgccagcctggatgcaggctgggtaggtctggcagtcaggtgatggtggggcctctggcagcctcacccctctggaagtgtggctgagaatgtgctgagagggctgggccagaattttcctgggccactgggggagctgtggtgtttattcacattaggaaaaagaagaaggaaaaagaaagatggaaaataaggtgggagctgctgagcctgagggaggatgagctggcttctgagcagacaggtagggcccctttccaggtgatggttcacagaggcagagtgggcagggacaagggagcctctgggtccagaaaatgcccagaggaaatggaaccatttcacagagaagacacgacaggataggataggtaagagaagaaaactaaatccaaggtgggggcagtaggtacagagccatctgttagctggagagttgaggcaggcagcaaagactgggaaagacacaccaagaaaaggcagagaggccaggatggtggaagagggccagacaaagaaggagtgcaaggtagcggcctaagctaggcctttgtcccaatccaagggaaagtggggaggagccagctctcaggactgtggctggaggctgggtctgctataatgccttcctatctggctagttcctcttcaattaggagtgagaggccaagcgtggtggctcacgcctgtaatcccagcactttgggaagccaagatgagtagatcacctggcatcaggagttcaagaccaacctggccaatgtggcaaaaccctgtctccactaaaaaatacaaaaattagctgggcgtggttgcacacgcctgtaatcccagctgcttgggaggctgagggcaggagaattgcttgaacctggaaggcggaggttgcagtgagccgagatcacgtcactgcactccggcctgggtgacagagccagactccatct

SEQ ID NO: 332613 - DNA, 2589 bp, Artificial Sequence
  derived and/or modified sequence
atggccaccctgaacagcgccagcaccaccggcaccacccccagccccggccacaacgcccccagcctgcccagcgacaccttcagcagcagcacccccagcgaccccgtgaccaaggacccccccgccgccagcagcaccagcgagaacatgagaagcagcgagcccggcggccagctgctggagagcggctgcggcctggtgccccccaaggagatcggcgagccccaggagggccccgactgcggccacttcccccccaacgaccccggcgtggagaaggacaaggagcaggaggaggaggaggagggcctgccccccatggacctgagcaaccacctgttcttcaccgccggcggcgaggcctacctggtggccaagctgagcctgcccggcggcagcgagctgctgctgcccaagggcttcccctggggcgaggccggcatcaaggaggagcccagcctgcccttcctggcctaccccccccccagccacctgaccgccctgcacatccagcacggcttcgaccccatccagggcttcagcagcagcgaccagatcctgagccacgacaccagcgcccccagccccgccgcctgcgaggagagacacggcgccttctggagctaccagctggcccccaacccccccggcgaccccaaggacggccccatgggcaacagcggcggcaaccacgtggccgtgttctggctgtgcctgctgtgcagactgggcttcagcaagccccaggccttcatggaccacacccagagccacggcgtgaagctgacccccgcccagtaccagggcctgagcggcagccccgccgtgctgcaggagggcgacgagggctgcaaggccctgatcagcttcctggagcccaagctgcccgccagacccagcagcgacatccccctggacaacagcagcaccgtgaacatggaggccaacgtggcccagaccgaggacggcccccccgaggccgaggtgcaggccctgatcctgctggacgaggaggtgatggccctgagcccccccagcccccccaccgccacctgggaccccagccccacccaggccaaggagagccccgtggccgccggcgaggccggccccgactggttccccgagggccaggaggaggacggcggcctgtgcccccccctgaaccagagcagccccaccagcaaggagggcggcaccctgcccgcccccgtgggcagccccgaggaccccagcgaccccccccagccctacagactggccgacgactacacccccgcccccgccgccttccagggcctgagcctgagcagccacatgagcctgctgcacagcagaaacagctgcaagaccctgaagtgccccaagtgcaactggcactacaagtaccagcagaccctggacgtgcacatgagagagaagcaccccgagagcaacagccactgcagctactgcagcgccggcggcgcccaccccagactggccagaggcgagagctacaactgcggctacaagccctacagatgcgacgtgtgcaactacagcaccaccaccaagggcaacctgagcatccacatgcagagcgacaagcacctggccaacctgcagggcttccaggccggccccggcggccagggcagcccccccgaggccagcctgccccccagcgccggcgacaaggagcccaagaccaagagcagctggcagtgcaaggtgtgcagctacgagaccaacatcagcagaaacctgagaatccacatgaccagcgagaagcacatgcagaacgtgctgatgctgcaccagggcctgcccctgggcctgccccccggcctgatgggccccggccccccccccccccccggcgccacccccaccagcccccccgagctgttccagtacttcggcccccaggccctgggccagccccagacccccctggccggccccggcctgagacccgacaagcccctggaggcccagctgctgctgaacggcttccaccacgtgggcgcccccgccagaaagttccccaccagcgcccccggcagcctgagccccgacgcccacctgccccccagccagctgctgggcagcagcagcgacagcctgcccaccagccccccccccgacgacagcctgagcctgaaggtgttcagatgcctggtgtgccaggccttcagcaccgacagcctggagctgctgctgtaccactgcagcatcggcagaagcctgcccgaggccgagtggaaggaggtggccggcgacacccacagatgcaagctgtgctgctacggcacccagctgaaggccaacttccagctgcacctgaagaccgacaagcacgcccagaagtaccagctggccgcccacctgagagagggcggcggcgccatgggcacccccagccccgccagcctgggcgacggcgccccctacggcagcgtgagccccctgcacctgagatgcaacatctgcgacttcgagagcaacagcaaggagaagatgcagctgcacgccagaggcgccgcccacgaggagaacagccagatctacaagagaaccggcaccggcctgctgatcaagtag

SEQ ID NO: 332614 - DNA, 7719 bp, Artificial Sequence
  derived and/or modified sequence
atggccaccctgaacagcgccagcaccaccggcaccacccccagccccggccacaacgcccccagcctgcccagcgacaccttcagcagcagcacccccagcgaccccgtgaccaaggacccccccgccgccagcagcaccagcgagaacatgagaagcagcgagcccggcggccagctgctggagagcggctgcggcctggtgccccccaaggagatcggcgagccccaggagggccccgactgcggccacttcccccccaacgaccccggcgtggagaaggacaaggagcaggaggaggaggaggagggcctgccccccatggacctgagcaaccacctgttcttcaccgccggcggcgaggcctacctggtggccaagctgagcctgcccggcggcagcgagctgctgctgcccaagggcttcccctggggcgaggccggcatcaaggaggagcccagcctgcccttcctggcctaccccccccccagccacctgaccgccctgcacatccagcacggcttcgaccccatccagggcttcagcagcagcgaccagatcctgagccacgacaccagcgcccccagccccgccgcctgcgaggagagacacggcgccttctggagctaccagctggcccccaacccccccggcgaccccaaggacggccccatgggcaacagcggcggcaaccacgtggccgtgttctggctgtgcctgctgtgcagactgggcttcagcaagccccaggccttcatggaccacacccagagccacggcgtgaagctgacccccgcccagtaccagggcctgagcggcagccccgccgtgctgcaggagggcgacgagggctgcaaggccctgatcagcttcctggagcccaagctgcccgccagacccagcagcgacatccccctggacaacagcagcaccgtgaacatggaggccaacgtggcccagaccgaggacggcccccccgaggccgaggtgcaggccctgatcctgctggacgaggaggtgatggccctgagcccccccagcccccccaccgccacctgggaccccagccccacccaggccaaggagagccccgtggccgccggcgaggccggccccgactggttccccgagggccaggaggaggacggcggcctgtgcccccccctgaaccagagcagccccaccagcaaggagggcggcaccctgcccgcccccgtgggcagccccgaggaccccagcgaccccccccagccctacagactggccgacgactacacccccgcccccgccgccttccagggcctgagcctgagcagccacatgagcctgctgcacagcagaaacagctgcaagaccctgaagtgccccaagtgcaactggcactacaagtaccagcagaccctggacgtgcacatgagagagaagcaccccgagagcaacagccactgcagctactgcagcgccggcggcgcccaccccagactggccagaggcgagagctacaactgcggctacaagccctacagatgcgacgtgtgcaactacagcaccaccaccaagggcaacctgagcatccacatgcagagcgacaagcacctggccaacctgcagggcttccaggccggccccggcggccagggcagcccccccgaggccagcctgccccccagcgccggcgacaaggagcccaagaccaagagcagctggcagtgcaaggtgtgcagctacgagaccaacatcagcagaaacctgagaatccacatgaccagcgagaagcacatgcagaacgtgctgatgctgcaccagggcctgcccctgggcctgccccccggcctgatgggccccggccccccccccccccccggcgccacccccaccagcccccccgagctgttccagtacttcggcccccaggccctgggccagccccagacccccctggccggccccggcctgagacccgacaagcccctggaggcccagctgctgctgaacggcttccaccacgtgggcgcccccgccagaaagttccccaccagcgcccccggcagcctgagccccgacgcccacctgccccccagccagctgctgggcagcagcagcgacagcctgcccaccagccccccccccgacgacagcctgagcctgaaggtgttcagatgcctggtgtgccaggccttcagcaccgacagcctggagctgctgctgtaccactgcagcatcggcagaagcctgcccgaggccgagtggaaggaggtggccggcgacacccacagatgcaagctgtgctgctacggcacccagctgaaggccaacttccagctgcacctgaagaccgacaagcacgcccagaagtaccagctggccgcccacctgagagagggcggcggcgccatgggcacccccagccccgccagcctgggcgacggcgccccctacggcagcgtgagccccctgcacctgagatgcaacatctgcgacttcgagagcaacagcaaggagaagatgcagctgcacgccagaggcgccgcccacgaggagaacagccagatctacaagttcctgctggacatggagggcgccgaggccggcgccgagctgggcctgtaccactgcctgctgtgcgcctgggagacccccagcagactggccgtgctgcagcacctgagaacccccgcccacagagacgcccaggcccagagaagactgcagctgctgcagaacggccccaccaccgaggagggcctggccgccctgcagagcatcctgagcttcagccacggccagctgagaacccccggcaaggcccccgtgacccccctggccgagccccccacccccgagaaggacgcccagaacaagaccgagcagctggccagcgaggagaccgagaacaagaccggccccagcagagacagcgccaaccagaccaccgtgtactgctgcccctactgcagcttcctgagccccgagagcagccaggtgagagcccacaccctgagccagcacgccgtgcagcccaagtacagatgccccctgtgccaggagcagctggtgggcagacccgccctgcacttccacctgagccacctgcacaacgtggtgcccgagtgcgtggagaagctgctgctggtggccaccaccgtggagatgaccttcaccaccaaggtgctgagcgcccccaccctgagccccctggacaacggccaggagccccccacccacggccccgagcccacccccagcagagaccaggccgccgagggccccaacctgacccccgaggccagccccgaccccctgcccgagccccccctggccagcgtggaggtgcccgacaagcccagcggcagccccggccagccccccagccccgcccccagccccgtgcccgagcccgacgcccaggccgaggacgtggcccccccccccaccatggccgaggaggaggagggcaccaccggcgagctgagaagcgccgagcccgcccccgccgacagcagacaccccctgacctacagaaagaccaccaacttcgccctggacaagttcctggaccccgccagaccctacaagtgcaccgtgtgcaaggagagcttcacccagaagaacatcctgctggtgcactacaacagcgtgagccacctgcacaagatgaagaaggccgccatcgaccccagcgcccccgccagaggcgaggccggcgccccccccaccaccaccgccgccaccgacaagcccttcaagtgcaccgtgtgcagagtgagctacaaccagagcagcaccctggagatccacatgagaagcgtgctgcaccagaccagaagcagaggcaccaagaccgacagcaagatcgagggccccgagagaagccaggaggagcccaaggagggcgagaccgagggcgaggtgggcaccgagaagaagggccccgacaccagcggcttcatcagcggcctgcccttcctgagccccccccccccccccctggacctgcacagattccccgcccccctgttcaccccccccgtgctgccccccttccccctggtgcccgagagcctgctgaagctgcagcagcagcagctgctgctgcccttctacctgcacgacctgaaggtgggccccaagctgaccctggccggccccgcccccgtgctgagcctgcccgccgccaccccccccccccccccccagccccccaaggccgagctggccgagagagagtgggagagaccccccatggccaaggagggcaacgaggccggccccagcagcccccccgaccccctgcccaacgaggccgccagaaccgccgccaaggccctgctggagaacttcggcttcgagctggtgatccagtacaacgagggcaagcaggccgtgccccccccccccaccccccccccccccgaggccctgggcggcggcgacaagctggcctgcggcgcctgcggcaagctgttcagcaacatgctgatcctgaagacccacgaggagcacgtgcacagaagattcctgcccttcgaggccctgagcagatacgccgcccagttcagaaagagctacgacagcctgtacccccccctggccgagccccccaagccccccgacggcagcctggacagccccgtgccccacctgggcccccccttcctggtgcccgagcccgaggccggcggcaccagagcccccgaggagagaagcagagccggcggccactggcccatcgaggaggaggagagcagcagaggcaacctgccccccctggtgcccgccggcagaagattcagcagaaccaagttcaccgagttccagacccaggccctgcagagcttcttcgagaccagcgcctaccccaaggacggcgaggtggagagactggccagcctgctgggcctggccagcagagtggtggtggtgtggttccagaacgccagacagaaggccagaaagaacgcctgcgagggcggcagcatgcccaccggcggcggcaccggcggcgccagcggctgcagaagatgccacgccaccttcagctgcgtgttcgagctggtgagacacctgaagaagtgctacgacgaccagaccctggaggaggaggaggaggaggccgagagaggcgaggaggaggaggaggtggaggaggaggaggtggaggaggagcagggcctggagccccccgccggccccgagggccccctgcccgagccccccgacggcgaggagctgagccaggccgaggccaccaaggccggcggcaaggagcccgaggagaaggccacccccagccccagccccgcccacacctgcgaccagtgcgccatcagcttcagcagccaggacctgctgaccagccacagaagactgcacttcctgcccagcctgcagcccagcgcccccccccagctgctggacctgcccctgctggtgttcggcgagagaaaccccctggtggccgccaccagccccatgcccggcccccccctgaagagaaagcacgaggacggcagcctgagccccaccggcagcgaggccggcggcggcggcgagggcgagccccccagagacaagagactgagaaccaccatcctgcccgagcagctggagatcctgtacagatggtacatgcaggacagcaaccccaccagaaagatgctggactgcatcagcgaggaggtgggcctgaagaagagagtggtgcaggtgtggttccagaacaccagagccagagagagaaagggccagttcagaagcacccccggcggcgtgcccagccccgccgtgaagccccccgccaccgccacccccgccagcctgcccaagttcaacctgctgctgggcaaggtggacgacggcaccggcagagaggcccccaagagagaggcccccgccttcccctaccccaccgccaccctggccagcggcccccagcccttcctgccccccggcaaggaggccaccacccccacccccgagccccccctgcccctgctgcccccccccccccccagcgaggaggagggccccgaggagccccccaaggccagccccgagagcgaggcctgcagcctgagcgccggcgacctgagcgacagcagcgccagcagcctggccgagcccgagagccccggcgccggcggcaccagcggcggccccggcggcggcaccggcgtgcccgacggcatgggccagagaagatacagaacccagatgagcagcctgcagctgaagatcatgaaggcctgctacgaggcctacagaacccccaccatgcaggagtgcgaggtgctgggcgaggagatcggcctgcccaagagagtgatccaggtgtggttccagaacgccagagccaaggagaagaaggccaagctgcagggcaccgccgccggcagcaccggcggcagcagcgagggcctgctggccgcccagagaaccgactgcccctactgcgacgtgaagtacgacttctacgtgagctgcagaggccacctgttcagcagacagcacctggccaagctgaaggaggccgtgagagcccagctgaagagcgagagcaagtgctacgacctggcccccgcccccgaggccccccccgccctgaaggccccccccgccaccacccccgccagcatgcccctgggcgccgcccccaccctgcccagactggcccccgtgctgctgagcggccccgccctggcccagccccccctgggcaacctggcccccttcaacagcggccccgccgccagcagcggcctgctgggcctggccaccagcgtgctgcccaccaccaccgtggtgcagaccgccggccccggcagacccctgccccagagacccatgcccgaccagaccaacaccagcaccgccggcaccaccgaccccgtgcccggcccccccaccgagcccctgggcgacaaggtgagcagcgagagaaagcccgtggccggccccaccagcagcagcaacgacgccctgaagaacctgaaggccctgaagaccaccgtgcccgccctgctgggcggccagttcctgcccttccccctgccccccgccggcggcaccgccccccccgccgtgttcggcccccagctgcagggcgcctacttccagcagctgtacggcatgaagaagggcctgttccccatgaaccccatgatcccccagaccctgatcggcctgctgcccaacgccctgctgcagccccccccccagccccccgagcccaccgccaccgccccccccaagccccccgagctgcccgcccccggcgagggcgaggccggcgaggtggacgagctgctgaccggcagcaccggcatcagcaccgtggacgtgacccacagatacctgtgcagacagtgcaagatggccttcgacggcgaggcccccgccaccgcccaccagagaagcttctgcttcttcggcagaggcagcggcggcagcatgcccccccccctgagagtgcccatctgcacctaccactgcctggcctgcgaggtgctgctgagcggcagagaggccctggccagccacctgagaagcagcgcccacagaagaaaggccgcccccccccagggcggcccccccatcagcatcaccaacgccgccaccgccgccagcgccgccgtggccttcgccaaggaggaggccagactgccccacaccgacagcaaccccaagaccaccaccaccagcaccctgctggccctgtag

SEQ ID NO: 332615 - DNA, 741 bp, Artificial Sequence
  derived and/or modified sequence
atggccaccctgaacagcgccagcaccaccggcaccacccccagccccggccacaacgcccccagcctgcccagcgacaccttcagcagcagcacccccagcgaccccgtgaccaaggacccccccgccgccagcagcaccagcgagaacatgagaagcagcgagcccggcggccagctgctggagagcggctgcggcctggtgccccccaaggagatcggcgagccccaggagggccccgactgcggccacttcccccccaacgaccccggcgtggagaaggacaaggagcaggaggaggaggaggagggcctgccccccatggacctgagcaaccacctgttcttcaccgccggcggcgaggcctacctggtggccaagctgagcctgcccggcggcagcgagctgctgctgcccaagggcttcccctggggcgaggccggcatcaaggaggagcccagcctgcccttcctggcctaccccccccccagccacctgaccgccctgcacatccagcacggcttcgaccccatccagggcttcagcagcagcgaccagatcctgagccacgacaccagcgcccccagccccgccgcctgcgaggagagacacggcgccttctggagctaccagctggcccccaacccccccggcgaccccaaggacggccccatgggcaacagcggcggcaaccacgtggccgtgttctggctgtgcctgctgtgcagactgggcttctag

SEQ ID NO: 332616 - DNA, 2589 bp, Artificial Sequence
  derived and/or modified sequence
atggccaccctgaatagcgcttctacaacaggcacaacgccttcacccggccacaatgctccatccttacccagcgacaccttctcatcctctacccccagtgatcctgtgacgaaggacccgccagccgcctcatccacttcagagaatatgcggagttccgagccaggtggccagctcctggagagcgggtgcggcctggtgcccccaaaggagattggagagcctcaggagggccctgactgcggacacttccctcctaatgaccccggggttgagaaggataaagagcaggaggaggaagaggaagggctgccacctatggacctctctaaccatctcttcttcacagctggaggcgaggcgtatctggtggctaaacttagcctgcccggtgggtctgaacttctgctccctaaagggtttccctggggagaagccgggattaaggaggagccgtccctccctttccttgcgtatccaccacctagccacctgacagcccttcatattcagcacggttttgaccctatacagggcttctcttcatctgatcagatactctcccatgacacatctgctcccagccctgcagcttgtgaggagcggcacggcgccttctggtcttaccaactcgcccctaaccctccaggggacccaaaggatggccccatgggaaactcaggcgggaatcatgtcgctgtattctggttatgtttgctctgcaggctggggttctccaaaccacaggctttcatggaccacactcagtcccacggcgtcaaactgacacccgcgcaataccagggcttgtccggatctcccgcggtgctgcaggaaggggatgaaggttgtaaggctctgatcagcttcttggaacccaaattgcccgcccgcccttctagtgacattccacttgacaattcttcaaccgttaacatggaagccaacgtggctcagacagaggatggacccccagaggcagaggttcaggcactgattctcctggacgaagaggttatggccctctctcccccttcacctccaacagctacctgggacccttccccgacccaagctaaagagtccccagtggcagccggcgaagcagggccagactggttcccagaagggcaggaagaagacggtggattgtgtccccctttaaaccagtcctcaccaaccagcaaagaaggtggaacgctgcccgcccccgttggatcaccagaggatccgagcgacccaccccagccatatcgcttagcagacgattacacacctgcgccagctgcgtttcagggcctgagcctgagcagtcacatgtccttgctccactccagaaatagctgtaagactttgaaatgtcctaaatgcaactggcactataaataccaacagacgctggacgtgcatatgagggagaaacatcctgagtcgaactcacactgctcttactgctccgcaggtggagcacaccctcggctggccaggggtgaaagttacaactgtggttataaaccctataggtgtgacgtttgcaattactcaaccactactaagggtaacctttcaatccacatgcaatctgacaaacatctggccaacctgcaagggtttcaagcaggccccggtggacaagggagtcctcccgaggcgagcttgcccccaagtgccggcgacaaggaaccaaaaacgaaatccagctggcagtgcaaggtgtgcagctacgaaactaacatttcccgaaatttacgaatacatatgacatctgagaagcatatgcagaatgtgttaatgctccaccagggcctgccactggggctgccgcccggcctcatgggtcccgggcctccccctcctccaggcgccacgcctacttcccccccagaacttttccagtatttcggaccacaggccctgggccagccacagaccccactggccggacctggccttcgcccagacaaacccctggaggcccagctcttgttgaacgggtttcatcatgtgggcgcccctgcccgtaaattcccaacttcagccccagggagcctgagtccagacgcgcaccttccaccttcgcagctgttgggttcctcatccgactccttaccaacctctccaccgcccgatgattcgttgtctcttaaggtcttcaggtgcctggtgtgtcaggccttttctacggatagcctggagttgctcctgtaccactgtagtataggaaggagtctgccagaggccgaatggaaggaagtagctggagatacacaccgctgcaagctgtgttgctacggcacccagctgaaagctaactttcagctccatctgaagacagataaacacgctcagaagtaccagcttgctgctcacctccgagaaggaggcggggcaatgggcacgcctagcccggccagcctcggagacggtgcaccatacggcagtgtgtcccccttgcatctgcggtgcaatatttgtgactttgaaagcaatagcaaggaaaagatgcagttgcatgcacgcggcgccgcccacgaagagaacagccagatttacaagcgaacaggtactggactgctgataaagtag

SEQ ID NO: 332617 - DNA, 7719 bp, Artificial Sequence
  derived and/or modified sequence
atggcaactctgaattcggctagcacaaccgggacaaccccctcacccgggcataacgcgccttcactgccatctgacacgtttagctcaagcacccccagcgatccggtcaccaaggaccctcctgcagcatcaagtacatccgaaaatatgagaagcagcgaaccaggcggccagctcctggaaagcggctgcggattggtccctcctaaagagatcggcgaacctcaggaagggccagattgtggacacttccccccaaatgacccaggggtggagaaagataaggagcaggaggaggaggaggagggccttccacccatggatttgtccaatcacctgttcttcactgcggggggggaagcttacctggtggctaagctctctcttccaggcggtagcgagcttctcttaccaaagggcttcccctggggcgaggcgggcatcaaggaggaaccatccctgccattcctcgcgtatcctccccccagccacctgactgccctccacatccagcacggctttgaccccatccagggattttctagttctgatcagatcttgagtcacgacactagcgctccaagccccgcagcctgtgaagaaaggcacggcgcattctggagttaccagctagccccaaatccgcccggtgatcccaaggacggcccaatgggaaactccggaggaaatcatgtcgccgttttctggctgtgtctcctctgtcgacttggattttccaagccccaggccttcatggatcacacccagagtcacggggtcaagcttacccccgcacaataccagggtctgtctggctctccagctgtgcttcaagaaggcgacgagggctgcaaagccttaatttcatttttagagcctaagttgccagcaagaccttctagcgacattcctctggataactccagtactgtcaatatggaggcaaatgtggcacagactgaggacgggccacccgaagctgaggtgcaggcactgatactgctggacgaggaagtcatggctctcagccctccttcgccacccaccgctacttgggacccttcccccactcaagctaaagagtctcccgtggccgccggcgaagccggaccagactggtttccggaaggacaagaggaggacggcgggctctgccctcccttaaatcagtcaagtccaaccagcaaagagggtggcaccctccctgctcccgtcggcagcccagaggatcccagtgacccaccccagccttacaggctggccgacgattacacgcctgcgcccgccgcctttcaaggcctctctctcagcagtcacatgtcgctcttgcatagccgaaattcctgtaaaactctgaagtgtcctaagtgtaactggcattataagtaccagcaaaccttggacgtgcacatgagggagaagcaccctgaatccaactcccactgttcatattgttctgcaggcggcgctcaccctcgcttggctagaggggagtcctacaactgtggctataagccctacagatgcgacgtgtgcaactattccacaacgacaaagggcaatctgtcaattcacatgcaaagcgataagcatctcgcaaaccttcaaggcttccaggcagggccaggtggccagggctcccctcccgaggcctcgctcccgccatccgccggcgataaagaaccaaaaacaaaatcatcgtggcagtgtaaagtgtgttcttatgaaaccaacatcagtagaaatttaagaatccacatgactagcgagaagcacatgcagaacgtattaatgctgcaccagggtctaccgcttggcctgccgccaggcctaatgggtccaggcccgccacctccccctggtgcaaccccaaccagtcctccagagctgttccagtacttcggacctcaagcactgggtcagccgcagaccccactagccggtccaggccttaggccagacaagccacttgaggcgcagctgctgctgaacggttttcaccacgtaggagctccagctagaaagtttcctacttccgctcccggctccctatcacctgacgcccacctgcccccctctcaattgcttggaagttccagcgactccctgcccacaagccccccacctgacgactcactgtctctcaaggtgtttcgatgtctggtgtgccaagcattttcaaccgacagtctcgagcttctgctctaccattgttctatcggcaggagcctccctgaagccgagtggaaagaggtggccggagatactcacaggtgcaagctgtgctgttatggaacccagctgaaggcaaatttccagctgcacctgaaaacagataaacacgcccagaagtatcagctcgcagctcatttaagagagggagggggggccatgggaaccccttccccagcctccctcggtgacggcgccccttacggaagcgtgagcccgctgcacttgcggtgtaatatctgcgacttcgagagcaattctaaggagaaaatgcagctgcacgctcggggcgctgcgcacgaggaaaactctcagatttataaatttctactggatatggagggcgctgaggccggcgctgagctgggtctgtaccattgtctcctgtgcgcgtgggagacccccagccggttagctgtgctgcagcatctgcgaaccccagcccatcgcgacgctcaggctcaaaggcggttgcaactcctgcagaacggccccaccaccgaggagggcctggcagccttacagtccatcctctccttttcccacggtcagctgcgaactccagggaaagcacctgtcactccccttgcagagcctccaactccagagaaggatgctcaaaataagaccgagcagcttgcctcagaagagacagaaaacaaaacaggaccatccagggacagtgcgaatcagacgaccgtttattgctgcccctactgcagtttcctgagcccggaatcttcacaggtaagggcacacaccctgtcacagcacgcagtgcagcccaagtatagatgtccactgtgtcaggagcagctggtggggagaccagccctacatttccatctgtctcacctgcacaatgtagtccctgaatgcgtagagaagttgctactggttgccaccaccgttgaaatgactttcaccactaaggtgctctccgctccaaccctaagtcccctggacaatggtcaggagcctcctacacatggacctgaacctacgcctagccgggaccaggcagcagagggtccaaatctaaccccagaggcgtctcctgacccgctgccagaaccccctctggcctcagttgaggtgccggacaagccttcagggtctccggggcagccacccagccccgctccatcccccgtgcccgagccagacgcacaagccgaggatgtggctccaccacctaccatggctgaggaggaggagggaaccacgggtgagctcagatcagccgagcccgcgcctgcagattctagacacccccttacctaccggaagacaactaacttcgccctggataagtttcttgatccagctcgaccatacaaatgcacagtttgcaaagaatcttttactcagaagaatatcttgcttgtgcactataattccgtgtcccacctccacaaaatgaaaaaggcagcaattgacccctccgcccctgcaagaggagaggccggcgcccctccaaccaccacggctgcaactgataaaccatttaagtgcactgtctgcagggtttcctacaatcagagtagcactctggagatccacatgaggagtgtactccatcagactagatcccgagggactaaaacagatagtaagatcgaggggccagaaagaagccaagaagaacctaaagagggcgaaactgagggtgaggttggtactgaaaaaaagggtcccgacacttccggctttatcagtggccttcccttcctgtctccccccccaccccctctggatctacatcggtttcccgcccctttgtttacccctcctgtcctaccgccatttcctctggtgcctgagagtttattgaagctgcaacagcagcaacttttactgcctttttacttacacgatctcaaagtgggtcctaagctgactttggcaggacccgcccccgtcctgtctctgccagctgccacccctcccccaccacctcagcctcccaaggcggaattggccgaaagggagtgggagcggcctcctatggcaaaagagggcaacgaggccggcccgtcgagcccacctgatcctctaccaaatgaggccgcgcgcacggccgcgaaggctttactggagaactttggttttgagctagtgattcagtataacgagggtaagcaggctgtcccaccacctcccactccgccgcccccggaagccttaggagggggtgacaagctggcatgcggagcgtgcggaaaattgttttctaacatgctgattcttaaaacccatgaagagcacgtacaccggaggttcctcccgttcgaagcattgagtagatacgccgctcagttccgtaaatcctacgacagcctatatccccctctggctgagccaccaaaacccccagatggaagtctggattcacccgttccccacttgggccctccttttctggttccggagcccgaagccggaggtactagagctccggaggagagatctcgggcggggggccactggcctattgaagaagaggagtccagtagaggcaatctcccccccctggtgcctgccggacgcagattttccaggaccaagttcaccgagttccagacccaagccttgcaatccttcttcgaaacgtctgcgtacccgaaggatggcgaggtggagcgcttggccagcctcctcggtcttgccagccgggtggttgtggtctggttccagaatgcccgacagaaggctagaaagaacgcatgcgaagggggaagtatgcctactggcggtgggacaggtggggcctcaggatgcagacggtgccatgccacattcagctgtgtctttgaactcgtgaggcacctcaagaaatgttatgacgaccagacactggaggaggaggaggaggaggcagaacgtggcgaagaggaagaggaggttgaggaagaggaggtcgaggaggaacagggcttagaaccccccgctggtcccgaaggtcccctacctgaacctcccgacggggaagaactgagtcaggccgaagcaaccaaggcaggcggaaaggaaccagaggaaaaggccacaccttcgcccagcccagcccacacttgtgaccagtgtgcaatctccttctcctcccaagacctattgacctctcatagaaggctgcatttcctgccgtcgctgcagccatctgccccccctcaactgctagacctgcccttactggtattcggggagcgcaaccctttggtggccgcaacttccccaatgccgggcccaccactgaagcgtaagcatgaagacggaagtctcagtcccacaggatccgaagcaggcggcggcggtgaaggcgagcccccccgtgacaagaggttaagaaccacgatacttccagaacagctcgagattctgtaccgctggtatatgcaggattctaatcctacccggaagatgctggattgtatcagcgaggaggtaggtttaaaaaaacgggtggtgcaggtttggtttcagaacacccgggctagagagcgaaagggtcagtttagaagcactccaggcggggttccctcccctgccgtgaagccacctgctaccgccactccagcctctcttcctaagttcaatcttctgctgggaaaggtagatgacggtaccgggagagaagcgcccaaaagagaagccccagcctttccctacccaaccgctaccctagcatccggtcctcagccatttctgccgcccggcaaagaagccaccacccccacccccgagcctccgctccccctgctgcctccgccccctccaagtgaggaagaaggaccagaagagccccccaaagcctcccctgaatcagaggcttgtagtttgagcgccggggacctgtccgactcctccgccagctcccttgcggagcctgagagccctggcgctggcggcacttctgggggccccggggggggtaccggggttcctgatggcatggggcagaggcgctaccgcacccagatgtcgtccctccagctgaagatcatgaaagcgtgctatgaagcgtatcgaaccccaaccatgcaggaatgcgaggtcctcggagaagaaatcggcttgcccaagcgggtcatacaagtgtggttccagaatgctcgggcaaaggagaagaaggcgaaactgcaggggaccgccgccggatccacaggcggctcttcagagggcctgctagccgcacagcggacggattgtccctactgcgacgttaagtatgatttctatgttagttgtagagggcacttattctccaggcagcatctggccaagctgaaagaggctgttcgcgcccagctgaagtcagaaagcaaatgctacgatttggctccggcacccgaagcacccccagctctgaaggcaccgcctgcaacaaccccagcttcgatgccactcggggctgcccccaccctgccccggctcgcacctgtgctgctcagtggcccagctctcgcacagcctcctctgggaaacctcgcccccttcaattctggccccgcagcatccagtggacttctgggcctggccacaagcgtcctacccacgacaacggtggtgcagaccgccggacctggcaggcctttgccccaaagacctatgccagatcagaccaatacctccaccgccggaacaacagacccggtacccggacccccaacagaacccctcggagataaagttagcagcgagcggaaacctgtggctgggcccacctcttctagcaacgatgcactgaaaaacctgaaagctctcaagactaccgtccctgccctattggggggacagttcctgccatttccactccctcccgcaggtggtacagctcctcctgctgtctttggaccgcaactgcagggtgcctattttcagcagttgtatgggatgaagaaggggctctttcccatgaatcccatgatcccacagacgttgataggccttctccctaacgcactgctgcaacctccccctcagcctcctgaacctactgcgaccgcccctcccaaaccacccgagctaccagccccaggagagggagaggccggtgaagtggatgaattgctcaccggctccacaggcatctcaacagtggacgtgacacataggtacctctgcaggcaatgcaagatggctttcgacggtgaggcccccgccaccgcgcatcaaaggtcgttttgcttttttggacgaggctcaggagggagcatgccacctccattaagggtgccaatttgcacataccactgtttggcttgtgaggttctgctgagtgggagggaggccctggcctcccatcttcggtcaagcgcacatcgccgcaaagccgcccctccccaaggggggccccccatcagtattaccaatgcagccacggcagctagtgctgcagttgcattcgctaaagaagaggctcgcctccctcatactgattctaacccaaaaactaccactaccagcactcttctggcattgtag

SEQ ID NO: 332618 - DNA, 741 bp, Artificial Sequence
  derived and/or modified sequence
atggctaccctcaatagcgcctccacaactggcacaaccccctctccggggcacaacgctccgagcctcccaagcgacaccttcagtagtagcactccctctgaccctgtgacgaaggacccacctgccgcttcttccacctccgaaaatatgcgttccagcgagcctggcggacagctgctcgagtctggctgtggacttgtgcccccaaaagagataggcgaaccccaggagggacctgattgtggccactttccacctaatgatcccggagtggaaaaggacaaggagcaggaggaggaggaggaaggcctaccccctatggacctatcaaaccacctcttcttcactgccggtggggaggcttacctggtggcaaaattgtcactgcctggcggaagtgaactgctgcttcccaaaggtttcccgtggggtgaagccggtattaaggaggagccgagtctaccatttctcgcgtacccaccacctagtcacctgactgccttgcatatccagcacggatttgacccaatacaaggattttccagctccgatcagatcttatcccatgataccagcgcacccagcccagctgcttgcgaggagagacacggtgcattctggtcttaccagctggccccaaatcccccaggcgaccctaaggatgggccaatgggcaatagcggtggcaaccacgtcgccgtcttttggctttgcctcctgtgcagactgggtttttag

SEQ ID NO: 332619 - DNA, 2589 bp, Artificial Sequence
  derived and/or modified sequence
atggccaccctgaacagcgccagcaccaccggcaccacccccagccctggccacaatgcccccagcctgcccagcgacaccttcagcagcagcacccccagcgaccctgtgaccaaggaccccccagctgccagcagcaccagcgagaacatgaggagcagcgagcccggcggccagctgctggagagcggctgcggcctggtgccccccaaggagattggagagccccaggagggccctgactgtggccacttccccccaaatgaccccggggtggagaaggacaaggagcaggaggaggaggaggagggcctgccccccatggacctgagcaaccacctgttcttcaccgctggaggagaggcctacctggtggccaagctgagcctgcccggcggcagcgagctgctgctgcccaagggcttcccctggggcgaggccggcatcaaggaggagcccagcctgcccttcctggcctaccccccacccagccacctgacagccctgcacatccagcacggctttgaccccatccagggcttcagcagcagtgaccagatcctgagccatgacaccagcgcccccagccctgctgcctgtgaggagcggcacggggccttctggagctaccagctggcccccaaccccccaggggaccccaaggatggccccatgggcaacagcggcggcaaccacgtggccgtgttctggctgtgcctgctgtgccgcctgggcttcagcaagccccaggccttcatggaccacacccagagccatggagtgaagctgaccccagcccagtaccagggcctgagcggcagccctgctgtgctgcaggagggagatgagggctgcaaggccctgatctccttcctggagcccaagctgcctgcccggcccagcagtgacatccccctggacaacagcagcacagtgaacatggaggccaacgtggcccagacagaagatggccccccagaggccgaggtgcaggccctgatcctgctggatgaggaggtgatggccctgagcccccccagccccccaacagccacctgggaccccagccccacccaggccaaggagagccctgtggccgccggggaggccggccctgactggttccctgagggccaggaggaggatggcggcctgtgcccccccctgaaccagagcagccccaccagcaaggagggcggcaccctgcctgcccctgtgggcagccctgaggaccccagcgaccccccccagccctaccgcctggctgatgactacaccccagccccagctgccttccagggcctgagcctgagcagccacatgagcctgctgcacagcaggaacagctgcaagaccctgaagtgccccaagtgcaactggcactacaagtaccagcagaccctggatgtgcacatgagggagaagcaccctgagagcaacagccactgcagctactgcagcgctgggggcgcccacccccggctggcccggggggagagctacaactgtggctacaagccctaccgctgtgatgtgtgcaactacagcaccaccaccaagggcaacctgagcatccacatgcagagcgacaagcacctggccaacctgcagggcttccaggccggccctgggggccagggcagccccccagaggccagcctgcccccatctgctggggacaaggagcccaagaccaagagctcctggcagtgcaaggtgtgcagctatgagaccaacatcagcaggaacctgcgcatccacatgaccagcgagaagcacatgcagaatgtgctgatgctgcaccagggcctgcccctgggcctgcccccaggcctgatgggccctggccccccacctcctcctggggccacccccaccagccccccagagctgttccagtacttcggcccccaggccctgggccagccccagacccccctggccggccctggcctgcggccagacaagcccctggaggcccagctgctgctgaatggcttccaccacgtgggcgccccagccaggaagttccccaccagcgcccctggcagcctgagcccagatgcccacctgccccccagccagctgctgggcagcagcagtgacagcctgcccaccagccccccaccagatgacagcctgagcctgaaggtgttccgctgcctggtgtgccaggccttcagcacagacagcctggagctgctgctgtaccactgcagcatcggccgcagcctgcctgaggccgagtggaaggaggtggccggggacacccaccgctgcaagctgtgctgctacggcacccagctgaaggccaacttccagctgcacctgaagacagacaagcacgcccagaagtaccagctggccgcccacctgcgggagggcggcggggccatgggcacccccagccctgccagcctgggagatggagccccctacggctctgtgagccccctgcacctgcgctgcaacatctgtgactttgagagcaacagcaaggagaagatgcagctgcacgcccggggagctgcccacgaggagaacagccagatctacaagaggactggaacaggcctgctgatcaagtag

SEQ ID NO: 332620 - DNA, 7719 bp, Artificial Sequence
  derived and/or modified sequence
atggccaccctgaacagcgccagcaccaccggcaccacccccagccctggccacaatgcccccagcctgcccagcgacaccttcagcagcagcacccccagcgaccctgtgaccaaggaccccccagctgccagcagcaccagcgagaacatgaggagcagcgagcccggcggccagctgctggagagcggctgcggcctggtgccccccaaggagattggagagccccaggagggccctgactgtggccacttccccccaaatgaccccggggtggagaaggacaaggagcaggaggaggaggaggagggcctgccccccatggacctgagcaaccacctgttcttcaccgctggaggagaggcctacctggtggccaagctgagcctgcccggcggcagcgagctgctgctgcccaagggcttcccctggggcgaggccggcatcaaggaggagcccagcctgcccttcctggcctaccccccacccagccacctgacagccctgcacatccagcacggctttgaccccatccagggcttcagcagcagtgaccagatcctgagccatgacaccagcgcccccagccctgctgcctgtgaggagcggcacggggccttctggagctaccagctggcccccaaccccccaggggaccccaaggatggccccatgggcaacagcggcggcaaccacgtggccgtgttctggctgtgcctgctgtgccgcctgggcttcagcaagccccaggccttcatggaccacacccagagccatggagtgaagctgaccccagcccagtaccagggcctgagcggcagccctgctgtgctgcaggagggagatgagggctgcaaggccctgatctccttcctggagcccaagctgcctgcccggcccagcagtgacatccccctggacaacagcagcacagtgaacatggaggccaacgtggcccagacagaagatggccccccagaggccgaggtgcaggccctgatcctgctggatgaggaggtgatggccctgagcccccccagccccccaacagccacctgggaccccagccccacccaggccaaggagagccctgtggccgccggggaggccggccctgactggttccctgagggccaggaggaggatggcggcctgtgcccccccctgaaccagagcagccccaccagcaaggagggcggcaccctgcctgcccctgtgggcagccctgaggaccccagcgaccccccccagccctaccgcctggctgatgactacaccccagccccagctgccttccagggcctgagcctgagcagccacatgagcctgctgcacagcaggaacagctgcaagaccctgaagtgccccaagtgcaactggcactacaagtaccagcagaccctggatgtgcacatgagggagaagcaccctgagagcaacagccactgcagctactgcagcgctgggggcgcccacccccggctggcccggggggagagctacaactgtggctacaagccctaccgctgtgatgtgtgcaactacagcaccaccaccaagggcaacctgagcatccacatgcagagcgacaagcacctggccaacctgcagggcttccaggccggccctgggggccagggcagccccccagaggccagcctgcccccatctgctggggacaaggagcccaagaccaagagctcctggcagtgcaaggtgtgcagctatgagaccaacatcagcaggaacctgcgcatccacatgaccagcgagaagcacatgcagaatgtgctgatgctgcaccagggcctgcccctgggcctgcccccaggcctgatgggccctggccccccacctcctcctggggccacccccaccagccccccagagctgttccagtacttcggcccccaggccctgggccagccccagacccccctggccggccctggcctgcggccagacaagcccctggaggcccagctgctgctgaatggcttccaccacgtgggcgccccagccaggaagttccccaccagcgcccctggcagcctgagcccagatgcccacctgccccccagccagctgctgggcagcagcagtgacagcctgcccaccagccccccaccagatgacagcctgagcctgaaggtgttccgctgcctggtgtgccaggccttcagcacagacagcctggagctgctgctgtaccactgcagcatcggccgcagcctgcctgaggccgagtggaaggaggtggccggggacacccaccgctgcaagctgtgctgctacggcacccagctgaaggccaacttccagctgcacctgaagacagacaagcacgcccagaagtaccagctggccgcccacctgcgggagggcggcggggccatgggcacccccagccctgccagcctgggagatggagccccctacggctctgtgagccccctgcacctgcgctgcaacatctgtgactttgagagcaacagcaaggagaagatgcagctgcacgcccggggagctgcccacgaggagaacagccagatctacaagttcctgctggacatggagggcgctgaggccggggctgagctgggcctgtaccactgcctgctgtgtgcctgggagacccccagccggctggccgtgctgcagcacctgcggaccccagcccacagagatgcccaggcccagaggcggctgcagctgctgcagaatggccccaccacagaggagggcctggccgccctgcagagcatcctgtccttcagccacggccagctgcggaccccaggcaaggcccctgtgacccccctggccgagccccccaccccagagaaggatgcccagaacaagacagagcagctggccagcgaggagacagagaacaagacaggccccagccgggacagcgccaaccagaccaccgtgtactgctgcccctactgcagcttcctgagccctgagagcagccaggtgcgggcccacaccctgagccagcacgctgtgcagcccaagtaccgctgccccctgtgccaggagcagctggtgggccggcctgccctgcacttccacctgagccacctgcacaacgtggtgcctgaatgtgtggagaagctgctgctggtggccaccaccgtggagatgaccttcaccaccaaggtgctgagcgcccccaccctgagccccctggacaatggccaggagccccccacccacggccctgagcccacccccagccgggaccaggccgctgagggccccaacctgaccccagaggccagcccagaccccctgcctgagccccccctggcctctgtggaggtgcctgacaagcccagcggcagccctggccagccccccagccctgcccccagccctgtgcctgagccagatgcccaggccgaggatgtggcccccccacccaccatggccgaggaggaggagggcaccaccggggagctgcggtctgctgagcccgccccagctgacagccgccaccccctgacctacaggaagaccaccaactttgccctggacaagttcctggaccctgcccggccctacaagtgcaccgtgtgcaaggagagcttcacccagaagaacatcctgctggtgcactacaacagcgtgagccacctgcacaagatgaagaaggccgccatcgaccccagcgccccagcccggggggaggccggggccccacccaccaccacagctgccacagacaagcccttcaagtgcaccgtgtgccgggtgtcctacaaccagagcagcaccctggagatccacatgaggtctgtgctgcaccagaccaggagccggggcaccaagacagacagcaagattgagggccctgagaggagccaggaggagcccaaggagggggagacagaaggagaggtgggcacagagaagaagggccctgacaccagcggcttcatcagcggcctgcccttcctgagccccccacctccacccctggacctgcaccgcttccctgcccccctcttcaccccacctgtgctgccccccttccccctggtgcctgagagcctgctgaagctgcagcagcagcagctgctgctgcccttctacctgcatgacctgaaggtgggccccaagctgaccctggccggccctgcccctgtgctgagcctgcctgctgccaccccacctcctccaccccagccccccaaggccgagctggccgagcgggagtgggagaggcctcccatggccaaggagggcaatgaggccggccccagcagccccccagaccccctgcccaatgaagctgccaggacagctgccaaggccctgctggagaactttggatttgagctggtgatccagtacaatgaaggcaagcaggccgtgcccccaccacccaccccacctcctcctgaggccctgggcggcggggacaagctggcctgtggggcctgtgggaagctgttcagcaacatgctgatcctgaagacccatgaggagcacgtgcaccggcgcttcctgccctttgaggccctgagccgctatgctgcccagttcaggaagagctatgacagcctgtacccacccctggccgagccccccaagcccccagatggcagcctggacagccctgtgccccacctgggcccccccttcctggtgcctgagcctgaggccggcggcacccgggcccctgaggagaggagcagagctgggggccactggcccatcgaggaggaggagagcagccggggcaacctgccccccctggtgcctgctggaagacgcttcagcaggaccaagttcacagagttccagacccaggccctgcagagcttctttgagaccagcgcctaccccaaggatggagaggtggagcggctggccagcctgctgggcctggccagccgggtggtggtggtgtggttccagaatgcccggcagaaggccaggaagaatgcctgtgagggcggctccatgcccaccggcggcggcaccggcggggccagcggctgccgccgctgccacgccaccttcagctgtgtgtttgagctggtgcgccacctgaagaagtgctatgatgaccagaccctggaggaggaggaggaggaggccgagcggggggaggaggaggaggaggtggaggaggaggaggtggaggaggagcagggcctggagcccccagctggccctgagggccccctgcctgagcccccagatggagaggagctgagccaggccgaggccaccaaggccggcggcaaggagcctgaggagaaggccacccccagccccagccctgcccacacctgtgaccagtgtgccatctccttcagcagccaggacctgctgaccagccaccggcggctgcacttcctgcccagcctgcagcccagcgccccaccccagctgctggacctgcccctgctggtgtttggagagaggaaccccctggtggccgccaccagccccatgcctggcccccccctgaagaggaagcatgaagatggcagcctgagccccaccggcagcgaggccggcggcggcggggagggggagcccccccgggacaagaggctgcggaccaccatcctgcctgagcagctggagatcctgtaccgctggtacatgcaggacagcaaccccaccaggaagatgctggactgcatcagcgaggaggtgggcctgaagaagagggtggtgcaggtgtggttccagaacacccgggcccgggagaggaagggccagttccgcagcaccccaggaggagtgcccagccctgctgtgaagcccccagccacagccaccccagccagcctgcccaagttcaacctgctgctgggcaaggtggatgatggcaccggccgggaggcccccaagcgggaggccccagccttcccctaccccacagccaccctggccagcggcccccagcccttcctgcccccaggcaaggaggccaccacccccaccccagagccccccctgcccctgctgcccccacctcctccttctgaggaggagggccctgaggagccccccaaggccagccctgagagcgaggcctgcagcctgtctgctggggacctgagtgacagcagcgccagcagcctggccgagcctgagagccctggggccggcggcaccagcggcggccctgggggcggcactggagtgcctgatggcatgggccagaggcgctaccgcacccagatgagcagcctgcagctgaagatcatgaaggcctgctatgaggcctaccgcacccccaccatgcaggagtgtgaggtgctgggggaggagatcggcctgcccaagagggtcatccaggtgtggttccagaatgcccgggccaaggagaagaaggccaagctgcagggcacagctgctggcagcactggaggcagcagcgagggcctgctggccgcccagaggacagactgcccctactgtgatgtgaagtatgacttctacgtgtcctgccggggccacctgttcagccggcagcacctggccaagctgaaggaggccgtgcgggcccagctgaagtctgagagcaaatgttatgacctggccccagcccctgaggcccccccagccctgaaggcccccccagccaccaccccagcctccatgcccctgggcgccgcccccaccctgccccggctggcccctgtgctgctgagcggccctgccctggcccagccccccctgggcaacctggcccccttcaacagcggccctgctgccagcagcggcctgctgggcctggccacctctgtgctgcccaccaccaccgtggtgcagacagctggccctggccggcccctgccccagaggcccatgccagaccagaccaacaccagcacagctggcaccacagatcctgtgcccggccccccaacagagcccctgggggacaaggtgtcctctgagaggaagcctgtggccggccccaccagcagcagcaatgatgccctgaagaacctgaaggccctgaagaccaccgtgcctgccctgctgggcggccagttcctgcccttccccctgcccccagctgggggcacagcccccccagctgtgtttggcccccagctgcagggcgcctacttccagcagctgtatggcatgaagaagggcctcttccccatgaaccccatgatcccccagaccctgattggcctgctgcccaatgccctgctgcagcccccaccccagcccccagagcccacagccacagccccacccaagcccccagagctgcctgcccctggagagggggaggccggggaggtggatgagctgctgaccggcagcacaggcatcagcacagtggatgtgacccaccgctacctgtgccggcagtgcaagatggcctttgatggagaggccccagccacagcccaccagaggagcttctgcttcttcggccggggcagcggcggctccatgcccccacccctgcgggtgcccatctgcacctaccactgcctggcctgtgaggtgctgctgagcggccgggaggccctggccagccacctgcggagcagcgcccacaggaggaaggccgccccaccccagggcggcccccccatcagcatcaccaatgctgccacagctgccagcgctgctgtggcctttgccaaggaggaggcccggctgccccacacagacagcaaccccaagaccaccaccaccagcaccctgctggccctgtag

SEQ ID NO: 332621 - DNA, 741 bp, Artificial Sequence
  derived and/or modified sequence
atggccaccctgaacagcgccagcaccaccggcaccacccccagccctggccacaatgcccccagcctgcccagcgacaccttcagcagcagcacccccagcgaccctgtgaccaaggaccccccagctgccagcagcaccagcgagaacatgaggagcagcgagcccggcggccagctgctggagagcggctgcggcctggtgccccccaaggagattggagagccccaggagggccctgactgtggccacttccccccaaatgaccccggggtggagaaggacaaggagcaggaggaggaggaggagggcctgccccccatggacctgagcaaccacctgttcttcaccgctggaggagaggcctacctggtggccaagctgagcctgcccggcggcagcgagctgctgctgcccaagggcttcccctggggcgaggccggcatcaaggaggagcccagcctgcccttcctggcctaccccccacccagccacctgacagccctgcacatccagcacggctttgaccccatccagggcttcagcagcagtgaccagatcctgagccatgacaccagcgcccccagccctgctgcctgtgaggagcggcacggggccttctggagctaccagctggcccccaaccccccaggggaccccaaggatggccccatgggcaacagcggcggcaaccacgtggccgtgttctggctgtgcctgctgtgccgcctgggcttctag

SEQ ID NO: 332622 - DNA, 2589 bp, Artificial Sequence
  derived and/or modified sequence
atggccaccctgaacagcgccagcaccaccggcaccacccccagccccgggcacaatgcacccagcctgccatctgacaccttctcttcttcaaccccgtccgaccccgtgaccaaggaccctcctgctgcctcaagtacgagtgagaatatgcgctcaagcgaaccgggcggtcaattgctggaatcaggttgcggccttgtaccgccgaaggagatcggggagcctcaggaagggcccgactgcggccactttcccccaaatgatcctggcgtagagaaggacaaagaacaagaggaggaggaggaaggcttgcccccgatggatctgagcaatcacctcttctttaccgcggggggcgaagcctacttggtggccaaactcagcttgccaggcggcagtgagctgctgctcccaaagggcttcccatggggggaagctggcattaaggaagagcctagcttacctttcctagcttatcccccaccatcccacctgactgccctccatatccagcacgggtttgaccccatccaaggattttcttcctcagaccagattctgtcacatgacacctctgctccctctcctgccgcttgtgaagagaggcatggggctttttggtcttaccagttagctccgaacccacccggtgatccaaaggacggcccgatgggcaactctggaggaaaccacgtcgccgtcttctggctatgtttactctgtcgtttagggttttcaaagcctcaggcatttatggatcatactcaatcccacggagtaaagctcactcccgctcagtaccaaggactttcagggagtcccgcagtacttcaggaaggtgacgaaggatgtaaggctcttattagcttcctggagccaaagttgccagcacgaccttcatcggatattcctttggacaattccagcaccgtgaatatggaagccaatgtcgctcagaccgaggacggcccgccggaggcagaggttcaggccctcatcttgctcgacgaggaggtgatggctctcagtccacccagccctcccactgctacatgggaccccagccctactcaagctaaggaatctcccgtcgcagctggggaggctggtccagactggtttcctgagggacaggaggaggatggggggctttgtccaccacttaaccagtctagtccaacttcaaaagagggcggtaccttgccagcccccgtcgggagccctgaggacccgtccgatcctccccagccttatagacttgcggatgattacacccctgccccagcagctttccagggactatccttgagttcccacatgagccttttgcactccagaaacagctgtaagaccttgaaatgtcctaagtgtaactggcactacaaatatcagcagacactcgatgttcatatgcgggaaaagcacccagagtccaatagtcattgtagctattgcagcgcgggaggggcccaccctaggcttgctaggggtgagtcttacaattgcggctataaaccttaccgttgtgacgtatgcaattattcaaccaccaccaaagggaacctgtctatccatatgcagagtgataaacacttggcgaacctgcagggcttccaagcaggcccaggaggccaggggtccccccctgaggcttccctcccaccatccgctggggataaagagcccaagaccaagagtagctggcagtgtaaggtgtgttcctacgaaactaatatatctaggaacctcagaatacacatgacatccgagaagcacatgcagaatgtgcttatgctgcaccaggggctacctttaggccttcctcctggattaatgggcccgggacccccccccccacccggagccacccctacttcacctccagaattattccagtactttggaccccaagcattggggcaaccacagacccccctggcgggacccggattgaggcccgataaaccactggaggcccaactgctgttgaatggtttccatcatgtgggggcaccagcaaggaagttccccacttctgcacccgggagcttgtcgccagatgctcatttgcctccctctcagctgttaggctccagctccgatagccttccaacttcacccccacccgatgactccttgtcactcaaggtgttcaggtgcctggtctgtcaggcattctccactgattccctggagctgcttctctaccactgttcaattggtcgcagtctgcccgaagctgagtggaaggaagtggcgggcgacacacacaggtgtaagttgtgttgttatggaacccagctgaaagctaattttcagttgcatctgaaaactgataaacatgcacagaagtatcagctagccgcacacctgcgtgaaggaggtggggccatgggcactcctagcccggcgagcctgggcgacggcgcgccctatggttcggttagccccctacacctgcgttgcaacatctgtgatttcgagtctaacagtaaggagaagatgcagctccatgcacgcggggccgctcacgaggaaaactcgcaaatctataaaaggacagggacgggactgctaatcaaatag

SEQ ID NO: 332623 - DNA, 7719 bp, Artificial Sequence
  derived and/or modified sequence
atggccaccctgaacagcgccagcaccaccggcaccacccccagcccaggtcataacgccccaagcctaccgagcgatactttctccagttcgactccgagcgacccggtgaccaaggatcctccagccgctagttcaacctccgagaatatgaggagcagtgaacccggcggacagttgttggagagcgggtgcggtcttgtgcctcccaaggagatcggagaaccccaggagggacccgactgtggccactttccccccaacgatcccggtgtagagaaggataaagagcaggaggaagaggaagagggcctgcccccaatggacctgtccaaccatctgttttttaccgccggaggcgaggcttatcttgtggccaagttgagtctcccgggaggttccgagctactgcttcccaaaggatttccatggggtgaagctggaatcaaggaggagccaagcctgcccttcttggcctacccccctccaagccaccttacggctctccatattcagcatgggtttgatccaatccaaggctttagcagctcagaccagattctgtcacatgataccagcgccccctcccctgcagcctgcgaggaaaggcacggggctttctggagttatcagcttgcaccaaacccccccggagaccctaaggatggacccatgggaaactcaggcggcaatcacgtggccgtcttttggctttgcctcctatgcagacttggattcagtaaacctcaggcatttatggaccatacccagtcccatggggtgaaactgacacccgcccagtaccagggcctttccggatctcccgccgtgctgcaggagggggatgagggctgcaaggctctcatcagtttcctggagcctaagctgcccgcgcgtccttcctcagatatccctctcgataattcttctactgtcaatatggaggccaatgtggctcagaccgaggatggacctcccgaagccgaggtccaggctcttatactcctagacgaagaagtaatggccctgtctccaccctctccccccactgctacgtgggacccatctcccacgcaggcgaaagagtcccctgttgccgccggcgaggccgggcccgattggttcccagaagggcaggaggaagacgggggactgtgccctcctctcaaccagagctcaccaacctctaaagagggcggtacactccccgctcccgtgggaagtcctgaggacccttcagaccctccccagccctaccggctcgctgacgactatactccagcacccgccgcctttcagggattgtctcttagcagtcatatgagtcttctgcacagccggaattcatgcaaaaccctcaagtgtcctaagtgtaattggcattataagtatcaacagacgctcgacgtgcacatgcgggagaaacacccagaaagcaatagtcactgttcctattgttctgccggtggagcgcacccaagactggccagaggtgagtcctacaactgcggctacaagccttaccgatgtgatgtttgtaactactcaactacaacaaagggtaatttgtcaattcacatgcagtctgacaaacacctggccaaccttcagggatttcaagcggggcctggtggacaaggttctcctcccgaggcctccctgccaccatctgcgggggataaggaacctaaaacgaagtcttcttggcagtgtaaggtgtgcagttacgagaccaacatttcaaggaatcttcgcatccacatgaccagtgaaaagcatatgcagaatgtgctgatgctgcaccagggactgccattggggttgcctccaggactcatgggaccaggcccccctccacctccaggcgcaaccccaactagtccacctgaactgtttcagtatttcggacctcaggctttaggccagccccaaactcctctcgctggccctggactcaggccagacaagccacttgaagctcaattgctgttaaatggtttccatcacgttggtgcccccgcccgcaagtttcccacttccgctcctggcagtctctcccctgatgcccacctgcctccaagccagctcttgggcagcagctccgattctttgccgacttcccccccgcctgacgactcactgagcctgaaggtgtttcggtgcctagtgtgccaagcgttttccaccgatagtctcgagctgctgctctaccattgttccatcggaaggtcactacctgaagctgagtggaaagaggtggctggcgacacccacaggtgtaagctgtgctgctatggtactcaactcaaggctaactttcaactgcacctgaaaactgacaaacatgctcagaagtaccaactggccgcacatctgcgggagggaggcggcgccatgggaactcctagccctgcttccctcggggatggcgcaccctatggatccgtgtcacccctccatctccgatgcaatatctgcgacttcgagtcgaactccaaagaaaagatgcaattacatgctcggggagctgctcacgaggagaacagccagatttataaattcctgctcgatatggagggagccgaagccggggccgaactggggctctatcattgcctgctgtgcgcatgggagacaccgtcccgactagctgtgctacagcatttacgcacacctgcccatcgcgacgcccaggcccagagacggcttcagctgttgcaaaatggccccacaacagaggagggcttggcagctctgcaatccatcctgtccttcagccatggccagttgcggaccccaggtaaagcacccgtaaccccattggctgagccgcccacccccgaaaaggatgcgcagaacaagactgagcaactcgcctctgaggagactgagaacaagacaggcccctccagggattctgctaatcaaacaacagtttactgttgtccatactgcagtttcctgtcaccagaaagttcccaggtgagggctcacacactgtctcagcatgctgtgcaaccaaagtatcgatgccccctctgccaggagcagctcgttggccggcccgccctgcacttccatcttagtcacctgcacaatgtggtcccagagtgtgtcgagaagcttctgctggtcgccaccactgtggaaatgactttcactaccaaagtgttgtccgcccctacactctcccccttggataacggtcaagagcccccaactcatggaccagaacctaccccatcaagggaccaggccgcagaggggcctaacctcactcctgaggccagtccagaccctcttccggaacccccccttgcatccgtcgaggtacctgacaagccttccggatcacccgggcagccaccttcgcctgctccgagcccagttccggagccagatgctcaggccgaggatgtggccccaccacctacaatggctgaagaagaagaaggaacgaccggcgagcttcgttctgcagaacccgcaccagccgactcaaggcatcctctgacatataggaaaactaccaacttcgcacttgataagttccttgatccagcgcggccatataaatgcactgtttgcaaagaaagctttacccaaaagaacatcctcctggtccattataactccgtctcccatctgcacaaaatgaagaaggctgctatcgacccctctgcacccgcacggggggaagccggtgcaccccccactaccactgcagccaccgataagccattcaagtgcacagtgtgccgggtctcatataatcagagcagtacgcttgagatacacatgagaagcgtcctgcatcagactaggagtagaggaaccaagacagatagcaagatcgaaggacccgagaggagtcaggaagaacccaaggagggggagaccgagggggaagtcggaaccgagaagaaaggccctgatacaagtggctttatcagtgggttaccttttttatctccacccccacctccactcgacctacaccgctttcccgctcccctgtttacgcccccagtcctgccaccattccctctcgtcccggaaagcctgctgaagctccagcaacaacaactgttacttcctttctacctccacgacctgaaggtcggacccaaacttacactcgccggcccggcccctgtcctttctctccccgccgctacccccccaccacccccacagcctccaaaggccgaactagctgagcgggaatgggaaagacctcctatggcaaaggaagggaacgaagccggtccttcttcccctccagacccgctcccaaacgaggccgcccggacagcagcgaaagctctactcgagaacttcggctttgaactggtgatccaatataatgaaggaaagcaggccgtgccccctccccccaccccgcccccgcctgaagccttaggcggtggtgacaagctggcctgcggcgcctgtggaaaactgtttagtaatatgctgattttaaagacccatgaggagcacgtccaccgcaggtttctgcccttcgaggcgctctcaaggtacgctgctcagtttcggaaaagctatgactcgctctatccccctttggcagaaccccctaagcccccagacggaagtttagatagtcctgttcctcatttgggcccaccatttttggttcccgagcccgaggccggcggtactagagctccagaagagcggagccgggcagggggccattggcccattgaggaggaagagagctctcggggtaacctgccgcctcttgtgcccgccgggagacgattttctcgaaccaaatttactgagtttcaaacccaggcccttcagagtttctttgagaccagcgcttaccctaaagacggcgaggtggaacgcctggcttcactgttgggtctggcttccagagtggttgtggtgtggtttcagaacgctaggcagaaagccagaaagaacgcatgcgaaggcgggtcgatgcccacagggggcggaactggaggggcatccgggtgccgcaggtgccacgccactttctcttgtgttttcgaactcgtccgccatctcaagaagtgttacgatgaccagaccttggaggaggaagaggaagaagccgagcgaggcgaggaagaggaagaggtggaagaagaggaggtcgaggaggaacaggggctagagccaccagcagggcctgaggggcctctgccagagccccctgatggggaggaactgagccaagccgaagctacaaaggcgggagggaaagagccagaagaaaaggccaccccgagcccttcccccgcccatacctgtgatcagtgtgctatatcattctcatctcaggacctgctgactagccatcggcggttacacttccttccctccctacagccaagtgcacctccccagcttctcgacctgccactgttggtgttcggcgagagaaatccgctcgtagccgcgacatcaccaatgcccggcccgccacttaagcgtaagcacgaggatggaagcttgtctccgacgggctctgaggctggcgggggcggggagggcgagccccctagggacaaacggctcagaacaacaatcctcccagagcaactcgagatcctctaccggtggtatatgcaggacagcaatccaaccaggaaaatgttagattgtatcagtgaggaggttgggctgaaaaaacgtgtggtgcaggtgtggtttcagaacaccagagcccgcgaaaggaagggtcagtttaggagcacgcccggaggcgtcccgtcccccgccgtgaaaccacccgccaccgcaacaccagcaagtctccctaagttcaatttgttactcggaaaggtggatgatggcacaggcagagaggctcctaagcgcgaggcacccgccttcccataccctacagccacactggcgagcggaccccaacccttcctgccacccggaaaagaggcgacgactcctacccccgagcctcccctgcccctgctgcctcctcctcctcctagtgaggaagaaggccctgaggaaccgccaaaagcttcgcccgaatctgaggcctgcagcctttccgcaggcgatctctcagactcttccgcaagcagcctggctgaacccgaaagcccaggagccgggggtacttctggcggtccggggggaggaacaggcgtgcccgatggcatgggacagcgtaggtatcgcacccagatgagctccctgcagctcaagatcatgaaggcatgctatgaggcttataggacccctacgatgcaggaatgcgaagtgctcggtgaagagattggtttaccgaaacgcgtgatccaggtgtggttccaaaatgcgcgggctaaggagaagaaggccaaactccagggtactgccgcaggcagcaccggcggatcttcagaaggccttctagcagctcagaggacggattgtccatattgcgacgtcaaatacgatttttacgtttcctgtagaggtcaccttttttccagacagcacctcgcgaagttgaaagaagcggtgcgagcgcaactgaaaagtgaatccaaatgttacgatctagctccagccccagaggctcctcctgccctgaaagcccctcccgcaacaacccccgccagcatgcccctcggcgcggctccaacattgcctcggctggcgccggtgttgctgtctggcccagcactggcccaaccccctcttggaaaccttgcacctttcaattccggaccagctgcatcaagcggactcctaggcctcgcgacaagcgtactgccaaccacaactgtagttcagaccgccggacctggcagaccccttccacagaggcctatgcccgaccagacaaacacatctaccgctgggacaactgacccggtgcccggcccgcccacagaacctctgggcgataaagtgtcatctgaacgcaagcctgtggctgggcccactagtagctcgaacgatgccctcaagaatctgaaagctctgaagacaaccgtcccagcactcttaggcggtcagtttttaccgttccccctcccacctgctggtgggactgctccgcccgctgtgtttggcccccagctccaaggagcctatttccagcaattatatggtatgaagaaaggcctgtttcctatgaatcctatgatcccccaaacactgattggactgttgccaaatgccctcctgcagccgcccccacagcccccagaacctaccgccacagccccacccaagcctcccgagctgccagcacctggcgagggcgaggccggcgaggtggatgagcttttgacaggatccacaggcatctcaacagtggatgtgacccaccgctacttgtgtagacagtgcaaaatggctttcgacggagaagcacccgccactgcccaccagcggtcattttgcttctttggccgggggtcagggggatctatgccgcctcccctgagggtaccaatttgcacctaccattgcctcgcatgcgaggtactgttgagcgggcgtgaggccctcgcttctcatctccgctcatctgcgcaccgcaggaaggctgcacccccacaaggcgggccccccatcagcatcaccaatgctgccacggctgcctctgcagccgtcgcatttgcaaaagaggaggccaggcttcctcatactgacagtaaccccaagaccactaccacatctaccttgttggctctctag

SEQ ID NO: 332624 - DNA, 741 bp, Artificial Sequence
  derived and/or modified sequence
atggccaccctgaacagcgccagcaccaccggcaccacccccagccccggccacaacgcccctagtctcccgtccgatactttttcctcctcaaccccttccgatcccgtcaccaaagacccacccgccgcgtcatcaacatcagaaaacatgagaagtagtgagcccggcggacagctgcttgagagcggatgcggattggtcccacctaaggaaattggcgaaccccaggagggacctgactgtgggcatttcccacctaacgaccccggcgtggaaaaagataaggaacaggaagaagaggaagaaggacttcccccaatggatctcagcaatcacctctttttcaccgccggtggagaggcatatctggtggctaaactgagccttcccggtggctccgaacttctgctgcccaagggcttcccgtggggggaggctggaatcaaggaagagccatccctcccctttctggcatatcccccaccaagtcacctcacagctttgcatatccagcacggattcgacccaatccagggattctccagtagtgaccagattctgagtcacgatacttccgctccaagccccgcagcatgcgaggagaggcatggagccttctggtcctaccagctcgcacccaacccgcctggtgatcctaaggatgggcctatggggaacagcgggggcaatcatgtggccgtgttctggctgtgtctgctgtgcaggcttgggttttag

SEQ ID NO: 332625 - DNA, 2589 bp, Artificial Sequence
  derived and/or modified sequence
atggcaaccctcaattccgcttctactaccggcactacaccctccccaggtcacaacgctccctccttgccatcagacaccttcagttctagcactccttccgaccctgtgaccaaggaccccccagctgcgagttccacttccgagaacatgcgatcctcagagcctggtggacagttgctggagtccggatgtggactggtgccaccaaaagaaataggcgagcctcaggaaggccctgactgcggccactttcccccaaacgaccctggcgtagagaaggataaggagcaggaggaggaagaggaggggctaccaccgatggacctctccaaccacctgttctttacagcaggtggggaggcctatctggtcgctaagctgtccctgcctgggggttctgagctactccttccaaaaggctttccatggggggaagccggaattaaggaagagcctagtttaccgtttctggcatacccccctccttcccatctgaccgcactccacatacagcacggtttcgatcctatacagggtttttcttccagcgaccagatcctgtcacatgacactagtgccccttcacccgcagcttgtgaagaaaggcacggagctttctggagttaccagttggcccctaatccacccggagatccaaaggatggccctatgggcaatagcgggggtaaccacgtagccgtcttctggttgtgcctgctttgtcggctggggttttctaagccgcaggcattcatggaccacacccagtcccacggggtcaaactgaccccagcacagtaccagggactctctgggagtccggctgttctgcaggagggggatgaaggctgcaaggccttaatttccttccttgagcccaagctgcctgccaggccttcctcagacatccctttagacaacagttctactgttaatatggaagctaatgtagcacagacggaggacggtcccccagaggccgaagtccaggctctcatactgttggacgaagaagttatggccctatcccctccctccccacccacagctacttgggacccgtctcccacccaggcgaaggaatcaccggttgcggcaggagaggctggcccagactggttcccggaggggcaggaagaagatggtggcttgtgccctccgcttaatcagtcctctcccacctcgaaagaggggggtactttgccagccccagtcggcagtcctgaagacccatcagaccctccgcagccttataggcttgcggatgactatacaccagctcccgcagctttccaaggcctgagtcttagtagccatatgtcccttctgcacagtcggaatagttgtaaaactctgaagtgcccgaagtgcaattggcactacaagtaccaacagaccctggacgtccatatgcgggaaaaacatcccgagtccaacagccattgttcgtactgcagtgcaggcggtgctcatccgcgtcttgcaaggggagaaagctacaattgtggctacaagccctatcgctgcgatgtgtgtaattacagcacaacaacaaaagggaacttatccatccatatgcagtcagacaagcaccttgcaaacttacaggggtttcaggcaggccctgggggacaaggatcaccaccagaggcatctctgccaccaagcgcgggagataaagagccaaagacaaagagctcttggcagtgcaaggtgtgttcgtacgaaaccaatatatcccgtaacctgcgcatccacatgacgtcagagaagcatatgcagaacgtcctgatgttgcaccagggcctgccactcggcctgcctcccggtctgatggggcctggcccaccccctcctcccggagctacccccacttccccaccagaactatttcagtacttcggtccccaggccctgggtcagccgcagactccccttgccggaccaggcctccggcctgataaaccacttgaagcccagttgctgttaaatggcttccatcatgtcggagcaccagctaggaagtttccaacttccgccccaggaagcctgtcccccgacgcgcatctgccacccagccagttgctggggtcttccagtgactcacttcctactagcccgcctccagatgatagcctgagcctcaaagttttccgttgcctggtttgccaggccttctccacagattcactagaactgctcctctatcactgttctatcggccgaagcctcccagaagctgagtggaaagaagttgctggcgatactcaccgatgcaaactatgctgttacggaacacagctaaaagcaaactttcagctccacctgaagacagataagcacgcacaaaaataccagctggccgcacaccttcgggagggaggtggcgcaatgggcaccccaagtcccgctagccttggtgatggggctccttacggatctgtttcacccctgcatctccggtgcaacatttgcgatttcgagagcaacagtaaagagaaaatgcagctgcacgcacgaggcgctgcacacgaggagaacagccaaatatacaagaggacgggaacggggctattaattaagtag

SEQ ID NO: 332626 - DNA, 7718 bp, Artificial Sequence
  derived and/or modified sequence
atggcaaccctgaactctgcctcaaccaccggaaccacaccatctcctggccataacgccccaagcctcccctcggacacattcagcagctcaacccccagcgatccagtgaccaaggacccacctgccgcaagtagtacctctgagaacatgcggagcagcgaacccggaggacaactgttggagtcaggttgtggtcttgtgccaccaaaggagataggagagccccaggaaggtcctgattgtggccactttcctcccaatgatccaggagtggaaaaggacaaggagcaggaggaagaggaggagggactacctcccatggacctgtccaaccacttatttttcaccgccggtggggaagcatatctggtggctaaattaagtttgccaggtggtagcgaactccttctcccaaaggggtttccctggggggaggccggaatcaaagaagaacccagtctcccatttttggcatacccaccaccctcgcacctgactgccctgcacattcagcacggatttgaccctatccagggatttagctcctcggatcagattttgagccacgacactagtgccccaagtccggcagcctgcgaggagcgccacggagctttctggagctatcagctggctcccaaccctcccggtgaccctaaggacggccctatggggaatagtgggggaaatcacgtggcagtgttttggctttgcctgctgtgccggttaggcttctcgaagccccaggctttcatggaccacacccagtcgcacggggtaaaactcacccccgcacagtaccagggactgtctggcagcccagccgtcctgcaggagggcgacgaaggttgtaaggcactcatttctttcttagaaccaaagctgcccgctcgtcccagttcagatatccccctggacaatagttctactgttaacatggaagccaacgtggcccagacagaggacggtcccccagaagcagaggtccaagctttgatcctcctggacgaggaggtgatggcactgtctcctccatcacccccaaccgcaacatgggatccctctccaacacaggctaaggaaagccccgtcgctgccggtgaggccggaccggactggttccctgaggggcaggaggaggatggcggtctgtgccccccactgaaccagagttcgcctacatctaaggaagggggtacattaccagcccctgtcggtagtcccgaggacccatccgaccccccacaaccctaccgcctcgcggatgattacacccctgctccagcggcatttcaagggctatccttaagctcgcatatgagcctgctgcatagccgcaactcgtgtaaaacactcaagtgccccaaatgtaactggcattacaaataccaacaaactctggacgttcacatgcgcgaaaagcacccggagtctaactctcactgctcctattgttcagccggtggtgctcaccccaggctcgccagaggcgagagttacaattgtggttataagccgtatcggtgcgacgtatgcaactactcaaccactacaaaggggaatttatctatccacatgcagagtgacaagcacctcgccaatctccaagggtttcaagcgggacctgggggtcagggttccccgcctgaggcttcccttccgcctagcgctggcgacaaggaaccgaagaccaagagctcatggcagtgtaaggtttgctcttacgagacaaatatatctcggaacctccgcatccacatgacttcggagaagcatatgcagaatgtgctgatgcttcatcagggtctgcccttgggccttccccctgggctgatgggaccaggcccaccccctcctcctggcgcaacacccacctctccacccgaactgttccagtatttcggaccccaggctctggggcagccccaaacacctctggctggccctggattacgcccagataagccactggaagctcagctacttctgaatggattccaccacgtaggcgcacctgctcggaaatttcctacgagtgccccagggagtctgtctcctgacgcccacctccctccctcacagttgctgggctcaagttctgatagccttccaacgtcccctccacctgacgatagcttgtctttgaaggtatttcggtgtctggtgtgccaggccttttctacagatagcctggagttgctgttatatcactgcagtatcggaaggagtctcccggaagctgaatggaaagaagtggccggagacacacaccgatgcaagctttgttgctacggcacccagctgaaagcgaattttcaacttcatttgaagacagacaagcacgcccagaaataccagctagcggctcatctgagagagggaggcggagcaatgggtacaccctcccccgctagcctcggggatggggctccttatggaagcgtgtctccactgcatcttcggtgtaacatttgtgattttgagtcaaactccaaggagaaaatgcagttacacgccaggggagcagcacacgaagagaattcccaaatctacaagttcctcctggacatggagggcgctgaagcaggtgctgagcttgggctttatcactgcctgctgtgtgcctgggagacaccctctcgcctagcagtacttcagcatctgcgaactcctgcacaccgggatgcacaagcgcaaagacgtctgcaactcctccagaacggccctaccacggaagagggtctggcagccttgcaatcaatcctttcattcagccatggacaattacgtacccctggcaaagccccagttacccctctggcagaaccaccaactcccgaaaaagacgcacaaaacaagacagaacagttggctagcgaggagaccgaaaacaagactggccctagcagggatagcgcaaatcagaccacagtgtactgttgtccatactgttcttttctgtcaccagaaagcagccaggtgcgggcacatactcttagccagcatgcggtacagcctaaataccgctgccctttgtgtcaggaacagctcgtgggtcgacctgctcttcatttccatttgtcccatctgcacaacgtagtgccagaatgcgtggagaaactcttactggtggcgaccacggtggaaatgaccttcacaaccaaggtgctgtctgcccctactctgagccccctcgataatggccaggagcctccaacgcatggacctgaacccactcccagtcgtgaccaggcggcagaagggcctaacctcacgcctgaagcaagtcctgatccactgcccgagcccccacttgcgtccgtagaagtcccagacaagccgtcagggtctccagggcagccacccagtcccgcaccatcccctgtgccggaacctgatgctcaagccgaagatgtggcccctcctcccactatggccgaggaagaggagggaacaaccggagagttgcggagcgccgaaccagctccagcagactcacgacaccctttgacctaccgtaagaccacaaactttgccctggataagttcttagaccccgctagaccctacaagtgtactgtgtgcaaagagtcttttacccagaagaatatccttctggtgcactacaactccgtttcacacctacacaaaatgaagaaggctgctatagatccctctgcccctgccagaggtgaagctggcgctcccccaactaccactgcagctaccgataagccctttaagtgcactgtgtgcagagtctcttacaatcagagcagcacgcttgagatccacatgagaagtgtgctgcaccagacgcgctcccgtggtacaaaaacagactcaaagatagaaggaccggagaggagccaggaggaaccaaaggagggagaaacagaaggtgaggtcggcaccgagaagaaaggaccagatacatcgggctttatcagcgggctccccttcctaagcccccctcctcccccacttgatctgcatcggtttcctgctcccctatttacgccacccgttttacccccatttcctctggttccagaatcactgctcaagctgcaacagcagcagctattgctgcctttttatctgcatgatctcaaggtgggcccaaaactaacactggctgggccagccccagtgctatctttgcctgccgcaacacctccaccacccccacagcccccaaaggccgaactggcggagcgcgagtgggagaggcctccaatggcgaaggaaggaaacgaggccggaccatccagccctcccgaccccttgccaaacgaagcggctaggacagccgctaaagccttattggagaatttcggattcgaacttgtgatacaatataatgaaggcaaacaggcagtgcctccacctcccaccccccctccgccagaagcgctcggcggtggcgacaaattggcatgtggggcatgcgggaagttattttcaaacatgttgatattgaaaacccacgaggaacatgtgcacaggcgctttcttccctttgaagccctgtcacgttacgcagcccagtttaggaagagctacgactccctgtatccccctctcgcagagcctccgaagcctccagacggcagccttgattcaccagtgccacatctcgggcctccatttttggtccctgagcctgaagccggagggacccgcgcacccgaggagcgctcacgagcgggagggcattggcctatagaggaagaggaatcgagtcgcggtaacctcccgccactcgtgccagccggacgaaggttttcaaggacgaagttcactgaattccagacccaggccctgcagtccttctttgaaacaagcgcttaccccaaggacggagaagtggagcggctggccagtctgctgggcctcgcctctcgggtagtggtggtctggttccagaatgcacgacaaaaggcgagaaaaaacgcttgtgaaggtggcagtatgcctaccgggggaggcacaggtggggcaagcgggtgtagacggtgtcacgctacattttcatgtgttttcgaattagttagacacctgaagaagtgttacgacgatcaaactctagaggaagaagaagaagaagctgaacggggagaggaggaagaggaggtagaagaagaagaagtcgaagaagaacagggactggagccccctgccggacccgaaggcccactccctgagccaccggacggagaggaactcagccaggcagaagccactaaagccggtggaaaagaacccgaggagaaagcgaccccaagtccatctccagcacacacttgcgatcagtgtgccatttcctttagttctcaggatctgctcacttctcatcggaggctgcactttctgccgagtctgcaaccctcagccccaccacagttattggatctgccactgctcgtgttcggcgaaaggaatcccctcgtggcggctacttcacccatgcccggaccacccttaaagagaaagcatgaggatggatctttatctccaacgggctctgaagccggaggaggtggggagggcgaacccccacgcgataaacgcctcagaacaaccatcctccctgaacagctggagatcctataccgatggtatatgcaggattcaaaccctactagaaaaatgctggactgcatctcagaggaggttgggctgaagaaaagagtggtccaggtctggtttcaaaatacccgcgcacgggagcgcaaaggacagttccgtagtacaccaggcggagtgccatcacctgcggtgaagcctccggctaccgctacccccgctagtctgcctaagttcaacctcctgctgggcaaagtcgacgacgggacaggacgcgaagctccgaaacgtgaggctccagcattcccctatcccacagccaccttggcgagtggcccacagccttttttgcccccagggaaggaggctacaacaccgacgccagaaccaccactgcctctgttgccaccccctcctccttccgaggaggaaggtccggaagagcccccaaaagcttccccagaatccgaggcttgtagcttatccgccggagatctaagtgacagcagcgcatcctcccttgccgaacccgaatctcccggtgccggtggaacttcgggtgggcctggaggagggaccggcgttccggatggaatggggcaacggaggtatcggacgcagatgtcttccttgcagctgaagatcatgaaggcttgctacgaggcctaccggacccctactatgcaggagtgcgaggtgttgggggaggaaatcgggctgccaaagagggtcatacaagtctggtttcagaacgcgagagcaaaggagaaaaaggccaagctacagggaactgctgcgggaagtacgggagggtctagtgagggcctactcgctgcgcagagaactgactgcccttattgcgacgtgaagtacgacttctatgtttcatgtcgaggccacctctttagtcggcagcacttggctaaactaaaagaggcagtcagagcacaactgaaatctgagtccaagtgttatgacctggcacctgccccagaggcccctcctgctctgaaagcaccgcctgcaaccactcccgcatccatgccgcttggcgctgccccaactcttccacggctggcccctgtcctgctgagcggccctgcgctggctcagccacccctgggaaacctcgcacctttcaattcaggcccagctgcatcgagtggccttcttggcctggcaacaagcgtcctcccaacaacaacggttgtccagactgcaggccctggcaggcccctgccccaacgaccgatgcctgaccagactaacacgtctaccgcgggaaccacagaccctgtcccaggtcctcccaccgaaccactcggagacaaagtcagcagcgagcgtaagcctgtagccggaccaacgtcaagtagtaatgacgccttaaagaatctgaaagccctgaagaccaccgttcccgcactactgggcggacaattcttacctttccccctgccgccagccggtggcactgctcccccagccgtcttcggccctcaattgcagggcgcttatttccagcagttgtacggcatgaaaaaggggttgtttcccatgaaccctatgatccctcaaacactgatcgggctcctcccaaacgcacttttgcagccccctccccagcctcctgaaccaacagcaactgctcctccaaagccaccagagctgcccgctcctggcgagggagaagccggagaagtcgacgaactgctaactggatccaccggcatcagcactgtcgacgttacccatcgctatctgtgtcgccaatgcaaaatggcctttgacggcgaagcgccagccaccgcgcaccagcggtccttttgctttttcggacggggatcgggcggtagcatgccccctccacttagagtgcctatttgcacttaccattgcttagcatgcgaagtcctgttgtccggtcgggaagcgttagcgagtcacctcaggtcgtcagcgcacagaagaaaagctgcacccccacagggaggtccccctatttccattactaatgccgctacagcagcgagcgcggctgtagcatttgccaaagaagaggcccgtttgcctcacactgattcaaacccaaaaaccactacaacgagcactttactcgctctgta

SEQ ID NO: 332627 - DNA, 741 bp, Artificial Sequence
  derived and/or modified sequence
atggccacactcaatagtgcaagtacaacaggcacgactccatcgcctggccacaacgccccatccctccccagtgacaccttttctagttccaccccatcggaccctgttacgaaggacccgcctgctgcttcttctactagtgaaaacatgaggtcatctgaaccaggtggccagttgctcgagagcggctgcggtctggttccacctaaggagatcggagaaccgcaagagggaccggattgcgggcattttcctcctaatgacccaggggttgagaaggataaggaacaggaagaagaggaagaggggttaccgccaatggacctgtccaatcacctctttttcacagcaggcggagaggcttacctggtcgcgaagctttcactcccaggtggtagcgagttactgctcccgaagggttttccttggggtgaagctggcatcaaagaagagccgagcctgccctttcttgcctacccgccacccagtcacctcactgcactccacatccaacacgggttcgatccaattcagggcttttcatcatcagatcagattttgtcccacgacactagtgcgccttctcccgctgcatgtgaggagcggcacggggcattctggagctaccaacttgccccaaacccgccaggtgaccctaaggacggtccgatggggaattctggtgggaatcatgtggcggtcttctggctgtgtctgctgtgccggctcggcttctag

SEQ ID NO: 332628 - DNA, 5428 bp, Artificial Sequence
  derived and/or modified sequence
ggagcgagcgagtgcccagggtgaatcaatggaaaccccctcacgaagccggggaaacacttcagccgcagccaaatagcattgattattttccttcacttccctcaccgccgtgaatttatttatttatttttttccgtctccgtccctgacgccccggagcgagcgctggagggagggaggaggaggggaaaaaagaggaatcaacacatcggagaagtcccttccaagagccgccccctcccctccccgcctcgcgctgctcggtggccgcggttcgactcccgtccctgcttccagctgaggtggtactggctgtcacgctgacatgagcccccagcactcctccgtctaccatggccacccttaactcagcctctaccactggtaccaccccctcccctgggcacaatgccccgtccctgccttcggacaccttctcctccagcaccccctctgatcctgtcaccaaagatccccctgctgcctcctccacctctgagaacatgaggtcctcagagccagggggacagctcctggagtcgggctgtggcctcgtcccaccaaaggagattggggagccccaggaagggcctgactgtggtcacttcccaccaaatgacccaggggtggaaaaggacaaggagcaggaggaggaagaagaagggctccctcccatggacctaagcaaccacttattcttcacagctggaggtgaggcctacctagtggccaagctgtccctgccaggtggcagtgaactcctgttaccaaagggcttcccctggggtgaggcgggcatcaaggaagagcccagtctgcccttccttgcctacccacccccctcacacctcactgcccttcacatccaacatggctttgacccaatccaaggctttagctcttctgaccaaattctgtcccatgatacctcagcaccatctccggctgcctgtgaggaaaggcatggagctttctggagctaccagctggctccaaatccacccggagatcccaaagatggccccatggggaacagcgggggcaaccacgtggcggtcttctggctctgccttctgtgccgcctgggtttcagcaagccccaggcctttatggatcacacacagtctcatggggtgaagctaacccctgcccaatatcagggcctgtcaggtagcccagctgtactccaggagggagatgaaggctgcaaggccctcataagctttctggagccaaaactccctgctcgcccctcttctgacataccccttgacaacagcagcacagtgaacatggaggcgaatgtggcccagacagaggatggcccccctgaggcagaagtccaggcccttatcctcctggatgaagaagttatggccctcagcccaccctctccacccacagccacctgggaccccagcccaacccaagccaaagaatcgccagtagcagcaggcgaggcagggccagattggttccctgaggggcaagaagaggatggagggctctgccccccactcaaccaaagctcacccacctccaaggaggggggcactctccctgccccagtgggctcccccgaagaccccagtgacccaccccagccctatcgcctagctgatgactacaccccagcccctgcagccttccagggcctcagcctgtccagccacatgtccctgctccactcacgcaactcctgcaagacactcaagtgtcccaagtgcaactggcactacaagtaccagcagaccctggatgtgcacatgcgagagaagcaccctgagagcaacagtcactgcagctactgcagtgctgggggcgcccacccccgccttgctcgtggagagagctacaactgtggctacaaaccctaccgctgtgacgtctgcaactactctacaaccaccaaaggcaacctcagcatccatatgcagtctgacaagcacctggccaacctacagggcttccaggcgggccctggtgggcagggaagtccaccagaggcatcactcccaccctccgcgggagacaaagagcctaagaccaaatcatcctggcagtgcaaggtgtgcagctacgagacaaacatctcccgtaacctgcgcatccatatgacctctgagaagcacatgcagaatgtcctaatgctgcaccaggggctgccgctgggcctgccacctggattgatggggccaggccctcctcccccaccaggggctacccccactagcccccctgaactcttccagtactttgggccccaggccctagggcagcctcagactcccttggctggcccggggctgaggccagacaagcccctggaagcccagctacttctcaatggtttccaccacgtaggagcacctgcccgcaagttccccacatccgcccctggaagcctatcccctgatgcccacctgcctccaagtcagctcctgggttcctcatctgacagcctgcccacctcaccacccccagacgacagcctgtccctgaaggtgttccgctgcctagtgtgccaggccttcagcacagacagcctggagctgctgctctaccactgcagcataggccggagcctcccggaagctgaatggaaggaggtggctggtgacacccaccgctgcaagctttgctgctatggcacccagctcaaggccaacttccaactccacctcaagactgacaaacatgctcagaagtaccagctggcagcccacctgcgggaggggggtggagccatgggcaccccttccccagcatccctgggagatggggctccttatgggtctgtctccccactacacctgcgctgcaacatctgtgactttgagtccaacagcaaggagaagatgcagctgcatgccaggggtgcagcccacgaagaaaacagccaaatctataagaggacaggaactggactcttaataaaatgatctcttaggccctaccagttctaatactgtaattttccctctatcttctgtgtgggtgtttctttttgttggcttttcatactctcctacctgctgattgagccatccattttctccttcattgactggctgcttgtcctgcttcctctgtcctatgtcctcccttccctgatgccacacctctttaagctgactctccccccatcctacacagggaaggctcctgtcacccccttagctgagccacccacccctgagaaagatgcccagaacaagacagaacaattgggtgagttttccctcccttccccccagtcctcctaccttctgagacgctcacgggaccttgcagtaatccaggagcccagcaatgtctgtgctcaaggagcaaaactgattaaagaaagggctcatcagggggaagggaggctgagccacgagaggctaggcacttccgccctctttgagaactcagacctgaccatcctactgacccggagtcagcccttgccaagcctcacctatctactgagtttcctgccctttctctagtgcccaactccctaccctggaagctctctgctacaaatcatcttgagggctgtcagggttccttaatctcctcttctttcatcctcagcttcagaagagacagaaaacaagactggcccttccagagacagtgccaaccagaccacggtcagaattggggtaactgggaagagctgaagtgggggcctggctttactgagatctgctcatattctaaaggcagacgtaattttgtcatgctttgacttatttcactcagaatagcacagttaagaaattccacccagatccagttccacatgttcagcactttcgggggcagagctggcccagcagggtcaagcacagagggagatgataggagggagacagcaggaacttgagggaaagatgaataaaggaattgtgctgagagtaggaaagagtgggggtacatgctggaaggaggggaggagaaaggcaaaagcaaacaaccagctactgcccagctctttatcccttagttaggagcagaaagacaagacaccggtgttcctaccctacaaaacgccctgagcctggatggaactgtcctggcatcctcttactaagggtaggggcaccaaccaaatgattcacactgacagcatgtgccacaaatctctaaatccccaggactcagacctaggcagcacccaggaatggcagctctgtgttctgaggggattcccagcctctggtttgagatgccatcctgtgcctcacagctctccaaactggactacaatatgtaacatttattgttattgcaatacgcagtgttactgcattactgcaagctgaagtaatgccttatgtcctcagcatcttttcttcctaactcctgctcccgccaacagacctcttccagatgtctgctccaggggctaggtgcgttaagatgagcatctggatccccttcctttacagtcatcccctccctgacacacaggcctgtgccactggtgccagcctggatgcaggctgggtaggtctggcagtcaggtgatggtggggcctctggcagcctcacccctctggaagtgtggctgagaatgtgctgagagggctgggccagaattttcctgggccactgggggagctgtggtgtttattcacattaggaaaaagaagaaggaaaaagaaagatggaaaataaggtgggagctgctgagcctgagggaggatgagctggcttctgagcagacaggtagggcccctttccaggtgatggttcacagaggcagagtgggcagggacaagggagcctctgggtccagaaaatgcccagaggaaatggaaccatttcacagagaagacacgacaggataggataggtaagagaagaaaactaaatccaaggtgggggcagtaggtacagagccatctgttagctggagagttgaggcaggcagcaaagactgggaaagacacaccaagaaaaggcagagaggccaggatggtggaagagggccagacaaagaaggagtgcaaggtagcggcctaagctaggcctttgtcccaatccaagggaaagtggggaggagccagctctcaggactgtggctggaggctgggtctgctataatgccttcctatctggctagttcctcttcaattaggagtgagaggccaagcgtggtggctcacgcctgtaatcccagcactttgggaagccaagatgagtagatcacctggcatcaggagttcaagaccaacctggccaatgtggcaaaaccctgtctccactaaaaaatacaaaaattagctgggcgtggttgcacacgcctgtaatcccagctgcttgggaggctgagggcaggagaattgcttgaacctggaaggcggaggttgcagtgagccgagatcacgtcactgcactccggcctgggtgacagagccagactccatct

SEQ ID NO: 332629 - DNA, 8855 bp, Artificial Sequence
  derived and/or modified sequence
gtggccgcggttcgactcccgtccctgcttccagctgaggtggtactggctgtcacgctgacatgagcccccagcactcctccgtctaccatggccacccttaactcagcctctaccactggtaccaccccctcccctgggcacaatgccccgtccctgccttcggacaccttctcctccagcaccccctctgatcctgtcaccaaagatccccctgctgcctcctccacctctgagaacatgaggtcctcagagccagggggacagctcctggagtcgggctgtggcctcgtcccaccaaaggagattggggagccccaggaagggcctgactgtggtcacttcccaccaaatgacccaggggtggaaaaggacaaggagcaggaggaggaagaagaagggctccctcccatggacctaagcaaccacttattcttcacagctggaggtgaggcctacctagtggccaagctgtccctgccaggtggcagtgaactcctgttaccaaagggcttcccctggggtgaggcgggcatcaaggaagagcccagtctgcccttccttgcctacccacccccctcacacctcactgcccttcacatccaacatggctttgacccaatccaaggctttagctcttctgaccaaattctgtcccatgatacctcagcaccatctccggctgcctgtgaggaaaggcatggagctttctggagctaccagctggctccaaatccacccggagatcccaaagatggccccatggggaacagcgggggcaaccacgtggcggtcttctggctctgccttctgtgccgcctgggtttcagcaagccccaggcctttatggatcacacacagtctcatggggtgaagctaacccctgcccaatatcagggcctgtcaggtagcccagctgtactccaggagggagatgaaggctgcaaggccctcataagctttctggagccaaaactccctgctcgcccctcttctgacataccccttgacaacagcagcacagtgaacatggaggcgaatgtggcccagacagaggatggcccccctgaggcagaagtccaggcccttatcctcctggatgaagaagttatggccctcagcccaccctctccacccacagccacctgggaccccagcccaacccaagccaaagaatcgccagtagcagcaggcgaggcagggccagattggttccctgaggggcaagaagaggatggagggctctgccccccactcaaccaaagctcacccacctccaaggaggggggcactctccctgccccagtgggctcccccgaagaccccagtgacccaccccagccctatcgcctagctgatgactacaccccagcccctgcagccttccagggcctcagcctgtccagccacatgtccctgctccactcacgcaactcctgcaagacactcaagtgtcccaagtgcaactggcactacaagtaccagcagaccctggatgtgcacatgcgagagaagcaccctgagagcaacagtcactgcagctactgcagtgctgggggcgcccacccccgccttgctcgtggagagagctacaactgtggctacaaaccctaccgctgtgacgtctgcaactactctacaaccaccaaaggcaacctcagcatccatatgcagtctgacaagcacctggccaacctacagggcttccaggcgggccctggtgggcagggaagtccaccagaggcatcactcccaccctccgcgggagacaaagagcctaagaccaaatcatcctggcagtgcaaggtgtgcagctacgagacaaacatctcccgtaacctgcgcatccatatgacctctgagaagcacatgcagaatgtcctaatgctgcaccaggggctgccgctgggcctgccacctggattgatggggccaggccctcctcccccaccaggggctacccccactagcccccctgaactcttccagtactttgggccccaggccctagggcagcctcagactcccttggctggcccggggctgaggccagacaagcccctggaagcccagctacttctcaatggtttccaccacgtaggagcacctgcccgcaagttccccacatccgcccctggaagcctatcccctgatgcccacctgcctccaagtcagctcctgggttcctcatctgacagcctgcccacctcaccacccccagacgacagcctgtccctgaaggtgttccgctgcctagtgtgccaggccttcagcacagacagcctggagctgctgctctaccactgcagcataggccggagcctcccggaagctgaatggaaggaggtggctggtgacacccaccgctgcaagctttgctgctatggcacccagctcaaggccaacttccaactccacctcaagactgacaaacatgctcagaagtaccagctggcagcccacctgcgggaggggggtggagccatgggcaccccttccccagcatccctgggagatggggctccttatgggtctgtctccccactacacctgcgctgcaacatctgtgactttgagtccaacagcaaggagaagatgcagctgcatgccaggggtgcagcccacgaagaaaacagccaaatctataagtttctgctggacatggagggagcggaggcaggggcagagctggggctataccactgcctgttgtgtgcgtgggagacaccctcccgcttggctgtgctgcaacacctgcgcacacctgcccaccgcgatgcccaggcccagaggcgtctgcagctgctacagaatggcccaaccactgaggaaggactcgcagctcttcagagcatcctgagcttcagccacgggcagctccggactcccgggaaggctcctgtcacccccttagctgagccacccacccctgagaaagatgcccagaacaagacagaacaattggcttcagaagagacagaaaacaagactggcccttccagagacagtgccaaccagaccacggtatactgctgtccatactgcagcttcctgagcccagagtccagccaggtgagggctcatacactctcccagcatgcagtgcagcccaagtacagatgcccactgtgccaggaacagctggtgggccggcctgccctgcacttccaccttagccaccttcacaacgtggtgcccgagtgcgttgagaagctgctgcttgtagctacaactgtagaaatgacatttacaaccaaagtgctgtctgcacccacattaagccctctggacaatggccaagaaccccccactcatgggccagagcctacaccgagcagagaccaggcagcagaaggccctaacctgaccccagaagccagtccagatcctcttcctgagcctcccctggcctcagttgaggtcccagacaaaccctcaggaagccctggccaacccccttctccagccccatctccagtccctgaacctgatgcccaagctgaagacgtagctcctccgcccaccatggctgaggaggaagaggggaccactggggagctccgctctgcagagccagctccagctgactctcgccaccctctgacctatcggaaaaccaccaactttgccctggacaagtttctcgaccctgcccggccctataagtgcactgtgtgtaaggagtccttcacccagaagaatattctgttggttcattataattctgtctcccaccttcacaagatgaagaaggctgccattgacccctctgcccctgcacggggagaggccggtgccccacccaccaccactgctgccacagacaagccctttaagtgcacagtctgcagagtctcctacaaccagagctccaccctggagatccacatgcggtcagttctgcatcagactcgctctcggggaaccaagactgattccaagattgaagggccagaacgcagccaagaagagcccaaggaaggcgagacagagggggaggtgggcactgagaagaagggccctgacaccagtggcttcatatctggattgcctttcctgtcccctcccccacctcccttggacctgcaccgattcccagcccctctcttcaccccaccagtcctgccccccttccctctggtgcccgaatcactgcttaagctccagcagcagcagctgctcctgcccttctacctccacgatctcaaggtggggcccaagctgacactagctgggcctgcacctgtgctgtccctgccagctgccacccctcctcctccaccccaacctcccaaggctgagctggctgagcgggagtgggagcggccccccatggccaaagagggtaatgaggcagggccttcctcaccccccgacccattgcccaacgaggctgcccgcactgcagccaaagcccttctagaaaactttggctttgagctggtgatccagtacaatgaagggaagcaagctgtgccccctccccctaccccacccccacctgaggccctcgggggtggggacaagctggcctgtggggcctgtgggaaactcttctccaatatgcttatcctcaagacacacgaggaacatgtccaccgccgctttctgccctttgaagccctgagccgttatgctgctcagtttcgaaagagctatgacagcctatacccgccccttgcagagcctcccaaacctcctgatgggtctctggattcacctgttccccatctgggcccacccttcctggtcccagagcctgaggcaggggggacccgtgcccctgaagagcgaagtcgagcagggggacactggcccatagaagaggaagaaagctccagagggaatcttcctcccctggtgcctgccggccgccggttctccagaaccaagttcacagagttccagacccaagccctgcagtctttctttgagactagcgcctaccccaaagacggagaggtggagcgactcgcaagtctgttgggtctggctagccgtgtggtggtggtgtggttccagaatgcccgccagaaagcacgcaaaaatgcctgtgagggtgggtccatgccaaccggaggaggcactgggggagcctccggctgcaggcgttgccacgccactttctcctgtgtttttgagttggtgcgccacctcaagaagtgctatgatgaccagacccttgaagaggaggaggaagaggcagagagaggggaagaggaggaagaggtggaagaagaagaagtagaggaggaacagggccttgaacctccagcagggcctgagggcccattaccagagcctccagatggggaggagctgagccaagcagaggcaacaaaggcaggaggcaaagagcctgaagagaaggctactccatcaccttccccagcccatacctgtgaccagtgtgccatttctttctccagccaggacctcctgaccagtcaccgccgactacatttcctgccatctctgcagcccagtgctcccccccaactcctagatctgcccttgctggtgtttggggagagaaaccccctggtggcagccacctcaccaatgccaggtccacctctcaaacggaagcatgaggacggcagcttgtctcccacaggcagtgaagcagggggaggaggggagggcgagccccccagggacaagcgcctgcgcaccaccatcttgcctgagcagctagagatcctgtaccgttggtacatgcaggattccaacccaacacgcaagatgctcgactgcatctccgaggaggtggggctcaaaaagcgagtggtacaggtctggttccagaataccagggcccgggagaggaaaggccagtttcgaagcacccctgggggggtgcctagtccagcagtgaaaccgcctgccacagccacccctgcatccttgcccaagttcaacctcttattaggcaaggtagatgatggcactgggagggaagccccaaagagggaagcacctgcttttccctaccccactgccacgcttgcttctgggccccagcctttcctaccacctgggaaagaggccaccaccccaacaccagagccacctctacctctcctacctccccctccacccagtgaggaagagggcccagaggaaccacctaaagcttctccagagagtgaggcttgcagtctctctgcaggagatctgagtgattcatctgcttccagcctagctgaaccagaatcccctggggctggagggaccagtgggggacctggaggtgggactggggttccagatggaatggggcagcggcgctacaggacccagatgagcagcctgcagctgaagatcatgaaagcctgctatgaagcttaccgcacccccaccatgcaggagtgtgaggtgctgggagaggagattgggctgcccaagagagtcatccaggtctggttccagaatgctcgtgccaaggaaaagaaggccaaactacaggggacagccgctgggagcactgggggcagcagtgagggcctcttagcagcccagcgcactgactgcccctattgtgatgtcaagtatgatttctatgtctcctgccgaggccatctcttttcccgtcagcacctggccaagctcaaggaggcggttcgagcccagctgaagagtgaaagcaagtgctacgacttggccccagcacctgaggctcccccagctctcaaggccccacctgccaccacacctgcctccatgcccctcggggctgccccaaccttgcctcgcctggcgccggtcctcttatctggcccagctctggctcagcccccgctgggcaacttagctcctttcaattcaggcccggcagcctcctcaggcctcctcggcctcgccacttcggtcctgcctaccaccacagtggtccagactgctggcccaggccgccccttacctcagagacccatgcccgaccaaaccaacacctccacagcaggcaccactgaccctgtcccaggccctcctactgagcccttgggggacaaggtctccagtgagcgaaagccagttgcaggccccaccagctcctccaatgatgccctcaagaacctcaaagcattgaagaccactgtcccagccctgttggggggccagttcctgccctttccattgccccctgctgggggaacagcaccgccagctgtctttggcccccagctacagggggcctacttccaacagctctatggcatgaagaaggggctatttcccatgaaccccatgatacctcagaccctcattgggctgctccccaatgccctcctccagccgccaccccagccccctgagcccacagccacagcacctccaaagcctcctgaactgcctgctccaggggagggggaagctggtgaggttgatgagctgctgacaggcagcactggcatctccaccgtggatgtaacccatcgctacctgtgccgccagtgcaagatggcatttgacggggaggccccggctactgcccaccagagatccttctgcttctttgggcggggctctgggggctccatgccacccccattgcgggtgcccatctgcacctaccactgcctggcatgtgaggtgctgctgagtgggcgtgaagccctagcctcccacctgcgctcctcggcccacaggcgcaaggcagccccacctcaagggggcccacccatctccatcaccaacgccgccactgctgcctcggctgctgtggcttttgccaaagaggaagcaagattacctcacacggactccaacccaaaaactacgactacctctacacttctagctttataaacagattaaccaagatggggagaggggagggcctcagggctccctcttttaccccaaggggtgttcggtgggagctcaaatccctcaccccaccccctggccccgcccacctcacaggaactgttcagttcccaccctcagtgggcaccacacaccccacttccagcagagtcctgcctcctcccaatccccacagacacacacattgatcctcctcctcagctccttgcagatgtagcccttgcccatcttcacagacacatacacccatcttggcaccctgattattcatacatgtctgcctaccacacacaaaatatatccttggttctatcttccttttcctcactgaattcccagctccccatccccataaatgcatacacatacatgcacacacacacgttatcccatgatgttccactgagaaaacaccaaaaaattttgaaaaagaagataaaaagaagaaacgaaaaagaaagcccaaggcaaagaagggggaaggaaaacaaacttcgccactctctcttctccttcctaaccctttgtctagagcaccacaccgctcacaaactctttccaaatgctcagttggctcccaaagttggagcctggcatgggcagggagcccacaaaactctaaccaaactggaggctggcatgggagaagtgcttctggttcactcttcctaccctctccctcctaaccctctccttgcctgacaggggagcccctgtggcctggactctaggggatgccgccaccagaaacccctctgccaatccctaccttgcaccctgggaactgcagtaacttattctcaaaggctttaaacacagagatcctctcagcggccgtgggcctgccccttgtcctagccctgccacgtgagggtccagcctccagggacaggcactgcccaccaacggcaaatccaaagttctttcaaaaaaaaaaactgaaacacaaccaaaaaagcaagagcgagagagagtacgtgcacacgcgcacaaaagagagaaacggacaccagaggaatgaacta

SEQ ID NO: 332630 - DNA, 949 bp, Artificial Sequence
  derived and/or modified sequence
atacaggaatcacttgctgctttgccggggtgctgtatcacctacgggccagggcctgggtcgaattggaaatagatgtttttgagagaggatctgggagttactgtaggatttggggcttaggtctgcctagccctactctgagctgtgatcgagcgtgggtactggctgtcacgctgacatgagcccccagcactcctccgtctaccatggccacccttaactcagcctctaccactggtaccaccccctcccctgggcacaatgccccgtccctgccttcggacaccttctcctccagcaccccctctgatcctgtcaccaaagatccccctgctgcctcctccacctctgagaacatgaggtcctcagagccagggggacagctcctggagtcgggctgtggcctcgtcccaccaaaggagattggggagccccaggaagggcctgactgtggtcacttcccaccaaatgacccaggggtggaaaaggacaaggagcaggaggaggaagaagaagggctccctcccatggacctaagcaaccacttattcttcacagctggaggtgaggcctacctagtggccaagctgtccctgccaggtggcagtgaactcctgttaccaaagggcttcccctggggtgaggcgggcatcaaggaagagcccagtctgcccttccttgcctacccacccccctcacacctcactgcccttcacatccaacatggctttgacccaatccaaggctttagctcttctgaccaaattctgtcccatgatacctcagcaccatctccggctgcctgtgaggaaaggcatggagctttctggagctaccagctggctccaaatccacccggagatcccaaagatggccccatggggaacagcgggggcaaccacgtggcggtcttctggctctgccttctgtgccgcctgggtttcag

SEQ ID NO: 332631 - protein, 408 aa, Artificial Sequence
  derived and/or modified sequence
MATLNSASTTGTTPSPGHNAPSLPSDTFSSSTPSDPVTKDPPAASSTSENMRSSEPGGQLLESGCGLVPPKEIGEPQEGPDCGHFPPNDPGVEKDKEQEEEEEGLPPMDLSNHLFFTAGGEAYLVAKLSLPGGSELLLPKGFPWGEAGIKEEPSLPFLAYPPPSHLTALHIQHGFDPIQGFSSSDQILSHDTSAPSPAACEERHGAFWSYQLAPNPPGDPKDGPMGNSGGNHVAVFWLCLLCRLGFSKPQAFMDHTQSHGVKLTPAQYQGLSGSPAVLQEGDEGCKALISFLEPKLPARPSSDIPLDNSSTVNMEANVAQTEDGPPEAEVQALILLDEEVMALSPPSPPTATWGYTTACCVRGRHPPAWLCCNTCAHLPTAMPRPRGVCSCYRMAQPLRKDSQLFRAS

SEQ ID NO: 332632 - protein, 246 aa, Artificial Sequence
  derived and/or modified sequence
MATLNSASTTGTTPSPGHNAPSLPSDTFSSSTPSDPVTKDPPAASSTSENMRSSEPGGQLLESGCGLVPPKEIGEPQEGPDCGHFPPNDPGVEKDKEQEEEEEGLPPMDLSNHLFFTAGGEAYLVAKLSLPGGSELLLPKGFPWGEAGIKEEPSLPFLAYPPPSHLTALHIQHGFDPIQGFSSSDQILSHDTSAPSPAACEERHGAFWSYQLAPNPPGDPKDGPMGNSGGNHVAVFWLCLLCRLGF

SEQ ID NO: 332633 - DNA, 303 bp, Artificial Sequence
  derived and/or modified sequence
atggccaccctgaacagcgccagcaccaccggcaccacccccagccccggccacaacgcccccagcctgcccagcgacaccttcagcagcagcacccccagcgaccccgtgaccaaggacccccccgccgccagcagcaccagcgagaacatgagaagcagcgagcccggcggccagctgctggagagcggctgcggcctggtgccccccaaggagatcggcgagccccaggagggccccgactgcggccacttcccccccaacgaccccggcgtggagaaggacaaggagcaggaggagtag

SEQ ID NO: 332634 - DNA, 1227 bp, Artificial Sequence
  derived and/or modified sequence
atggccaccctgaacagcgccagcaccaccggcaccacccccagccccggccacaacgcccccagcctgcccagcgacaccttcagcagcagcacccccagcgaccccgtgaccaaggacccccccgccgccagcagcaccagcgagaacatgagaagcagcgagcccggcggccagctgctggagagcggctgcggcctggtgccccccaaggagatcggcgagccccaggagggccccgactgcggccacttcccccccaacgaccccggcgtggagaaggacaaggagcaggaggaggaggaggagggcctgccccccatggacctgagcaaccacctgttcttcaccgccggcggcgaggcctacctggtggccaagctgagcctgcccggcggcagcgagctgctgctgcccaagggcttcccctggggcgaggccggcatcaaggaggagcccagcctgcccttcctggcctaccccccccccagccacctgaccgccctgcacatccagcacggcttcgaccccatccagggcttcagcagcagcgaccagatcctgagccacgacaccagcgcccccagccccgccgcctgcgaggagagacacggcgccttctggagctaccagctggcccccaacccccccggcgaccccaaggacggccccatgggcaacagcggcggcaaccacgtggccgtgttctggctgtgcctgctgtgcagactgggcttcagcaagccccaggccttcatggaccacacccagagccacggcgtgaagctgacccccgcccagtaccagggcctgagcggcagccccgccgtgctgcaggagggcgacgagggctgcaaggccctgatcagcttcctggagcccaagctgcccgccagacccagcagcgacatccccctggacaacagcagcaccgtgaacatggaggccaacgtggcccagaccgaggacggcccccccgaggccgaggtgcaggccctgatcctgctggacgaggaggtgatggccctgagcccccccagcccccccaccgccacctggggctacaccaccgcctgctgcgtgagaggcagacacccccccgcctggctgtgctgcaacacctgcgcccacctgcccaccgccatgcccagacccagaggcgtgtgcagctgctacagaatggcccagcccctgagaaaggacagccagctgttcagagccagctag

SEQ ID NO: 332635 - DNA, 303 bp, Artificial Sequence
  derived and/or modified sequence
atggccaccctgaatagtgcgtccacgaccggcactaccccctctccaggccacaatgcccctagcctcccctccgacacattctcttctagtacaccttctgatccagtcaccaaagacccaccggcggcatcgtctacatcagagaatatgaggagcagcgagcccggaggccaactgctagagagtgggtgtggcctggtgcctcccaaggagatcggagaacctcaagaggggccagattgtggccactttcctcctaacgatccaggtgtcgaaaaggataaggagcaggaagagtag

SEQ ID NO: 332636 - DNA, 1227 bp, Artificial Sequence
  derived and/or modified sequence
atggcaactctgaattctgcctctacaacagggacaacaccctcacccggacataacgccccttccctgccgtctgatactttcagttccagtacacccagcgatcccgtgacaaaggatcctcccgctgctagtagtaccagtgaaaacatgcgtagttctgaacccggaggccagctgttggagtccggatgtggactcgttcccccaaaggaaattggagaacctcaggaaggtccagactgtggccacttcccccccaacgaccctggagtagagaaagacaaggaacaggaagaggaggaggaaggtctgcctcccatggaccttagcaaccacctattcttcactgccggaggtgaagcatatctcgttgcaaagctctcactaccaggcggaagcgaactcctgcttcccaagggcttcccatggggggaggctggcatcaaggaggaacccagcctcccatttcttgcctatcccccccccagccacttaactgcattacacatacagcacggatttgaccccatccaaggattcagctcctccgaccagatcctgagccatgacacaagcgctccgagtccagccgcatgcgaagagcgtcatggggccttctggtcctaccagttggcgcccaatccccccggggatcctaaggatggacctatgggtaatagcgggggaaaccacgtggctgtgttctggctttgtctgctgtgcaggttaggattctctaagccccaggcctttatggatcatactcagagtcatggggtaaagctaaccccagcacagtaccaagggctgtctggaagcccagccgttctgcaggagggcgacgaaggctgtaaagcattgattagttttctggagcccaaactgccggcacggccttcatctgacatacctctggataattcctctacggttaatatggaggcaaacgtcgcccaaaccgaagacggaccacccgaggctgaggtgcaggctctgatcctgttagacgaagaggtgatggcactgtctccacctagtccacccacagccacgtggggatacacgaccgcctgctgcgtcagaggccggcacccgcccgcttggttgtgttgcaatacctgcgctcacctcccaaccgccatgccccgaccccgtggtgtctgttcctgttaccgaatggcacagcctctgcgaaaagatagtcaattgttccgcgcgtcctag

SEQ ID NO: 332637 - DNA, 303 bp, Artificial Sequence
  derived and/or modified sequence
atggccaccctgaacagcgccagcaccaccggcaccacccccagccctggccacaatgcccccagcctgcccagcgacaccttcagcagcagcacccccagcgaccctgtgaccaaggaccccccagctgccagcagcaccagcgagaacatgaggagcagcgagcccggcggccagctgctggagagcggctgcggcctggtgccccccaaggagattggagagccccaggagggccctgactgtggccacttccccccaaatgaccccggggtggagaaggacaaggagcaggaggagtag

SEQ ID NO: 332638 - DNA, 1227 bp, Artificial Sequence
  derived and/or modified sequence
atggccaccctgaacagcgccagcaccaccggcaccacccccagccctggccacaatgcccccagcctgcccagcgacaccttcagcagcagcacccccagcgaccctgtgaccaaggaccccccagctgccagcagcaccagcgagaacatgaggagcagcgagcccggcggccagctgctggagagcggctgcggcctggtgccccccaaggagattggagagccccaggagggccctgactgtggccacttccccccaaatgaccccggggtggagaaggacaaggagcaggaggaggaggaggagggcctgccccccatggacctgagcaaccacctgttcttcaccgctggaggagaggcctacctggtggccaagctgagcctgcccggcggcagcgagctgctgctgcccaagggcttcccctggggcgaggccggcatcaaggaggagcccagcctgcccttcctggcctaccccccacccagccacctgacagccctgcacatccagcacggctttgaccccatccagggcttcagcagcagtgaccagatcctgagccatgacaccagcgcccccagccctgctgcctgtgaggagcggcacggggccttctggagctaccagctggcccccaaccccccaggggaccccaaggatggccccatgggcaacagcggcggcaaccacgtggccgtgttctggctgtgcctgctgtgccgcctgggcttcagcaagccccaggccttcatggaccacacccagagccatggagtgaagctgaccccagcccagtaccagggcctgagcggcagccctgctgtgctgcaggagggagatgagggctgcaaggccctgatctccttcctggagcccaagctgcctgcccggcccagcagtgacatccccctggacaacagcagcacagtgaacatggaggccaacgtggcccagacagaagatggccccccagaggccgaggtgcaggccctgatcctgctggatgaggaggtgatggccctgagcccccccagccccccaacagccacctggggctacaccacagcctgctgcgtgcggggccgccaccccccagcctggctgtgctgcaacacctgtgcccacctgcccacagccatgccccggccccggggcgtgtgcagctgctacaggatggcccagcccctgaggaaggacagccagctgttccgggccagctag

SEQ ID NO: 332639 - DNA, 303 bp, Artificial Sequence
  derived and/or modified sequence
atggccaccctgaacagcgccagcaccaccggcaccacccccagccctggacacaatgcaccttctctgcccagcgataccttctcatcaagcacgccatctgacccagttaccaaggacccgcccgccgcatccagcacctctgaaaacatgaggtcctccgaaccggggggacagctcttagagtctggatgtggtttagtgcctcctaaggagattggggaaccgcaggaagggccggattgtggacactttcccccaaatgatcccggtgtcgagaaagacaaggaacaagaggagtag

SEQ ID NO: 332640 - DNA, 1227 bp, Artificial Sequence
  derived and/or modified sequence
atggccaccctgaacagcgccagcaccaccggcaccacccccagcccaggccacaacgcgccttctttgcctagcgataccttctcgtcttctacacccagtgacccagtcacaaaagatccacccgccgctagcagcactagcgagaatatgcgctcatccgaacctgggggccagctactggagtctggctgcggactcgtcccacctaaggaaattggagagccccaggaaggacccgactgtgggcattttccccctaatgacccaggagtcgaaaaagataaggaacaagaggaagaggaggaggggcttccacccatggacctgagcaaccacctgtttttcactgcagggggggaagcataccttgttgctaagctgtccttgcctgggggcagcgaactgttattgcccaagggcttcccatggggggaagcagggatcaaggaagagcctagtctgccctttctggcatatccccctccgagccatctcactgctctgcacattcagcatggatttgatcccatccagggattctcctcttcagatcaaatcttgagccatgatacatccgctccatctccagccgcgtgtgaggagcgccacggagctttttggagttaccaattagctccaaaccccccaggcgaccccaaggatggcccaatggggaattctggtggaaaccacgttgccgtattctggctatgtctcttgtgtcgcctaggcttttccaagcctcaagcatttatggatcatactcagtcccatggtgtgaagctgacgcctgcgcagtaccagggactaagcggcagccccgcggtgcttcaagagggtgatgaagggtgtaaagccctgatttccttccttgagccgaagttacccgccaggcctagcagcgatataccccttgataatagctccactgtgaatatggaggccaatgtcgcccaaaccgaggacggtccccccgaagcagaggtgcaagccctaatactcctggatgaggaagtaatggccctgtcccctccgtccccccctacagcgacctggggatatacgaccgcctgctgtgtcaggggtagacaccctccagcctggttgtgctgcaatacctgtgctcatcttccaacagctatgccccgtccccgaggtgtctgtagttgttacagaatggcccagcccctgaggaaagactcccaactcttccgggcaagctag

SEQ ID NO: 332641 - DNA, 303 bp, Artificial Sequence
  derived and/or modified sequence
atggccaccttgaatagtgcctccaccacgggtactactccttcccctggccacaatgccccaagcttgcccagcgacacgttcagtagcagcactccatcagatccggtgacgaaagaccctccagctgccagtagtaccagcgagaacatgagaagcagcgagccgggtggccagctcctggagtcaggctgcggactcgtccctccaaaggagattggggaacctcaggagggcccagattgcggtcacttcccgcctaacgaccccggagtcgagaaagataaggagcaagaggagtag

SEQ ID NO: 332642 - DNA, 1227 bp, Artificial Sequence
  derived and/or modified sequence
atggctacccttaatagtgcttcaacgaccggtaccacaccgtctcctgggcataacgctccctccttgccttcggatacattctctagttctaccccatccgatcctgtcactaaggatcctcccgcagccagctccactagtgagaatatgcgatctagtgaacccggagggcaacttctggagtcagggtgtggactcgtgcctcccaaagagattggggagcctcaggagggcccagattgcggtcactttccacctaatgatcctggggtggaaaaagacaaggagcaggaagaggaggaagagggtttgcctcctatggacctgtctaaccacctgttctttactgccggaggtgaggcatatctcgtagctaaattgtctttaccaggcggatccgaattactcttgccgaaagggtttccctggggcgaagctggaatcaaagaggagccaagcctaccttttctcgcctatcctcccccaagccacttgaccgcactgcatattcaacacggttttgacccaattcaggggttttcttcttccgaccagatactcagccatgacacctccgctccttcccctgccgcatgtgaggaacgccatggtgccttttggtcgtatcagttagcaccaaaccctccaggcgatcctaaggacggcccaatgggaaattctggcggaaaccacgtagccgttttctggttgtgcctcctgtgcagactgggcttcagcaaaccccaggcctttatggatcacacacagagtcatggagtgaaactgacacctgcacagtaccaggggctgtcaggttcccccgctgtcttacaggagggcgatgaaggctgtaaggctctgatatctttcctagagcccaagctcccggcaaggccttctagcgacatccccctggacaatagctcaactgtcaatatggaagctaacgtagctcagacagaggatgggccacctgaggcagaggttcaggcactgattttactggatgaagaggtgatggctctttctccaccttctcctccaaccgccacttggggttacaccactgcctgctgcgtgcgcggaaggcaccctcctgcttggctatgttgtaatacatgcgctcacctcccaacagcgatgccccgtccacgcggtgtatgcagctgctaccgaatggcccaacctctgagaaaagattctcagctgttccgcgcatcatag

SEQ ID NO: 332643 - DNA, 821 bp, Artificial Sequence
  derived and/or modified sequence
acgcccgttgtggcggtgccgagagcaggccagggctcgagacacgcgctatgtaatgggaggccgcgacccccgcggtggccaggggagcgaggccgccccttgcattctgctcctcattgttggccccgcacggctcccgggggctggtacaggtctcatgcctgaggctgagccaggcaccccgaggcgcggatgcatgatgggagatgtagttccaaagggagactttgccatctcgccccgcccgtcgctatggcgacaggaaagctgcacttggtgcctgcggtactctacctaaagctgaactggggctacaaggcggcggggagagtcgggtgcaaggagctcaagccccagtcccgtctccaacaccccccgccgcacccccaacgcaggcagatgggcctggaatacaagccattcacaccgtccaacagatatctgctatagcagccagctaagcgcagggtactggctgtcacgctgacatgagcccccagcactcctccgtctaccatggccacccttaactcagcctctaccactggtaccaccccctcccctgggcacaatgccccgtccctgccttcggacaccttctcctccagcaccccctctgatcctgtcaccaaagatccccctgctgcctcctccacctctgagaacatgaggtcctcagagccagggggacagctcctggagtcgggctgtggcctcgtcccaccaaaggagattggggagccccaggaagggcctgactgtggtcacttcccaccaaatgacccaggggtggaaaaggacaaggagcaggaggagga

SEQ ID NO: 332644 - DNA, 1972 bp, Artificial Sequence
  derived and/or modified sequence
tccttcacttccctcaccgccgtgaatttatttatttatttttttccgtctccgtccctgacgccccggagcgagcgctggagggagggaggaggaggggaaaaaagaggaatcaacacatcggagaagtcccttccaagagccgccccctcccctccccgcctcgcgctgctcggtggccgcggttcgactcccgtccctgcttccagctgaggtggtactggctgtcacgctgacatgagcccccagcactcctccgtctaccatggccacccttaactcagcctctaccactggtaccaccccctcccctgggcacaatgccccgtccctgccttcggacaccttctcctccagcaccccctctgatcctgtcaccaaagatccccctgctgcctcctccacctctgagaacatgaggtcctcagagccagggggacagctcctggagtcgggctgtggcctcgtcccaccaaaggagattggggagccccaggaagggcctgactgtggtcacttcccaccaaatgacccaggggtggaaaaggacaaggagcaggaggaggaagaagaagggctccctcccatggacctaagcaaccacttattcttcacagctggaggtgaggcctacctagtggccaagctgtccctgccaggtggcagtgaactcctgttaccaaagggcttcccctggggtgaggcgggcatcaaggaagagcccagtctgcccttccttgcctacccacccccctcacacctcactgcccttcacatccaacatggctttgacccaatccaaggctttagctcttctgaccaaattctgtcccatgatacctcagcaccatctccggctgcctgtgaggaaaggcatggagctttctggagctaccagctggctccaaatccacccggagatcccaaagatggccccatggggaacagcgggggcaaccacgtggcggtcttctggctctgccttctgtgccgcctgggtttcagcaagccccaggcctttatggatcacacacagtctcatggggtgaagctaacccctgcccaatatcagggcctgtcaggtagcccagctgtactccaggagggagatgaaggctgcaaggccctcataagctttctggagccaaaactccctgctcgcccctcttctgacataccccttgacaacagcagcacagtgaacatggaggcgaatgtggcccagacagaggatggcccccctgaggcagaagtccaggcccttatcctcctggatgaagaagttatggccctcagcccaccctctccacccacagccacctggggctataccactgcctgttgtgtgcgtgggagacaccctcccgcttggctgtgctgcaacacctgcgcacacctgcccaccgcgatgcccaggcccagaggcgtctgcagctgctacagaatggcccaaccactgaggaaggactcgcagctcttcagagcatcctgagcttcagccacgggcagctccggactcccgggaaggctcctgtcacccccttagctgagccacccacccctgagaaagatgcccagaacaagacagaacaattggcttcagaagagacagaaaacaagactggcccttccagagacagtgccaaccagaccacggtcagaattggggtaactgggaagagctgaagtgggggcctggctttactgagatctgctcatattctaaaggcagacgtaattttgtcatgctttgacttatttcactcagaatagcacagttaagaaattccacccagatccagttccacatgttcagcactttcgggggcagagctggcccagcagggtcaagcacagagggagatgataggagggagacagcaggaacttgagggaaagatgaataaaggaattgtgctgagagtaggaaagagtgggggtacatgctggaaggaggggaggagaaaggcaa

SEQ ID NO: 332645 - DNA, 177 bp, Artificial Sequence
  derived and/or modified sequence
atgcccaatagacataaaactaaggaccaaaccctgctccccgcacagcaatatatctggttacttaacagccacacccagatgactgcacccgtgccgcaattcaaattgagcgagacagctagtcttctgtgtaaaaggaaaatcagtactgccatgagctcgacatgcctgtag

SEQ ID NO: 332646 - protein, 651 aa, Artificial Sequence
  derived and/or modified sequence
MNKLRQSFRRKKDVYVPEASRPHQWQTDEEGVRTGKCSFPVKYLGHVEVDESRGMHICEDAVKRLKAERKFFKGFFGKTGKKAVKAVLWVSADGLRVVDEKTKDLIVDQTIEKVSFCAPDRNFDRAFSYICRDGTTRRWICHCFMAVKDTGERLSHAVGCAFAACLERKQKREKECGVTATFDASRTTFTREGSFRVTTATEQAEREEIMKQMQDAKKAETDKIVVGSSVAPGNTAPSPSSPTSPTSDATTSLEMNNPHAIPRRHAPIEQLARQGSFRGFPALSQKMSPFKRQLSLRINELPSTMQRKTDFPIKNAVPEVEGEAESISSLCSQITNAFSTPEDPFSSAPMTKPVTVVAPQSPTFQANGTDSAFHVLAKPAHTALAPVAMPVRETNPWAHAPDAANKEIAATCSGTEWGQSSGAASPGLFQAGHRRTPSEADRWLEEVSKSVRAQQPQASAAPLQPVLQPPPPTAISQPASPFQGNAFLTSQPVPVGVVPALQPAFVPAQSYPVANGMPYPAPNVPVVGITPSQMVANVFGTAGHPQAAHPHQSPSLVRQQTFPHYEASSATTSPFFKPPAQHLNGSAAFNGVDDGRLASADRHTEVPTGTCPVDPFEAQWAALENKSKQRTNPSPTNPFSSDLQKTFEIEL

SEQ ID NO: 332647 - protein, 258 aa, Artificial Sequence
  derived and/or modified sequence
MNKLRQSFRRKKDVYVPEASRPHQWQTDEEGVRTGKCSFPVKYLGHVEVDESRGMHICEDAVKRLKAERKFFKGFFGKTGKKAVKAVLWVSADGLRVVDEKTKDLIVDQTIEKVSFCAPDRNFDRAFSYICRDGTTRRWICHCFMAVKDTGERLSHAVGCAFAACLERKQKREKECGVTATFDASRTTFTREGSFRVTTATEQAEREEIMKQMQDAKKAETDKIVVGSSVAPGNTAPSPSSPTSPTSDATTSLEMNNP

SEQ ID NO: 332648 - DNA, 1956 bp, Artificial Sequence
  derived and/or modified sequence
atgaataaactgagacagtcattccgcagaaagaaggatgtatatgttcccgaagcgagccgaccacaccagtggcagacagatgaagagggtgtcaggaccggtaagtgcagtttcccagtgaagtatctcggacatgtggaggtagacgagtccaggggcatgcacatttgtgaggatgcggttaaacggctaaaagccgaacggaagttttttaaaggtttctttggtaaaaccggaaaaaaagcagtgaaagcagtactatgggtgagtgcagatggtttgagagtggtggacgagaagacgaaggacttgattgtggatcaaaccatcgaaaaagtatctttctgcgcacccgatcggaacttcgatcgcgcgtttagctatatctgccgtgatgggacaaccaggcggtggatttgtcactgcttcatggcagtcaaggataccggcgagaggctgtcgcatgcggtgggctgcgcttttgccgcatgcctggaaaggaaacagaaacgcgaaaaagaatgtggcgttactgctaccttcgatgcctctcgcaccacgtttaccagggaggggtcattccgggtgactactgccacagaacaggcagagcgagaggagatcatgaaacaaatgcaggacgcaaagaaagctgagacggataaaatagtcgtgggatctagcgtggctcccgggaatacagcccccagcccttcctcacctacaagcccaacttccgacgcaacgacatccctcgagatgaataatcctcatgccatccctagacggcatgcgcccattgagcagctagccaggcaggggagctttagaggtttcccggccttaagtcagaagatgagcccattcaaacggcagctgtccctgcgcatcaacgagctcccttccaccatgcagcgcaaaaccgacttcccgatcaagaacgccgtgcccgaagtagagggcgaagccgagagtataagtagcctatgcagccagataaccaatgcgttctccacaccagaggatccattttcatcggctcctatgactaagccagtgactgttgtagcaccacaaagcccaacgttccaggcaaatgggactgactctgccttccatgtcctggctaagcctgcacacactgccctggcacccgtggccatgccagtgcgggagacaaacccttgggcacacgcacctgacgccgccaataaggaaattgccgcgacatgttccggcactgagtgggggcaaagttcaggggcagcctcacctgggctttttcaagccgggcacaggcgcactccaagcgaagctgaccggtggctcgaggaagtctcgaaatcagtccgggcacagcagccacaggcgtctgccgccccactccagcctgtactgcaaccccctccccctacagctattagccagccagctagtccattccaaggtaacgcattcctgacaagccaacccgtgccagtgggcgtagtaccagccctgcagcccgcattcgtgccagctcaaagctatcccgtcgcgaacggcatgccataccctgccccaaacgtacctgtcgtaggcatcacaccttcccaaatggtggctaacgtcttcggcacagctgggcaccctcaggccgcgcatccacatcaatccccaagccttgtccgtcagcagacatttccacattacgaggcctcctccgcgactaccagccctttcttcaagcccccagctcagcatctgaacggttcggcggcatttaatggcgtggatgatggacgattggccagcgccgatcgacacacagaggtgcctactgggacctgccctgtggaccctttcgaagcccagtgggctgcattggagaataaaagcaagcagagaaccaatccaagcccaactaatcccttttcatctgatctccagaagacctttgagattgaactttag

SEQ ID NO: 332649 - DNA, 1956 bp, Artificial Sequence
  derived and/or modified sequence
atgaataagctacgacaatcatttcggaggaaaaaggacgtctacgtgcctgaagcatctcgcccccatcaatggcagactgatgaagaaggagtgagaaccggcaagtgctcctttcctgtgaagtatcttggacacgttgaggtcgacgagagccgtgggatgcatatttgcgaggatgccgtcaagaggcttaaagctgagagaaagttctttaagggtttcttcggcaaaacgggcaaaaaagcagtgaaagccgtcctttgggtgagtgctgatgggttgagggtggtggacgaaaagacgaaggatctgatcgtcgaccagacgatcgagaaagtcagcttctgtgctcccgacagaaactttgatcgagctttctcttatatatgccgtgacgggacaacgcgtcgctggatctgtcactgtttcatggctgtgaaggatacaggtgagcggctgagtcacgctgtcggatgtgccttcgctgcgtgcctggagagaaagcagaagcgcgaaaaagaatgtggggtgaccgctacatttgatgcatctcggacaacattcacccgcgaggggtccttccgggtcaccacagcgacagagcaagcggagcgcgaggaaatcatgaagcagatgcaggacgctaagaaggctgagacagataagatagtggtgggatcctctgttgctcccggtaacaccgctccttcaccgagttcccctacatcccccaccagtgatgcgaccaccagtctggagatgaacaacccgcacgctatcccaagaagacacgcgcctattgagcagctggcccggcaaggcagcttccggggtttcccagccctctctcagaagatgtcaccttttaaacgccagctctcattacgcataaatgagctcccctccaccatgcagaggaagactgacttccctattaagaatgcagtaccagaagtggagggcgaggctgaatctatctcaagtctgtgcagccaaataactaatgccttcagcacccccgaggatccgttctcctctgcaccgatgactaagcccgtgaccgtagtagcccctcagtctccaacttttcaggccaacggcaccgatagtgctttccacgtcctggccaagccagctcacactgccctggcccctgtagctatgcccgtgagagagacaaacccatgggcacacgctccagacgcggcgaacaaggagatcgccgctacttgctcaggaaccgaatggggacaatccagcggagctgctagcccgggcctgttccaggcgggacataggaggaccccatctgaagcggacaggtggctggaggaggtcagcaaatctgtccgggctcaacagcctcaggcatcagccgcgcccttgcagccagtactccagccaccaccacccacggccatatctcaaccagcttcaccatttcagggcaacgctttcctgacgagccaacccgtgcctgtcggggtggtcccagctttacagcctgctttcgtacctgcccagagctatccagtggccaatgggatgccttatcctgctcccaatgtacccgtggtggggattactccctctcaaatggtggccaacgtgtttgggaccgcaggacaccctcaggccgcacaccctcatcagtccccttccctcgtcagacaacagacatttccacattacgaggctagctcagctaccactagtcctttttttaaaccacccgcccaacatctgaacggctctgccgcatttaatggggtcgacgacggccgcctcgctagcgcggaccgacacaccgaggttccaaccggcacctgtcctgttgatcctttcgaagcccagtgggccgctttagagaataagtctaagcagcggaccaatccctctcctactaatcccttcagctccgacttacaaaaaacttttgagatagaactgtag

SEQ ID NO: 332650 - DNA, 1956 bp, Artificial Sequence
  derived and/or modified sequence
atgaacaagctgcggcagagcttccggaggaagaaggatgtgtatgtgcctgaggccagccggccccaccagtggcagacagatgaggagggcgtgaggacaggcaagtgcagcttccctgtgaagtacctgggccacgtggaggtggatgagagccggggcatgcacatctgtgaagatgctgtgaagaggctgaaggccgagaggaagttcttcaagggcttcttcggcaagacaggcaagaaggctgtgaaggctgtgctgtgggtgtctgcagatggcctgcgggtggtggatgagaagaccaaggacctgattgtggaccagaccatcgagaaggtgtccttctgtgccccagacaggaactttgaccgggccttctcctacatctgcagagatggcaccacccggcgctggatctgccactgcttcatggctgtgaaggacaccggggagcggctgagccatgctgtgggctgtgcctttgctgcctgcctggagaggaagcagaagcgggagaaggaatgtggggtgacagccacctttgatgccagcaggaccaccttcacccgggagggcagcttccgggtgaccacagccacagagcaggccgagcgggaggagatcatgaagcagatgcaggatgccaagaaggccgagacagacaagatcgtggtgggcagctctgtggcccctggcaacacagcccccagccccagcagccccaccagccccaccagtgatgccaccaccagcctggagatgaacaacccccacgccatccccaggagacatgcccccatcgagcagctggcccggcagggcagcttccggggcttccctgccctgagccagaagatgagccccttcaagaggcagctgagcctgcgcatcaatgagctgcccagcaccatgcagaggaagacagacttccccatcaagaatgctgtgcctgaggtggagggggaggccgagagcatcagcagcctgtgcagccagatcaccaatgccttcagcaccccagaggaccccttcagcagcgcccccatgaccaagcctgtgacagtggtggccccccagagccccaccttccaggccaatggaacagattctgccttccacgtgctggccaagccagcccacacagccctggcccctgtggccatgcctgtgcgggagaccaacccctgggcccacgccccagatgctgccaacaaggagattgctgccacctgcagcggcacagagtggggccagagcagtggagctgccagccctggcctcttccaggccggccacaggaggacccccagcgaggccgaccgctggctggaggaggtgtccaagtctgtgcgggcccagcagccccaggccagcgctgcccccctgcagcctgtgctgcagcccccaccacccacagccatcagccagcctgccagccccttccagggcaatgccttcctgaccagccagcctgtgcctgtgggcgtggtgcctgccctgcagcctgcctttgtgcctgcccagagctaccctgtggccaacggcatgccctacccagccccaaatgtgcctgtggtgggcatcacccccagccagatggtggccaacgtgtttggaacagctggccacccccaggccgcccacccccaccagagccccagcctggtgcggcagcagaccttcccccactatgaggccagcagcgccaccaccagccccttcttcaagcccccagcccagcacctgaatggcagcgctgccttcaacggggtggatgatggccgcctggccagcgctgacagacacacagaggtgcccaccggcacctgccctgtggacccctttgaggcccagtgggccgccctggagaacaagagcaagcagaggaccaaccccagccccaccaaccccttcagcagtgacctgcagaagacctttgaaattgagctgtag

SEQ ID NO: 332651 - DNA, 1956 bp, Artificial Sequence
  derived and/or modified sequence
atgaacaagctgcggcagagcttccggcggaagaaggacgtgtacgtccccgaggccagcagaccacaccagtggcagaccgacgaggaaggcgtccgcacaggaaagtgctccttccctgtgaagtatctcggtcatgttgaggtggatgaatcgaggggcatgcacatatgtgaggacgccgttaagcgtctgaaagcggaacggaaattctttaagggtttctttggcaaaacggggaagaaggctgtgaaagcggtgctctgggtatccgccgatggcctgagggtggtggacgagaagacgaaagacttgattgtggaccaaacaatcgaaaaagtctctttttgtgcaccagatcgaaattttgatagagcatttagttatatctgccgggatggcactacacgcagatggatttgccactgctttatggcagtcaaagacacaggagaacggctctcccatgccgtcggttgcgctttcgcagcgtgtctggagcgcaagcaaaaacgggaaaaggagtgtggggtaacggcgaccttcgacgcctctagaacgaccttcaccagggaaggcagttttagggtgactaccgctacagaacaggccgagagagaagaaattatgaaacagatgcaagacgccaaaaaagctgagacagacaagatcgttgtggggagtagcgtggcccccggaaatacggccccgtccccatccagtcctacgtcacccaccagcgacgctacaacgtcacttgagatgaataaccctcacgcgatcccgaggcgacatgcacctatagaacagttggctcgccaaggatccttccgaggtttccctgctctttcccagaagatgagtcccttcaagcggcagttgagtctgaggattaacgagctgccatcgacgatgcagaggaaaactgatttcccaatcaagaacgcagtgcccgaggtggaaggtgaggccgagagcatcagttccctgtgcagccaaatcaccaacgcattttcaacccccgaggatcctttctcctccgcccctatgactaagccagtcacggtggttgcccctcaatccccgacctttcaagcaaatgggacagattccgctttccacgtgctcgctaaaccagctcataccgcattggcacctgtggccatgccagtacgtgagactaatccatgggcccacgcaccggacgcagctaacaaagagattgcagccacatgttctggcactgaatggggtcagagctccggggcagctagcccaggactgttccaggccggccataggcgcactccctcagaagctgatcgctggttagaagaggtgagtaagagtgtgcgggcgcaacaacctcaagcatctgccgcccctttgcagccggtcctgcagcctccgccccccaccgctatctcgcagcccgccagccctttccagggaaacgctttcctgacctcccagcctgtgcctgtaggtgtcgtgcctgctctgcagccagcattcgttccagcacagtcatacccagtggctaatggcatgccataccccgctccaaacgtgcctgtagtggggatcaccccttctcaaatggtcgcgaatgttttcggaaccgcgggacacccccaggccgcccaccctcaccagagcccatcactggtccggcagcaaaccttcccacactatgaggcctcatcagcaaccacctcaccattcttcaagcccccagcccagcacctgaacggctctgcagcttttaatggcgttgacgatggccggctagcatctgcagaccggcataccgaggtacccacaggtacttgccctgttgaccctttcgaagcacaatgggccgcgctggagaataagtccaaacaacgcacaaacccttcaccaaccaatcccttttctagcgatctgcagaagacatttgaaatcgagctttag

SEQ ID NO: 332652 - DNA, 1956 bp, Artificial Sequence
  derived and/or modified sequence
atgaacaagctgcggcagagcttccggcggaagaaggacgtgtacgtcccggaggctagccgtccccatcagtggcagacagacgaagagggagtgaggacaggaaagtgttcctttccagtaaaatatctaggacacgtcgaggtcgacgagagtcggggcatgcacatttgtgaggacgccgtaaaacggttgaaagccgaacgcaagttctttaaaggtttctttggcaagaccggcaaaaaagctgtaaaggcggtattgtgggtctccgcagacggactccgcgttgtggatgaaaagaccaaggatctgatagtggaccagacgatcgagaaagtaagcttttgtgccccggatcgtaactttgatcgggcgttctcctacatctgtcgtgacggcaccacaagacgatggatttgtcattgttttatggcggtcaaggatacgggagagagattatctcatgccgttgggtgcgcctttgcagcctgtctggagcgcaagcagaaacgtgaaaaggagtgcggagttactgctaccttcgacgcctctagaaccacatttacaagggaggggtctttcagagtcactacagctactgagcaggccgaacgggaggaaatcatgaagcagatgcaggacgctaagaaggcagagactgataagatcgtggtgggctcatccgttgcacccggtaatacagctccaagtccaagcagccctacttcacctacctccgacgctacaacgtcgctggaaatgaacaatccccacgctattccacggcggcacgcccctattgaacagcttgctagacagggcagctttcgaggatttcctgctttatcacagaagatgtcaccctttaaaagacaactgtctttgagaatcaatgaattgccatctactatgcagagaaagactgatttcccaatcaaaaatgccgtcccagaggttgaaggggaggctgagagcatatccagtctctgttcacaaattacaaatgccttttccacacctgaggacccattctcatctgccccaatgacaaaacctgtcaccgtagtcgctccccagtccccaacatttcaggccaacggtactgacagcgcctttcatgtgctcgccaagccggcacataccgctttggcgccagtagccatgccagtgcgagagacgaatccctgggcacatgctcctgatgcagctaacaaggagatcgctgcaacttgctcaggaacggaatggggccagtcttcgggcgccgcttctccaggcctctttcaggccggtcacaggcggacaccatccgaagccgaccgatggctagaagaggttagcaaaagtgtgcgggcccagcagccacaggcctccgctgcccccttacagcctgtactgcagccaccgccacccaccgccatttcccaaccagcgtcaccctttcaggggaatgcctttttaacctcacagccagtccccgtcggagtggtgcccgcgctacagcctgcgtttgttcccgcacagtcctatcctgtcgctaacgggatgccctatccagctccgaatgtaccggtggtcggaattacgcccagccagatggtcgcaaatgtgtttggaactgccggacatcctcaagctgctcatccccaccagagcccatccctagtgcgtcagcaaacttttccccactacgaggcctcatcagcaacaacctcacctttcttcaaaccacccgcccagcacctcaatggttccgctgcattcaacggagtggacgacgggagattggcaagtgccgacagacacaccgaggtgcccaccggcacttgccctgtcgacccctttgaggctcagtgggcggctctggaaaacaagtcaaagcagcgcaccaaccctagccccacaaacccatttagttctgatctgcagaaaaccttcgaaattgaactgtag

SEQ ID NO: 332653 - DNA, 3593 bp, Artificial Sequence
  derived and/or modified sequence
gcttgagttggtcgggggcagcggcagctgagctgggatgggagacccaactggcctggccgctccggctctgaggatccctaagggaccaggaaagaagtcctcgaggagtggctcgcgtttgagaccgggatttgaggcttaagcaacttcttccggggaagagtgccagtgcagccactgttacaattcaagatcttgatctatatccatagattggaatattggtgggccagcaatcctcagacgcctcacttaggacaagctgtaaaaattaaaatgaacaaattacggcaaagttttaggagaaagaaggatgtttatgttccagaggccagtcgtccacatcagtggcagacagatgaagaaggcgttcgcaccggaaaatgtagcttcccggttaagtaccttggccatgtagaagttgatgaatcaagaggaatgcacatctgtgaagatgctgtaaaaagattgaaagctgaaaggaagttcttcaaaggcttctttggaaaaactggaaagaaagcagttaaagcagttctgtgggtctcagcagatggactcagagttgtggatgaaaaaactaaggacctcatagttgaccagacgatagagaaagtttctttctgtgccccagacaggaactttgatagagccttttcttacatatgccgtgatggcaccactcgtcgctggatctgtcactgcttcatggctgtcaaggacacaggtgaaaggttgagccatgcagtaggctgtgcttttgcagcctgtttagagcgcaagcagaagcgggagaaggaatgtggagtgactgctacttttgatgctagtcggaccacttttacaagagaaggatcattccgtgtcacaacagccactgaacaagcagaaagagaggagatcatgaaacaaatgcaagatgccaagaaagctgaaacagataagatagtcgttggttcatcagttgcccctggcaacactgccccatccccatcctctcccacctctcctacttctgatgccacgacctctctggagatgaacaatcctcatgccatcccacgccggcatgctccaattgaacagcttgctcgccaaggctctttccgaggttttcctgctcttagccagaagatgtcaccctttaaacgccaactatccctacgcatcaatgagttgccttccactatgcagaggaagactgatttccccattaaaaatgcagtgccagaagtagaaggggaggcagagagcatcagctccctgtgctcacagatcaccaatgccttcagcacacctgaggaccccttctcatctgctccgatgaccaaaccagtgacagtggtggcaccacaatctcctaccttccaagctaatggcactgactcagccttccatgtgcttgctaagccagcccatactgctctagcacccgtagcaatgcctgtgcgtgaaaccaacccttgggcccatgcccctgatgctgctaacaaggaaattgcagccacatgttcggggaccgagtggggtcaatcttctggtgctgcctctccaggtctcttccaggccggtcatagacgtactccctctgaggccgaccgatggttagaagaggtgtctaagagcgtccgggctcagcagccccaggcctcagctgctcctctgcagccagttctccagcctcctccacccactgccatctcccagccagcatcacctttccaagggaatgcattcctcacctctcagcctgtgccagtgggtgtggtcccagccctgcaaccagcctttgtccctgcccagtcctatcctgtggccaatggaatgccctatccagcccctaatgtgcctgtggtgggcatcactccctcccagatggtggccaacgtatttggcactgcaggccaccctcaggctgcccatccccatcagtcacccagcctggtcaggcagcagacattccctcactacgaggcaagcagtgctaccaccagtcccttctttaagcctcctgctcagcacctcaacggttctgcagctttcaatggtgtagatgatggcaggttggcctcagcagacaggcatacagaggttcctacaggcacctgcccagtggatccttttgaagcccagtgggctgcattagaaaataagtccaagcagcgtactaatccctcccctaccaaccctttctccagtgacttacagaagacgtttgaaattgaactttaagcaatcattatggctatgtatcttgtccataccagacagggagcagggggtagcggtcaaaggagcaaaacagactttgtctcctgattagtactcttttcactaatcccaaaggtcccaaggaacaagtccaggcccagagtactgtgaggggtgattttgaaagacatgggaaaaagcattcctagagaaaagctgccttgcaattaggctaaagaagtcaaggaaatgttgctttctgtactccctcttcccttacccccttacaaatctctggcaacagagaggcaaagtatctgaacaagaatctatattccaagcacatttactgaaatgtaaaacacaacaggaagcaaagcaatctccctttgtttttcaggccattcacctgcctcctgtcagtagtggcctgtattagagatcaagaagagtggtttgtgctcaggctggggaacagagaggcacgctatgctgccagaattcccaggagggcatatcagcaactgcccagcagagctatattttgggggagaagttgagcttccattttgagtaacagaataaatattatatatatcaaaagccaaaatctttatttttatgcatttagaatattttaaatagttctcagatattaagaagttgtatgagttgtaagtaatcttgccaaaggtaaaggggctagttgtaagaaattgtacataagattgatttatcattgatgcctactgaaataaaaagaggaaaggctggaagctgcagacaggatccctagcttgttttctgtcagtcattcattgtaagtagcacattgcaacaacaatcatgcttatgaccaatacagtcactaggttgtagttttttttaaataaaggaaaagcagtattgtcctggttttaaacctatgatggaattctaatgtcattattttaatggaatcaatcgaaatatgctctatagagaatatatcttttatatattgctgcagtttccttatgttaatcctttaacactaaggtaacatgacataatcataccatagaagggaacacaggttaccatattggtttgtaatatgggtcttggtgggttttgttttatcctttaaattttgttcccatgagttttgtggggatggggattctggttttattagctttgtgtgtgtcctcttcccccaaacccccttttggtgagaacatccccttgacagttgcagcctcttgacctcggataacaataagagagctcatctcatttttacttttgaacgttggccttacaatcaaatgtaagttatatatatttgtactgatgaaaatttataatctgctttaacaaaaataaatgttcatggt

SEQ ID NO: 332654 - DNA, 3588 bp, Artificial Sequence
  derived and/or modified sequence
gaggcagtggcgcttgagttggtcgggggcagcggcagatttgaggcttaagcaacttcttccggggaagagtgccagtgcagccactgttacaattcaagatcttgatctatatccatagattggaatattggtgggccagcaatcctcagacgcctcacttaggacaaatgaggaaactgaggcttggtgaagttacgaaacttgtccaaaatcacacaacttgtaaagggcacagccaagattcagagccaggctgtaaaaattaaaatgaacaaattacggcaaagttttaggagaaagaaggatgtttatgttccagaggccagtcgtccacatcagtggcagacagatgaagaaggcgttcgcaccggaaaatgtagcttcccggttaagtaccttggccatgtagaagttgatgaatcaagaggaatgcacatctgtgaagatgctgtaaaaagattgaaagctgaaaggaagttcttcaaaggcttctttggaaaaactggaaagaaagcagttaaagcagttctgtgggtctcagcagatggactcagagttgtggatgaaaaaactaaggacctcatagttgaccagacgatagagaaagtttctttctgtgccccagacaggaactttgatagagccttttcttacatatgccgtgatggcaccactcgtcgctggatctgtcactgcttcatggctgtcaaggacacaggtgaaaggttgagccatgcagtaggctgtgcttttgcagcctgtttagagcgcaagcagaagcgggagaaggaatgtggagtgactgctacttttgatgctagtcggaccacttttacaagagaaggatcattccgtgtcacaacagccactgaacaagcagaaagagaggagatcatgaaacaaatgcaagatgccaagaaagctgaaacagataagatagtcgttggttcatcagttgcccctggcaacactgccccatccccatcctctcccacctctcctacttctgatgccacgacctctctggagatgaacaatcctcatgccatcccacgccggcatgctccaattgaacagcttgctcgccaaggctctttccgaggttttcctgctcttagccagaagatgtcaccctttaaacgccaactatccctacgcatcaatgagttgccttccactatgcagaggaagactgatttccccattaaaaatgcagtgccagaagtagaaggggaggcagagagcatcagctccctgtgctcacagatcaccaatgccttcagcacacctgaggaccccttctcatctgctccgatgaccaaaccagtgacagtggtggcaccacaatctcctaccttccaagctaatggcactgactcagccttccatgtgcttgctaagccagcccatactgctctagcacccgtagcaatgcctgtgcgtgaaaccaacccttgggcccatgcccctgatgctgctaacaaggaaattgcagccacatgttcggggaccgagtggggtcaatcttctggtgctgcctctccaggtctcttccaggccggtcatagacgtactccctctgaggccgaccgatggttagaagaggtgtctaagagcgtccgggctcagcagccccaggcctcagctgctcctctgcagccagttctccagcctcctccacccactgccatctcccagccagcatcacctttccaagggaatgcattcctcacctctcagcctgtgccagtgggtgtggtcccagccctgcaaccagcctttgtccctgcccagtcctatcctgtggccaatggaatgccctatccagcccctaatgtgcctgtggtgggcatcactccctcccagatggtggccaacgtatttggcactgcaggccaccctcaggctgcccatccccatcagtcacccagcctggtcaggcagcagacattccctcactacgaggcaagcagtgctaccaccagtcccttctttaagcctcctgctcagcacctcaacggttctgcagctttcaatggtgtagatgatggcaggttggcctcagcagacaggcatacagaggttcctacaggcacctgcccagtggatccttttgaagcccagtgggctgcattagaaaataagtccaagcagcgtactaatccctcccctaccaaccctttctccagtgacttacagaagacgtttgaaattgaactttaagcaatcattatggctatgtatcttgtccataccagacagggagcagggggtagcggtcaaaggagcaaaacagactttgtctcctgattagtactcttttcactaatcccaaaggtcccaaggaacaagtccaggcccagagtactgtgaggggtgattttgaaagacatgggaaaaagcattcctagagaaaagctgccttgcaattaggctaaagaagtcaaggaaatgttgctttctgtactccctcttcccttacccccttacaaatctctggcaacagagaggcaaagtatctgaacaagaatctatattccaagcacatttactgaaatgtaaaacacaacaggaagcaaagcaatctccctttgtttttcaggccattcacctgcctcctgtcagtagtggcctgtattagagatcaagaagagtggtttgtgctcaggctggggaacagagaggcacgctatgctgccagaattcccaggagggcatatcagcaactgcccagcagagctatattttgggggagaagttgagcttccattttgagtaacagaataaatattatatatatcaaaagccaaaatctttatttttatgcatttagaatattttaaatagttctcagatattaagaagttgtatgagttgtaagtaatcttgccaaaggtaaaggggctagttgtaagaaattgtacataagattgatttatcattgatgcctactgaaataaaaagaggaaaggctggaagctgcagacaggatccctagcttgttttctgtcagtcattcattgtaagtagcacattgcaacaacaatcatgcttatgaccaatacagtcactaggttgtagttttttttaaataaaggaaaagcagtattgtcctggttttaaacctatgatggaattctaatgtcattattttaatggaatcaatcgaaatatgctctatagagaatatatcttttatatattgctgcagtttccttatgttaatcctttaacactaaggtaacatgacataatcataccatagaagggaacacaggttaccatattggtttgtaatatgggtcttggtgggttttgttttatcctttaaattttgttcccatgagttttgtggggatggggattctggttttattagctttgtgtgtgtcctcttcccccaaacccccttttggtgagaacatccccttgacagttgcagcctcttgacctcggataacaataagagagctcatctcatttttacttttgaacgttggccttacaatcaaatgtaagttatatatatttgtactgatgaaaatttataatctgctttaacaaaaataaatgttcatggtagaa

SEQ ID NO: 332655 - DNA, 1956 bp, Artificial Sequence
  derived and/or modified sequence
atgaataagctgcgacaaagctttcgacgcaagaaagatgtttatgtgccggaagccagccgaccgcatcaatggcagacagatgaagaaggggtgagaacgggaaagtgcagctttccagtgaagtacttaggacatgttgaagtggacgagtcaagaggtatgcacatttgcgaggacgccgtgaagcgccttaaagctgaaaggaaattttttaagggcttcttcggcaaaacgggcaagaaggccgtgaaggcggttctgtgggtatctgcggatggactgcgtgtcgttgacgagaaaacaaaagatctaattgtcgatcagaccatcgagaaagtgtccttttgtgccccagatagaaacttcgatagagcattcagctacatatgtagagacgggactacacgcaggtggatctgccactgctttatggctgtcaaggacacgggagagcgcctgtctcacgccgtgggatgcgcattcgccgcatgtctggagagaaaacagaagcgagagaaagaatgtggcgtcaccgccacatttgatgcaagcaggaccacatttaccagagagggttcgtttagagtgaccactgctactgagcaagcagagcgcgaagaaattatgaagcagatgcaggatgcaaagaaggccgagaccgacaagattgtcgtagggtcctcagtcgctccaggcaacactgcaccttcccctagttctcccactagccctaccagcgatgccacaacttccctcgaaatgaataatccacatgccatccctcgacgccatgctcccatcgaacaattggcaagacagggctcgttccgagggttccctgccctgtctcagaaaatgagtcccttcaaacggcaattgagcttacgcatcaacgagttgccttccactatgcaaaggaagactgattttccaatcaaaaacgccgtgcctgaggttgaaggagaagctgaatcaatcagctcactgtgcagccagatcaccaacgccttctctacgcccgaagacccattctcctccgcgcctatgacaaagccagtgaccgtagtggcgcctcagtcgcctacctttcaagcaaacggaactgatagcgcatttcacgtgttggccaagccagcccacactgcactggcccctgtcgccatgccagtgcgagaaacaaatccatgggctcatgcccctgatgccgcaaataaggaaattgctgctacatgctcaggcaccgaatgggggcagtcttcaggagcagctagcccaggcctctttcaggcgggtcatcgaaggactccctccgaggctgaccgctggctggaagaggtgagtaaatctgtgagagcccagcagccccaggcaagtgcagcccctctccagcccgtgttacagccccctccaccgaccgctatctcccaacccgcatcgccatttcagggcaacgcgttcctgacctcacaaccagtgcccgtgggcgtggtgcccgctctgcagcctgctttcgtccctgcccagtcctaccccgtagctaacggcatgccctatcctgcccctaacgtcccagtcgtagggattacacctagccaaatggtggctaatgtttttggcacagccggtcacccgcaagcagcacacccacatcagagcccatccctggtgcggcagcagacctttccccactacgaggcttcatcagccactacttcaccattcttcaagccaccagcccaacatctaaatggaagcgccgcattcaatggtgttgacgatggtcgtcttgcaagcgctgacaggcatactgaagttcctacaggaacatgtcccgtagatcctttcgaggcccaatgggcggctctggagaacaaaagcaagcagagaactaatccatctccaacgaatccattttcttctgatttgcagaagactttcgagatagagctctag

SEQ ID NO: 332656 - DNA, 1956 bp, Artificial Sequence
  derived and/or modified sequence
atgaataagctgcgacaatcctttcgaaggaagaaggacgtctacgtgcctgaggcaagtagaccacatcagtggcagactgacgaggaaggagtgcgcacaggcaaatgcagtttccctgtgaagtatcttgggcacgtggaggtcgacgagtcccgagggatgcacatttgcgaagacgccgtgaagcggcttaaggcagagaggaagttctttaaaggcttttttggcaaaacaggaaaaaaagcagtgaaggcggtgttgtgggtctcagccgatggccttagggtggttgatgagaagaccaaggacctgatcgtagaccaaactatcgagaaggtgagtttttgtgcacccgatagaaactttgacagagcattttcctatatttgtagagacgggactaccaggaggtggatttgccactgcttcatggctgtgaaggacaccggcgagaggctatcacacgccgtaggatgcgcttttgcagcctgtcttgagagaaagcagaagagggagaaagagtgcggcgtcacagctacgtttgacgctagtcggacaactttcaccagagaaggctcgttccgagtgacaactgcaactgaacaagctgagcgggaggagatcatgaaacagatgcaggatgctaaaaaggctgaaactgataaaattgtggtcggctcatcagtggctcccggaaacacggctcccagccccagctcgccaacctcacccacaagcgatgccactaccagccttgaaatgaacaatccacacgctatccctcgacggcacgctcctattgagcagcttgcacgacaggggtcgttcagaggttttccagccttgtcccaaaagatgagtccgttcaagcggcagctgtctcttagaatcaacgaactcccgagcactatgcagcgaaagaccgattttcctattaaaaatgcggttccagaggtggaaggcgaggctgaatcaatttcttccttgtgctcccagattaccaatgccttttctactccagaagaccccttcagtagcgcccctatgaccaagccagtgactgtggtagctccgcagtcaccaacatttcaagcaaacggcacagattccgctttccacgtgctggcaaagccagctcataccgccttggctccagtggctatgcccgttcgagaaacaaacccttgggcacatgcacctgatgcagctaacaaggagatagctgccacttgctccggaaccgagtggggccagagttcaggcgcagcttctcctgggttgtttcaagccggacacagaagaaccccatccgaagcagaccgctggttagaggaagtgtcaaaaagcgtgagagcacagcagccacaggcgtctgctgcccctctgcaacctgttctgcagcctccccctccgaccgctatctcgcagccagcgagtccgtttcagggcaacgccttccttacctcccagccagttccagtgggagtggttcctgccctgcaacccgcttttgtacccgcacagagctatccggtagcaaatggcatgccataccccgcaccaaatgtcccggtcgtcggaatcacgccatcccagatggtggccaacgtgttcggcaccgcagggcaccctcaggctgctcatcctcaccagtccccctctctcgtgcggcagcagacctttccgcactacgaggcctccagcgcaaccacatctccgttcttcaagcctcctgcacaacacctaaacggaagtgcggcatttaatggcgtggacgatggtcgtctggccagcgccgatcggcatacagaggtacccaccgggacgtgcccagtcgatccatttgaagcccaatgggctgcactcgaaaataaatcgaagcagagaaccaatcctagcccgaccaacccgttcagtagcgatttgcagaaaacttttgagatcgaactgtag

SEQ ID NO: 332657 - DNA, 1956 bp, Artificial Sequence
  derived and/or modified sequence
atgaacaagctgagacagagcttcagaagaaagaaggacgtgtacgtgcccgaggccagcagaccccaccagtggcagaccgacgaggagggcgtgagaaccggcaagtgcagcttccccgtgaagtacctgggccacgtggaggtggacgagagcagaggcatgcacatctgcgaggacgccgtgaagagactgaaggccgagagaaagttcttcaagggcttcttcggcaagaccggcaagaaggccgtgaaggccgtgctgtgggtgagcgccgacggcctgagagtggtggacgagaagaccaaggacctgatcgtggaccagaccatcgagaaggtgagcttctgcgcccccgacagaaacttcgacagagccttcagctacatctgcagagacggcaccaccagaagatggatctgccactgcttcatggccgtgaaggacaccggcgagagactgagccacgccgtgggctgcgccttcgccgcctgcctggagagaaagcagaagagagagaaggagtgcggcgtgaccgccaccttcgacgccagcagaaccaccttcaccagagagggcagcttcagagtgaccaccgccaccgagcaggccgagagagaggagatcatgaagcagatgcaggacgccaagaaggccgagaccgacaagatcgtggtgggcagcagcgtggcccccggcaacaccgcccccagccccagcagccccaccagccccaccagcgacgccaccaccagcctggagatgaacaacccccacgccatccccagaagacacgcccccatcgagcagctggccagacagggcagcttcagaggcttccccgccctgagccagaagatgagccccttcaagagacagctgagcctgagaatcaacgagctgcccagcaccatgcagagaaagaccgacttccccatcaagaacgccgtgcccgaggtggagggcgaggccgagagcatcagcagcctgtgcagccagatcaccaacgccttcagcacccccgaggaccccttcagcagcgcccccatgaccaagcccgtgaccgtggtggccccccagagccccaccttccaggccaacggcaccgacagcgccttccacgtgctggccaagcccgcccacaccgccctggcccccgtggccatgcccgtgagagagaccaacccctgggcccacgcccccgacgccgccaacaaggagatcgccgccacctgcagcggcaccgagtggggccagagcagcggcgccgccagccccggcctgttccaggccggccacagaagaacccccagcgaggccgacagatggctggaggaggtgagcaagagcgtgagagcccagcagccccaggccagcgccgcccccctgcagcccgtgctgcagccccccccccccaccgccatcagccagcccgccagccccttccagggcaacgccttcctgaccagccagcccgtgcccgtgggcgtggtgcccgccctgcagcccgccttcgtgcccgcccagagctaccccgtggccaacggcatgccctaccccgcccccaacgtgcccgtggtgggcatcacccccagccagatggtggccaacgtgttcggcaccgccggccacccccaggccgcccacccccaccagagccccagcctggtgagacagcagaccttcccccactacgaggccagcagcgccaccaccagccccttcttcaagccccccgcccagcacctgaacggcagcgccgccttcaacggcgtggacgacggcagactggccagcgccgacagacacaccgaggtgcccaccggcacctgccccgtggaccccttcgaggcccagtgggccgccctggagaacaagagcaagcagagaaccaaccccagccccaccaaccccttcagcagcgacctgcagaagaccttcgagatcgagctgtag

SEQ ID NO: 332658 - protein, 233 aa, Artificial Sequence
  derived and/or modified sequence
MNKLRQSFRRKKDVYVPEASRPHQWQTDEEGVRTGKCSFPVKTGKKAVKAVLWVSADGLRVVDEKTKDLIVDQTIEKVSFCAPDRNFDRAFSYICRDGTTRRWICHCFMAVKDTGERLSHAVGCAFAACLERKQKREKECGVTATFDASRTTFTREGSFRVTTATEQAEREEIMKQMQDAKKAETDKIVVGSSVAPGNTAPSPSSPTSPTSDATTSLEMNNPHAIPRRHAPIE

SEQ ID NO: 332659 - protein, 640 aa, Artificial Sequence
  derived and/or modified sequence
MNKLRQSFRRKKDVYVPEASRPHQWQTDEEGVRTGKCSFPVKYLGHVEVDESRGMHICEDAVKRLKATGKKAVKAVLWVSADGLRVVDEKTKDLIVDQTIEKVSFCAPDRNFDRAFSYICRDGTTRRWICHCFMAVKDTGERLSHAVGCAFAACLERKQKREKECGVTATFDASRTTFTREGSFRVTTATEQAEREEIMKQMQDAKKAETDKIVVGSSVAPGNTAPSPSSPTSPTSDATTSLEMNNPHAIPRRHAPIEQLARQGSFRGFPALSQKMSPFKRQLSLRINELPSTMQRKTDFPIKNAVPEVEGEAESISSLCSQITNAFSTPEDPFSSAPMTKPVTVVAPQSPTFQANGTDSAFHVLAKPAHTALAPVAMPVRETNPWAHAPDAANKEIAATCSGTEWGQSSGAASPGLFQAGHRRTPSEADRWLEEVSKSVRAQQPQASAAPLQPVLQPPPPTAISQPASPFQGNAFLTSQPVPVGVVPALQPAFVPAQSYPVANGMPYPAPNVPVVGITPSQMVANVFGTAGHPQAAHPHQSPSLVRQQTFPHYEASSATTSPFFKPPAQHLNGSAAFNGVDDGRLASADRHTEVPTGTCPVDPFEAQWAALENKSKQRTNPSPTNPFSSDLQKTFEIEL

SEQ ID NO: 332660 - protein, 67 aa, Artificial Sequence
  derived and/or modified sequence
MNKLRQSFRRKKDVYVPEASRPHQWQTDEEGVRTGKCSFPVKYLGHVEVDESRGMHICEDAVKRLKA

SEQ ID NO: 332661 - DNA, 1923 bp, Artificial Sequence
  derived and/or modified sequence
atgaacaagcttcgtcagagctttaggcgaaaaaaggacgtgtacgttccagaggctagtcggccgcaccagtggcaaactgacgaggagggggtgagaacagggaaatgctcttttccagtcaagtacctcggtcatgtcgaggtagacgaatctcggggcatgcacatttgcgaggatgccgtgaagcgactgaaggctaccgggaagaaggcagtgaaggctgttctttgggtgtccgccgatggacttcgtgtggtggacgagaaaacaaaggacctgattgtagatcagacgatcgagaaggtgagcttctgtgcaccggatcgcaacttcgatagggctttctcttacatttgccgggacggcacaacccgcagatggatttgccactgtttcatggcagtgaaagacacaggagagcgcctgtcacacgccgtgggctgcgccttcgcagcctgcctggagcggaagcagaagcgggaaaaggaatgcggggtgaccgcgactttcgatgcctcacggacaacctttactcgtgaaggcagttttcgcgtgacgaccgccaccgaacaagcggagagggaggaaattatgaagcagatgcaggacgccaaaaaagcggagacagataagatagtggtaggatcctcagttgccccgggcaacaccgcccctagtcccagtagtcccacgagccctaccagcgacgcaacaacatccctggaaatgaataatccccatgctattcctaggagacatgcaccaattgagcaacttgccaggcagggttctttccgtgggtttcctgcgttgagccaaaaaatgtctccatttaaacggcagttatcccttcggatcaacgagctccccagcaccatgcagcgtaagacggactttccaattaaaaatgccgttcccgaggtggagggcgaggctgagagcatcagttcactgtgtagccaaatcactaacgcattctctacccctgaagacccattcagtagcgcccctatgacaaaaccggttaccgtggtcgctcctcagtcccctaccttccaggccaacgggacggatagtgcgttccatgtgctggccaaacctgcccataccgcccttgcccccgtcgcaatgccagtccgggagaccaacccatgggcacacgccccagacgcggccaacaaggaaatcgctgctacttgttctggcaccgaatgggggcagtcttcaggggccgcctcaccaggcttgtttcaggcaggacaccgtcgaaccccatcagaagcagacaggtggctggaggaagtctctaagtctgtgcgcgcacaacagccgcaagcctcggccgcccccttgcagccggttctccaaccacctcccccaaccgccatctcacagcctgcctccccttttcaagggaacgccttcttgaccagtcagcctgttcctgtaggcgtcgtgcctgccctgcaaccggcgtttgtcccggcgcagtcatatccggtggctaacggaatgccttacccagctccgaacgtgcccgtcgtgggaatcacccccagccagatggttgctaacgtgttcggaaccgcaggccatccccaagctgcccacccccaccagagtccctcactggtcaggcagcagactttcccacactatgaggcctcaagcgcaactacatcacctttttttaaaccgcctgcgcagcatctaaatggatccgcagccttcaacggggtggacgacggtcgcctggctagcgctgacagacacactgaggtgccgaccgggacatgtccagtcgatcccttcgaggcccagtgggccgcgttagagaacaaatctaagcaacggacaaaccccagccccaccaaccccttcagtagcgatttacagaagacctttgagatcgagctgtag

SEQ ID NO: 332662 - DNA, 1923 bp, Artificial Sequence
  derived and/or modified sequence
atgaacaaactaagacagagttttcgccgaaaaaaagatgtctacgttcctgaggctagtaggccacaccaatggcagactgacgaggaaggtgtcagaaccgggaaatgcagctttccagtcaagtatctcggacacgtcgaggtagacgagtcgagaggaatgcacatatgcgaggatgcggtgaaaagattgaaggctacaggtaagaaagccgttaaagccgttctttgggttagcgcagacggcctgagagtagtggacgaaaaaaccaaggacctaatagttgaccagaccatagagaaggtgtccttttgcgcaccagacagaaatttcgacagagcatttagctacatctgccgtgacggtaccacacgcaggtggatctgccattgtttcatggctgtgaaagatacaggtgaacggctgtcgcatgccgtgggctgcgcctttgcggcatgtttagaacgcaaacagaaacgcgagaaggaatgtggagtcactgccacgttcgacgccagcagaacaacattcacccgggaaggatccttccgcgtcaccaccgctaccgaacaggccgaacgcgaagagattatgaagcagatgcaagatgccaagaaagccgagaccgataagatcgtggtcggctcaagcgttgcccctggtaacaccgccccatcacctagctcacctacttcccccacgagcgacgcaacaacttcactcgagatgaacaatccccacgccatccctagaagacacgccccaatcgaacagttagccagacaaggctcattccgcgggtttcccgccctttcccagaagatgagccccttcaaaagacagctgagcctacgaattaatgagctgccctccaccatgcagcgcaaaactgacttcccgataaagaatgccgtccctgaagtcgagggagaagcagagagcatctcttcactctgttcccaaattaccaatgccttctccacacccgaggacccgttcagctccgcgcccatgaccaagcccgtaactgtggtagcaccacaaagtccaactttccaagccaatggcacagattctgccttccacgttctcgctaagccagcacacaccgccttggctcccgtcgctatgccggttcgggagacaaacccctgggcgcacgctcccgacgcggcgaataaagagatcgctgccacatgttcaggcacggaatggggacagagttccggcgccgcttctcccgggctattccaggctggccaccggaggacgccttctgaagctgaccggtggctcgaggaggtaagcaagagtgtgcgggcacagcaaccccaggcctccgcagcgcccctgcagccagtgctgcagccaccaccccccacagctattagccaaccggcgtcccccttccagggcaatgctttcttgacgagccagcctgtaccggtgggcgtggtcccagccctgcaaccagcctttgttcctgcgcagtcttacccggtggctaatggaatgccttatcccgcccccaacgtaccggtggtgggtataacaccatcacaaatggtcgccaatgttttcggcaccgccggccacccccaggctgcgcatcctcaccagtctccttctctcgtgagacagcagactttccctcactacgaggcgtcctctgcaaccacgagcccttttttcaagccgccagcacagcatcttaatggtagtgctgcattcaacggcgtagatgacggtagacttgcctctgcagatcggcatactgaagtaccgacaggcacctgccctgtcgatccattcgaagcccaatgggcggcgctggaaaataagagcaagcagcggacgaaccccagcccaactaacccctttagcagcgatctccagaaaacgttcgagattgagctttag

SEQ ID NO: 332663 - DNA, 1923 bp, Artificial Sequence
  derived and/or modified sequence
atgaacaaactgcgacagtcttttcgacgcaagaaagacgtatacgtccctgaagcttcaaggccacaccagtggcaaacagatgaggagggagttagaactggcaagtgcagtttcccggtgaagtaccttgggcatgttgaggtcgacgaatcccgcgggatgcatatatgtgaagatgcagtcaaaaggttaaaagctacaggaaagaaagcagtgaaagctgtgttatgggtttccgccgatgggctgagagtcgtggacgaaaagaccaaggacctcatagtagatcagacaatcgaaaaggtgagtttttgcgcccccgataggaatttcgacagagccttttcctacatctgccgtgacggaaccacgaggcgctggatttgccattgtttcatggccgtcaaggatactggagaacgactgagccatgccgtggggtgtgcatttgcggcctgtctagaacgaaagcagaagcgcgaaaaagaatgtggcgtcacagcgacatttgatgcttcaagaacaactttcactcgtgaaggctcctttcgagtgaccaccgcaacagaacaagccgaacgagaagaaatcatgaagcagatgcaggacgctaaaaaggccgaaacggataagatcgtggtggggagtagcgtagcccctggaaatactgctccctccccttcatcaccaacaagccccacatccgacgcgaccacaagcctggagatgaacaaccctcacgcaatacccagaagacacgccccgattgagcagttggccagacaggggtcattcagaggatttcccgccctgagtcaaaagatgtcccctttcaagcgacagttatccttacgcatcaatgaactccctagcaccatgcaacgtaagactgacttcccaattaagaatgcagtgcccgaggtggaaggcgaggccgagtctatcagcagcttatgcagtcagattacaaatgctttttcaactcccgaggacccgttctccagcgcccccatgactaaacccgtcacagttgttgccccacaaagtcctaccttccaggcaaacggcacagacagtgcctttcatgtgctggccaagcccgcccacacggcattagctcccgttgcaatgcctgtcagggaaacaaacccctgggcccacgcgcccgatgccgccaataaagagatagccgcaacctgcagcgggactgagtggggacagtccagtggcgccgctagtcccggcctgttccaggcagggcatagaaggaccccaagcgaagccgataggtggttggaggaagtgtcgaagtctgttagggcacagcagcctcaggcaagcgccgcccccctgcagccagtcctgcagccgccccctcctactgccattagtcagccagctagccccttccaggggaacgccttcctcaccagccagcctgtgcctgttggagtggtccccgctctgcagcctgcatttgtgcccgcccagagttacccagtagctaatggcatgccatatccagcccccaacgtgcccgttgtaggtatcaccccatcacaaatggttgccaatgtgtttgggaccgcaggtcaccctcaggccgcacaccctcatcagtccccttcactcgtgaggcagcagacgtttcctcactacgaagctagctcagccactaccagcccttttttcaagcctcctgctcagcacctgaatgggagcgctgccttcaacggagttgacgatgggcgtctggcatctgctgatagacacaccgaggtgcctacaggcacctgcccagtggacccttttgaagcccagtgggcagcgctggagaacaaaagcaaacagaggaccaatccaagccctacgaatcccttctccagcgacttgcagaaaaccttcgaaatcgaactctag

SEQ ID NO: 332664 - DNA, 1923 bp, Artificial Sequence
  derived and/or modified sequence
atgaacaagctgcggcagagcttccggaggaagaaggatgtgtatgtgcctgaggccagccggccccaccagtggcagacagatgaggagggcgtgaggacaggcaagtgcagcttccctgtgaagtacctgggccacgtggaggtggatgagagccggggcatgcacatctgtgaagatgctgtgaagaggctgaaggccaccgggaagaaggctgtgaaggctgtgctgtgggtgtctgcagatggcctgcgggtggtggatgagaagaccaaggacctgattgtggaccagaccatcgagaaggtgtccttctgtgccccagacaggaactttgaccgggccttctcctacatctgcagagatggcaccacccggcgctggatctgccactgcttcatggctgtgaaggacacaggagagcggctgagccatgctgtgggctgtgcctttgctgcctgcctggagaggaagcagaagcgggagaaggaatgtggggtgacagccacctttgatgccagcaggaccaccttcacccgggagggcagcttccgggtgaccacagccacagagcaggccgagcgggaggagatcatgaagcagatgcaggatgccaagaaggccgagacagacaagatcgtggtgggcagctctgtggcccctggcaacacagcccccagccccagcagccccaccagccccaccagtgatgccaccaccagcctggagatgaacaacccccacgccatccccaggagacatgcccccatcgagcagctggcccggcagggcagcttccggggcttccctgccctgagccagaagatgagccccttcaagaggcagctgagcctgcgcatcaatgagctgcccagcaccatgcagaggaagacagacttccccatcaagaatgctgtgcctgaggtggagggggaggccgagagcatcagcagcctgtgcagccagatcaccaatgccttcagcaccccagaggaccccttcagcagcgcccccatgaccaagcctgtgacagtggtggccccccagagccccaccttccaggccaacggcacagacagcgccttccacgtgctggccaagccagcccacacagccctggcccctgtggccatgcctgtgcgggagaccaacccctgggcccacgccccagatgctgccaacaaggagattgctgccacctgcagcggcacagagtggggccagagcagcggggccgccagccctggcctcttccaggccggccacaggaggaccccatctgaggccgaccgctggctggaggaggtgtccaagtctgtgcgggcccagcagccccaggccagcgctgcccccctgcagcctgtgctgcagcccccaccacccacagccatcagccagcctgccagccccttccagggcaatgccttcctgaccagccagcctgtgcctgtgggcgtggtgcctgccctgcagcctgcctttgtgcctgcccagagctaccctgtggccaacggcatgccctacccagcccccaacgtgcctgtggtgggcatcacccccagccagatggtggccaacgtgtttggaacagctggccacccccaggccgcccacccccaccagagccccagcctggtgcggcagcagaccttcccccactatgaggccagcagcgccaccaccagccccttcttcaagcccccagcccagcacctgaatggatctgctgccttcaatggagtggatgatggccgcctggccagcgctgacagacacacagaggtgcccaccggcacctgccctgtggacccctttgaggcccagtgggccgccctggagaacaagagcaagcagaggaccaaccccagccccaccaaccccttcagcagtgacctgcagaagacctttgaaattgagctgtag

SEQ ID NO: 332665 - DNA, 1923 bp, Artificial Sequence
  derived and/or modified sequence
atgaacaagctgcggcagagcttccggcggaagaaggacgtgtacgtccccgaagcctccaggcctcaccaatggcagaccgatgaagagggggtgagaactgggaagtgttcttttccagttaagtacctggggcacgttgaggtagacgagagccggggtatgcacatttgcgaggatgctgttaaaaggctgaaggccaccggcaagaaggccgttaaagctgtcttgtgggtcagtgccgacggtctgcgcgtcgtggatgagaagaccaaggacctgattgtagatcagactattgaaaaagtctccttctgtgcaccagataggaatttcgatagggccttcagctatatctgccgagatgggaccacccggcggtggatctgtcattgttttatggccgtcaaggatacaggggagcgcctgtctcacgccgtcggttgtgctttcgcagcctgcctggagcggaagcagaaaagggaaaaagagtgcggagtgaccgctacttttgacgcctctcggacaacgttcacaagggaggggtctttccgcgtgactactgctacagagcaggcagaaagagaggagataatgaagcaaatgcaggacgcgaagaaggccgaaactgacaaaatagttgttggttcctccgtcgcccccggtaataccgcccccagtccgtcaagtcccacctcccctaccagcgacgcgactacgtcactggagatgaataaccctcatgccatccccagacggcacgcacctattgagcagctcgccaggcaaggcagctttagagggttccccgccctcagtcagaagatgtcgccattcaaaagacagctgagtctgagaatcaacgagttgccatcaaccatgcaaagaaaaaccgactttcctataaaaaatgcggtgccagaggtggagggggaagccgagtcaattagttctctctgtagccagattacaaatgcattctctacaccggaagaccccttcagcagtgcccctatgactaaaccggtgaccgtcgtcgctccccagagccctaccttccaggcgaacggaaccgacagcgctttccatgtactcgctaaaccagctcatacggccttagcaccggttgcgatgcctgttcgtgaaaccaacccatgggctcacgctcccgatgctgctaataaagagattgctgccacttgcagcggaacagagtgggggcaaagttccggcgccgcctctcccggtttattccaagctggacacaggagaaccccatccgaagctgaccgctggctagaagaagtgtccaagagcgtgcgtgcacagcagcctcaggcatctgcggcacctctacaacctgtacttcaaccacccccacctacagcgatatctcagccagccagcccattccagggcaacgcatttctgacctctcagccagtaccagtcggcgtcgtgcctgcgttacagcccgcctttgtacctgcccagagctaccccgtggcaaatggaatgccctaccctgcaccaaatgttccagtggtagggatcactccgtcacagatggttgccaatgtcttcggtacagctggacacccccaagccgcacatcctcaccaaagcccgagcctggttcggcagcagacattcccgcattatgaagccagcagcgctacaactagcccgttcttcaagcctcctgcccagcatctgaatggttcagcagcctttaacggggtggacgatggccgcttggcctctgctgatcgacataccgaggtaccgacaggcacctgccccgtggatcctttcgaagctcaatgggcagcactcgaaaacaagtctaagcaacggaccaacccctctcccacaaatccctttagttccgatctccaaaagacttttgagattgagttgtag

SEQ ID NO: 332666 - DNA, 1923 bp, Artificial Sequence
  derived and/or modified sequence
atgaacaagctgcggcagagcttccggcggaagaaggacgtgtacgtgccggaggcctctcgccctcaccaatggcagacagacgaagagggcgtgcgcacaggtaagtgctcttttccagtgaagtatctcggacacgtggaagttgatgagtctcgaggcatgcacatttgtgaagacgcagttaaacgcctgaaagccaccggaaaaaaagctgtaaaagcagtgctgtgggtgagcgcggacggcctgcgcgtggtagacgaaaagaccaaggatctcatcgtagatcagacgatcgagaaggtcagcttttgcgccccagaccggaatttcgacagggcgttctcttacatttgccgtgatggcaccactagaaggtggatctgtcattgctttatggctgttaaggacaccggggaacgactgagtcacgcggttggctgtgcttttgccgcctgtctggagcgaaaacaaaagcgagaaaaggagtgtggcgttacagccacttttgacgctagtcgcaccacattcacaagggagggcagcttcagggtgacaaccgcgaccgagcaggcagaacgggaagagattatgaaacaaatgcaagatgcgaagaaggccgagaccgacaagattgtcgtgggctcgtctgtggcgcccggcaacacggccccctcgcctagtagtccaacctccccaacgtccgatgcaactacttccttggagatgaacaatccacacgcaatccctcgcagacatgccccaattgagcagcttgcccggcaggggtcctttcgaggcttcccagctttgagtcaaaaaatgtccccctttaagaggcagctttccctgcgaatcaacgaacttccttccaccatgcagaggaagactgactttcccattaagaatgcagtgcccgaggtcgagggagaggctgagagtattagctccctttgcagccagattaccaatgcttttagtaccccagaggatcccttcagcagcgcccccatgacaaagccagtgaccgtagtcgcaccccagagtcccacctttcaagcaaacggcaccgattctgccttccatgtgctggcgaaacccgctcacacagcactggctcccgtagccatgcccgttagagaaacaaatccatgggcccatgcgcccgacgctgcaaacaaagagatcgctgctacctgctctggcaccgagtggggccaaagcagcggggccgcgtctcccggcctgttccaggctggacacagaagaaccccctccgaggccgaccgttggctggaggaggtttccaagagcgttagggctcagcagcctcaggcaagtgcggcacctttacagcccgtactccagccccctccacccactgccatcagccagccagctagtccctttcaggggaatgcctttctcacaagtcagcctgtgcccgtcggcgtggtcccagctctccagcctgcctttgtgcccgcccagtcttacccagttgcgaatggtatgccttatcctgctcccaacgttcccgtggtggggatcaccccgtcacaaatggtggctaacgtcttcgggaccgccggccaccctcaagctgctcaccctcatcagagccccagtcttgtacggcagcaaacgtttcctcactacgaagcatcctcagccaccaccagtccattctttaagcctccggcccagcatctgaatggcagtgcggcgttcaacggtgtggacgacggaagactggccagcgctgatagacacactgaggtgcccacaggcacatgtcctgtcgaccctttcgaggctcaatgggccgctttggagaacaagtccaaacaaagaacaaacccatctccaacgaatcccttctccagtgatctacagaaaacatttgagattgagctgtag

SEQ ID NO: 332667 - DNA, 1923 bp, Artificial Sequence
  derived and/or modified sequence
atgaacaagctgcggcagagcttccggcggaagaaggacgtgtacgtgcccgaggcgtccagaccacaccagtggcagacagacgaggagggcgtacgcacagggaagtgctcttttccagtgaaatacctcggtcatgtcgaagttgacgaatcccggggaatgcacatctgcgaggatgccgtgaaacggcttaaggctaccggaaaaaaggcagtgaaagctgtactgtgggtttccgctgatggtctgagggttgtggacgagaagactaaagatctgatagttgaccaaaccattgaaaaggtctctttctgcgcccctgaccggaattttgacagggctttctcctacatttgtagagatggtaccactagacgctggatctgtcattgcttcatggcagtgaaagacaccggggaaagactgtcacacgctgtagggtgtgctttcgccgcctgtctggagaggaaacagaagagagagaaggagtgcggtgtcaccgccacctttgatgcgtccaggaccacttttaccagggagggcagcttccgtgtgacaaccgccaccgagcaggccgagcgtgaagaaattatgaaacagatgcaagacgccaaaaaagcagagacagataagattgtcgtcggatcctccgtggcccctggaaataccgcaccaagccccagttcacccaccagtccaacatctgatgccaccacatcccttgaaatgaacaatccacacgctattccgagacggcacgctcctatcgagcagcttgcaagacagggctcttttcgcggctttcccgccctgagccaaaaaatgtctccatttaaaaggcagttgtccctaagaattaatgagttaccctccaccatgcagcgcaagaccgacttccccattaagaacgccgtgccggaagttgagggggaagcagagtccatttcctcattgtgttcccagatcactaatgctttcagtacccccgaggacccctttagttcagcccccatgactaagcccgtgaccgttgttgctccacaaagcccaacattccaggctaatgggacggattctgccttccatgtgctggcgaagcctgcacacaccgcgttggcgcccgtggccatgcccgtgcgtgaaacaaacccctgggcccacgccccagatgcggcaaacaaagaaattgccgccacatgctccggcaccgagtggggccagagttcgggtgctgcttctcccgggctgtttcaggcgggacaccgcaggaccccttctgaggctgacaggtggttagaagaggtctctaagagcgtgagggctcagcagcctcaagccagcgcggctcccctgcaaccagtgctgcaacctcccccaccaacagccattagccagcccgcctcaccattccagggcaacgccttcctaacctcgcagcctgtccccgtgggtgtggtgccagcactgcagccagccttcgtacctgcccaaagctacccagtagcaaatggaatgccttatccagcacctaatgttccagtggtgggcatcacacctagccagatggtcgccaacgtttttggtacggctggacacccgcaggccgcacatccccatcagtctcctagtcttgtgcgacaacagacctttccacactatgaggcatcatccgcgaccacgtctcccttcttcaaacctccagcccaacacctcaacggctcagctgcatttaacggtgtcgatgacggcaggctggcatccgccgacaggcataccgaggtacccaccggcacatgtccagtcgatccatttgaggcccagtgggccgcacttgagaacaaatccaaacagcggaccaatccctccccaactaaccctttcagcagcgacttgcaaaagacatttgaaattgaactctag

SEQ ID NO: 332668 - DNA, 1657 bp, Artificial Sequence
  derived and/or modified sequence
ggcgcttgagttggtcgggggcagcggcagatttgaggcttaagcaacttcttccggggaagagtgccagtgcagccactgttacaattcaagatcttgatctatatccatagattggaatattggtgggccagcaatcctcagacgcctcacttaggacaagctgtaaaaattaaaatgaacaaattacggcaaagttttaggagaaagaaggatgtttatgttccagaggccagtcgtccacatcagtggcagacagatgaagaaggcgttcgcaccggaaaatgtagcttcccggttaagactggaaagaaagcagttaaagcagttctgtgggtctcagcagatggactcagagttgtggatgaaaaaactaaggacctcatagttgaccagacgatagagaaagtttctttctgtgccccagacaggaactttgatagagccttttcttacatatgccgtgatggcaccactcgtcgctggatctgtcactgcttcatggctgtcaaggacacaggtgaaaggttgagccatgcagtaggctgtgcttttgcagcctgtttagagcgcaagcagaagcgggagaaggaatgtggagtgactgctacttttgatgctagtcggaccacttttacaagagaaggatcattccgtgtcacaacagccactgaacaagcagaaagagaggagatcatgaaacaaatgcaagatgccaagaaagctgaaacagataagatagtcgttggttcatcagttgcccctggcaacactgccccatccccatcctctcccacctctcctacttctgatgccacgacctctctggagatgaacaatcctcatgccatcccacgccggcatgctccaattgaacagcttgctcgccaaggctctttccgaggttttcctgctcttagccagaagatgtcaccctttaaacgccaactatccctacgcatcaatgagttgccttccactatgcagaggaagactgatttccccattaaaaatgcagtgccagaagtagaaggggaggcagagagcatcagctccctgtgctcacagatcaccaatgccttcagcacacctgaggaccccttctcatctgctccgatgaccaaaccagtgacagtggtggcaccacaatctcctaccttccaagctaatggcactgactcagccttccatgtgcttgctaagccagcccatactgctctagcacccgtagcaatgcctgtgcgtgaaaccaacccttgggcccatgcccctgatgctgctaacaaggaaattgcagccacatgttcggggaccgagtggggtcaatcttctggtgctgcctctccaggtctcttccaggccggtcatagacgtactccctctgaggccgaccgatggttagaagaggtgtctaagagcgtccgggctcagcagccccaggcctcagctgctcctctgcagccagttctccagcctcctccacccactgccatctcccagccagcatcacctttccaagggaatgcattcctcacctctcagcctgtgccagtgggtgtggtcccagccctgcaaccagcctttgtccctgcccagtcctatcctgtggccaatggaatgccctatccagcccctaatgtgcctgtggtgggcatca

SEQ ID NO: 332669 - DNA, 3560 bp, Artificial Sequence
  derived and/or modified sequence
gcttgagttggtcgggggcagcggcagctgagctgggatgggagacccaactggcctggccgctccggctctgaggatccctaagggaccaggaaagaagtcctcgaggagtggctcgcgtttgagaccgggatttgaggcttaagcaacttcttccggggaagagtgccagtgcagccactgttacaattcaagatcttgatctatatccatagattggaatattggtgggccagcaatcctcagacgcctcacttaggacaagctgtaaaaattaaaatgaacaaattacggcaaagttttaggagaaagaaggatgtttatgttccagaggccagtcgtccacatcagtggcagacagatgaagaaggcgttcgcaccggaaaatgtagcttcccggttaagtaccttggccatgtagaagttgatgaatcaagaggaatgcacatctgtgaagatgctgtaaaaagattgaaagctactggaaagaaagcagttaaagcagttctgtgggtctcagcagatggactcagagttgtggatgaaaaaactaaggacctcatagttgaccagacgatagagaaagtttctttctgtgccccagacaggaactttgatagagccttttcttacatatgccgtgatggcaccactcgtcgctggatctgtcactgcttcatggctgtcaaggacacaggtgaaaggttgagccatgcagtaggctgtgcttttgcagcctgtttagagcgcaagcagaagcgggagaaggaatgtggagtgactgctacttttgatgctagtcggaccacttttacaagagaaggatcattccgtgtcacaacagccactgaacaagcagaaagagaggagatcatgaaacaaatgcaagatgccaagaaagctgaaacagataagatagtcgttggttcatcagttgcccctggcaacactgccccatccccatcctctcccacctctcctacttctgatgccacgacctctctggagatgaacaatcctcatgccatcccacgccggcatgctccaattgaacagcttgctcgccaaggctctttccgaggttttcctgctcttagccagaagatgtcaccctttaaacgccaactatccctacgcatcaatgagttgccttccactatgcagaggaagactgatttccccattaaaaatgcagtgccagaagtagaaggggaggcagagagcatcagctccctgtgctcacagatcaccaatgccttcagcacacctgaggaccccttctcatctgctccgatgaccaaaccagtgacagtggtggcaccacaatctcctaccttccaagctaatggcactgactcagccttccatgtgcttgctaagccagcccatactgctctagcacccgtagcaatgcctgtgcgtgaaaccaacccttgggcccatgcccctgatgctgctaacaaggaaattgcagccacatgttcggggaccgagtggggtcaatcttctggtgctgcctctccaggtctcttccaggccggtcatagacgtactccctctgaggccgaccgatggttagaagaggtgtctaagagcgtccgggctcagcagccccaggcctcagctgctcctctgcagccagttctccagcctcctccacccactgccatctcccagccagcatcacctttccaagggaatgcattcctcacctctcagcctgtgccagtgggtgtggtcccagccctgcaaccagcctttgtccctgcccagtcctatcctgtggccaatggaatgccctatccagcccctaatgtgcctgtggtgggcatcactccctcccagatggtggccaacgtatttggcactgcaggccaccctcaggctgcccatccccatcagtcacccagcctggtcaggcagcagacattccctcactacgaggcaagcagtgctaccaccagtcccttctttaagcctcctgctcagcacctcaacggttctgcagctttcaatggtgtagatgatggcaggttggcctcagcagacaggcatacagaggttcctacaggcacctgcccagtggatccttttgaagcccagtgggctgcattagaaaataagtccaagcagcgtactaatccctcccctaccaaccctttctccagtgacttacagaagacgtttgaaattgaactttaagcaatcattatggctatgtatcttgtccataccagacagggagcagggggtagcggtcaaaggagcaaaacagactttgtctcctgattagtactcttttcactaatcccaaaggtcccaaggaacaagtccaggcccagagtactgtgaggggtgattttgaaagacatgggaaaaagcattcctagagaaaagctgccttgcaattaggctaaagaagtcaaggaaatgttgctttctgtactccctcttcccttacccccttacaaatctctggcaacagagaggcaaagtatctgaacaagaatctatattccaagcacatttactgaaatgtaaaacacaacaggaagcaaagcaatctccctttgtttttcaggccattcacctgcctcctgtcagtagtggcctgtattagagatcaagaagagtggtttgtgctcaggctggggaacagagaggcacgctatgctgccagaattcccaggagggcatatcagcaactgcccagcagagctatattttgggggagaagttgagcttccattttgagtaacagaataaatattatatatatcaaaagccaaaatctttatttttatgcatttagaatattttaaatagttctcagatattaagaagttgtatgagttgtaagtaatcttgccaaaggtaaaggggctagttgtaagaaattgtacataagattgatttatcattgatgcctactgaaataaaaagaggaaaggctggaagctgcagacaggatccctagcttgttttctgtcagtcattcattgtaagtagcacattgcaacaacaatcatgcttatgaccaatacagtcactaggttgtagttttttttaaataaaggaaaagcagtattgtcctggttttaaacctatgatggaattctaatgtcattattttaatggaatcaatcgaaatatgctctatagagaatatatcttttatatattgctgcagtttccttatgttaatcctttaacactaaggtaacatgacataatcataccatagaagggaacacaggttaccatattggtttgtaatatgggtcttggtgggttttgttttatcctttaaattttgttcccatgagttttgtggggatggggattctggttttattagctttgtgtgtgtcctcttcccccaaacccccttttggtgagaacatccccttgacagttgcagcctcttgacctcggataacaataagagagctcatctcatttttacttttgaacgttggccttacaatcaaatgtaagttatatatatttgtactgatgaaaatttataatctgctttaacaaaaataaatgttcatggt

SEQ ID NO: 332670 - DNA, 2124 bp, Artificial Sequence
  derived and/or modified sequence
actggcggccgaggtagaggcagtggcgcttgagttggtcgggggcagcggcagatttgaggcttaagcaacttcttccggggaagagtgccagtgcagccactgttacaattcaagatcttgatctatatccatagattggaatattggtgggccagcaatcctcagacgcctcacttaggacaagctgtaaaaattaaaatgaacaaattacggcaaagttttaggagaaagaaggatgtttatgttccagaggccagtcgtccacatcagtggcagacagatgaagaaggcgttcgcaccggaaaatgtagcttcccggttaagtaccttggccatgtagaagttgatgaatcaagaggaatgcacatctgtgaagatgctgtaaaaagattgaaagctactggaaagaaagcagttaaagcagttctgtgggtctcagcagatggactcagagttgtggatgaaaaaactaaggacctcatagttgaccagacgatagagaaagtttctttctgtgccccagacaggaactttgatagagccttttcttacatatgccgtgatggcaccactcgtcgctggatctgtcactgcttcatggctgtcaaggacacaggtgaaaggttgagccatgcagtaggctgtgcttttgcagcctgtttagagcgcaagcagaagcgggagaaggaatgtggagtgactgctacttttgatgctagtcggaccacttttacaagagaaggatcattccgtgtcacaacagccactgaacaagcagaaagagaggagatcatgaaacaaatgcaagatgccaagaaagctgaaacagataagatagtcgttggttcatcagttgcccctggcaacactgccccatccccatcctctcccacctctcctacttctgatgccacgacctctctggagatgaacaatcctcatgccatcccacgccggcatgctccaattgaacagcttgctcgccaaggctctttccgaggttttcctgctcttagccagaagatgtcaccctttaaacgccaactatccctacgcatcaatgagttgccttccactatgcagaggaagactgatttccccattaaaaatgcagtgccagaagtagaaggggaggcagagagcatcagctccctgtgctcacagatcaccaatgccttcagcacacctgaggaccccttctcatctgctccgatgaccaaaccagtgacagtggtggcaccacaatctcctaccttccaagctaatggcactgactcagccttccatgtgcttgctaagccagcccatactgctctagcacccgtagcaatgcctgtgcgtgaaaccaacccttgggcccatgcccctgatgctgctaacaaggaaattgcagccacatgttcggggaccgagtggggtcaatcttctggtgctgcctctccaggtctcttccaggccggtcatagacgtactccctctgaggccgaccgatggttagaagaggtgtctaagagcgtccgggctcagcagccccaggcctcagctgctcctctgcagccagttctccagcctcctccacccactgccatctcccagccagcatcacctttccaagggaatgcattcctcacctctcagcctgtgccagtgggtgtggtcccagccctgcaaccagcctttgtccctgcccagtcctatcctgtggccaatggaatgccctatccagcccctaatgtgcctgtggtgggcatcactccctcccagatggtggccaacgtatttggcactgcaggccaccctcaggctgcccatccccatcagtcacccagcctggtcaggcagcagacattccctcactacgaggcaagcagtgctaccaccagtcccttctttaagcctcctgctcagcacctcaacggttctgcagctttcaatggtgtagatgatggcaggttggcctcagcagacaggcatacagaggttcctacaggcacctgcccagtggatccttttgaagcccagtgggctgcattagaaaataagtccaagcagcgtactaatccctcccctaccaaccctttctccagtgacttacagaagacgtttgaaattgaactttaa

SEQ ID NO: 332671 - DNA, 3547 bp, Artificial Sequence
  derived and/or modified sequence
ggcgcttgagttggtcgggggcagcggcagatttgaggcttaagcaacttcttccggggaagagtgccagtgcagccactgttacaattcaagatcttgatctatatccatagattggaatattggtgggccagcaatcctcagacgcctcacttaggacaaatgaggaaactgaggcttggtgaagttacgaaacttgtccaaaatcacacaacttgtaaagggcacagccaagattcagagccaggctgtaaaaattaaaatgaacaaattacggcaaagttttaggagaaagaaggatgtttatgttccagaggccagtcgtccacatcagtggcagacagatgaagaaggcgttcgcaccggaaaatgtagcttcccggttaagtaccttggccatgtagaagttgatgaatcaagaggaatgcacatctgtgaagatgctgtaaaaagattgaaagctactggaaagaaagcagttaaagcagttctgtgggtctcagcagatggactcagagttgtggatgaaaaaactaaggacctcatagttgaccagacgatagagaaagtttctttctgtgccccagacaggaactttgatagagccttttcttacatatgccgtgatggcaccactcgtcgctggatctgtcactgcttcatggctgtcaaggacacaggtgaaaggttgagccatgcagtaggctgtgcttttgcagcctgtttagagcgcaagcagaagcgggagaaggaatgtggagtgactgctacttttgatgctagtcggaccacttttacaagagaaggatcattccgtgtcacaacagccactgaacaagcagaaagagaggagatcatgaaacaaatgcaagatgccaagaaagctgaaacagataagatagtcgttggttcatcagttgcccctggcaacactgccccatccccatcctctcccacctctcctacttctgatgccacgacctctctggagatgaacaatcctcatgccatcccacgccggcatgctccaattgaacagcttgctcgccaaggctctttccgaggttttcctgctcttagccagaagatgtcaccctttaaacgccaactatccctacgcatcaatgagttgccttccactatgcagaggaagactgatttccccattaaaaatgcagtgccagaagtagaaggggaggcagagagcatcagctccctgtgctcacagatcaccaatgccttcagcacacctgaggaccccttctcatctgctccgatgaccaaaccagtgacagtggtggcaccacaatctcctaccttccaagctaatggcactgactcagccttccatgtgcttgctaagccagcccatactgctctagcacccgtagcaatgcctgtgcgtgaaaccaacccttgggcccatgcccctgatgctgctaacaaggaaattgcagccacatgttcggggaccgagtggggtcaatcttctggtgctgcctctccaggtctcttccaggccggtcatagacgtactccctctgaggccgaccgatggttagaagaggtgtctaagagcgtccgggctcagcagccccaggcctcagctgctcctctgcagccagttctccagcctcctccacccactgccatctcccagccagcatcacctttccaagggaatgcattcctcacctctcagcctgtgccagtgggtgtggtcccagccctgcaaccagcctttgtccctgcccagtcctatcctgtggccaatggaatgccctatccagcccctaatgtgcctgtggtgggcatcactccctcccagatggtggccaacgtatttggcactgcaggccaccctcaggctgcccatccccatcagtcacccagcctggtcaggcagcagacattccctcactacgaggcaagcagtgctaccaccagtcccttctttaagcctcctgctcagcacctcaacggttctgcagctttcaatggtgtagatgatggcaggttggcctcagcagacaggcatacagaggttcctacaggcacctgcccagtggatccttttgaagcccagtgggctgcattagaaaataagtccaagcagcgtactaatccctcccctaccaaccctttctccagtgacttacagaagacgtttgaaattgaactttaagcaatcattatggctatgtatcttgtccataccagacagggagcagggggtagcggtcaaaggagcaaaacagactttgtctcctgattagtactcttttcactaatcccaaaggtcccaaggaacaagtccaggcccagagtactgtgaggggtgattttgaaagacatgggaaaaagcattcctagagaaaagctgccttgcaattaggctaaagaagtcaaggaaatgttgctttctgtactccctcttcccttacccccttacaaatctctggcaacagagaggcaaagtatctgaacaagaatctatattccaagcacatttactgaaatgtaaaacacaacaggaagcaaagcaatctccctttgtttttcaggccattcacctgcctcctgtcagtagtggcctgtattagagatcaagaagagtggtttgtgctcaggctggggaacagagaggcacgctatgctgccagaattcccaggagggcatatcagcaactgcccagcagagctatattttgggggagaagttgagcttccattttgagtaacagaataaatattatatatatcaaaagccaaaatctttatttttatgcatttagaatattttaaatagttctcagatattaagaagttgtatgagttgtaagtaatcttgccaaaggtaaaggggctagttgtaagaaattgtacataagattgatttatcattgatgcctactgaaataaaaagaggaaaggctggaagctgcagacaggatccctagcttgttttctgtcagtcattcattgtaagtagcacattgcaacaacaatcatgcttatgaccaatacagtcactaggttgtagttttttttaaataaaggaaaagcagtattgtcctggttttaaacctatgatggaattctaatgtcattattttaatggaatcaatcgaaatatgctctatagagaatatatcttttatatattgctgcagtttccttatgttaatcctttaacactaaggtaacatgacataatcataccatagaagggaacacaggttaccatattggtttgtaatatgggtcttggtgggttttgttttatcctttaaattttgttcccatgagttttgtggggatggggattctggttttattagctttgtgtgtgtcctcttcccccaaacccccttttggtgagaacatccccttgacagttgcagcctcttgacctcggataacaataagagagctcatctcatttttacttttgaacgttggccttacaatcaaatgtaagttatatatatttgtactgatgaaaatttataatctgctttaacaaaaataaatgttcatggtagaa

SEQ ID NO: 332672 - DNA, 1923 bp, Artificial Sequence
  derived and/or modified sequence
atgaacaaactcaggcagtcatttaggcggaaaaaagatgtatatgtgccggaagcctcgcggccacaccagtggcagacagacgaggaaggagtgaggaccggcaagtgcagcttccctgtgaaatacctgggacatgtcgaggtcgatgagtcgcgcggaatgcacatctgtgaagacgctgtcaaaaggctgaaagcaactggcaaaaaagccgtcaaggcagtcctgtgggtcagcgcagacggcctcagagtcgtggacgagaagacaaaggacttaatagtggaccagaccatcgaaaaagtgagcttctgtgctcctgatcgcaattttgaccgagcattctcatatatctgccgggatggtaccaccagacggtggatatgccactgtttcatggccgtcaaggatactggcgagaggctgtctcatgctgtcgggtgcgcgtttgcggcttgcttggaacgtaaacagaaacgtgagaaggagtgcggcgtaaccgcaacttttgacgcttcccgcacgactttcacacgcgagggctcatttagggtaacaactgccacagagcaggctgagagggaagaaatcatgaaacagatgcaggacgccaagaaagcggaaactgataagatcgttgttggcagttccgtcgccccagggaatacagcacctagccccagttctcctacaagtcctacttcagacgcgacaacctccctcgaaatgaacaacccacatgcgatccccagacggcatgctcccatcgaacagctggcgaggcaagggagtttcaggggctttcctgccttaagtcaaaagatgagcccattcaaaaggcagctaagtctcaggattaatgagttaccgtccacaatgcagcggaaaacagactttcccattaaaaacgccgtgccagaggtggagggtgaagctgagtcgatcagcagcctctgctctcagatcactaacgccttctccacaccggaggatcccttttcgagcgctccaatgactaagccagtgactgttgtagctccccagagtcctacatttcaagctaacgggaccgattctgcctttcatgtgctcgccaaaccggctcacacggccctggcccctgttgctatgcctgtacgcgagaccaacccatgggcgcacgctcccgacgcagctaacaaggagatcgccgcaacctgcagcggaaccgagtggggccaatcgtcaggggcagctagtcccggactctttcaggccggtcacagacgcactccatcagaggcggacaggtggctcgaggaggtctctaaatccgttcgagctcagcaacctcaagctagcgctgcccctctgcagcctgtgctccagcctcctccgccaaccgccatctcacagccagccagccccttccaagggaacgcatttctcactagtcagcccgtgcccgtgggagttgtcccagccctccagcccgcattcgtccctgctcaatcctaccccgtggcaaacggaatgccatacccggcaccaaatgttccagtggtcggaattacgccttctcaaatggtggccaacgtgttcggcacagcgggacaccctcaagcagcccatccacaccagtccccctccttagtgcgtcagcagacattcccacattacgaagcgagctcagccacaaccagccctttcttcaagcctcccgcacagcacctcaacgggtctgccgcatttaatggcgtcgacgatggaagacttgctagtgcagacagacacacagaggtgcccaccggcacctgccctgtcgatccattcgaagcgcagtgggctgctttggagaacaaatctaaacaacgcacaaatcctagtccaaccaatccattctctagcgacctgcagaagactttcgaaattgagctctag

SEQ ID NO: 332673 - DNA, 1923 bp, Artificial Sequence
  derived and/or modified sequence
atgaacaaactgaggcagtcctttcggaggaaaaaagatgtttatgttcccgaggctagccgaccccaccaatggcagactgacgaagaaggcgtccgcaccggcaaatgttcttttccagtgaagtatctcggacacgtcgaagttgatgagagccgcggaatgcatatttgcgaggacgccgtgaagagacttaaagcaacagggaagaaagcagttaaagccgtcttatgggtttctgcagacggattacgcgtagttgatgagaagacgaaagaccttatagtcgaccaaaccatcgaaaaggtgtcattttgcgctccagatcgcaatttcgaccgcgctttcagctacatttgcagagacggtaccactcggaggtggatatgccattgcttcatggccgtgaaggacaccggagagagactgagtcacgccgtcggatgcgcatttgctgcctgtctcgaacggaagcagaaaagggaaaaggagtgtggtgttactgccaccttcgatgcctccaggactacattcacgcgggagggatcattcagggtgaccaccgccaccgaacaggctgagagggaggaaattatgaaacagatgcaggatgcaaaaaaagccgagacagataaaatcgtggtaggctcatctgtggcgcctgggaacacagccccttcaccaagttctccaacttcaccgacttcggatgcgaccacttctttagagatgaacaacccacacgcaatcccacgtagacacgcccctatcgaacaattggccaggcaggggagctttcgtggattccccgctctgagccagaaaatgagtccatttaagagacagctgtctctgaggatcaatgagctaccgagcaccatgcagcggaaaaccgactttcccataaagaatgccgttccagaggtggaaggcgaagccgaatctatctcaagcctatgtagccagattaccaacgctttctctacacctgaggatcctttttctagcgcacctatgaccaaacctgtgacagtggtggccccacagagcccaaccttccaagctaatggaactgactctgctttccacgttctggcgaaacccgctcatacagctttggctccagtggccatgccagtacgggagaccaacccatgggcccacgcaccggatgcagctaataaagagattgctgccacatgcagtggcacagagtggggacagtcatccggcgcagcttcccccggactgttccaagctggtcatcgacgcactccttcagaggcagaccgatggttagaagaagtttctaagagcgttcgggctcagcaaccccaggcctctgcggcacctctgcagccagtgcttcaacctccgccacctactgccatctctcagccagcaagcccattccaaggtaatgcatttttgacttctcagcccgtgcctgttggggtagtgccagccctgcagcctgcattcgtccctgcgcagagctatccagtggctaacggtatgccttatcccgctccaaatgtgccagttgttggaataacgccctcccagatggtcgcaaacgtctttggcacagcaggtcacccccaggcagcccacccacatcagagcccatccttggttcgacagcagacttttccacattacgaagcttccagcgctacaaccagtcccttcttcaaaccacccgcacaacacctcaacggttccgctgctttcaatggagtggacgatggtcgattggcatcagcggatcgccacacggaggtgccaacgggaacatgtcctgtggatccctttgaggctcagtgggcggcactcgaaaacaagtctaagcaacgaactaatcctagccctaccaacccgttttcttctgacctacagaagacattcgagatagaactctag

SEQ ID NO: 332674 - DNA, 1923 bp, Artificial Sequence
  derived and/or modified sequence
atgaataagctgcgtcaaagtttcagaagaaagaaagacgtttacgtacccgaggcatcccgaccacatcagtggcagacagacgaggaaggagtgcgcacaggaaaatgctcctttcccgtaaaatacttggggcacgtcgaggtggacgagtctcgtggtatgcacatttgcgaggacgctgttaagcgattaaaagcgacagggaaaaaggcagttaaggctgttctgtgggttagcgcggacgggttgcgggtggtagacgagaaaacgaaagatctgattgttgatcaaaccatagaaaaagtgtctttttgtgcaccggacaggaattttgatcgggcattctcctatatatgcagggacggcaccactcgcagatggatatgtcattgcttcatggctgttaaagacaccggggagaggctttcccatgccgtgggttgcgctttcgccgcttgcttagaaagaaagcaaaagagggaaaaagaatgtggggtcactgccactttcgacgcttcccgcacaacatttaccagggagggttcattccgtgtcacaaccgcgaccgaacaagctgagcgggaagagataatgaaacaaatgcaggatgctaagaaggcagagacagataagatcgtagttggatcctccgtggcccctgggaatacagcgcctagccctagctcccccacatccccaacttcagacgcaactacaagtctcgagatgaataatcctcacgctattcctcgcagacacgcaccaatcgaacagttagctcgtcaggggtcgtttagaggattccctgcactgagtcagaagatgtctccgtttaaacgacagctgtcgctaagaatcaatgagttaccatccaccatgcaaagaaagaccgacttcccgatcaaaaatgccgtgcctgaagtggaaggggaggcagaatctatcagtagcctgtgtagccagattaccaatgccttctctacccccgaagatcccttctcctccgctcccatgaccaagcccgtcactgtggtagcaccacaatcccctacttttcaggctaacggaaccgactctgcgttccatgtcttggccaagcccgctcacactgcgctagcgcctgtggctatgccagttcgggagacaaacccctgggctcatgcaccagacgccgctaacaaagagattgccgctacttgcagtggaactgagtggggacagtcatccggagctgcctcacctgggctgttccaggcgggacaccggcgtactccatctgaagccgaccggtggctggaggaggtctctaagagcgttcgggcacagcagcctcaggcatccgcagcaccgctccagccagtacttcagccccctccacccacggccatttcccaacctgcttcccctttccagggcaatgcttttctcacaagccaacccgtgcctgtaggtgttgttcccgctctacagcccgcattcgtgcccgctcagagctaccctgtcgccaacggaatgccgtacccagcccctaacgtacctgtggtcggaatcaccccaagccaaatggtggctaacgtgtttgggaccgccggtcatcctcaggcagcacatccccaccagagcccctcactcgtgaggcagcagactttccctcactatgaggcctctagcgccaccactagcccttttttcaagccgccagcccagcatctcaacggcagcgcagcgttcaatggggttgacgacggcaggcttgcctctgccgatcgccatacggaggttccaacaggtacttgccccgtggaccccttcgaggctcagtgggcagcattggaaaacaaaagcaaacagaggacaaaccccagtccaactaacccattctctagtgatctgcagaagacatttgagatcgaattatag

SEQ ID NO: 332675 - DNA, 1923 bp, Artificial Sequence
  derived and/or modified sequence
atgaacaagctgagacagagcttcagaagaaagaaggacgtgtacgtgcccgaggccagcagaccccaccagtggcagaccgacgaggagggcgtgagaaccggcaagtgcagcttccccgtgaagtacctgggccacgtggaggtggacgagagcagaggcatgcacatctgcgaggacgccgtgaagagactgaaggccaccggcaagaaggccgtgaaggccgtgctgtgggtgagcgccgacggcctgagagtggtggacgagaagaccaaggacctgatcgtggaccagaccatcgagaaggtgagcttctgcgcccccgacagaaacttcgacagagccttcagctacatctgcagagacggcaccaccagaagatggatctgccactgcttcatggccgtgaaggacaccggcgagagactgagccacgccgtgggctgcgccttcgccgcctgcctggagagaaagcagaagagagagaaggagtgcggcgtgaccgccaccttcgacgccagcagaaccaccttcaccagagagggcagcttcagagtgaccaccgccaccgagcaggccgagagagaggagatcatgaagcagatgcaggacgccaagaaggccgagaccgacaagatcgtggtgggcagcagcgtggcccccggcaacaccgcccccagccccagcagccccaccagccccaccagcgacgccaccaccagcctggagatgaacaacccccacgccatccccagaagacacgcccccatcgagcagctggccagacagggcagcttcagaggcttccccgccctgagccagaagatgagccccttcaagagacagctgagcctgagaatcaacgagctgcccagcaccatgcagagaaagaccgacttccccatcaagaacgccgtgcccgaggtggagggcgaggccgagagcatcagcagcctgtgcagccagatcaccaacgccttcagcacccccgaggaccccttcagcagcgcccccatgaccaagcccgtgaccgtggtggccccccagagccccaccttccaggccaacggcaccgacagcgccttccacgtgctggccaagcccgcccacaccgccctggcccccgtggccatgcccgtgagagagaccaacccctgggcccacgcccccgacgccgccaacaaggagatcgccgccacctgcagcggcaccgagtggggccagagcagcggcgccgccagccccggcctgttccaggccggccacagaagaacccccagcgaggccgacagatggctggaggaggtgagcaagagcgtgagagcccagcagccccaggccagcgccgcccccctgcagcccgtgctgcagccccccccccccaccgccatcagccagcccgccagccccttccagggcaacgccttcctgaccagccagcccgtgcccgtgggcgtggtgcccgccctgcagcccgccttcgtgcccgcccagagctaccccgtggccaacggcatgccctaccccgcccccaacgtgcccgtggtgggcatcacccccagccagatggtggccaacgtgttcggcaccgccggccacccccaggccgcccacccccaccagagccccagcctggtgagacagcagaccttcccccactacgaggccagcagcgccaccaccagccccttcttcaagccccccgcccagcacctgaacggcagcgccgccttcaacggcgtggacgacggcagactggccagcgccgacagacacaccgaggtgcccaccggcacctgccccgtggaccccttcgaggcccagtgggccgccctggagaacaagagcaagcagagaaccaaccccagccccaccaaccccttcagcagcgacctgcagaagaccttcgagatcgagctgtag

SEQ ID NO: 332676 - protein, 603 aa, Artificial Sequence
  derived and/or modified sequence
MNKLRQSFRRKKDVYVPEASRPHQWQTDEEGVRTGKCSFPVKYLGHVEVDESRGMHICEDAVKRLKAERKFFKGFFGKTGKKAVKAVLWVSADGLRVVDEKTKDLIVDQTIEKVSFCAPDRNFDRAFSYICRDGTTRRWICHCFMAVKDTGERLSHAVGCAFAACLERKQKREKECGVTATFDASRTTFTREGSFRVTTATEQAEREEIMKQMQDAKKAETDKIVVGSSVAPGNTAPSPSSPTSPTSDATTSLEMNNPHAIPRRHAPIEQLARQGSFRGFPALSQKMSPFKRQLSLRINELPSTMQRKTDFPIKNAVPEVEGEAESISSLCSQITNAFSTPEDPFSSAPMTKPVTVVAPQSPTFQGTEWGQSSGAASPGLFQAGHRRTPSEADRWLEEVSKSVRAQQPQASAAPLQPVLQPPPPTAISQPASPFQGNAFLTSQPVPVGVVPALQPAFVPAQSYPVANGMPYPAPNVPVVGITPSQMVANVFGTAGHPQAAHPHQSPSLVRQQTFPHYEASSATTSPFFKPPAQHLNGSAAFNGVDDGRLASADRHTEVPTGTCPVDPFEAQWAALENKSKQRTNPSPTNPFSSDLQKTFEIEL

SEQ ID NO: 332677 - DNA, 1812 bp, Artificial Sequence
  derived and/or modified sequence
atgaataagctgcggcagtcttttagacgcaagaaagacgtatacgtccccgaagcctcaagacctcaccaatggcagaccgatgaggagggcgtccgtacaggaaagtgctcatttcctgtgaagtacttggggcacgtggaggtcgacgagtcgcgcggaatgcatatctgcgaagacgcagtcaaaagactgaaggctgagagaaagtttttcaaggggtttttcgggaaaaccggtaaaaaggcagtcaaggccgtcctttgggtttctgccgacgggctgcgggtggtagatgagaagactaaggacctgatagtcgatcagactattgaaaaggtttccttctgcgcgccggacaggaacttcgatagggccttttcatacatctgtcgggacggaactacacgcaggtggatttgtcactgcttcatggctgtcaaagacacgggcgagcggctgtctcatgccgtggggtgcgctttcgcagcctgtctggaaaggaaacagaagcgcgaaaaggagtgcggagtgaccgccacgttcgatgcttcacgaaccacttttacgcgggagggctcctttcgcgttacaacggccactgagcaggcggaacgcgaagagattatgaaacaaatgcaggatgcaaaaaaggccgagacagataagattgtggtagggtctagcgtggctcccggcaataccgccccaagtcccagttcccctacaagccccacatctgacgccaccactagtctggaaatgaataaccctcatgctatccctcgccggcatgcgccaatcgaacagctcgcccgccagggctcttttcggggatttcccgcactttctcagaagatgtccccctttaagcgacagctctctcttcgcataaatgaattgcctagtaccatgcagaggaagactgactttcccattaagaacgccgtgcctgaggtggaaggcgaagcggagtcaatctctagtttatgttcccagattaccaatgctttttccaccccagaagaccctttctcgtccgctcccatgaccaagcccgtgacagtggtcgcacctcaatctcctaccttccaaggcactgaatggggccagagctccggtgctgcttcccccggactgtttcaggccgggcataggcggacaccgtccgaggccgatcgttggctggaagaagtgtcaaagtctgtgcgcgcgcagcaaccacaagcgagcgccgcgcccctgcaaccagtgctgcaaccgcctccaccaaccgcaatatcacagcctgcctccccctttcaaggaaacgcttttctaacttctcagccggtcccagttggagtcgtgcctgcattacagcccgccttcgtccctgctcaatcctatcctgttgcgaacggaatgccatacccagctcctaacgttcccgtggtgggcatcacaccaagccagatggtagccaacgtgtttggaaccgcaggtcacccccaagctgctcatccccatcagtctcctagtctggtcaggcagcagacattcccgcactacgaagcctcatccgcaaccacttccccgttctttaagcctcccgcgcagcacctcaatggtagcgcagccttcaatggagtcgacgatgggaggttggccagtgccgaccgtcacacagaagtgcccacagggacctgtccagtggacccatttgaggcccagtgggcagccctcgagaataaatccaagcagcggacgaatccttcccccactaatccattttcttctgatctccagaaaacattcgaaattgagctgtag

SEQ ID NO: 332678 - DNA, 777 bp, Artificial Sequence
  derived and/or modified sequence
atgaacaagttgcggcagtctttcagacgaaagaaggatgtttacgtgcctgaagcctcccgtcctcaccagtggcagacagacgaagagggtgtccgcaccggtaagtgctctttcccagtaaaatatcttgggcacgtggaggttgatgagtctcggggaatgcacatctgcgaggacgcagtgaagaggctgaaggctgagagaaaatttttcaaaggcttctttggaaaaaccggaaagaaagcggtgaaggccgtcctgtgggtaagcgcagacggtctccgggtggttgacgaaaagactaaggatctcatcgtggaccagacaattgaaaaggtgagcttttgtgccccggaccgaaattttgatagggcattctcctacatatgccgggatgggacgactcgacggtggatttgtcactgcttcatggcagtgaaggacactggggagaggctgagtcacgccgttgggtgtgcttttgctgcttgcctggagaggaagcagaaacgcgagaaggaatgtggggtgacggcaacattcgacgctagccggaccacctttacacgggagggatcatttagggtgaccactgccacggagcaagcagagcgagaggagattatgaagcagatgcaggatgctaaaaaagccgagaccgataaaattgttgtgggttccagtgtggctcctggaaataccgccccaagccccagttctcccacctctcctactagtgacgctaccacctctttggagatgaataacccctag

SEQ ID NO: 332679 - DNA, 777 bp, Artificial Sequence
  derived and/or modified sequence
atgaacaagcttcggcaatctttccgcaggaaaaaggacgtttatgtgccggaagcctcaaggccacaccaatggcagaccgatgaggagggggtgcgcaccgggaaatgctcattccccgtgaaatacctggggcatgtggaggttgacgagtcaaggggaatgcacatctgcgaggacgcggtgaaaagattaaaggccgagcgcaaattctttaaaggcttcttcgggaaaactggtaagaaagccgtgaaggctgtactctgggttagcgccgatggcctgcgcgtggtggacgagaagactaaggatctgattgtggaccagaccatagagaaggtgagcttttgcgccccagataggaacttcgaccgcgccttttcgtatatctgtcgagatggaaccacccgccgttggatttgccattgcttcatggctgtgaaggacactggggagcgcctgtctcacgccgtgggatgcgctttcgcagcatgcttagagaggaagcagaaaagggagaaagagtgtggggtgaccgccacttttgatgcttctcgcaccacatttacaagggaagggtcattccgggttacaacagcaacagaacaggccgaacgggaagagatcatgaagcagatgcaggacgccaagaaggctgaaactgataaaattgtggtgggttcaagtgtcgctccaggcaacacagctccgtccccgtcttcccctacaagcccgacaagtgacgcaaccacctcattggagatgaacaatccctag

SEQ ID NO: 332680 - DNA, 1812 bp, Artificial Sequence
  derived and/or modified sequence
atgaataagctgcgtcagagcttccgaagaaaaaaagatgtgtacgtgccagaggcatctcggccgcaccaatggcagactgatgaggagggcgtgcgaaccgggaagtgctcctttcccgtgaaatatctgggccatgtggaagttgacgagtctcgaggaatgcatatttgtgaggacgccgtcaagaggttgaaagctgagcgcaaattcttcaagggttttttcggcaagactggtaagaaagctgttaaggcagtcctctgggtatccgccgatgggctgagagttgtggatgaaaagacaaaggatctaattgtggaccagaccattgagaaggtgtctttttgtgcacctgataggaattttgacagagcattcagctacatctgccgggatggtactacaagacgatggatatgccattgcttcatggcagttaaagacacaggagagagattgtctcacgcggtcggatgcgccttcgcggcttgcttagaacgaaagcagaaacgggagaaggagtgcggtgtgacagcaacatttgatgccagccgcacaactttcacacgggaaggttcttttagggtcaccacggccacggagcaggccgagcgagaagagattatgaaacagatgcaggacgcgaaaaaggccgaaacagataaaatcgtggtcggcagctccgtggctccaggcaacacagccccctctcccagtagccccacgagccctacatctgacgctaccacctccctggaaatgaacaaccctcacgccattcccaggcggcatgccccaatcgaacaactagcaaggcagggttcctttcggggttttcccgctctctcacagaaaatgagcccgttcaaacggcagctgagtctgcgaatcaatgagcttcccagcaccatgcaacggaaaaccgatttcccaatcaaaaatgcagtacctgaagtagaaggcgaagctgagtcaatttcgtctctgtgttcacagataactaacgccttcagcacgccagaagatcccttctcctcagctccaatgacaaagcccgtgaccgtggtagctccccagagtcctactttccagggaactgagtggggccagtccagcggggctgcatctcctgggctctttcaggctggccaccggaggaccccgtctgaggccgaccggtggctggaggaagtatctaagtcggtgagggctcagcagccccaggcctctgccgccccgttgcagcccgtactgcagcctccgcctcctacagcgatcagccagcctgcttctccttttcaggggaatgcattcctgacaagccagccagtacctgtgggtgtcgtacccgcactccaacccgctttcgtgcccgcacagtcatacccagtcgcgaacggaatgccatatcccgctccaaacgttcctgtcgtcggcatcacgccttcacagatggttgcaaatgtattcggcaccgcaggacatccccaggccgcccacccccatcagtcaccaagtctggtgcggcagcagactttcccccactacgaggcaagttctgccacgactagtcccttcttcaaaccacccgctcagcacttaaacggttcggcggccttcaatggcgtggatgacgggcgcctcgcgagcgcagaccgccatactgaggtgcccactggaacctgccccgtagacccatttgaggcacagtgggccgctctcgagaataagagcaagcaacggactaacccaagcccaactaatccctttagttccgacttacagaagacctttgagatagaattatag

SEQ ID NO: 332681 - DNA, 1812 bp, Artificial Sequence
  derived and/or modified sequence
atgaacaagctgcggcagagcttccggaggaagaaggatgtgtatgtgcctgaggccagccggccccaccagtggcagacagatgaggagggcgtgaggacaggcaagtgcagcttccctgtgaagtacctgggccacgtggaggtggatgagagccggggcatgcacatctgtgaagatgctgtgaagaggctgaaggccgagaggaagttcttcaagggcttcttcggcaagacaggcaagaaggctgtgaaggctgtgctgtgggtgtctgcagatggcctgcgggtggtggatgagaagaccaaggacctgattgtggaccagaccatcgagaaggtgtccttctgtgccccagacaggaactttgaccgggccttctcctacatctgcagagatggcaccacccggcgctggatctgccactgcttcatggctgtgaaggacaccggggagcggctgagccatgctgtgggctgtgcctttgctgcctgcctggagaggaagcagaagcgggagaaggaatgtggggtgacagccacctttgatgccagcaggaccaccttcacccgggagggcagcttccgggtgaccacagccacagagcaggccgagcgggaggagatcatgaagcagatgcaggatgccaagaaggccgagacagacaagatcgtggtgggcagctctgtggcccctggcaacacagcccccagccccagcagccccaccagccccaccagtgatgccaccaccagcctggagatgaacaacccccacgccatccccaggagacatgcccccatcgagcagctggcccggcagggcagcttccggggcttccctgccctgagccagaagatgagccccttcaagaggcagctgagcctgcgcatcaatgagctgcccagcaccatgcagaggaagacagacttccccatcaagaatgctgtgcctgaggtggagggggaggccgagagcatcagcagcctgtgcagccagatcaccaatgccttcagcaccccagaggaccccttcagcagcgcccccatgaccaagcctgtgacagtggtggccccccagagccccaccttccagggcacagagtggggccagagcagtggagctgccagccctggcctcttccaggccggccacaggaggacccccagcgaggccgaccgctggctggaggaggtgtccaagtctgtgcgggcccagcagccccaggccagcgctgcccccctgcagcctgtgctgcagcccccaccacccacagccatcagccagcctgccagccccttccagggcaatgccttcctgaccagccagcctgtgcctgtgggcgtggtgcctgccctgcagcctgcctttgtgcctgcccagagctaccctgtggccaacggcatgccctacccagccccaaatgtgcctgtggtgggcatcacccccagccagatggtggccaacgtgtttggaacagctggccacccccaggccgcccacccccaccagagccccagcctggtgcggcagcagaccttcccccactatgaggccagcagcgccaccaccagccccttcttcaagcccccagcccagcacctgaatggcagcgctgccttcaacggggtggatgatggccgcctggccagcgctgacagacacacagaggtgcccaccggcacctgccctgtggacccctttgaggcccagtgggccgccctggagaacaagagcaagcagaggaccaaccccagccccaccaaccccttcagcagtgacctgcagaagacctttgaaattgagctgtag

SEQ ID NO: 332682 - DNA, 777 bp, Artificial Sequence
  derived and/or modified sequence
atgaacaagctgcggcagagcttccggaggaagaaggatgtgtatgtgcctgaggccagccggccccaccagtggcagacagatgaggagggcgtgaggacaggcaagtgcagcttccctgtgaagtacctgggccacgtggaggtggatgagagccggggcatgcacatctgtgaagatgctgtgaagaggctgaaggccgagaggaagttcttcaagggcttcttcggcaagacaggcaagaaggctgtgaaggctgtgctgtgggtgtctgcagatggcctgcgggtggtggatgagaagaccaaggacctgattgtggaccagaccatcgagaaggtgtccttctgtgccccagacaggaactttgaccgggccttctcctacatctgcagagatggcaccacccggcgctggatctgccactgcttcatggctgtgaaggacaccggggagcggctgagccatgctgtgggctgtgcctttgctgcctgcctggagaggaagcagaagcgggagaaggaatgtggggtgacagccacctttgatgccagcaggaccaccttcacccgggagggcagcttccgggtgaccacagccacagagcaggccgagcgggaggagatcatgaagcagatgcaggatgccaagaaggccgagacagacaagatcgtggtgggcagctctgtggcccctggcaacacagcccccagccccagcagccccaccagccccaccagtgatgccaccaccagcctggagatgaacaacccctag

SEQ ID NO: 332683 - DNA, 1812 bp, Artificial Sequence
  derived and/or modified sequence
atgaacaagctgcggcagagcttccggcggaagaaggacgtgtacgttcctgaggcatctcgcccgcatcagtggcaaaccgatgaagagggcgtgcgaacaggaaaatgcagcttcccagtcaaatatcttggtcacgttgaggtggatgaatcacggggaatgcatatctgtgaggacgcagtaaagcggttgaaagctgagagaaaattttttaagggattcttcgggaaaactgggaagaaagcagtgaaagccgttctctgggtgtctgcagatgggttacgtgtggtcgatgaaaaaactaaagaccttatcgtcgaccagactattgaaaaagtgtctttttgcgcaccagaccggaatttcgaccgcgcattctcttacatatgtcgggatggcactactaggaggtggatctgtcattgcttcatggccgttaaggacacaggtgaacggctgagtcacgcagtggggtgcgcgtttgcagcctgcctggagagaaagcagaaacgcgaaaaggagtgtggcgtgaccgcaacctttgatgcttcccgtacaaccttcacacgagaggggagctttcgtgtgacaacagccaccgagcaagcggagagggaggagatcatgaagcagatgcaggatgctaaaaaggccgagacagacaagattgttgtgggatccagcgtggctcctggcaatacggctccatctccttcctccccaacgagccctacatctgacgccaccacctcgctagagatgaataatccccatgcaataccccgccggcatgctccgatcgagcagctggcaagacagggatcgttccggggattccctgctttatcacaaaagatgagtcctttcaagcgccagctgtctctccgaatcaatgaattgccgtcgacaatgcagaggaagaccgacttcccgatcaaaaatgccgttccggaagtggagggcgaagctgaaagcatatcgtcgttatgctcccagataaccaacgctttctccacacctgaggatccctttagcagcgctccaatgactaagccagtaactgtcgtggccccacaaagcccaactttccaagggactgagtggggccagtcatccggagcagcaagtccaggacttttccaggccggccacaggaggacaccgtcggaagcagatagatggttggaagaagtttccaaaagcgtgagggcccaacagccccaagctagcgcagccccgttgcagcctgtgctgcagcccccccctccaactgctatcagtcagcccgcgtctccgttccagggtaacgctttcctcacttctcaacccgtgccagtgggggtggtgcctgctctgcagcctgcatttgttcccgcacagagttaccctgttgctaatggcatgccctatcctgcccccaacgtgcccgtcgtgggtataactccgtcacagatggtggcaaacgtatttggcactgcaggccacccccaagctgcccatcctcaccagagcccgtccctagttaggcagcagacattcccccattacgaggcgtccagcgcgactactagcccgttttttaagccacccgcccagcatctcaacgggagcgcagcctttaatggagtcgatgacggaaggcttgcttcagctgatcgtcatacggaggtgccaaccgggacttgccctgtggacccattcgaggcacagtgggccgcactggagaataagagtaaacagcggaccaacccctctccaactaacccctttagttccgatcttcaaaagacattcgaaatagaactttag

SEQ ID NO: 332684 - DNA, 777 bp, Artificial Sequence
  derived and/or modified sequence
atgaacaagctgcggcagagcttccggcggaagaaggacgtgtacgtccccgaggcctcacggccacatcagtggcagacagacgaggaaggagtaaggaccggtaaatgttcattccccgtcaagtaccttggccatgtcgaagtggacgaatcccggggtatgcacatctgcgaggacgctgtgaagaggttgaaggccgaaaggaaattttttaaagggttttttggtaaaacaggaaaaaaggctgtgaaagctgtgctctgggtgagtgctgacggactacgggtcgtggacgagaagactaaggatctgatagtcgatcagacgattgaaaaagtgtctttttgtgcgccagaccgtaattttgaccgggcctttagctacatttgccgagacggcacgactagacgctggatctgccactgcttcatggccgtgaaagataccggagagaggctttcccacgcggtgggctgtgcattcgccgcttgcctggaacggaaacaaaagcgcgagaaagagtgtggcgtgaccgcaacatttgatgccagtcgaacaacttttacgcgggagggaagcttcagagtgacgactgctaccgagcaggcagaaagggaagagataatgaagcagatgcaggatgctaagaaggccgaaacggacaaaatagtggtcgggagcagcgtcgcccccggcaataccgccccctctccatcttcacctacatctccaactagtgatgcaacgaccagtttggaaatgaacaacccctag

SEQ ID NO: 332685 - DNA, 777 bp, Artificial Sequence
  derived and/or modified sequence
atgaacaagctgcggcagagcttccggcggaagaaggacgtgtacgttcctgaggcatcccggccccaccaatggcagactgacgaggagggggttaggaccggcaaatgctcattcccagtaaaatatctgggacatgtagaggtggatgaaagtaggggtatgcacatctgcgaggacgctgtaaagcgcctcaaggccgagcgtaagttctttaaaggtttttttggaaaaacagggaagaaagcagttaaagcagtcctgtgggtaagcgcggatgggctgagggtagtcgatgagaagactaaagatctgatagtggaccaaactattgagaaagtgagtttttgcgcccccgaccgaaatttcgaccgtgccttttcttatatctgcagagacgggaccaccagacgatggatctgtcactgtttcatggccgtgaaagacactggagagcgactcagccacgcggtaggctgcgctttcgctgcctgtctggagcgtaaacagaaaagggagaaggagtgtggggtcacggctacctttgacgcatcccgcactacgtttacccgcgaggggtcttttcgcgtgaccactgccactgagcaagccgaacgcgaggagattatgaagcagatgcaggacgcaaagaaggctgagaccgacaaaatagtggtcggctcctccgtggccccgggaaatacagccccaagccccagtagccctacgtcccccacctctgatgctacaacttccctcgagatgaacaacccttag

SEQ ID NO: 332686 - DNA, 1812 bp, Artificial Sequence
  derived and/or modified sequence
atgaacaagctgcggcagagcttccggcggaagaaggacgtgtacgtgcctgaggcgtcccggccgcatcagtggcagaccgatgaagaaggcgtacgtaccgggaaatgctccttccctgttaaatacttagggcatgtagaagtagacgaaagcagggggatgcatatctgtgaggacgctgtgaaacgtctgaaagccgagaggaagttcttcaagggatttttcggaaagacagggaaaaaagcagtaaaggccgtgctctgggtgtccgctgacggcctgagagtggtggacgagaaaaccaaagatctcatcgtggatcaaaccattgagaaggttagtttctgtgcaccagatcgcaactttgatcgtgcattttcatacatctgcagagacggcactacgaggcgatggatctgccactgcttcatggcagtgaaggataccggagagaggctgagccatgccgtggggtgtgcatttgcagcctgtctcgaaaggaaacaaaaaagagagaaagaatgtggcgtaacagctacttttgatgcatccaggaccacatttactagagagggtagctttcgggtgaccactgcaacagaacaggccgaacgcgaggagattatgaagcaaatgcaagatgccaagaaggcagagacagacaagatagtagttggctcctcagttgcccctggtaacacagcccccagcccttccagcccgacttcccccacctctgatgccaccactagcctcgagatgaacaacccgcacgcaatccccaggcggcacgctcccatagagcaactcgcccggcagggatcatttcgaggctttcctgcattgagtcagaaaatgtcaccgttcaaacgccagctctccctgcggatcaacgaactgccttccactatgcagcggaaaactgatttcccaatcaaaaacgctgtcccagaagttgagggggaggccgagagcatcagttcattatgctctcagataactaatgccttttctacacctgaagatcccttttcaagtgctcctatgactaagccagttacagtggtggctccccagagcccaacgtttcaaggaaccgaatggggccagtcaagcggcgccgccagtcccgggcttttccaggctggtcataggagaactccctctgaggctgacagatggctcgaagaggttagtaagtcagtccgagcccagcaaccccaagcgtcggccgccccactccagccggtcctccagcctccaccaccgaccgcaatttctcagcctgcaagcccatttcaagggaatgcatttctgacgagccagccagtgcccgttggagttgtgccagcacttcagccagcgtttgttccagctcagagctatcctgtcgcaaacggcatgccatatccagctccaaacgttcctgtcgtgggcattaccccatctcaaatggtagctaacgtgtttggtacagcgggacatccccaggccgcgcacccacatcagtcccccagtctagtcaggcagcagacattccctcattatgaggctagttctgccaccacttccccttttttcaagccacccgcccagcacttaaatggaagcgccgccttcaacggggtcgatgacgggcgactggcttctgctgatcgtcacactgaggtgcctacaggaacctgcccagtggaccccttcgaggcccagtgggctgccctcgaaaataagagcaagcagcgcaccaacccttccccaactaaccccttctcgtctgacttgcagaagacatttgaaatcgagctgtag

SEQ ID NO: 332687 - DNA, 3453 bp, Artificial Sequence
  derived and/or modified sequence
gcttgagttggtcgggggcagcggcagctgagctgggatgggagacccaactggcctggccgctccggctctgaggatccctaagggaccaggaaagaagtcctcgaggagtggctcgcgtttgagaccgggatttgaggcttaagcaacttcttccggggaagagtgccagtgcagccactgttacaattcaagatcttgatctatatccatagattggaatattggtgggccagcaatcctcagacgcctcacttaggacaagctgtaaaaattaaaatgaacaaattacggcaaagttttaggagaaagaaggatgtttatgttccagaggccagtcgtccacatcagtggcagacagatgaagaaggcgttcgcaccggaaaatgtagcttcccggttaagtaccttggccatgtagaagttgatgaatcaagaggaatgcacatctgtgaagatgctgtaaaaagattgaaagctgaaaggaagttcttcaaaggcttctttggaaaaactggaaagaaagcagttaaagcagttctgtgggtctcagcagatggactcagagttgtggatgaaaaaactaaggacctcatagttgaccagacgatagagaaagtttctttctgtgccccagacaggaactttgatagagccttttcttacatatgccgtgatggcaccactcgtcgctggatctgtcactgcttcatggctgtcaaggacacaggtgaaaggttgagccatgcagtaggctgtgcttttgcagcctgtttagagcgcaagcagaagcgggagaaggaatgtggagtgactgctacttttgatgctagtcggaccacttttacaagagaaggatcattccgtgtcacaacagccactgaacaagcagaaagagaggagatcatgaaacaaatgcaagatgccaagaaagctgaaacagataagatagtcgttggttcatcagttgcccctggcaacactgccccatccccatcctctcccacctctcctacttctgatgccacgacctctctggagatgaacaatcctcatgccatcccacgccggcatgctccaattgaacagcttgctcgccaaggctctttccgaggttttcctgctcttagccagaagatgtcaccctttaaacgccaactatccctacgcatcaatgagttgccttccactatgcagaggaagactgatttccccattaaaaatgcagtgccagaagtagaaggggaggcagagagcatcagctccctgtgctcacagatcaccaatgccttcagcacacctgaggaccccttctcatctgctccgatgaccaaaccagtgacagtggtggcaccacaatctcctaccttccaagggaccgagtggggtcaatcttctggtgctgcctctccaggtctcttccaggccggtcatagacgtactccctctgaggccgaccgatggttagaagaggtgtctaagagcgtccgggctcagcagccccaggcctcagctgctcctctgcagccagttctccagcctcctccacccactgccatctcccagccagcatcacctttccaagggaatgcattcctcacctctcagcctgtgccagtgggtgtggtcccagccctgcaaccagcctttgtccctgcccagtcctatcctgtggccaatggaatgccctatccagcccctaatgtgcctgtggtgggcatcactccctcccagatggtggccaacgtatttggcactgcaggccaccctcaggctgcccatccccatcagtcacccagcctggtcaggcagcagacattccctcactacgaggcaagcagtgctaccaccagtcccttctttaagcctcctgctcagcacctcaacggttctgcagctttcaatggtgtagatgatggcaggttggcctcagcagacaggcatacagaggttcctacaggcacctgcccagtggatccttttgaagcccagtgggctgcattagaaaataagtccaagcagcgtactaatccctcccctaccaaccctttctccagtgacttacagaagacgtttgaaattgaactttaagcaatcattatggctatgtatcttgtccataccagacagggagcagggggtagcggtcaaaggagcaaaacagactttgtctcctgattagtactcttttcactaatcccaaaggtcccaaggaacaagtccaggcccagagtactgtgaggggtgattttgaaagacatgggaaaaagcattcctagagaaaagctgccttgcaattaggctaaagaagtcaaggaaatgttgctttctgtactccctcttcccttacccccttacaaatctctggcaacagagaggcaaagtatctgaacaagaatctatattccaagcacatttactgaaatgtaaaacacaacaggaagcaaagcaatctccctttgtttttcaggccattcacctgcctcctgtcagtagtggcctgtattagagatcaagaagagtggtttgtgctcaggctggggaacagagaggcacgctatgctgccagaattcccaggagggcatatcagcaactgcccagcagagctatattttgggggagaagttgagcttccattttgagtaacagaataaatattatatatatcaaaagccaaaatctttatttttatgcatttagaatattttaaatagttctcagatattaagaagttgtatgagttgtaagtaatcttgccaaaggtaaaggggctagttgtaagaaattgtacataagattgatttatcattgatgcctactgaaataaaaagaggaaaggctggaagctgcagacaggatccctagcttgttttctgtcagtcattcattgtaagtagcacattgcaacaacaatcatgcttatgaccaatacagtcactaggttgtagttttttttaaataaaggaaaagcagtattgtcctggttttaaacctatgatggaattctaatgtcattattttaatggaatcaatcgaaatatgctctatagagaatatatcttttatatattgctgcagtttccttatgttaatcctttaacactaaggtaacatgacataatcataccatagaagggaacacaggttaccatattggtttgtaatatgggtcttggtgggttttgttttatcctttaaattttgttcccatgagttttgtggggatggggattctggttttattagctttgtgtgtgtcctcttcccccaaacccccttttggtgagaacatccccttgacagttgcagcctcttgacctcggataacaataagagagctcatctcatttttacttttgaacgttggccttacaatcaaatgtaagttatatatatttgtactgatgaaaatttataatctgctttaacaaaaataaatgttcatggtagaa

SEQ ID NO: 332688 - DNA, 954 bp, Artificial Sequence
  derived and/or modified sequence
tggcgcttgagttggtcgggggcagcggcagatttgaggcttaagcaacttcttccggggaagagtgccagtgcagccactgttacaattcaagatcttgatctatatccatagattggaatattggtgggccagcaatcctcagacgcctcacttaggacaagctgtaaaaattaaaatgaacaaattacggcaaagttttaggagaaagaaggatgtttatgttccagaggccagtcgtccacatcagtggcagacagatgaagaaggcgttcgcaccggaaaatgtagcttcccggttaagtaccttggccatgtagaagttgatgaatcaagaggaatgcacatctgtgaagatgctgtaaaaagattgaaagctgaaaggaagttcttcaaaggcttctttggaaaaactggaaagaaagcagttaaagcagttctgtgggtctcagcagatggactcagagttgtggatgaaaaaactaaggacctcatagttgaccagacgatagagaaagtttctttctgtgccccagacaggaactttgatagagccttttcttacatatgccgtgatggcaccactcgtcgctggatctgtcactgcttcatggctgtcaaggacacaggtgaaaggttgagccatgcagtaggctgtgcttttgcagcctgtttagagcgcaagcagaagcgggagaaggaatgtggagtgactgctacttttgatgctagtcggaccacttttacaagagaaggatcattccgtgtcacaacagccactgaacaagcagaaagagaggagatcatgaaacaaatgcaagatgccaagaaagctgaaacagataagatagtcgttggttcatcagttgcccctggcaacactgccccatccccatcctctcccacctctcctacttctgatgccacgacctctctggagatgaacaatcctca

SEQ ID NO: 332689 - DNA, 1039 bp, Artificial Sequence
  derived and/or modified sequence
gagttctcccgaggaaggtaggctacggccggacccgcgcgggtcaggccaggaggtcccttgggacgtccagctgctccggtctagcgcgctgaccggcggccactgtgtgaggaatttgaggcttaagcaacttcttccggggaagagtgccagtgcagccactgttacaattcaagatcttgatctatatccatagattggaatattggtgggccagcaatcctcagacgcctcacttaggacaagctgtaaaaattaaaatgaacaaattacggcaaagttttaggagaaagaaggatgtttatgttccagaggccagtcgtccacatcagtggcagacagatgaagaaggcgttcgcaccggaaaatgtagcttcccggttaagtaccttggccatgtagaagttgatgaatcaagaggaatgcacatctgtgaagatgctgtaaaaagattgaaagctgaaaggaagttcttcaaaggcttctttggaaaaactggaaagaaagcagttaaagcagttctgtgggtctcagcagatggactcagagttgtggatgaaaaaactaaggacctcatagttgaccagacgatagagaaagtttctttctgtgccccagacaggaactttgatagagccttttcttacatatgccgtgatggcaccactcgtcgctggatctgtcactgcttcatggctgtcaaggacacaggtgaaaggttgagccatgcagtaggctgtgcttttgcagcctgtttagagcgcaagcagaagcgggagaaggaatgtggagtgactgctacttttgatgctagtcggaccacttttacaagagaaggatcattccgtgtcacaacagccactgaacaagcagaaagagaggagatcatgaaacaaatgcaagatgccaagaaagctgaaacagataagatagtcgttggttcatcagttgcccctggcaacactgccccatccccatcctctcccacctctcctacttctgatgccacgacctctctggagatgaacaatcctca

SEQ ID NO: 332690 - DNA, 3037 bp, Artificial Sequence
  derived and/or modified sequence
gttgtcatgggggaggtggtggcgcttggtggccactggcggccgaggtagaggcagtggcgcttgagttggtcgggggcagcggcagatttgaggcttaagcaacttcttccggggaagagtgccagtgcagccactgttacaattcaagatcttgatctatatccatagattggaatattggtgggccagcaatcctcagacgcctcacttaggacaaatgaggaaactgaggcttggtgaagttacgaaacttgtccaaaatcacacaacttgtaaagggcacagccaagattcagagccaggctgtaaaaattaaaatgaacaaattacggcaaagttttaggagaaagaaggatgtttatgttccagaggccagtcgtccacatcagtggcagacagatgaagaaggcgttcgcaccggaaaatgtagcttcccggttaagtaccttggccatgtagaagttgatgaatcaagaggaatgcacatctgtgaagatgctgtaaaaagattgaaagctgaaaggaagttcttcaaaggcttctttggaaaaactggaaagaaagcagttaaagcagttctgtgggtctcagcagatggactcagagttgtggatgaaaaaactaaggacctcatagttgaccagacgatagagaaagtttctttctgtgccccagacaggaactttgatagagccttttcttacatatgccgtgatggcaccactcgtcgctggatctgtcactgcttcatggctgtcaaggacacaggtgaaaggttgagccatgcagtaggctgtgcttttgcagcctgtttagagcgcaagcagaagcgggagaaggaatgtggagtgactgctacttttgatgctagtcggaccacttttacaagagaaggatcattccgtgtcacaacagccactgaacaagcagaaagagaggagatcatgaaacaaatgcaagatgccaagaaagctgaaacagataagatagtcgttggttcatcagttgcccctggcaacactgccccatccccatcctctcccacctctcctacttctgatgccacgacctctctggagatgaacaatcctcatgccatcccacgccggcatgctccaattgaacagcttgctcgccaaggctctttccgaggttttcctgctcttagccagaagatgtcaccctttaaacgccaactatccctacgcatcaatgagttgccttccactatgcagaggaagactgatttccccattaaaaatgcagtgccagaagtagaaggggaggcagagagcatcagctccctgtgctcacagatcaccaatgccttcagcacacctgaggaccccttctcatctgctccgatgaccaaaccagtgacagtggtggcaccacaatctcctaccttccaagggaccgagtggggtcaatcttctggtgctgcctctccaggtctcttccaggccggtcatagacgtactccctctgaggccgaccgatggttagaagaggtgtctaagagcgtccgggctcagcagccccaggcctcagctgctcctctgcagccagttctccagcctcctccacccactgccatctcccagccagcatcacctttccaagggaatgcattcctcacctctcagcctgtgccagtgggtgtggtcccagccctgcaaccagcctttgtccctgcccagtcctatcctgtggccaatggaatgccctatccagcccctaatgtgcctgtggtgggcatcactccctcccagatggtggccaacgtatttggcactgcaggccaccctcaggctgcccatccccatcagtcacccagcctggtcaggcagcagacattccctcactacgaggcaagcagtgctaccaccagtcccttctttaagcctcctgctcagcacctcaacggttctgcagctttcaatggtgtagatgatggcaggttggcctcagcagacaggcatacagaggttcctacaggcacctgcccagtggatccttttgaagcccagtgggctgcattagaaaataagtccaagcagcgtactaatccctcccctaccaaccctttctccagtgacttacagaagacgtttgaaattgaactttaagcaatcattatggctatgtatcttgtccataccagacagggagcagggggtagcggtcaaaggagcaaaacagactttgtctcctgattagtactcttttcactaatcccaaaggtcccaaggaacaagtccaggcccagagtactgtgaggggtgattttgaaagacatgggaaaaagcattcctagagaaaagctgccttgcaattaggctaaagaagtcaaggaaatgttgctttctgtactccctcttcccttacccccttacaaatctctggcaacagagaggcaaagtatctgaacaagaatctatattccaagcacatttactgaaatgtaaaacacaacaggaagcaaagcaatctccctttgtttttcaggccattcacctgcctcctgtcagtagtggcctgtattagagatcaagaagagtggtttgtgctcaggctggggaacagagaggcacgctatgctgccagaattcccaggagggcatatcagcaactgcccagcagagctatattttgggggagaagttgagcttccattttgagtaacagaataaatattatatatatcaaaagccaaaatctttatttttatgcatttagaatattttaaatagttctcagatattaagaagttgtatgagttgtaagtaatcttgccaaaggtaaaggggctagttgtaagaaattgtacataagattgatttatcattgatgcctactgaaataaaaagaggaaaggctggaagctgcagacaggatccctagcttgttttctgtcagtcattcattgtaagtagcacattgcaacaacaatcatgcttatgaccaatacagtcactaggttgtagttttttttaaataaaggaaaagcagtattgtcctggttttaaaccta

SEQ ID NO: 332691 - DNA, 1812 bp, Artificial Sequence
  derived and/or modified sequence
atgaacaagctgaggcaaagttttcgaagaaagaaggacgtttacgtgcctgaggcctctagaccacatcagtggcagactgacgaggagggcgtgcggaccggaaagtgctcattcccagtgaagtacctcggacatgtggaagtcgacgagtctcgcggtatgcatatctgcgaggatgccgtgaagcgccttaaggctgaacggaagttcttcaaagggttttttggaaagaccggcaaaaaggcggtcaaggccgtcttatgggtaagcgctgatggtttgcgcgtggtcgatgaaaaaactaaagacctgatagtggatcagacaatcgaaaaagtctccttctgtgcccctgatcggaatttcgaccgagccttctcctatatctgtagggacgggacaacaaggaggtggatctgccactgctttatggccgttaaagacaccggagagcgtctttctcatgccgtggggtgtgcttttgccgcttgtctggaacgcaagcagaagagagaaaaagagtgtggggtgacagctacttttgacgcctcaaggactacattcacgcgtgaagggtcattcagagtcaccactgcaaccgagcaggccgagcgggaggagatcatgaagcagatgcaagatgcgaaaaaagccgagacagataagattgtggttggaagctctgtggcacccggtaatacggccccatctccttccagcccaacttcccctacatcagacgccacaacctcccttgagatgaacaatccacatgccattcctcggagacacgctcccattgaacagctcgccagacaaggcagctttagagggttcccggcactgagtcagaagatgagtcctttcaaacgccagctctctctcagaattaatgagcttccttcgaccatgcaacgaaaaactgacttccctatcaaaaatgcggtgccggaggtcgagggcgaggccgaaagtatctcatctctgtgtagccagattacaaacgcatttagcacgccagaagacccattctcatctgcccctatgacaaagccagtgaccgtggtggctccacagagcccaactttccagggaactgagtgggggcagtctagcggcgctgcttcccccggactgttccaggcagggcatcgtaggacacctagcgaggctgaccgctggctggaggaagtcagtaaatccgtgcgagcacaacaacctcaggccagcgccgcaccactgcagcctgtgttgcaaccccctcccccaacagctatttcccagcccgcttctcctttccaggggaacgcttttctgacttcccagccagtgcctgtcggggtggtacctgctttacagccagctttcgttccagcccagtcttatcctgtggccaatggcatgccgtacccggctcccaacgtgcctgtagtgggaataaccccatctcagatggtggccaacgttttcggaaccgcagggcacccccaagccgctcatccccatcaaagtccaagtctggtgagacagcagaccttcccacactatgaggcaagtagcgcgacaacctcacctttttttaaacctcccgctcaacatttaaacggatcagccgcatttaatggtgttgacgatggaagactggcctccgctgatagacacaccgaggtgcctacggggacatgtcccgtcgacccattcgaagctcaatgggccgctctcgaaaacaaaagcaaacaacgtactaatccctcaccaaccaacccgttctcctcagacctccagaagacctttgagatcgaactgtag

SEQ ID NO: 332692 - DNA, 777 bp, Artificial Sequence
  derived and/or modified sequence
atgaacaagcttcgtcaaagcttccgcagaaagaaggatgtatacgtccctgaggcttcaaggcctcatcagtggcaaaccgacgaggagggtgtgcgaactgggaagtgctcttttcctgttaagtacctaggccacgtggaagtcgacgagtcgcgcggaatgcacatatgtgaagacgccgtgaagcggctgaaagccgaaagaaaattcttcaaagggttcttcggcaaaacaggtaaaaaagccgtgaaggccgttctctgggtttctgccgacggcttgagggtggtcgatgaaaagaccaaggacctgatcgtggaccagaccatcgagaaagtgtccttttgtgccccagaccgaaactttgacagagccttcagctatatttgcagagatggcacaacccgacggtggatctgtcattgttttatggcggtgaaggataccggtgaacgattatcccatgccgttggttgcgccttcgctgcttgcctggaacgcaaacaaaagcgggagaaggaatgtggggttacagccacttttgatgcttcacgcactacatttacacgcgagggctctttcagagtgacaaccgcaactgaacaagcagagagagaagaaatcatgaaacaaatgcaggacgccaagaaggcagagacagataaaatcgtcgtggggtctagcgtggctccagggaatactgcccctagcccatcctcgccaacgagccctactagcgacgccacaacaagcctggagatgaacaatccatag

SEQ ID NO: 332693 - DNA, 777 bp, Artificial Sequence
  derived and/or modified sequence
atgaataaactacgacagagcttccgccgtaagaaggacgtgtatgtacccgaagcctccaggccacaccaatggcaaaccgacgaagaaggagtacggacgggtaaatgctcttttccagtcaagtatttgggccacgtggaggtggatgagtcccgcggaatgcacatctgtgaagatgcagtaaagagactgaaggctgagcggaaattttttaagggattttttggtaaaaccggcaagaaagctgtcaaggcagtcctatgggtaagcgcggatggattacgggtggtcgatgaaaaaacaaaggacctgattgtggaccaaacaatagagaaagtgtccttctgcgcccctgatcgcaacttcgatagggcttttagctacatttgccgcgacggcaccactcggcgatggatctgccactgcttcatggccgtcaaggacactggggagagactgtctcacgccgttggctgtgcctttgccgcttgcctagagcggaaacaaaagagagagaaagagtgcggagtcacagccactttcgatgccagcagaactacttttacgagggaggggagcttccgggtgacaacggctacagagcaggccgagagagaagagatcatgaaacagatgcaagatgctaaaaaggcggaaactgataaaatcgtcgtcggttcttctgtggcccctggcaacactgctccatctcctagttccccgacttctccgacaagcgacgcaacgacaagcctagaaatgaacaacccctag

SEQ ID NO: 332694 - DNA, 1812 bp, Artificial Sequence
  derived and/or modified sequence
atgaataagctgagacagtctttcagaaggaaaaaggacgtatatgtgcccgaagcctctcgaccacatcaatggcagacagacgaagaaggagtgaggacaggcaagtgctcatttcctgttaaatatcttggtcacgtagaggtcgacgagtcccgcggaatgcatatatgcgaggacgcagtgaagaggctcaaggctgagcggaaattcttcaaaggcttctttggcaaaactggcaagaaagctgtgaaggccgtcctttgggtgtctgctgacgggctccgtgtggtggacgagaagactaaggatctgatcgttgaccagaccatcgaaaaagtcagcttttgtgctcccgataggaacttcgaccgcgctttttcttatatatgcagggatggtacgactcgtagatggatatgtcattgctttatggccgtcaaagacacgggagagagactctcacatgccgtcggttgcgcatttgcggcttgtttagaacggaaacagaagcgcgagaaagagtgcggggtgaccgccacttttgacgcatcaagaacaacctttaccagagaagggagtttcagagtgacgaccgcaacagagcaggctgagcgggaggaaattatgaaacagatgcaagacgccaaaaaagcagagacagataagattgttgtgggatcatccgtggcgcctgggaacacggcacctagtccgagtagccccacatcccccacaagcgacgctactacttcactcgagatgaataatccacacgctattccccgtcgtcatgctccgattgaacaactagcaaggcaggggagcttccgaggatttcctgccctaagtcagaagatgagcccttttaagcggcagctgtcactgcgcatcaacgaattaccgtccaccatgcagcggaagaccgattttccaatcaagaacgctgtgcctgaggttgaaggagaggccgagtccatttcctccctttgtagtcagatcacaaacgcgttttcgacccctgaagacccgttctcatccgcgcctatgactaaacctgtaaccgtggtggccccacaatctcccacattccaaggcacagaatgggggcaatcttctggagctgcgagcccgggtctgttccaagcgggacaccgaagaaccccatccgaagcagaccgttggttagaagaagtcagtaagtcagtaagggcccagcagcctcaagccagcgccgctcccttgcagccagtactgcagccgccacctccaactgccatatctcagcctgcgtctccttttcaggggaacgcctttctaacgtcgcaaccagtgcccgttggtgtggtgcccgcactgcagcctgcttttgttccagctcagagctaccccgtggctaatggaatgccttaccctgctcccaacgtgccagtagtggggattactcccagtcagatggtggcaaatgtgttcggaacagctggccatccacaggcggcacacccccaccagtcaccttctctggtgaggcagcaaaccttcccccactacgaagcatcctccgcaaccacatccccattcttcaagccgcctgcccagcacctgaacgggagtgccgctttcaacggcgtggacgacggcagattggccagcgcagataggcacacggaggtacccactgggacctgccctgtagaccctttcgaagcccagtgggctgcattggaaaacaagtcaaagcaacgcacaaatccatcacctacaaaccccttttcttccgaccttcagaagactttcgagatcgagctctag

SEQ ID NO: 332695 - DNA, 1812 bp, Artificial Sequence
  derived and/or modified sequence
atgaacaagctgagacagagcttcagaagaaagaaggacgtgtacgtgcccgaggccagcagaccccaccagtggcagaccgacgaggagggcgtgagaaccggcaagtgcagcttccccgtgaagtacctgggccacgtggaggtggacgagagcagaggcatgcacatctgcgaggacgccgtgaagagactgaaggccgagagaaagttcttcaagggcttcttcggcaagaccggcaagaaggccgtgaaggccgtgctgtgggtgagcgccgacggcctgagagtggtggacgagaagaccaaggacctgatcgtggaccagaccatcgagaaggtgagcttctgcgcccccgacagaaacttcgacagagccttcagctacatctgcagagacggcaccaccagaagatggatctgccactgcttcatggccgtgaaggacaccggcgagagactgagccacgccgtgggctgcgccttcgccgcctgcctggagagaaagcagaagagagagaaggagtgcggcgtgaccgccaccttcgacgccagcagaaccaccttcaccagagagggcagcttcagagtgaccaccgccaccgagcaggccgagagagaggagatcatgaagcagatgcaggacgccaagaaggccgagaccgacaagatcgtggtgggcagcagcgtggcccccggcaacaccgcccccagccccagcagccccaccagccccaccagcgacgccaccaccagcctggagatgaacaacccccacgccatccccagaagacacgcccccatcgagcagctggccagacagggcagcttcagaggcttccccgccctgagccagaagatgagccccttcaagagacagctgagcctgagaatcaacgagctgcccagcaccatgcagagaaagaccgacttccccatcaagaacgccgtgcccgaggtggagggcgaggccgagagcatcagcagcctgtgcagccagatcaccaacgccttcagcacccccgaggaccccttcagcagcgcccccatgaccaagcccgtgaccgtggtggccccccagagccccaccttccagggcaccgagtggggccagagcagcggcgccgccagccccggcctgttccaggccggccacagaagaacccccagcgaggccgacagatggctggaggaggtgagcaagagcgtgagagcccagcagccccaggccagcgccgcccccctgcagcccgtgctgcagccccccccccccaccgccatcagccagcccgccagccccttccagggcaacgccttcctgaccagccagcccgtgcccgtgggcgtggtgcccgccctgcagcccgccttcgtgcccgcccagagctaccccgtggccaacggcatgccctaccccgcccccaacgtgcccgtggtgggcatcacccccagccagatggtggccaacgtgttcggcaccgccggccacccccaggccgcccacccccaccagagccccagcctggtgagacagcagaccttcccccactacgaggccagcagcgccaccaccagccccttcttcaagccccccgcccagcacctgaacggcagcgccgccttcaacggcgtggacgacggcagactggccagcgccgacagacacaccgaggtgcccaccggcacctgccccgtggaccccttcgaggcccagtgggccgccctggagaacaagagcaagcagagaaccaaccccagccccaccaaccccttcagcagcgacctgcagaagaccttcgagatcgagctgtag

SEQ ID NO: 332696 - DNA, 777 bp, Artificial Sequence
  derived and/or modified sequence
atgaacaagctgagacagagcttcagaagaaagaaggacgtgtacgtgcccgaggccagcagaccccaccagtggcagaccgacgaggagggcgtgagaaccggcaagtgcagcttccccgtgaagtacctgggccacgtggaggtggacgagagcagaggcatgcacatctgcgaggacgccgtgaagagactgaaggccgagagaaagttcttcaagggcttcttcggcaagaccggcaagaaggccgtgaaggccgtgctgtgggtgagcgccgacggcctgagagtggtggacgagaagaccaaggacctgatcgtggaccagaccatcgagaaggtgagcttctgcgcccccgacagaaacttcgacagagccttcagctacatctgcagagacggcaccaccagaagatggatctgccactgcttcatggccgtgaaggacaccggcgagagactgagccacgccgtgggctgcgccttcgccgcctgcctggagagaaagcagaagagagagaaggagtgcggcgtgaccgccaccttcgacgccagcagaaccaccttcaccagagagggcagcttcagagtgaccaccgccaccgagcaggccgagagagaggagatcatgaagcagatgcaggacgccaagaaggccgagaccgacaagatcgtggtgggcagcagcgtggcccccggcaacaccgcccccagccccagcagccccaccagccccaccagcgacgccaccaccagcctggagatgaacaacccctag

SEQ ID NO: 332697 - protein, 505 aa, Artificial Sequence
  derived and/or modified sequence
MNKLRQSFRRKKDVYVPEASRPHQWQTDEEGVRTGKCSFPVKYLGHVEVDESRGMHICEDAVKRLKAERKFFKGFFGKTGKKAVKAVLWVSADGLRVVDEKTKDLIVDQTIEKVSFCAPDRNFDRAFSYICRDGTTRRWICHCFMAVKDTGERLSHAVGCAFAACLERKQKREKECGVTATFDASRTTFTREGSFRVTTATEQAEREEIMKQMQDAKKVPEVEGEAESISSLCSQITNAFSTPEDPFSSAPMTKPVTVVAPQSPTFQGTEWGQSSGAASPGLFQAGHRRTPSEADRWLEEVSKSVRAQQPQASAAPLQPVLQPPPPTAISQPASPFQGNAFLTSQPVPVGVVPALQPAFVPAQSYPVANGMPYPAPNVPVVGITPSQMVANVFGTAGHPQAAHPHQSPSLVRQQTFPHYEASSATTSPFFKPPAQHLNGSAAFNGVDDGRLASADRHTEVPTGTCPVDPFEAQWAALENKSKQRTNPSPTNPFSSDLQKTFEIEL

SEQ ID NO: 332698 - protein, 456 aa, Artificial Sequence
  derived and/or modified sequence
MNKLRQSFRRKKDVYVPEASRPHQWQTDEEGVRTGKCSFPVKYLGHVEVDESRGMHICEDAVKRLKAERKFFKGFFGKTGKKAVKAVLWVSADGLRVVDEKTKDLIVDQTIEKVSFCAPDRNFDRAFSYICRDGTTRRWICHCFMAVKDTGERLSHAVGCAFAACLERKQKREKECGVTATFDASRTTFTREGSFRVTTATEQAEREEIMKQMQDAKKGTEWGQSSGAASPGLFQAGHRRTPSEADRWLEEVSKSVRAQQPQASAAPLQPVLQPPPPTAISQPASPFQGNAFLTSQPVPVGVVPALQPAFVPAQSYPVANGMPYPAPNVPVVGITPSQMVANVFGTAGHPQAAHPHQSPSLVRQQTFPHYEASSATTSPFFKPPAQHLNGSAAFNGVDDGRLASADRHTEVPTGTCPVDPFEAQWAALENKSKQRTNPSPTNPFSSDLQKTFEIEL

SEQ ID NO: 332699 - DNA, 1518 bp, Artificial Sequence
  derived and/or modified sequence
atgaacaagctgcgacagtctttcaggaggaagaaggacgtatacgttccggaggcttcccgaccccatcaatggcaaactgacgaggagggtgtgcggactggcaaatgcagctttccagttaagtatctgggccatgttgaagtggatgagagtcgaggaatgcacatttgtgaggacgctgtcaaaagattgaaagcagaaaggaaattttttaagggcttcttcggaaagaccggaaagaaggccgttaaagccgtcctgtgggttagtgcagacggacttagggtcgtggacgagaaaactaaggacttgatagtggaccaaactatcgaaaaagtgtctttttgcgctccggatcggaacttcgatcgggccttcagttatatctgccgtgacggtacgacaagacgctggatctgtcattgctttatggccgtgaaggacacaggggaaaggctaagccatgccgtgggctgcgcttttgcggcttgcctggaacggaagcagaagcgtgagaaggagtgcggcgtcaccgccaccttcgacgctagccgcacaacgtttacccgggagggcagtttccgggtcactaccgccacggagcaggccgagcgggaggagatcatgaagcagatgcaagatgcaaaaaaagtgcccgaggtggaaggcgaagctgagtccatctcttcactttgtagccagattacaaatgcctttagcactcctgaggatcctttttcttcagctcctatgacaaagcctgtaacggtggtggcaccacagagtcccacattccagggcacagagtgggggcagtcctccggcgccgcgtcccccgggctgttccaagcgggccaccgtaggaccccatcggaggctgaccgttggcttgaagaggtgtccaagagcgtcagagcccagcaaccacaggcctctgccgcccccctgcagccagtgctgcagccgcccccacccactgccattagtcagccggcttcacccttccagggaaatgcattcctgaccagtcaaccagtgcctgtcggcgttgttcctgccctgcaacccgctttcgtacctgctcaatcctacccggtggccaatggcatgccctatcctgcacctaacgtaccagtggtgggtataacaccgagtcaaatggtagcgaacgtcttcggcaccgccggtcaccctcaggcagcccatccacaccagagtccctccttagttcgtcagcagacctttccgcattatgaggctagttcagctacaactagtcctttcttcaagcctcccgcgcagcatctgaacggatccgcagcctttaatggtgttgacgatggccgactagccagcgctgacaggcacactgaggtacccaccgggacctgcccggtggatccctttgaggcacaatgggcagcgctggagaataagtccaagcagcgcaccaatccatcccccacaaaccctttttcaagtgatctccagaagaccttcgagatcgaactctag

SEQ ID NO: 332700 - DNA, 1371 bp, Artificial Sequence
  derived and/or modified sequence
atgaataaactccgtcagtcttttagaaggaagaaggacgtctacgtgcctgaagcttcacgacctcaccagtggcagaccgatgaggagggcgtgagaactggcaagtgctcattcccagtgaaatatcttggccacgtcgaggtagacgagtcccgtgggatgcatatctgtgaggatgccgttaagcgcctcaaagctgagcgaaagttctttaaaggcttcttcggtaagaccggcaaaaaagccgtgaaggccgtactgtgggtgagtgcagatggcttgagagtagttgatgagaagacaaaagatctgatcgtcgatcagaccatagagaaggtcagcttctgcgcgcctgataggaacttcgatcgagctttttcttatatttgcagggatggcacaaccaggcgctggatttgccactgtttcatggccgtgaaagacacgggtgagaggctaagccatgccgtagggtgtgcatttgccgcctgtctcgaacgcaaacagaaaagagaaaaggagtgtggagtgactgccaccttcgacgcctcaaggacgacgttcaccagagagggctcatttcgcgtgactaccgccaccgagcaagccgagcgggaggaaattatgaaacaaatgcaggatgccaagaagggtacagagtgggggcaatccagtggcgccgcatccccaggcttgtttcaggccgggcaccgccgtacaccctccgaggcggaccggtggttggaggaggtttcaaaatccgtccgcgcacaacaaccgcaggctagtgcggctcccttacagcctgtgctgcagccgcctccccccacagccatctctcagccggccagccccttccagggcaatgctttcctgacgtcgcagcccgtgcctgtgggagtggtgcccgccctccagcccgctttcgtaccggctcaatcttatcctgtagccaatggaatgccataccccgccccaaatgtgcccgtggtgggcattacgcccagtcagatggtcgcgaatgtcttcggcacggcaggccatccccaagcagcccatccacatcagtcacccagcctggtcagacagcagacgttcccgcactacgaggcttcctccgcaactacctctcccttcttcaaacccccggcccagcatctgaacgggagcgcggctttcaacggtgtagacgatgggcggctggcttccgcagatcggcacacagaagtcccaacaggtacatgtccagtcgacccttttgaagcccagtgggccgctctcgaaaacaagagcaagcagcggaccaatccttcgcctactaatcctttctctagtgacctgcagaagacttttgagattgaattatag

SEQ ID NO: 332701 - DNA, 1518 bp, Artificial Sequence
  derived and/or modified sequence
atgaacaagctgcggcagagcttccggaggaagaaggatgtgtatgtgcctgaggccagccggccccaccagtggcagacagatgaggagggcgtgaggacaggcaagtgcagcttccctgtgaagtacctgggccacgtggaggtggatgagagccggggcatgcacatctgtgaagatgctgtgaagaggctgaaggccgagaggaagttcttcaagggcttcttcggcaagacaggcaagaaggctgtgaaggctgtgctgtgggtgtctgcagatggcctgcgggtggtggatgagaagaccaaggacctgattgtggaccagaccatcgagaaggtgtccttctgtgccccagacaggaactttgaccgggccttctcctacatctgcagagatggcaccacccggcgctggatctgccactgcttcatggctgtgaaggacaccggggagcggctgagccatgctgtgggctgtgcctttgctgcctgcctggagaggaagcagaagcgggagaaggaatgtggggtgacagccacctttgatgccagcaggaccaccttcacccgggagggcagcttccgggtgaccacagccacagagcaggccgagcgggaggagatcatgaagcagatgcaggatgccaagaaggtgcctgaggtggagggggaggccgagagcatcagcagcctgtgcagccagatcaccaatgccttcagcaccccagaggaccccttcagcagcgcccccatgaccaagcctgtgacagtggtggccccccagagccccaccttccagggcacagagtggggccagagcagtggagctgccagccctggcctcttccaggccggccacaggaggacccccagcgaggccgaccgctggctggaggaggtgtccaagtctgtgcgggcccagcagccccaggccagcgctgcccccctgcagcctgtgctgcagcccccaccacccacagccatcagccagcctgccagccccttccagggcaatgccttcctgaccagccagcctgtgcctgtgggcgtggtgcctgccctgcagcctgcctttgtgcctgcccagagctaccctgtggccaacggcatgccctacccagccccaaatgtgcctgtggtgggcatcacccccagccagatggtggccaacgtgtttggaacagctggccacccccaggccgcccacccccaccagagccccagcctggtgcggcagcagaccttcccccactatgaggccagcagcgccaccaccagccccttcttcaagcccccagcccagcacctgaatggcagcgctgccttcaacggggtggatgatggccgcctggccagcgctgacagacacacagaggtgcccaccggcacctgccctgtggacccctttgaggcccagtgggccgccctggagaacaagagcaagcagaggaccaaccccagccccaccaaccccttcagcagtgacctgcagaagacctttgaaattgagctgtag

SEQ ID NO: 332702 - DNA, 1371 bp, Artificial Sequence
  derived and/or modified sequence
atgaacaagctgcggcagagcttccggaggaagaaggatgtgtatgtgcctgaggccagccggccccaccagtggcagacagatgaggagggcgtgaggacaggcaagtgcagcttccctgtgaagtacctgggccacgtggaggtggatgagagccggggcatgcacatctgtgaagatgctgtgaagaggctgaaggccgagaggaagttcttcaagggcttcttcggcaagacaggcaagaaggctgtgaaggctgtgctgtgggtgtctgcagatggcctgcgggtggtggatgagaagaccaaggacctgattgtggaccagaccatcgagaaggtgtccttctgtgccccagacaggaactttgaccgggccttctcctacatctgcagagatggcaccacccggcgctggatctgccactgcttcatggctgtgaaggacaccggggagcggctgagccatgctgtgggctgtgcctttgctgcctgcctggagaggaagcagaagcgggagaaggaatgtggggtgacagccacctttgatgccagcaggaccaccttcacccgggagggcagcttccgggtgaccacagccacagagcaggccgagcgggaggagatcatgaagcagatgcaggatgccaagaagggcacagagtggggccagagcagcggggccgccagccctggcctcttccaggccggccacaggaggaccccatctgaggccgaccgctggctggaggaggtgtccaagtctgtgcgggcccagcagccccaggccagcgctgcccccctgcagcctgtgctgcagcccccaccacccacagccatcagccagcctgccagccccttccagggcaatgccttcctgaccagccagcctgtgcctgtgggcgtggtgcctgccctgcagcctgcctttgtgcctgcccagagctaccctgtggccaacggcatgccctacccagcccccaacgtgcctgtggtgggcatcacccccagccagatggtggccaacgtgtttggaacagctggccacccccaggccgcccacccccaccagagccccagcctggtgcggcagcagaccttcccccactatgaggccagcagcgccaccaccagccccttcttcaagcccccagcccagcacctgaatggatctgctgccttcaatggagtggatgatggccgcctggccagcgctgacagacacacagaggtgcccaccggcacctgccctgtggacccctttgaggcccagtgggccgccctggagaacaagagcaagcagaggaccaaccccagccccaccaaccccttcagcagtgacctgcagaagacctttgaaattgagctgtag

SEQ ID NO: 332703 - DNA, 1518 bp, Artificial Sequence
  derived and/or modified sequence
atgaacaagctgcggcagagcttccggcggaagaaggacgtgtacgttccagaggcttcccgtcctcaccagtggcagactgatgaggagggcgtaagaacaggtaagtgctctttcccggtgaagtacctgggccacgtggaggtggacgagtctcgaggcatgcacatctgtgaagacgctgtgaagcggttgaaggctgagcgtaaattctttaaaggatttttcgggaagacaggaaagaaggccgtgaaggcagtactgtgggtcagcgctgatgggttgcgcgtggttgacgaaaaaacaaaggatcttattgtcgaccagaccatcgagaaagtctctttctgcgctcccgatagaaattttgatcgagccttttcatatatatgtagggatggtacgacacgtaggtggatttgtcattgcttcatggctgtgaaagacaccggtgagcgtctgtctcatgccgttggatgtgctttcgccgcttgcctagaaaggaagcagaaacgcgaaaaagagtgcggagtcaccgcaacctttgacgcctcccggaccacattcacccgagaaggaagcttcagagtgacgacagccacggaacaagccgagagggaggaaataatgaagcagatgcaagacgctaagaaggtgccagaggttgagggtgaagccgagtccatatcctccctctgttcgcagattaccaatgcgtttagcacccctgaggaccctttctcttccgcaccaatgaccaagccagtgacagtggttgctccacagtctcccacatttcagggaaccgagtgggggcagtctagtggggccgcgagcccaggtctttttcaagccggacaccgccgcacgccgtccgaagcagatagatggcttgaagaggtctccaaatccgtgcgtgcccagcagccacaggcttctgctgctccactgcagccagtacttcagccccctccgcctactgccatctcccagcctgctagccctttccagggaaatgcattcctgactagccagcctgtgcccgtaggtgttgtacctgctcttcagccagccttcgtccctgctcagtcttatccagtggctaatggcatgccatatcccgcgccaaacgtgccagttgtggggatcacgccttctcagatggtggccaatgtttttgggacagccggccacccacaggcagcacatccacaccaatctccaagcttagtgcggcagcagacctttccccactatgaagcttcctccgcaacaactagtcctttctttaaacctcctgcccagcacttgaacggttctgccgccttcaatggcgtggatgatggacgtctcgccagcgccgataggcatacagaagtgccaacaggaacctgcccggtggaccccttcgaggctcaatgggccgccctagagaataaaagtaaacaacggacaaatccctctccaaccaacccattctcaagcgacctgcaaaagacctttgagatcgagctgtag

SEQ ID NO: 332704 - DNA, 1371 bp, Artificial Sequence
  derived and/or modified sequence
atgaacaagctgcggcagagcttccggcggaagaaggacgtgtacgtaccagaggcgtcccgtccacaccagtggcaaaccgatgaggaaggggtcaggactggaaaatgcagttttcccgtgaagtatctgggccacgtcgaagtcgacgaaagtcgcggcatgcacatctgcgaggacgcagttaagaggttaaaggctgagcgcaagttcttcaaaggcttctttggcaagaccggaaaaaaggcagtgaaagctgtactctgggtgagcgccgatggcctgagggtagtggatgaaaagacgaaggatctcatcgtcgaccagaccatagaaaaggtgagtttctgcgccccggacagaaattttgatagagcattttcatatatctgcagagatgggactacgaggagatggatatgccattgtttcatggcagtgaaagacaccggggaacgtctgtcccatgcagttgggtgcgcgttcgccgcctgcttggagaggaagcaaaagagagaaaaagagtgtggggtgacagcgacgtttgacgcctcacgaacgacgtttacccgagaggggagcttcagagttaccacggccactgagcaggcagagagagaggagatcatgaagcagatgcaggacgccaaaaagggtactgaatggggacagtccagtggagcagcatccccgggactatttcaggccgggcatcggcgcactccctccgaagccgataggtggctggaagaggtttctaaaagcgtgagggcccagcagccacaggctagcgctgccccactgcagcctgtgcttcaaccgcctccccccaccgccatttctcagcctgcatcacccttccagggcaacgcctttttaacctcccagcctgtgccagtcggagtggtccccgctctgcagccagccttcgttcccgcccagagctaccctgtagcaaacggaatgccgtaccccgcgccaaatgtacccgtggtcggcattacacccagtcagatggtagctaacgtttttgggaccgcagggcacccccaggccgcccatcctcaccaatcccctagtctagtaaggcagcaaacatttccccattatgaggcaagttctgccacaacgtctcctttttttaagccccctgcccaacatctgaatggttctgcggcatttaacggggttgacgatggcagactcgcctccgctgatcggcacaccgaagtgcctaccggcacttgtccagtggacccattcgaggcacagtgggcagcccttgagaacaaaagcaagcagcgcactaacccgagtccaacgaatccttttagtagcgacttacagaaaaccttcgagatagaactttag

SEQ ID NO: 332705 - DNA, 1565 bp, Artificial Sequence
  derived and/or modified sequence
caggctgtaaaaattaaaatgaacaaattacggcaaagttttaggagaaagaaggatgtttatgttccagaggccagtcgtccacatcagtggcagacagatgaagaaggcgttcgcaccggaaaatgtagcttcccggttaagtaccttggccatgtagaagttgatgaatcaagaggaatgcacatctgtgaagatgctgtaaaaagattgaaagctgaaaggaagttcttcaaaggcttctttggaaaaactggaaagaaagcagttaaagcagttctgtgggtctcagcagatggactcagagttgtggatgaaaaaactaaggacctcatagttgaccagacgatagagaaagtttctttctgtgccccagacaggaactttgatagagccttttcttacatatgccgtgatggcaccactcgtcgctggatctgtcactgcttcatggctgtcaaggacacaggtgaaaggttgagccatgcagtaggctgtgcttttgcagcctgtttagagcgcaagcagaagcgggagaaggaatgtggagtgactgctacttttgatgctagtcggaccacttttacaagagaaggatcattccgtgtcacaacagccactgaacaagcagaaagagaggagatcatgaaacaaatgcaagatgccaagaaagtgccagaagtagaaggggaggcagagagcatcagctccctgtgctcacagatcaccaatgccttcagcacacctgaggaccccttctcatctgctccgatgaccaaaccagtgacagtggtggcaccacaatctcctaccttccaagggaccgagtggggtcaatcttctggtgctgcctctccaggtctcttccaggccggtcatagacgtactccctctgaggccgaccgatggttagaagaggtgtctaagagcgtccgggctcagcagccccaggcctcagctgctcctctgcagccagttctccagcctcctccacccactgccatctcccagccagcatcacctttccaagggaatgcattcctcacctctcagcctgtgccagtgggtgtggtcccagccctgcaaccagcctttgtccctgcccagtcctatcctgtggccaatggaatgccctatccagcccctaatgtgcctgtggtgggcatcactccctcccagatggtggccaacgtatttggcactgcaggccaccctcaggctgcccatccccatcagtcacccagcctggtcaggcagcagacattccctcactacgaggcaagcagtgctaccaccagtcccttctttaagcctcctgctcagcacctcaacggttctgcagctttcaatggtgtagatgatggcaggttggcctcagcagacaggcatacagaggttcctacaggcacctgcccagtggatccttttgaagcccagtgggctgcattagaaaataagtccaagcagcgtactaatccctcccctaccaaccctttctccagtgacttacagaagacgtttgaaattgaactttaagcaatcattatggctatgtatcttgtcca

SEQ ID NO: 332706 - DNA, 1418 bp, Artificial Sequence
  derived and/or modified sequence
caggctgtaaaaattaaaatgaacaaattacggcaaagttttaggagaaagaaggatgtttatgttccagaggccagtcgtccacatcagtggcagacagatgaagaaggcgttcgcaccggaaaatgtagcttcccggttaagtaccttggccatgtagaagttgatgaatcaagaggaatgcacatctgtgaagatgctgtaaaaagattgaaagctgaaaggaagttcttcaaaggcttctttggaaaaactggaaagaaagcagttaaagcagttctgtgggtctcagcagatggactcagagttgtggatgaaaaaactaaggacctcatagttgaccagacgatagagaaagtttctttctgtgccccagacaggaactttgatagagccttttcttacatatgccgtgatggcaccactcgtcgctggatctgtcactgcttcatggctgtcaaggacacaggtgaaaggttgagccatgcagtaggctgtgcttttgcagcctgtttagagcgcaagcagaagcgggagaaggaatgtggagtgactgctacttttgatgctagtcggaccacttttacaagagaaggatcattccgtgtcacaacagccactgaacaagcagaaagagaggagatcatgaaacaaatgcaagatgccaagaaagggaccgagtggggtcaatcttctggtgctgcctctccaggtctcttccaggccggtcatagacgtactccctctgaggccgaccgatggttagaagaggtgtctaagagcgtccgggctcagcagccccaggcctcagctgctcctctgcagccagttctccagcctcctccacccactgccatctcccagccagcatcacctttccaagggaatgcattcctcacctctcagcctgtgccagtgggtgtggtcccagccctgcaaccagcctttgtccctgcccagtcctatcctgtggccaatggaatgccctatccagcccctaatgtgcctgtggtgggcatcactccctcccagatggtggccaacgtatttggcactgcaggccaccctcaggctgcccatccccatcagtcacccagcctggtcaggcagcagacattccctcactacgaggcaagcagtgctaccaccagtcccttctttaagcctcctgctcagcacctcaacggttctgcagctttcaatggtgtagatgatggcaggttggcctcagcagacaggcatacagaggttcctacaggcacctgcccagtggatccttttgaagcccagtgggctgcattagaaaataagtccaagcagcgtactaatccctcccctaccaaccctttctccagtgacttacagaagacgtttgaaattgaactttaagcaatcattatggctatgtatcttgtcca

SEQ ID NO: 332707 - DNA, 1518 bp, Artificial Sequence
  derived and/or modified sequence
atgaacaagctgcgccagtcatttaggaggaaaaaggacgtgtatgtgccagaggcatcccgccctcatcagtggcagacggacgaagagggcgttagaaccggaaagtgttcatttcctgtcaaatacttgggacacgtcgaggtggatgaaagcagaggcatgcacatttgtgaggacgccgtgaagcgactaaaagcagagcgaaagttctttaaggggtttttcgggaaaactggaaaaaaggctgttaaagccgtgctgtgggtctcggcagatggtttacgggttgtggacgaaaaaacaaaagatctgatagtcgaccagacaattgagaaagtttccttttgcgccccagaccggaatttcgatagggctttcagctatatttgcagagatggaaccacaaggagatggatctgccactgcttcatggcagtgaaggataccggagagagactaagtcacgcggtgggttgcgcctttgccgcttgcctcgagagaaaacaaaagcgggagaaagaatgcggagtgacggccacattcgacgcttctcggactacattcacaagagaaggatcctttcgggttactactgccaccgagcaggccgaacgcgaagagatcatgaagcagatgcaagacgctaaaaaagtcccagaagtggaaggcgaggcagagtctatttccagcctctgttcccagatcaccaatgccttcagcacaccggaggatcccttttcatcagctcctatgactaagccagtgaccgtcgttgccccacagtccccgaccttccaggggaccgagtggggacaaagcagtggtgctgccagtcccggtctttttcaggccggtcaccgacggacaccgagcgaagccgatagatggttagaagaagtaagcaaaagcgtgagagcacagcagcctcaagcaagcgcagcccctctgcaacccgtgttacagccgcctcccccaacagcaatttcacagcccgcatccccttttcagggcaatgctttcctcaccagccagcctgtgcccgtcggcgttgtgccggcactccagcccgcattcgttcccgctcagtcttaccctgtcgccaatggaatgccttaccccgcacctaatgtgccggtggtcggaatcacaccatcccagatggtcgcgaacgtgtttggtacagccggacatccccaggctgctcatccccatcagtccccttcattagtaagacagcaaacattcccacactacgaggcctcctccgcaaccactagtcccttttttaagccaccagctcagcacctcaacggaagtgcggcattcaacggcgtcgatgatgggaggctggcatcagccgacaggcacaccgaggtgccaacgggaacttgccccgtcgaccccttcgaggcgcaatgggctgcattggagaacaagtccaaacagcgaaccaacccatctcctacgaacccgttctcttccgacctgcagaagacttttgagatcgaactgtag

SEQ ID NO: 332708 - DNA, 1371 bp, Artificial Sequence
  derived and/or modified sequence
atgaataagctgcgacagagcttcagacggaagaaggacgtctacgtgcccgaggcctcccgtcctcatcagtggcagacagacgaagagggcgtccgtacggggaagtgttcgttccctgtgaaatacctgggccacgtcgaggtggacgagtccagaggcatgcacatctgtgaggatgccgtgaagcgcctgaaagcggagcgtaagttctttaaaggcttcttcggaaagacgggaaagaaagcagtgaaggctgtgctctgggtaagtgctgacggactccgcgtggttgatgagaagaccaaggatcttattgtggatcaaacaatcgagaaagtctcattctgcgcacccgacagaaatttcgatagggccttctcatatatatgccgcgacgggactaccagaagatggatctgccactgttttatggcagtgaaagataccggcgaacgcctgtcccatgctgtgggctgcgccttcgccgcatgcctcgaaagaaaacaaaagagagagaaggagtgcggcgtcaccgcaaccttcgatgcatcaaggacgacatttacgagggaaggctccttcagagtgactacagctacagaacaggctgaacgggaggaaattatgaaacagatgcaagacgcaaaaaaggggacggaatggggacaaagcagcggagcagcctccccaggattatttcaggccggacaccgtcgcaccccttctgaggccgaccgttggctggaggaagtttctaagtccgtgcgcgcacagcagccacaggcctccgctgctcctcttcagccagtccttcagccacctcccccaaccgctattagccagccagcctccccattccagggcaacgcttttctgacttcgcaacccgttccagtgggcgtggtgccggctctgcagccggctttcgtccccgctcagtcgtacccagtggccaatggcatgccctatcccgcaccgaatgtgccagtggtcggcatcaccccttcccaaatggtcgctaacgtgttcgggacggcgggtcaccctcaggccgctcaccctcatcagtcacctagcttggtgcgccagcagacttttccgcactacgaagcctcttctgctacgacgtctccttttttcaaaccccctgcccaacacttaaacgggagcgccgcttttaatggcgtcgatgatggaagactggcttccgccgacaggcataccgaggtcccaacaggtacatgccccgttgatcctttcgaggcgcaatgggccgcactcgaaaataagtctaaacaacgcactaatccatctccaacaaatcctttctcttctgatttgcagaaaacattcgagattgaactgtag

SEQ ID NO: 332709 - DNA, 1518 bp, Artificial Sequence
  derived and/or modified sequence
atgaacaagctgagacagagcttcagaagaaagaaggacgtgtacgtgcccgaggccagcagaccccaccagtggcagaccgacgaggagggcgtgagaaccggcaagtgcagcttccccgtgaagtacctgggccacgtggaggtggacgagagcagaggcatgcacatctgcgaggacgccgtgaagagactgaaggccgagagaaagttcttcaagggcttcttcggcaagaccggcaagaaggccgtgaaggccgtgctgtgggtgagcgccgacggcctgagagtggtggacgagaagaccaaggacctgatcgtggaccagaccatcgagaaggtgagcttctgcgcccccgacagaaacttcgacagagccttcagctacatctgcagagacggcaccaccagaagatggatctgccactgcttcatggccgtgaaggacaccggcgagagactgagccacgccgtgggctgcgccttcgccgcctgcctggagagaaagcagaagagagagaaggagtgcggcgtgaccgccaccttcgacgccagcagaaccaccttcaccagagagggcagcttcagagtgaccaccgccaccgagcaggccgagagagaggagatcatgaagcagatgcaggacgccaagaaggtgcccgaggtggagggcgaggccgagagcatcagcagcctgtgcagccagatcaccaacgccttcagcacccccgaggaccccttcagcagcgcccccatgaccaagcccgtgaccgtggtggccccccagagccccaccttccagggcaccgagtggggccagagcagcggcgccgccagccccggcctgttccaggccggccacagaagaacccccagcgaggccgacagatggctggaggaggtgagcaagagcgtgagagcccagcagccccaggccagcgccgcccccctgcagcccgtgctgcagccccccccccccaccgccatcagccagcccgccagccccttccagggcaacgccttcctgaccagccagcccgtgcccgtgggcgtggtgcccgccctgcagcccgccttcgtgcccgcccagagctaccccgtggccaacggcatgccctaccccgcccccaacgtgcccgtggtgggcatcacccccagccagatggtggccaacgtgttcggcaccgccggccacccccaggccgcccacccccaccagagccccagcctggtgagacagcagaccttcccccactacgaggccagcagcgccaccaccagccccttcttcaagccccccgcccagcacctgaacggcagcgccgccttcaacggcgtggacgacggcagactggccagcgccgacagacacaccgaggtgcccaccggcacctgccccgtggaccccttcgaggcccagtgggccgccctggagaacaagagcaagcagagaaccaaccccagccccaccaaccccttcagcagcgacctgcagaagaccttcgagatcgagctgtag

SEQ ID NO: 332710 - DNA, 1371 bp, Artificial Sequence
  derived and/or modified sequence
atgaacaagctgagacagagcttcagaagaaagaaggacgtgtacgtgcccgaggccagcagaccccaccagtggcagaccgacgaggagggcgtgagaaccggcaagtgcagcttccccgtgaagtacctgggccacgtggaggtggacgagagcagaggcatgcacatctgcgaggacgccgtgaagagactgaaggccgagagaaagttcttcaagggcttcttcggcaagaccggcaagaaggccgtgaaggccgtgctgtgggtgagcgccgacggcctgagagtggtggacgagaagaccaaggacctgatcgtggaccagaccatcgagaaggtgagcttctgcgcccccgacagaaacttcgacagagccttcagctacatctgcagagacggcaccaccagaagatggatctgccactgcttcatggccgtgaaggacaccggcgagagactgagccacgccgtgggctgcgccttcgccgcctgcctggagagaaagcagaagagagagaaggagtgcggcgtgaccgccaccttcgacgccagcagaaccaccttcaccagagagggcagcttcagagtgaccaccgccaccgagcaggccgagagagaggagatcatgaagcagatgcaggacgccaagaagggcaccgagtggggccagagcagcggcgccgccagccccggcctgttccaggccggccacagaagaacccccagcgaggccgacagatggctggaggaggtgagcaagagcgtgagagcccagcagccccaggccagcgccgcccccctgcagcccgtgctgcagccccccccccccaccgccatcagccagcccgccagccccttccagggcaacgccttcctgaccagccagcccgtgcccgtgggcgtggtgcccgccctgcagcccgccttcgtgcccgcccagagctaccccgtggccaacggcatgccctaccccgcccccaacgtgcccgtggtgggcatcacccccagccagatggtggccaacgtgttcggcaccgccggccacccccaggccgcccacccccaccagagccccagcctggtgagacagcagaccttcccccactacgaggccagcagcgccaccaccagccccttcttcaagccccccgcccagcacctgaacggcagcgccgccttcaacggcgtggacgacggcagactggccagcgccgacagacacaccgaggtgcccaccggcacctgccccgtggaccccttcgaggcccagtgggccgccctggagaacaagagcaagcagagaaccaaccccagccccaccaaccccttcagcagcgacctgcagaagaccttcgagatcgagctgtag

SEQ ID NO: 332711 - DNA, 204 bp, Artificial Sequence
  derived and/or modified sequence
atgaacaagttaaggcagtcttttaggcgaaaaaaagacgtgtatgtacccgaggcctctcgacctcaccagtggcaaacagatgaagaaggtgtgaggacaggcaagtgcagctttccagtcaagtatctcggccacgtggaggtggacgagtccagaggtatgcacatctgcgaggacgccgttaagaggctgaaagcttag

SEQ ID NO: 332712 - DNA, 204 bp, Artificial Sequence
  derived and/or modified sequence
atgaacaagctgcggcagagcttccggaggaagaaggatgtgtatgtgcctgaggccagccggccccaccagtggcagacagatgaggagggcgtgaggacaggcaagtgcagcttccctgtgaagtacctgggccacgtggaggtggatgagagccggggcatgcacatctgtgaagatgctgtgaagaggctgaaggcctag

SEQ ID NO: 332713 - DNA, 204 bp, Artificial Sequence
  derived and/or modified sequence
atgaacaagctgcggcagagcttccggcggaagaaggacgtgtacgttcccgaggctagcaggccgcaccagtggcagacggatgaggaaggggtgcgcacaggtaagtgcagctttcctgtcaaatacctgggccacgtggaagtcgatgaatctagagggatgcacatatgcgaggatgccgttaagcgcctcaaagcatag

SEQ ID NO: 332714 - DNA, 552 bp, Artificial Sequence
  derived and/or modified sequence
gcggagttctcccgaggaaggtaggctacggccggacccgcgcgggtcaggccaggaggtcccttgggacgtccagctgctccggtctagcgcgctgaccggcggccactgtgtgaggaatttgaggcttaagcaacttcttccggggaagagtgccagtgcagccactgttacaattcaagatcttgatctatatccatagattggaatattggtgggccagcaatcctcagacgcctcacttaggacaaatgaggaaactgaggcttggtgaagttacgaaacttgtccaaaatcacacaacttgtaaagggcacagccaagattcagagccaggctgtaaaaattaaaatgaacaaattacggcaaagttttaggagaaagaaggatgtttatgttccagaggccagtcgtccacatcagtggcagacagatgaagaaggcgttcgcaccggaaaatgtagcttcccggttaagtaccttggccatgtagaagttgatgaatcaagaggaatgcacatctgtgaagatgctgtaaaaagattgaaagct

SEQ ID NO: 332715 - DNA, 204 bp, Artificial Sequence
  derived and/or modified sequence
atgaacaagcttcgccagtcctttaggcgaaaaaaggacgtatacgtgcctgaagcatccaggccccatcaatggcagaccgacgaagaaggagtcagaacaggaaaatgctcattcccagtgaagtacctggggcacgtggaggtggatgagagcagaggcatgcacatttgcgaagatgctgtgaaaaggctcaaggcctag

SEQ ID NO: 332716 - DNA, 204 bp, Artificial Sequence
  derived and/or modified sequence
atgaacaagctgagacagagcttcagaagaaagaaggacgtgtacgtgcccgaggccagcagaccccaccagtggcagaccgacgaggagggcgtgagaaccggcaagtgcagcttccccgtgaagtacctgggccacgtggaggtggacgagagcagaggcatgcacatctgcgaggacgccgtgaagagactgaaggcctag

SEQ ID NO: 332717 - protein, 776 aa, Artificial Sequence
  derived and/or modified sequence
MVQLHQDTDPQIPKGQPCTLNSSEGGARPAVPHTLFSSALDRWLHNDSFIMAVGEPLVHIRVTLLLLWFGMFLSISGHSQARPSQYFTSPEVVIPLKVISRGRGAKAPGWLSYSLRFGGQRYIVHMRVNKLLFAAHLPVFTYTEQHALLQDQPFIQDDCYYHGYVEGVPESLVALSTCSGGFLGMLQINDLVYEIKPISVSATFEHLVYKIDSDDTQFPPMRCGLTEEKIAHQMELQLSYNFTLKQSSFVGWWTHQRFVELVVVVDNIRYLFSQSNATTVQHEVFNVVNIVDSFYHPLEVDVILTGIDIWTASNPLPTSGDLDNVLEDFSIWKNYNLNNRLQHDVAHLFIKDTQGMKLGVAYVKGICQNPFNTGVDVFEDNRLVVFAITLGHELGHNLGMQHDTQWCVCELQWCIMHAYRKVTTKFSNCSYAQYWDSTISSGLCIQPPPYPGNIFRLKYCGNLVVEEGEECDCGTIRQCAKDPCCLLNCTLHPGAACAFGICCKDCKFLPSGTLCRQQVGECDLPEWCNGTSHQCPDDVYVQDGISCNVNAFCYEKTCNNHDIQCKEIFGQDARSASQSCYQEINTQGNRFGHCGIVGTTYVKCWTPDIMCGRVQCENVGVIPNLIEHSTVQQFHLNDTTCWGTDYHLGMAIPDIGEVKDGTVCGPEKICIRKKCASMVHLSQACQPKTCNMRGICNNKQHCHCNHEWAPPYCKDKGYGGSADSGPPPKNNMEGLNVMGKLRYLSLLCLLPLVAFLLFCLHVLFKKRTKSKEDEEG

SEQ ID NO: 332718 - DNA, 2792 bp, Artificial Sequence
  derived and/or modified sequence
gggagttcagcagtgtgtttaagactagggtcatgcccacatcaatctcagattcccattttatctttcttttttggtatcactcctagtaccaagtcttgtgtctgtcaatatcctgtccaaaaaagaaaaacacaccaaggaaaattaatataggaaaaatttaaaaagttattagaggactgaaaatataaaaatggaacactgaaagacacagagtttttattttcagcactgcagctctgatggtccagctccaccaggacacagatccccagatccctaaaggtcagccatgcaccctgaacagctcagagggaggagccagaccagcagtgcctcacaccttgttctcttctgctctagacagatggctccataatgacagcttcataatggcagtgggtgagcccctggtgcacatcagggtcactcttctgctgctctggtttgggatgtttttgtctatttctggccactctcaggccaggccctcccagtatttcacttctccagaagtggtgatccctttgaaggtgatcagcaggggcagaggtgcaaaggctcctggatggctctcctatagcctgcggtttgggggacagagatacattgtccacatgagggtaaataagctgttgtttgctgcacaccttcctgtgttcacctacacagagcagcatgccctgctccaggatcagcccttcatccaggatgactgctactaccatggttatgtggagggggtccctgagtccttggttgcccttagtacctgttctgggggctttcttggaatgctacagataaatgaccttgtttatgaaatcaagccaattagtgtttctgccacatttgaacacctagtatataagatagacagtgatgatacacagtttccacctatgagatgtgggttaacagaagagaaaatagcacaccagatggagttgcaattgtcatataatttcactctgaagcaaagttcttttgtgggctggtggacccatcagcggtttgttgagctggtagtggtcgtggataatattagatatcttttctctcaaagtaatgcaacaacagtgcagcatgaagtatttaacgttgtcaatatagtggattccttctatcatcctttggaggttgatgtaattttgactggaattgatatatggactgcatcaaatccacttcctaccagtggagacctagataatgttttagaggacttttctatttggaagaattataaccttaataatcgactacaacatgatgttgcacatcttttcataaaagacacacaaggcatgaagcttggtgttgcctatgttaaaggaatatgccagaatccttttaatactggagttgatgtttttgaagacaacaggttggtcgtttttgcaattactttgggccacgagcttggtcataatttgggtatgcaacatgacacccagtggtgtgtgtgcgagctacagtggtgcataatgcatgcctatagaaaggtgacaactaaatttagcaactgcagttatgcccaatattgggacagtactatcagtagtggattatgtattcaaccgcctccatatccagggaatatatttagactgaagtactgtgggaatctagtggttgaagaaggggaggaatgtgactgtggaaccatacggcagtgtgcaaaagatccctgttgtctgttaaactgtactctacatcctggggctgcttgtgcttttggaatatgttgcaaagactgcaaatttctgccatcaggaactttatgtagacaacaagttggtgaatgtgaccttccagagtggtgcaatgggacatcccatcaatgcccagatgatgtgtatgtgcaggacgggatctcctgtaatgtgaatgccttctgctatgaaaagacgtgtaataaccatgatatacaatgtaaagagatttttggccaagatgcaaggagtgcatctcagagttgctaccaagaaatcaacacccaaggaaaccgtttcggtcactgtggtattgtaggcacaacatatgtaaaatgttggacccctgatatcatgtgtgggagggttcagtgtgaaaatgtgggagtaattcccaatctgatagagcattctacagtgcagcagtttcacctcaatgacaccacttgctggggcactgattatcatttagggatggctatacctgatattggtgaggtgaaagatggcacagtatgtggtccagaaaagatctgcatccgtaagaagtgtgccagtatggttcatctgtcacaagcctgtcagcctaagacctgcaacatgaggggaatctgcaacaacaaacaacactgtcactgcaaccatgaatgggcacccccatactgcaaggacaaaggctatggaggtagtgctgatagtggcccacctcctaagaacaacatggaaggattaaatgtgatgggaaagttgcgttacctgtcactattgtgccttcttcctttggttgcttttttattattttgcttacatgtgctttttaagaaacgcacaaaaagtaaagaagatgaagaaggataagagaaatgggaaaaagaaggagactaaactttatacttcatttttaatatccaattttttaatagaaaaatatgaagccatgtctcactgtttaaataaaacttcatggacatttcatgtcaggattgcaagcattagctatcacagcaaaggattcctagcctattcttacttactctacagtgtcttaagcaatattaaaggttccttttccca

SEQ ID NO: 332719 - protein, 357 aa, Artificial Sequence
  derived and/or modified sequence
MKENKENSSPSVTSANLDHTKPCWYWDKKDLAHTPSQLEGLDPATEARYRREGARFIFDVGTRLGLHYDTLATGIIYFHRFYMFHSFKQFPRYVTGACCLFLAGKVEETPKKCKDIIKTARSLLNDVQFGQFGDDPKEEVMVLERILLQTIKFDLQVEHPYQFLLKYAKQLKGDKNKIQKLVQMAWTFVNDRTSLCTTLSLQWEPEIIAVAVMYLAGRLCKFEIQEWTSKPMYRRWWEQFVQDVPVDVLEDICHQILDLYSQGKQQMPHHTPHQLQQPPSLQPTPQVPQVQQSQPSQSSEPSQPQQKDPPLILLQGWACRQPATHLLPSPLEDSLLCPRPFPHPACLQLGGWGGQPG

SEQ ID NO: 332720 - protein, 359 aa, Artificial Sequence
  derived and/or modified sequence
MKENKENSSPSVTSANLDHTKPCWYWDKKDLAHTPSQLEGLDPATEARYRREGARFIFDVGTRLGLHYDTLATGIIYFHRFYMFHSFKQFPRYVTGACCLFLAGKVEETPKKCKDIIKTARSLLNDVQFGQFGDDPKEEVMVLERILLQTIKFDLQVEHPYQFLLKYAKQLKGDKNKIQKLVQMAWTFVNDRTSLCTTLSLQWEPEIIAVAVMYLAGRLCKFEIQEWTSKPMYRRWWEQFVQDVPVDVLEDICHQILDLYSQGKQQMPHHTPHQLQQPPSLQPTPQVPQVQQSQPSQSSEPSQPQQKDPQQPAQQQQPAQQPKKPSPQPSSPRQVKRAVVVSPKEENKAAGKASLKHTW

SEQ ID NO: 332721 - protein, 580 aa, Artificial Sequence
  derived and/or modified sequence
MKENKENSSPSVTSANLDHTKPCWYWDKKDLAHTPSQLEGLDPATEARYRREGARFIFDVGTRLGLHYDTLATGIIYFHRFYMFHSFKQFPRYVTGACCLFLAGKVEETPKKCKDIIKTARSLLNDVQFGQFGDDPKEEVMVLERILLQTIKFDLQVEHPYQFLLKYAKQLKGDKNKIQKLVQMAWTFVNDSLCTTLSLQWEPEIIAVAVMYLAGRLCKFEIQEWTSKPMYRRWWEQFVQDVPVDVLEDICHQILDLYSQGKQQMPHHTPHQLQQPPSLQPTPQVPQVQQSQPSQSSEPSQPQQKDPQQPAQQQQPAQQPKKPSPQPSSPRQVKRAVVVSPKEENKAAEPPPPKIPKIETTHPPLPPAHPPPDRKPPLAAALGEAEPPGPVDATDLPKVQIPPPAHPAPVHQPPPLPHRPPPPPPSSYMTGMSTTSSYMSGEGYQSLQSMMKTEGPSYGALPPAYGPPAHLPYHPHVYPPNPPPPPVPPPPASFPPPAIPPPTPGYPPPPPTYNPNFPPPPPRLPPTHAVPPHPPPGLGLPPASYPPPAVPPGGQPPVPPPIPPPGMPPVGGLGRAAWMR

SEQ ID NO: 332722 - protein, 600 aa, Artificial Sequence
  derived and/or modified sequence
MKENKENSSPSVTSANLDHTKPCWYWDKKDLAHTPSQLEGLDPATEARYRREGARFIFDVGTRLGLHYDTLATGIIYFHRFYMFHSFKQFPRYVTGACCLFLAGKVEETPKKCKDIIKTARSLLNDVQFGQFGDDPKEEVMVLERILLQTIKFDLQVEHPYQFLLKYAKQLKGDKNKIQKLVQMAWTFVNDSLCTTLSLQWEPEIIAVAVMYLAGRLCKFEIQEWTSKPMYRRWWEQFVQDVPVDVLEDICHQILDLYSQGKQQMPHHTPHQLQQPPSLQPTPQVPQVQQSQPSQSSEPSQPQQKDPQQPAQQQQPAQQPKKPSPQPSSPRQVKRAVVSGLKQALGRAGFPGGGNTTVVSPKEENKAAEPPPPKIPKIETTHPPLPPAHPPPDRKPPLAAALGEAEPPGPVDATDLPKVQIPPPAHPAPVHQPPPLPHRPPPPPPSSYMTGMSTTSSYMSGEGYQSLQSMMKTEGPSYGALPPAYGPPAHLPYHPHVYPPNPPPPPVPPPPASFPPPAIPPPTPGYPPPPPTYNPNFPPPPPRLPPTHAVPPHPPPGLGLPPASYPPPAVPPGGQPPVPPPIPPPGMPPVGGLGRAAWMR

SEQ ID NO: 332723 - protein, 110 aa, Artificial Sequence
  derived and/or modified sequence
MKENKENSSPSVTSANLDHTKPCWYWDKKDLAHTPSQLEGLDPATEARYRREGARFIFDVGTRLGLHYDTLATGIIYFHRFYMFHSFKQFPRYVTGACCLFLAGKVEETP

SEQ ID NO: 332724 - protein, 227 aa, Artificial Sequence
  derived and/or modified sequence
MKENKENSSPSVTSANLDHTKPCWYWDKKDLAHTPSQLEGLDPATEARYRREGARFIFDVGTRLGLHYDTLATGIIYFHRFYMFHSFKQFPRYVTGACCLFLAGKVEETPKKCKDIIKTARSLLNDVQFGQFGDDPKEEVMVLERILLQTIKFDLQVEHPYQFLLKYAKQLKGDKNKIQKLVQMAWTFVNDSLCTTLSLQWEPEIIAVAVMYLAGRLCKFEIQEWTS

SEQ ID NO: 332725 - DNA, 1074 bp, Artificial Sequence
  derived and/or modified sequence
atgaaggagaacaaggagaacagcagccccagcgtgaccagcgccaacctggaccacaccaagccctgctggtactgggacaagaaggacctggcccacacccccagccagctggagggcctggaccccgccaccgaggccagatacagaagagagggcgccagattcatcttcgacgtgggcaccagactgggcctgcactacgacaccctggccaccggcatcatctacttccacagattctacatgttccacagcttcaagcagttccccagatacgtgaccggcgcctgctgcctgttcctggccggcaaggtggaggagacccccaagaagtgcaaggacatcatcaagaccgccagaagcctgctgaacgacgtgcagttcggccagttcggcgacgaccccaaggaggaggtgatggtgctggagagaatcctgctgcagaccatcaagttcgacctgcaggtggagcacccctaccagttcctgctgaagtacgccaagcagctgaagggcgacaagaacaagatccagaagctggtgcagatggcctggaccttcgtgaacgacagaaccagcctgtgcaccaccctgagcctgcagtgggagcccgagatcatcgccgtggccgtgatgtacctggccggcagactgtgcaagttcgagatccaggagtggaccagcaagcccatgtacagaagatggtgggagcagttcgtgcaggacgtgcccgtggacgtgctggaggacatctgccaccagatcctggacctgtacagccagggcaagcagcagatgccccaccacaccccccaccagctgcagcagccccccagcctgcagcccaccccccaggtgccccaggtgcagcagagccagcccagccagagcagcgagcccagccagccccagcagaaggacccccccctgatcctgctgcagggctgggcctgcagacagcccgccacccacctgctgcccagccccctggaggacagcctgctgtgccccagacccttcccccaccccgcctgcctgcagctgggcggctggggcggccagcccggctag

SEQ ID NO: 332726 - DNA, 1074 bp, Artificial Sequence
  derived and/or modified sequence
atgaaagagaacaaggagaattcctccccaagtgtcacttctgctaacctggaccacaccaagccatgctggtattgggataaaaaagatctcgcgcacactccctctcaactggagggccttgaccctgcgaccgaggcacggtaccgacgggagggcgctcgctttattttcgatgtgggcacaagacttggactccactatgacaccttggcaacagggataatctactttcacagattttatatgtttcactccttcaaacagttccctagatatgtcactggggcatgttgcctgttcctggctggaaaggttgaagagaccccaaaaaagtgcaaagacattattaagacggcaaggtcgctcctgaatgatgtccagtttggacaattcggagatgatcccaaggaggaggtgatggtcttagaacgtatccttttacagacaattaaattcgatctgcaagtagagcacccatatcagttcctcttgaaatatgctaagcagttgaaaggcgacaaaaacaagattcagaagctcgtgcagatggcctggactttcgtgaatgacagaacatctctctgcactaccctctctctccagtgggaaccagaaatcatcgcggtcgccgtgatgtacctggctgggagactctgtaagttcgaaatacaagagtggacgtctaagcctatgtaccggagatggtgggaacagtttgtgcaagatgtgcccgttgacgtgctcgaggatatttgccaccaaattctggacctctactcacagggtaaacagcaaatgccacatcatacccctcatcagctgcagcagcctcctagccttcaacctacgccccaggtgcctcaggtacagcaatctcagccctctcagtcatcagagcctagtcaaccccagcagaaggacccaccgctgattctgttgcaaggttgggcttgccggcagccggcaacccacctactcccaagccctttggaggattctctgctgtgccccaggccatttccccatccagcatgtctccagctaggaggatggggaggacagccaggatag

SEQ ID NO: 332727 - DNA, 1074 bp, Artificial Sequence
  derived and/or modified sequence
atgaaggagaacaaggagaacagcagccccagcgtgaccagcgccaacctggaccacaccaagccctgctggtactgggacaagaaggacctggcccacacccccagccagctggagggcctggaccctgccacagaggcccgctaccgccgggagggcgcccgcttcatctttgatgtgggcacccggctgggcctgcactatgacaccctggccaccggcatcatctacttccaccgcttctacatgttccacagcttcaagcagttccccaggtatgtgactggagcctgctgcctcttcctggccggcaaggtggaggagacccccaagaagtgcaaggacatcatcaagacagcccggagcctgctgaatgatgtgcagtttggccagtttggagatgaccccaaggaggaggtgatggtgctggagcgcatcctgctgcagaccatcaagtttgacctgcaggtggagcacccctaccagttcctgctgaagtatgccaagcagctgaagggggacaagaacaagatccagaagctggtgcagatggcctggacctttgtgaatgacaggaccagcctgtgcaccaccctgagcctgcagtgggagcctgagatcatcgctgtggccgtgatgtacctggccggccgcctgtgcaagtttgagatccaggagtggaccagcaagcccatgtaccgccgctggtgggagcagtttgtgcaggatgtgcctgtggatgtgctggaggacatctgccaccagatcctggacctgtacagccagggcaagcagcagatgccccaccacaccccccaccagctgcagcagccccccagcctgcagcccaccccccaggtgccccaggtgcagcagagccagcccagccagagcagcgagcccagccagccccagcagaaggaccccccactcatcctgctgcagggctgggcctgccggcagcctgccacccacctgctgcccagccccctggaggacagcctgctgtgcccccggcccttcccccacccagcctgcctgcagctgggcggctggggcggccagcccggctag

SEQ ID NO: 332728 - DNA, 1074 bp, Artificial Sequence
  derived and/or modified sequence
atgaaggagaacaaggagaacagcagccccagcgtgaccagcgccaatctggaccacaccaaaccatgttggtactgggacaagaaggatcttgctcacaccccttctcagctcgaaggactcgaccctgcaacagaggcaaggtaccgacgagaaggtgcccgctttattttcgatgtgggtactaggctgggattgcattacgacaccctggcaacagggataatctacttccaccggttttacatgttccacagctttaaacagtttcccagatatgttaccggagcctgctgcctgtttttggcaggcaaggttgaagaaaccccaaagaaatgcaaggacatcatcaagaccgctcgctcccttcttaatgacgtacagttcggtcagtttggagatgatccgaaggaagaagtgatggtcctcgagcgaatcttactacagacgataaagttcgaccttcaggtggaacatccctaccagtttctcttgaaatacgcgaaacagctgaagggggataagaacaagatccagaaactggtgcaaatggcttggacctttgtgaatgaccgaacgtcactgtgtacaacgttgagtctgcagtgggaacccgaaatcattgctgttgcggtgatgtacctagccgggagactgtgtaaattcgagattcaggaatggacttccaagccaatgtatcggagatggtgggagcagtttgttcaagacgttccagtagatgttctcgaggacatatgccaccagattttagatctgtattctcaggggaaacagcagatgccccaccataccccccaccagttacagcagcctcctagcctacaacctaccccacaggtgcctcaggtgcagcagtcccaaccaagccagtcatcagaaccaagtcagccccaacaaaaggatcctcccctcattctactgcagggctgggcttgcagacagcccgctactcacctgctccccagcccactcgaggattcactgctgtgtccacgtccctttcctcacccagcatgtctgcagctggggggatggggagggcagcctggatag

SEQ ID NO: 332729 - DNA, 1074 bp, Artificial Sequence
  derived and/or modified sequence
atgaaggagaataaggaaaactcctccccatccgtgacaagtgcaaacctggatcacaccaagccatgctggtattgggacaaaaaggacctggcacacactccctcgcagctggagggattagaccccgcaacagaggccagatacaggcgggagggcgctcgtttcatttttgacgtgggcactagactggggctacattacgatactctggctaccggcatcatctacttccaccgtttctacatgtttcacagtttcaagcagttccccaggtatgtaaccggcgcatgctgtctgtttctcgcgggaaaagtcgaggagacccccaagaagtgcaaggatatcataaagacggcacgcagcctgctgaacgacgtacagtttggacaatttggcgacgaccccaaagaggaggtgatggtgctggagcgaatcctgttgcaaaccataaagttcgaccttcaagtcgagcacccttatcaatttttacttaagtatgcgaaacagctcaaaggggacaagaacaaaatccagaagctggtacaaatggcttggacctttgtgaacgatagaacaagtctctgtaccacactctcactgcaatgggagcctgagataattgctgttgccgtcatgtatttggcgggtagactctgtaaattcgagattcaagagtggacctccaagccaatgtatagaagatggtgggagcagtttgtccaagacgtcccagtggatgttctggaggatatatgtcaccaaattctggacctctatagtcaaggaaaacagcaaatgccccaccataccccacaccaacttcagcagcctccttccttgcaacccacaccccaggtgccccaggtccagcagtcgcagccctcgcagtcctctgaaccgtcacagccgcaacagaaggaccctcctttgatcctcctgcaagggtgggcctgtcgtcagcctgcaacccatcttttacctagtccgctggaagattccctgctgtgtcctcgcccatttccccaccccgcttgcctgcagctggggggatgggggggtcagcccggatag

SEQ ID NO: 332730 - DNA, 276 bp, Artificial Sequence
  derived and/or modified sequence
atggagatcgcccactacgccaaggtgttcaccgccgacggccacctgggctgctacatcctggccaccatgaactaccacagcgccaagcactgcggcagctgcctgcagagccagctgtgcaagagactgaagcaggaggacagactgagccccggcttccagggccagctgggccagcacagcgagaccagcagcctgaagaccgtgatcggccccctggcccccagctgccacctggccgacatgaagaactggagatggcagcagtggtag

SEQ ID NO: 332731 - DNA, 276 bp, Artificial Sequence
  derived and/or modified sequence
atggagatcgcccactacgccaaggtgttcaccgcagatggccacctgggctgctacatcctggccaccatgaactaccacagcgccaagcactgcggcagctgcctgcagagccagctgtgcaagaggctgaagcaggaggaccggctgagccctggcttccagggccagctgggccagcacagcgagaccagcagcctgaagacagtgattggccccctggcccccagctgccacctggccgacatgaagaactggcgctggcagcagtggtag

SEQ ID NO: 332732 - DNA, 423 bp, Artificial Sequence
  derived and/or modified sequence
atgaagggacaagaagggatacgtggtgaaggatgcaccgatccagagatcaaggcaagtcctcagatgtgggcggctaggttcagagggatgcgcagccgcttctctccgctcttctctcaggcaactgagatgggacctcgggtgtcagctggctggtgtctctccggagggggtcgcaaggtgtcttctctccagggggatttcccaccaggaggcttttgggccttaagcaacgactccgccttgtcactccctcctctttctcttccacacccacacccactgcgtccaccaggactgggggtcaatgagttcacccaaggcttacacccaccactccatcccgcagcctccgtgtttcagacatgtttctatcgaaaaccgcattattgttctactttaaggcccacgaccacgtag

SEQ ID NO: 332733 - DNA, 1080 bp, Artificial Sequence
  derived and/or modified sequence
atgaaggaaaacaaagagaacagctcaccatccgtgacaagtgccaacctcgatcacactaagccatgctggtactgggataagaaggatctggcccacacaccaagccaactcgagggcttagatcctgcaactgaagccaggtaccggcgcgagggtgcccgattcatcttcgacgtgggcacgaggctcggcctgcactacgacaccctggccactgggataatatattttcatcggttttacatgtttcatagcttcaagcagtttccccggtatgtgactggggcttgctgcctctttctcgccggcaaagtggaggagacccccaaaaaatgtaaagacattattaagacggctcggagtctgctgaacgatgttcaatttggccaatttggtgacgatccaaaagaagaggtgatggtgcttgagaggatcctcctgcagactattaaatttgacctgcaggtagagcatccataccagttcctgctaaagtatgccaaacagctgaagggcgacaagaacaagattcagaagcttgtgcaaatggcctggaccttcgtgaacgacagaacgtcgctatgcaccactctctccttgcagtgggaaccagagatcatcgccgtggcggtgatgtatcttgccggcagactgtgcaaatttgaaatacaagaatggacctctaagccgatgtatagacggtggtgggagcagttcgtgcaggatgtccctgtggatgttctcgaggatatttgccatcagatcctagatctgtactctcagggtaaacaacagatgccacaccacaccccccaccagcttcagcaacctccttccctgcaaccgactcctcaggtgccgcaggtgcagcagtcccagcctagtcagtctagcgagcccagccagccccagcagaaagacccgcagcagcctgcacagcaacagcagcccgcacagcagccgaaaaagccatccccgcaacccagttctccccggcaggttaaaagagccgtagtcgtctcgcctaaggaggaaaataaagccgctggaaaggcttcccttaagcatacttggtag

SEQ ID NO: 332734 - DNA, 1743 bp, Artificial Sequence
  derived and/or modified sequence
atgaaggagaataaagagaattccagcccctccgttacttccgcaaatctggaccatactaagccatgttggtactgggataagaaggatctggcccacactcctagtcaactggaaggactggatcctgctaccgaggccaggtatagaagagaaggggcccgcttcatttttgatgtcgggacccgtctcggcctgcactatgatactctggccacaggcatcatctattttcatcgtttctacatgttccatagttttaagcaatttccccggtacgtgactggcgcatgctgcctgttcctggctggcaaggttgaggaaaccccaaaaaagtgcaaggatatcatcaaaaccgctcgttccctgttaaacgacgtccagttcggccagtttggtgatgacccaaaagaggaggtaatggtcctcgagaggatattactccagaccatcaagttcgatctgcaggtcgaacatccataccagttcctgcttaaatatgcgaaacagcttaagggggacaagaataaaatacagaaactggtacagatggcatggacctttgtgaatgactccctgtgtacaactcttagtcttcagtgggaaccagaaattatcgcggtggccgtcatgtacttagccggccggctctgtaagtttgagatccaagagtggacctccaagcccatgtaccgacgctggtgggagcagtttgtacaggacgttcccgtcgacgtgctagaagatatttgtcatcagatcttagacctctatagccagggcaaacaacaaatgccccaccacacccctcatcagctgcaacagccccctagccttcaacccaccccacaggtcccgcaagttcagcaaagccagccaagccaaagctcagagccgtctcagcctcaacagaaagacccgcagcagcccgctcaacagcaacagcctgcccagcagccaaagaaaccttcccctcagccatcgagcccacgacaggtcaagagagcagtggtcgtcagccctaaggaggaaaacaaagccgcagagcctccgcctcccaaaattcccaagattgaaactacacatcccccgctgccgcccgcccaccctccaccagaccgtaagccccccctggcagcagccctaggcgaggctgagccccctggccctgtggatgctaccgacctgccgaaagtccagattccccccccggcccaccccgcaccagttcatcagccccccccactaccccacagacctccaccccctccgcccagtagttacatgaccggtatgtcaactacatcctcctatatgtccggtgaggggtaccaatccttacagtccatgatgaagaccgagggaccgtcctacggcgctttacccccggcatacggaccacccgcacatctgccttatcatccccatgtgtatcctcccaatcctccaccccctccagtgcctccaccaccagcgagttttcctccgcccgccattccgccgccgacacctggctatcctccgcccccccccacgtacaatcctaacttcccccctcctcctccaaggctgccaccaacacacgccgttcccccacatccacctcccggcctgggtctgccgccagccagctatcccccaccagccgtgcctcccggcgggcagcctccagtgcccccccccattccaccaccagggatgccacctgtgggtggtttgggacgcgccgcctggatgcgatag

SEQ ID NO: 332735 - DNA, 1803 bp, Artificial Sequence
  derived and/or modified sequence
atgaaggaaaacaaggagaatagttctccttcagtgacgagcgccaacctggaccacaccaagccttgctggtattgggacaagaaagatttggctcacacccctagtcagctcgagggtctcgaccctgccacagaggctcgctatcgccgtgagggtgctcgattcatcttcgatgtcggtacgagacttggcctacactacgatacgctagccaccggaattatctactttcatcggttctatatgttccattcatttaagcagtttccccgctatgtgaccggagcctgctgtcttttcttggcaggtaaggttgaggaaacgccgaagaagtgcaaagatatcatcaagaccgcaaggtccctgctcaacgacgtgcaattcggacagttcggagatgacccaaaagaagaggtgatggtcctggaacgtatcttactccagactattaagtttgacctacaggtggagcacccttatcagtttcttctgaaatatgccaaacagctaaaaggcgataagaataagattcagaaactggtgcaaatggcctggacgtttgtgaatgacagtctttgtaccacgctctctctccagtgggagcctgagatcattgcagtagcagtaatgtacctggctgggcgcctgtgtaaattcgaaatccaggaatggacatctaagccaatgtaccgcagatggtgggagcaatttgtccaggatgtgcccgtggacgtgctcgaggatatatgccatcagatcctagacctgtattcacaggggaagcagcaaatgcctcaccatacgccccaccagctgcagcagcctccctcgttacaacctacccctcaggtcccacaggtgcaacaatctcagccctctcaatcctcagaaccctcgcagccccaacagaaagatccgcagcagccagctcaacagcagcagcccgcccagcagcctaaaaagcccagccctcagccttctagtcctcgacaggtcaaacgggccgtggtgtctggtttaaagcaggccctcggacgggccggtttccccgggggggggaataccaccgtggttagtcccaaagaagaaaataaggctgccgagcctccaccccccaagatccccaagattgagaccactcacccccccctacctccggcccaccctcccccagatcgcaagccgccccttgccgcagctctgggggaagctgaacctccaggaccagtcgatgcgacagacctccccaaggttcagatcccacctcctgctcatccggctccagttcatcagccgcctccattacctcatcgccctccccctcctcctccctcttcctatatgacgggcatgagtacaacttccagttacatgtcgggagagggctaccagagccttcagtcaatgatgaaaactgagggtccaagttatggcgcactgccacctgcatacgggccaccggcccatttgccatatcatccccacgtttaccccccaaacccaccgcctccgccggttccgccacccccagcgagctttccgcctcccgctataccacctcccacccccggctacccacctcctcctccaacctataatccaaactttccgccgccaccgcccagactcccaccaacacacgccgtgccaccccacccacctcctggtttgggcctcccacctgcctcatacccccctcccgctgtgccaccaggcggtcagccaccagtccccccaccaatacccccccccggcatgcctcccgtaggtggtctagggcgtgctgcctggatgaggtag

SEQ ID NO: 332736 - DNA, 333 bp, Artificial Sequence
  derived and/or modified sequence
atgaaggaaaataaagaaaattcctcaccctctgtgacaagtgctaatttagatcatactaaaccctgctggtattgggataagaaagacctcgctcacaccccaagccaactggaaggcttagacccagctactgaagcacgctaccggagggaaggagccagattcatctttgacgtcggaacaagactgggcctccactacgacacactggccacgggcattatctactttcaccggttctacatgtttcattccttcaaacaatttccacgctacgtgaccggggcatgttgccttttcttggccggtaaagtggaggagacaccctag

SEQ ID NO: 332737 - DNA, 684 bp, Artificial Sequence
  derived and/or modified sequence
atgaaagagaataaggagaattccagtccatccgtgacctctgctaatctcgatcatacgaagccctgttggtactgggacaagaaagacctcgcacacactccttcccagctggaaggattagatcctgcaaccgaggcgaggtaccggcgggagggtgccaggttcatcttcgatgtgggaactaggctgggactgcactacgatacactcgctaccggcattatctatttccaccgcttctatatgttccactcttttaagcagttcccacgctatgtaacaggggcctgttgtcttttcctcgccggaaaggttgaagagactcctaaaaagtgcaaagatattattaagacagcccgttccctgcttaatgacgtgcaattcggccaattcggtgacgatccaaaagaggaggtaatggtcctcgagagaattctgctgcaaaccatcaaatttgatttgcaggtagagcacccatatcaattcttactgaagtacgccaaacagctcaagggggataagaacaagattcagaagctggtacagatggcttggacgtttgtcaacgattctctttgcaccaccctttctttgcaatgggaacccgagataattgcggtggccgtaatgtacctagctggtagattgtgcaagtttgaaatacaagagtggacgagctag

SEQ ID NO: 332738 - DNA, 1080 bp, Artificial Sequence
  derived and/or modified sequence
atgaaggagaacaaggagaacagcagccccagcgtgaccagcgccaacctggaccacaccaagccctgctggtactgggacaagaaggacctggcccacacccccagccagctggagggcctggaccctgccacagaggcccgctaccgccgggagggcgcccgcttcatctttgatgtgggcacccggctgggcctgcactatgacaccctggccaccggcatcatctacttccaccgcttctacatgttccacagcttcaagcagttccccaggtatgtgactggagcctgctgcctcttcctggccggcaaggtggaggagacccccaagaagtgcaaggacatcatcaagacagcccggagcctgctgaatgatgtgcagtttggccagtttggagatgaccccaaggaggaggtgatggtgctggagcgcatcctgctgcagaccatcaagtttgacctgcaggtggagcacccctaccagttcctgctgaagtatgccaagcagctgaagggggacaagaacaagatccagaagctggtgcagatggcctggacctttgtgaatgacaggaccagcctgtgcaccaccctgagcctgcagtgggagcctgagatcatcgctgtggccgtgatgtacctggccggccgcctgtgcaagtttgagatccaggagtggaccagcaagcccatgtaccgccgctggtgggagcagtttgtgcaggatgtgcctgtggatgtgctggaggacatctgccaccagatcctggacctgtacagccagggcaagcagcagatgccccaccacaccccccaccagctgcagcagccccccagcctgcagcccaccccccaggtgccccaggtgcagcagagccagcccagccagagcagcgagcccagccagccccagcagaaggacccccagcagcctgcccagcagcagcagcctgcccagcagcccaagaagcccagcccccagcccagcagcccccggcaggtgaagagagctgtggtggtgagccccaaggaggagaacaaggccgccggcaaggccagcctgaagcacacctggtag

SEQ ID NO: 332739 - DNA, 1743 bp, Artificial Sequence
  derived and/or modified sequence
atgaaggagaacaaggagaacagcagccccagcgtgaccagcgccaacctggaccacaccaagccctgctggtactgggacaagaaggacctggcccacacccccagccagctggagggcctggaccctgccacagaggcccgctaccgccgggagggcgcccgcttcatctttgatgtgggcacccggctgggcctgcactatgacaccctggccaccggcatcatctacttccaccgcttctacatgttccacagcttcaagcagttccccaggtatgtgactggagcctgctgcctcttcctggccggcaaggtggaggagacccccaagaagtgcaaggacatcatcaagacagcccggagcctgctgaatgatgtgcagtttggccagtttggagatgaccccaaggaggaggtgatggtgctggagcgcatcctgctgcagaccatcaagtttgacctgcaggtggagcacccctaccagttcctgctgaagtatgccaagcagctgaagggggacaagaacaagatccagaagctggtgcagatggcctggacctttgtgaatgacagcctgtgcaccaccctgagcctgcagtgggagcctgagatcatcgctgtggccgtgatgtacctggccggccgcctgtgcaagtttgagatccaggagtggaccagcaagcccatgtaccgccgctggtgggagcagtttgtgcaggatgtgcctgtggatgtgctggaggacatctgccaccagatcctggacctgtacagccagggcaagcagcagatgccccaccacaccccccaccagctgcagcagccccccagcctgcagcccaccccccaggtgccccaggtgcagcagagccagcccagccagagcagcgagcccagccagccccagcagaaggacccccagcagcctgcccagcagcagcagcctgcccagcagcccaagaagcccagcccccagcccagcagcccccggcaggtgaagagagctgtggtggtgagccccaaggaggagaacaaggctgctgagcccccaccacccaagatccccaagattgagaccacccacccccccctgcccccagcccaccccccaccagacaggaagccacccctggccgccgccctgggggaggccgagcccccaggccctgtggatgccacagacctgcccaaggtgcagatccccccaccagcccacccagcccctgtgcaccagcccccacccctgccccaccggcccccacctcctccacccagcagctacatgacaggcatgagcaccaccagcagctacatgtctggagagggctaccagagcctgcagagcatgatgaagacagagggccccagctatggagccctgcccccagcctacggccccccagcccacctgccctaccacccccacgtgtacccacccaaccccccacctcctcctgtgcccccacctccagccagcttccccccaccagccatccccccacccaccccaggctacccacctcctccacccacctacaaccccaacttccccccacctccaccccggctgccccccacccatgctgtgcccccccaccccccacctggcctgggcctgcccccagccagctacccacctcctgctgtgcccccaggcggccagccccctgtgcccccacccatccccccacctggcatgcctcctgtgggcggcctgggccgggccgcctggatgaggtag

SEQ ID NO: 332740 - DNA, 1803 bp, Artificial Sequence
  derived and/or modified sequence
atgaaggagaacaaggagaacagcagccccagcgtgaccagcgccaacctggaccacaccaagccctgctggtactgggacaagaaggacctggcccacacccccagccagctggagggcctggaccctgccacagaggcccgctaccgccgggagggcgcccgcttcatctttgatgtgggcacccggctgggcctgcactatgacaccctggccaccggcatcatctacttccaccgcttctacatgttccacagcttcaagcagttccccaggtatgtgactggagcctgctgcctcttcctggccggcaaggtggaggagacccccaagaagtgcaaggacatcatcaagacagcccggagcctgctgaatgatgtgcagtttggccagtttggagatgaccccaaggaggaggtgatggtgctggagcgcatcctgctgcagaccatcaagtttgacctgcaggtggagcacccctaccagttcctgctgaagtatgccaagcagctgaagggggacaagaacaagatccagaagctggtgcagatggcctggacctttgtgaatgacagcctgtgcaccaccctgagcctgcagtgggagcctgagatcatcgctgtggccgtgatgtacctggccggccgcctgtgcaagtttgagatccaggagtggaccagcaagcccatgtaccgccgctggtgggagcagtttgtgcaggatgtgcctgtggatgtgctggaggacatctgccaccagatcctggacctgtacagccagggcaagcagcagatgccccaccacaccccccaccagctgcagcagccccccagcctgcagcccaccccccaggtgccccaggtgcagcagagccagcccagccagagcagcgagcccagccagccccagcagaaggacccccagcagcctgcccagcagcagcagcctgcccagcagcccaagaagcccagcccccagcccagcagcccccggcaggtgaagagagctgtggtgtctggcctgaagcaggccctgggccgggccggcttccctgggggcggcaacaccaccgtggtgagccccaaggaggagaacaaggctgctgagcccccaccacccaagatccccaagattgagaccacccacccccccctgcccccagcccaccccccaccagacaggaagccacccctggccgccgccctgggggaggccgagcccccaggccctgtggatgccacagacctgcccaaggtgcagatccccccaccagcccacccagcccctgtgcaccagcccccacccctgccccaccggcccccacctcctccacccagcagctacatgacaggcatgagcaccaccagcagctacatgtctggagagggctaccagagcctgcagagcatgatgaagacagagggccccagctatggagccctgcccccagcctacggccccccagcccacctgccctaccacccccacgtgtacccacccaaccccccacctcctcctgtgcccccacctccagccagcttccccccaccagccatccccccacccaccccaggctacccacctcctccacccacctacaaccccaacttccccccacctccaccccggctgccccccacccatgctgtgcccccccaccccccacctggcctgggcctgcccccagccagctacccacctcctgctgtgcccccaggcggccagccccctgtgcccccacccatccccccacctggcatgcctcctgtgggcggcctgggccgggccgcctggatgaggtag

SEQ ID NO: 332741 - DNA, 333 bp, Artificial Sequence
  derived and/or modified sequence
atgaaggagaacaaggagaacagcagccccagcgtgaccagcgccaacctggaccacaccaagccctgctggtactgggacaagaaggacctggcccacacccccagccagctggagggcctggaccctgccacagaggcccgctaccgccgggagggcgcccgcttcatctttgatgtgggcacccggctgggcctgcactatgacaccctggccaccggcatcatctacttccaccgcttctacatgttccacagcttcaagcagttccccaggtatgtgactggagcctgctgcctcttcctggccggcaaggtggaggagaccccctag

SEQ ID NO: 332742 - DNA, 684 bp, Artificial Sequence
  derived and/or modified sequence
atgaaggagaacaaggagaacagcagccccagcgtgaccagcgccaacctggaccacaccaagccctgctggtactgggacaagaaggacctggcccacacccccagccagctggagggcctggaccctgccacagaggcccgctaccgccgggagggcgcccgcttcatctttgatgtgggcacccggctgggcctgcactatgacaccctggccaccggcatcatctacttccaccgcttctacatgttccacagcttcaagcagttccccaggtatgtgactggagcctgctgcctcttcctggccggcaaggtggaggagacccccaagaagtgcaaggacatcatcaagacagcccggagcctgctgaatgatgtgcagtttggccagtttggagatgaccccaaggaggaggtgatggtgctggagcgcatcctgctgcagaccatcaagtttgacctgcaggtggagcacccctaccagttcctgctgaagtatgccaagcagctgaagggggacaagaacaagatccagaagctggtgcagatggcctggacctttgtgaatgacagcctgtgcaccaccctgagcctgcagtgggagcctgagatcatcgctgtggccgtgatgtacctggccggccgcctgtgcaagtttgagatccaggagtggaccagctag

SEQ ID NO: 332743 - DNA, 1080 bp, Artificial Sequence
  derived and/or modified sequence
atgaaggagaacaaggagaacagcagccccagcgtgaccagcgccaacctggaccacaccaagccttgctggtattgggacaaaaaggacctagcccatacacccagtcaattggaaggccttgatcctgccactgaggccaggtaccggcgcgaaggagcccgatttatttttgacgttggaactcggctagggcttcactatgataccctcgctactggcattatctacttccatcggttctatatgttccactcattcaagcaatttcctaggtatgtaaccggagcatgctgtctttttctcgctggcaaagtggaagagacgcccaagaagtgcaaagacatcattaagacagcccggagcttgctgaacgatgtccagttcggccagtttggcgatgaccccaaagaggaggtgatggtcctcgagaggatcttgttacaaaccattaaattcgatttgcaagttgagcatccatatcaattcctgctgaagtacgccaagcagctcaaaggcgataagaataagatccagaaactcgtgcaaatggcatggactttcgtaaatgatcgaacttcactgtgtactacccttagtctccagtgggaacctgagattattgctgtcgctgtaatgtacctcgcgggacgactctgcaagttcgagatccaggagtggacttctaaacctatgtatagaagatggtgggagcagttcgtacaggatgtgccagtggatgtgctggaggatatctgtcaccagattctcgatctgtactcccagggcaaacagcagatgcctcaccacactccgcaccagttacagcaaccgccctcccttcagccaaccccgcaggtaccacaggtgcagcagtcccagccatcccagtcgtctgagccctctcagccccaacagaaggacccgcagcaaccagctcagcagcagcagcccgctcagcagcctaagaaaccctcaccgcagcccagctcaccacgacaggtgaaacgtgcagtagttgttagccctaaggaggaaaacaaggcagcagggaaggccagccttaagcacacgtggtag

SEQ ID NO: 332744 - DNA, 1743 bp, Artificial Sequence
  derived and/or modified sequence
atgaaggagaacaaggagaacagcagccccagcgtgaccagcgccaacctggatcacacgaaaccttgctggtactgggataagaaagatctcgcccacaccccctctcagttggaaggcctggatcccgctactgaggcgaggtacaggagggaaggggccaggtttattttcgacgtaggaacgaggctcggactccactacgacacgctggcaacaggcattatttacttccatcgcttttatatgttccatagtttcaagcagtttccacgctacgtgactggcgcttgttgcctgttcttagcaggcaaggttgaagagactcccaaaaaatgcaaggatattattaaaaccgcccgaagcttgttgaatgatgtgcagttcggacagttcggcgacgaccctaaggaggaagttatggtcctcgagcggattctacttcagacaataaagttcgatctgcaggttgaacacccttaccagtttctgctgaagtatgcaaaacaacttaagggcgataagaacaaaattcagaaacttgttcagatggcctggacttttgttaacgatagtttgtgcaccaccttgtctctacagtgggaacccgaaatcatagccgtcgcagttatgtaccttgccggacgcctgtgcaagtttgaaattcaggaatggacaagcaaacccatgtaccgaagatggtgggagcaatttgtccaggacgtccccgtggatgtgctggaggatatatgtcatcagattctagatctttattctcagggaaagcagcagatgcctcaccacacaccccaccaacttcagcagcctccatctctccagcccaccccgcaagtgccgcaggttcagcagtcacaaccaagtcagagctccgaaccatcacagcctcagcagaaggacccccagcagcccgcacagcagcaacagcccgcacagcaaccaaagaagccttccccacagccttccagccccaggcaggttaagcgcgctgttgtggtgtcaccaaaggaggagaataaggctgcggaaccaccacctcctaaaatcccaaaaattgagactacccatccaccactgcctccggcgcacccaccccctgaccggaaacctcccctagccgccgccctaggcgaagctgagcccccgggacctgttgacgccacagatttaccaaaggtacagataccacccccagctcaccccgcaccagtgcatcaacctcccccattgccgcatcgccccccacccccaccacccagcagctatatgacagggatgtcaacgacgtctagctatatgtctggggagggctaccagagcctacagtctatgatgaagactgaaggcccctcctacggcgcccttccgcctgcctatggccccccagctcatttaccctaccacccccacgtatatccacctaatccacctcctccgcccgttccacccccccccgccagctttcccccacccgctattcccccaccaacacccgggtatcccccccctccacccacttacaaccctaatttcccacctccccctcctcgactgcctcccacacacgccgtgcccccgcatcctccccctgggttagggctgcccccagcaagctacccccccccagccgtgcccccgggcggtcagccacctgttcccccgccgatcccaccgccaggcatgcccccggtgggcggactagggcgcgccgcatggatgaggtag

SEQ ID NO: 332745 - DNA, 1803 bp, Artificial Sequence
  derived and/or modified sequence
atgaaggagaacaaggagaacagcagccccagcgtgaccagcgccaacctagaccataccaagccttgctggtactgggacaagaaagacctggcgcacactcccagtcagctggaagggttggacccagcgaccgaggctaggtatcgcagggaaggcgctaggttcatattcgatgtgggcacccgtctgggcctccattatgataccctcgccacaggaattatttatttccatagattttacatgtttcactctttcaaacaattccctagatacgtgacaggggcttgttgcctttttcttgcaggcaaggtcgaagagaccccaaaaaaatgtaaggacataattaagaccgcgcggtctctgctgaacgatgtgcagttcggccagttcggggacgatcctaaggaagaggttatggtcctggagaggattctgctccagacgattaaattcgacttgcaggtggagcacccctaccagttcctgttaaaatatgctaaacagctcaaaggagataagaacaaaatacagaagctcgtccaaatggcttggacttttgtaaacgattccctttgtacaaccctcagccttcagtgggagccagagatcatcgccgtggccgtgatgtacctagccggtcgtctgtgtaagtttgaaatccaggagtggactagtaaaccaatgtacagacggtggtgggagcagtttgtccaggatgtacccgtggatgtgttggaggacatctgtcatcagattctggacctgtactctcagggtaaacagcagatgccacaccacaccccccaccaacttcagcaacctcccagtcttcagcctacacctcaggtgccccaggtacagcaatcccagccgtctcaatcaagtgagcccagccaacctcagcagaaggatccccagcagcccgcgcagcagcagcaacccgcgcaacagcctaagaagccctcccctcagccctcttctccccgccaagttaaacgtgccgttgtgtctggcctcaagcaggcactggggagagccggattcccaggtggcggaaacaccacggttgtgagtcctaaagaagagaataaggcagcagagcctccgcccccgaagataccgaagatcgaaactacccatccccccctgccccccgcacatccgcccccagatcggaagccaccgcttgctgcggcactcggcgaggcagaaccccccggacccgttgacgccactgacctcccaaaggtccaaatcccccctcctgcccacccggctcctgtgcatcagccgccacccctcccacacaggccacctcctcctcctccatctagctatatgaccggaatgtctactacctcaagctatatgagcggtgaaggctatcagtccctgcaaagcatgatgaaaaccgaaggcccgtcctatggcgcgttaccgccagcctatgggcctcccgcccacctcccttaccatcctcatgtttacccacccaaccccccaccaccacccgtgcctcctcctcccgcctcttttcctcctcctgctatcccacctccaacacccggatacccccccccaccccctacttacaatcccaattttccaccccctccaccccggctgccaccaacccacgccgtcccaccccaccctccccctggactgggactccccccagccagttatccaccgcctgcggtgccacccgggggtcagccccctgtgcccccgcccatccctcctcccgggatgccgcccgttggaggtctgggacgtgccgcctggatgcggtag

SEQ ID NO: 332746 - DNA, 333 bp, Artificial Sequence
  derived and/or modified sequence
atgaaggagaacaaggagaacagcagccccagcgtgaccagcgccaaccttgatcacactaagccctgttggtactgggataagaaggacttggctcacacaccttcccaactagaggggttggaccctgccacggaggcaaggtaccggagggagggcgctagattcatctttgacgtagggacgcgattaggcctccactatgataccctcgcaactggcatcatttattttcatcggttttacatgtttcactcattcaaacaatttcctcgctacgtcaccggagcctgctgtttgtttttggcgggcaaggttgaggagaccccatag

SEQ ID NO: 332747 - DNA, 684 bp, Artificial Sequence
  derived and/or modified sequence
atgaaggagaacaaggagaacagcagccccagcgtgaccagcgccaacttggatcacaccaaaccttgctggtactgggacaagaaagatctggcccacactcccagccagctagagggactcgatcctgccactgaagccagatatagaagagaaggcgccaggtttatttttgacgtgggtaccaggctgggactgcattacgacacattggcgactggcatcatttatttccaccgcttttacatgttccactcattcaaacagtttccccgatatgtaacaggggcatgttgtctttttctggcagggaaagtggaggagactccaaaaaaatgcaaggatataataaagaccgccagatctctgctgaatgatgttcagtttggacagttcggggatgatccgaaggaagaggtcatggtcctggaacgaatcttgctccagacaatcaaattcgatcttcaagttgagcacccgtaccaattcttattgaagtacgcgaaacaactgaagggcgacaagaataaaatccagaaacttgtgcagatggcctggacctttgttaatgatagtctgtgcacaacattatcacttcaatgggagcccgaaataatagccgtcgccgtgatgtatctggccggtcgactgtgtaaattcgagattcaggagtggacctcctag

SEQ ID NO: 332748 - DNA, 1080 bp, Artificial Sequence
  derived and/or modified sequence
atgaaagaaaataaagagaacagctctccatcggtgactagcgcaaatctggatcacacaaaaccctgttggtactgggacaaaaaagacttagctcacacccctagccagctggaaggattggaccctgctaccgaggctagatataggcgggaaggggcacggttcatattcgatgtggggacgaggctggggttacactatgacacactggcaaccggaattatttactttcaccgtttctatatgttccactcattcaaacagttcccgcgttatgtcaccggggcttgctgtttgtttttagccggaaaggtcgaagaaactcccaagaaatgcaaagatatcattaagactgcaagatccctgctgaacgacgtgcagttcggacagtttggagatgatccaaaagaagaagtgatggtcttggaaagaattctgctgcaaaccattaagttcgacttgcaggtagagcacccctatcagtttttgctcaagtacgcaaaacagcttaagggcgacaagaataagatccagaagctggtgcagatggcctggactttcgtcaatgaccgtaccagtttgtgcaccacactgtctcttcagtgggagcccgagatcatcgcagtggccgtgatgtacctcgcgggacgcctgtgcaaattcgaaattcaagagtggactagcaagcctatgtacagacgatggtgggagcaattcgtgcaggacgttcccgtggacgtgctggaagacatctgtcaccagatcctcgacctgtactcacaagggaaacagcagatgccccaccataccccccaccagctgcagcagcccccaagcctccaaccaacgccccaagtgccacaagtccagcagtcccaaccatcccaaagtagcgaacctagccagcctcagcaaaaagatccacagcaaccagcccagcagcaacagccggcacagcagcccaaaaagcctagccctcagcctagtagtccaagacaggtgaagcgggcagttgttgtgagtccaaaagaggagaacaaagcagccggaaaagccagtttgaaacatacttggtag

SEQ ID NO: 332749 - DNA, 1743 bp, Artificial Sequence
  derived and/or modified sequence
atgaaagagaataaggaaaattcaagtcccagtgtcacctccgcaaacctcgatcatacaaaaccctgctggtactgggataaaaaagacctagcccacacaccttctcagctcgagggacttgaccctgcaaccgaggccaggtatcgcagggagggcgcaagatttatctttgacgtgggcactagactggggctgcattacgacaccctggcaaccggtataatttattttcaccgattctacatgttccactcatttaagcaattcccgagatacgtgaccggggcttgctgcctgttcctggccggaaaggttgaggagacgccgaaaaagtgcaaggacataattaaaaccgctagaagcctcttgaacgacgttcagtttggacaatttggagacgacccaaaagaggaggtgatggtactggagcgaatcctccttcagacgatcaaattcgatttgcaggtcgaacatccctaccagttcctgctgaaatacgcgaagcaactgaagggtgataagaacaagatccaaaagttggtccagatggcttggacctttgtgaacgactccttgtgtacaaccctgtctttgcagtgggagccagagatcattgctgttgctgtcatgtatctagccggtcggctctgcaaatttgagattcaggagtggacctctaaacccatgtaccgacggtggtgggagcagtttgtccaggacgtgcccgtagatgtgctggaagatatctgccatcagatattggatctgtacagtcagggcaaacagcaaatgccacatcatacccctcatcagctgcagcagccacccagtcttcaacccacaccccaagttccacaggttcagcagtcacagcccagtcagagttcagaaccctcacagccgcaacagaaggatccccagcaaccagcacagcagcagcagcctgcacagcaaccaaagaaaccctctccccaaccttcgagtccaagacaggtgaaacgcgcagtggtagtgtcaccgaaggaggagaacaaagctgcagaaccacctccacccaaaattcctaagattgagactacccatcccccactgccacccgctcaccccccacctgatcggaagcctccccttgcggctgcccttggcgaggccgaacctcccggtccagtggatgcaacagatttgccaaaggttcagattccgcctcccgcacatcctgcccctgttcatcagcctccaccattgcctcatcgtccaccccctcctccccctagctcctatatgacagggatgtccacaacctcctcctatatgtcaggggaaggctatcagtctttacagagtatgatgaagacagaaggcccaagttatggtgccttgcccccagcctatggccctcctgcacacctgccctaccatccacacgtataccctcctaatcccccaccgcctcctgtgccccctccccctgcttcctttccacccccagctatccctcctcccacccctggataccccccaccccctccaacatacaatcccaatttcccccctccgcctccccgactcccccctacccatgcagttccaccccacccgccaccgggacttggactcccacccgcatcctaccccccacccgctgtgccacccggaggccagcctcctgtgcctcccccaatcccaccgccagggatgcccccagtgggtgggctgggcagggctgcctggatgcgctag

SEQ ID NO: 332750 - DNA, 1803 bp, Artificial Sequence
  derived and/or modified sequence
atgaaagagaataaagagaatagttctccctcggtgactagcgccaaccttgaccacacaaaaccatgttggtattgggacaaaaaagacctagcacatacacccagccagctcgagggtctcgaccctgccacagaagcgaggtacagacgagagggggcaaggttcatctttgacgtcggcactcggcttggactgcactacgacacactggcgaccggcatcatatattttcaccgcttctacatgtttcacagttttaagcaattccctcggtacgtaactggagcctgttgtttgtttctggccggaaaagtagaggagaccccgaagaagtgcaaagatatcatcaaaaccgcgagatctctcttgaacgacgtgcagttcggacagtttggggatgaccccaaggaggaggtgatggtgcttgagcgcattctcctacagactatcaagttcgatctgcaggttgaacatccttaccagtttttgctgaagtatgccaaacagcttaagggggacaaaaacaaaatccaaaagctggtgcaaatggcttggacatttgttaacgactccctgtgcaccacgctgtctctccagtgggagcctgaaataattgcggtggccgttatgtatctggccggaagactgtgcaaattcgagatccaggagtggacctcaaagccaatgtataggaggtggtgggagcagttcgttcaggatgtcccagttgatgtgttggaggacatttgtcatcagattcttgacttgtatagtcaaggaaagcaacagatgccgcaccacacaccccatcaactgcagcagccgccatctttgcagcctaccccccaagtcccccaagtgcaacagtctcagccttcgcagtccagtgagccatcacagccccagcagaaggacccacaacagcccgctcagcagcagcagcctgcccagcagcctaaaaaacctagcccgcagccgtcaagtccacgacaggtgaagcgcgcagtcgtgtctgggctaaaacaggcactgggacgtgctggctttcctggtggtggcaacactacagtggtctcccccaaggaggagaataaggccgcagagcctccgcctccaaaaatccctaagatcgagactacgcatcctccactgccccctgcccatccccctccagaccgcaagcctccactggccgctgctctgggagaagctgaaccacccggaccagtcgatgctacggatctaccaaaagttcagatccctccacctgcccatcctgctccagtgcatcaacctccaccccttccacaccggcctccacctccaccaccaagctcctatatgaccggaatgtctaccactagttcctacatgtcaggtgaagggtaccagagtctccaaagcatgatgaaaacagagggtccatcctacggcgcactgccacccgcatatggccctcctgcgcaccttccatatcaccctcatgtgtaccccccaaatccacctccccctcctgtgcctccaccccctgcgtcttttcctccccctgcaattccccctcccaccccaggctaccctccgccaccccctacctacaaccccaattttccgccaccacccccaagattgcctcccacgcacgcggtacccccacaccctccacccggactggggctccccccagcctcctaccctccacccgcagtccctccgggaggtcagccgccagtgcctccaccaataccccctccaggcatgcccccagtggggggtttaggaagagcagcctggatgcgctag

SEQ ID NO: 332751 - DNA, 333 bp, Artificial Sequence
  derived and/or modified sequence
atgaaggagaataaggaaaacagctcaccttcggttaccagtgccaaccttgaccacacaaagccttgctggtactgggacaagaaagatctcgcacacacgccaagccaactggaaggcctggatcctgccaccgaagcaaggtaccggagggaaggggctcgtttcatttttgacgtcgggactcgattagggctgcattatgacacactggcgactggcatcatttacttccacagattctatatgttccattcctttaaacagttccccaggtatgtaactggagcctgttgtctattcctggcaggtaaggttgaggaaaccccctag

SEQ ID NO: 332752 - DNA, 684 bp, Artificial Sequence
  derived and/or modified sequence
atgaaggaaaacaaggaaaatagctccccatccgtgacaagtgcaaatttagatcacacaaagccgtgttggtactgggataagaaagatctggcccacacgccctctcagctggagggactggaccccgcaactgaggcacgttatagacgcgaaggagctcggttcattttcgatgtgggcactcgccttggactccactacgacaccttggcgactggtatcatctacttccacagattctatatgttccactctttcaagcagtttccgagatacgtcacaggagcttgctgcttatttctggccggtaaggtagaagagactccgaaaaaatgcaaggacattattaagacagccagaagcttactcaatgatgttcaattcggccagttcggggatgaccccaaggaagaggtaatggtcttggagcgaatcctcctgcagacaatcaagttcgacctgcaggtggagcacccataccagtttcttctaaaatatgcaaagcaactgaaaggtgataagaataagatccagaaactggtccagatggcctggacttttgtgaacgattcattgtgtactaccctgtccctgcagtgggagccggaaataatcgcagtggcagtcatgtatcttgcaggcaggctctgcaagtttgagatccaggaatggacctcctag

SEQ ID NO: 332753 - DNA, 1204 bp, Artificial Sequence
  derived and/or modified sequence
ggtccccgacattccatatacaagatggccgcagtcggcaaggagagacgtcgctgaggggcttgcctgaagcgaggggattctaacattttcagagaaccttttggaaagaacaagcctacttcaataaatgaaggagaataaagaaaattcaagcccttcagtaacttcagcaaacctggaccacacaaagccatgttggtactgggataagaaagacttggctcatacaccctcacaacttgaaggacttgatccagccaccgaggcccggtaccgccgagagggcgctcggttcatctttgatgtgggcacacgtttggggctacactatgataccctggcaactggaataatttattttcatcgcttctatatgtttcattccttcaagcaattcccaagatatgtgacaggagcctgttgcctctttctggctgggaaagtagaagaaacaccaaaaaaatgtaaagatatcatcaaaacagctcgtagtttattaaatgatgtacaatttggccagtttggagatgacccaaaggaggaagtaatggttctggagagaatcttactgcagaccatcaagtttgatttacaggtagaacatccataccagttcctactaaaatatgcaaagcaactcaaaggtgataaaaacaaaattcaaaagttggttcaaatggcatggacatttgtaaatgacagaactagtctctgcaccaccttgtcactgcagtgggaaccagagatcatagcagtagcagtgatgtatctcgcaggacgtttgtgcaaatttgaaatacaagaatggacctccaaacccatgtataggagatggtgggagcagtttgttcaagatgtcccggtcgacgttttggaagacatctgccaccaaatcctggatctttactcacaaggaaaacaacagatgcctcatcacaccccccatcagctgcaacagcccccatctcttcagcctacaccacaagtgccgcaagtacagcagtcacagccgtctcaaagctccgaaccatcccagccccagcagaaggacccccccctcatcctcctccagggttgggcctgccgccagccagctacccacctcctgccgtcccccctggaggacagcctcctgtgcccccgcccattcccccacccggcatgcctccagttggggggctggggcgggcagcctggatga

SEQ ID NO: 332754 - DNA, 1207 bp, Artificial Sequence
  derived and/or modified sequence
ggtccccgacattccatatacaagatggccgcagtcggcaaggagagacgtcgctgaggggcttgcctgaagcgaggggattctaacattttcagagaaccttttggaaagaacaagcctacttcaataaatgaaggagaataaagaaaattcaagcccttcagtaacttcagcaaacctggaccacacaaagccatgttggtactgggataagaaagacttggctcatacaccctcacaacttgaaggacttgatccagccaccgaggcccggtaccgccgagagggcgctcggttcatctttgatgtgggcacacgtttggggctacactatgataccctggcaactggaataatttattttcatcgcttctatatgtttcattccttcaagcaattcccaagatatgtgacaggagcctgttgcctctttctggctgggaaagtagaagaaacaccaaaaaaatgtaaagatatcatcaaaacagctcgtagtttattaaatgatgtacaatttggccagtttggagatgacccaaaggaggaagtaatggttctggagagaatcttactgcagaccatcaagtttgatttacaggtagaacatccataccagttcctactaaaatatgcaaagcaactcaaaggtgataaaaacaaaattcaaaagttggttcaaatggcatggacatttgtaaatgacagaactagtctctgcaccaccttgtcactgcagtgggaaccagagatcatagcagtagcagtgatgtatctcgcaggacgtttgtgcaaatttgaaatacaagaatggacctccaaacccatgtataggagatggtgggagcagtttgttcaagatgtcccggtcgacgttttggaagacatctgccaccaaatcctggatctttactcacaaggaaaacaacagatgcctcatcacaccccccatcagctgcaacagcccccatctcttcagcctacaccacaagtgccgcaagtacagcagtcacagccgtctcaaagctccgaaccatcccagccccagcagaaggacccccagcaaccagcccagcagcagcagccagcccaacagcccaagaaaccctctccgcagcccagttctccccgacaggttaagcgagccgtggttgtttctcccaaagaagagaacaaagcagcaggcaaggcctctttgaaacacacttgg

SEQ ID NO: 332755 - DNA, 3524 bp, Artificial Sequence
  derived and/or modified sequence
gacattccatatacaagatggccgcagtcggcaaggagagacgtcgctgaggggcttgcctgaagcgaggggattctaacattttcagagaaccttttggaaagaacaagcctacttcaataaatgaaggagaataaagaaaattcaagcccttcagtaacttcagcaaacctggaccacacaaagccatgttggtactgggataagaaagacttggctcatacaccctcacaacttgaaggacttgatccagccaccgaggcccggtaccgccgagagggcgctcggttcatctttgatgtgggcacacgtttggggctacactatgataccctggcaactggaataatttattttcatcgcttctatatgtttcattccttcaagcaattcccaagatatgtgacaggagcctgttgcctctttctggctgggaaagtagaagaaacaccaaaaaaatgtaaagatatcatcaaaacagctcgtagtttattaaatgatgtacaatttggccagtttggagatgacccaaaggaggaagtaatggttctggagagaatcttactgcagaccatcaagtttgatttacaggtagaacatccataccagttcctactaaaatatgcaaagcaactcaaaggtgataaaaacaaaattcaaaagttggttcaaatggcatggacatttgtaaatgacagtctctgcaccaccttgtcactgcagtgggaaccagagatcatagcagtagcagtgatgtatctcgcaggacgtttgtgcaaatttgaaatacaagaatggacctccaaacccatgtataggagatggtgggagcagtttgttcaagatgtcccggtcgacgttttggaagacatctgccaccaaatcctggatctttactcacaaggaaaacaacagatgcctcatcacaccccccatcagctgcaacagcccccatctcttcagcctacaccacaagtgccgcaagtacagcagtcacagccgtctcaaagctccgaaccatcccagccccagcagaaggacccccagcaaccagcccagcagcagcagccagcccaacagcccaagaaaccctctccgcagcccagttctccccgacaggttaagcgagccgtggttgtttctcccaaagaagagaacaaagcagcagaaccaccaccacctaaaatccccaaaattgagaccactcatccaccgttgcctccagcccacccacctccagaccggaagcctcccctcgctgctgccttaggtgaggctgagccgccgggccctgtggatgccactgacctccccaaagtccagattccccctccggcccacccggcccctgtgcaccagccaccgccgctgccacaccggcccccgcccccacccccctccagctacatgaccgggatgtccaccaccagctcctacatgtctggagagggctaccagagcctgcagtccatgatgaagaccgagggaccctcctacggtgccctgccccccgcctacggcccacctgcacacctgccctaccacccccatgtctacccgcccaacccgcccccgccacctgtgcctcctcccccagcctccttccccccacctgccatcccaccccctactcctggctaccccccacccccacccacctacaaccccaacttcccacccccacccccacgcctcccgcctacccacgcagtcccccctcatcctcctccagggttgggcctgccgccagccagctacccacctcctgccgtcccccctggaggacagcctcctgtgcccccgcccattcccccacccggcatgcctccagttggggggctggggcgggcagcctggatgagataacgtgagccttttttccctctttgtttttttaacaagattttctaatcgacttgcagagtagttgaagtgggtaagcagcagggtaccttgtataatgcacgacagttgcagtatgggaagaatggaccgggcccctgggataaaatcagagtggtcctcacacctagaggacggggacaaccagctttcagagtagcctcatcagtgcccttgcagtctgactgtgtacacttggttcagctaatgtctgagagtcctgcactgggttactttatactagtgaggacgttaaccagccatattggctcaataaatagcttcggtaaggagttaatttccttctagaaatcagtgcctatttttcctggaaactcaattttaaatagtccaattccatctgaagccaagctgttgtcattttcattcggtgacattctctcccatgacacccagaaggggcagaagaaccacatttttcatttatagatgtttgcatcctttgtattaaaattattttgaaggggttgcctcattggatggctttttttttttcctccagggagaaggggagaaatgtacttggaaattaatgtatgtttacatctctttgcaaattcctgtacatagagatatattttttaagtgtgaatgtaacaacatactgtgaattccatcttggttacaaatgagactccttcagtcagttatccaaataaaagcagttctgaaactatccctttctttgttatgggtggaaggtggggctccaggccttcgcagtctgtggcttataaaatgtgcagaggccctccttccagaccctggggacgcgggagaggcctggctgcagctcacagcagccacagccaaccccactgcctcccaaggcactctgggtggatccgcacagctgcctgccaagccagcctgcccccatcctgtgcctgccttggtttcctttggaggacctggttgagttccaaaccagtttgaaactttgaagccttgctgcgtagaacgcacacaggaacccgggggcttggatttgaaaccctttccacttctggcctgtgatgagacagaggcagctggaggagcagcggcctcactgtccaccttgaggggccacggctctgtctgtggaaggggccccgactgagcccccatctgcggtgcttgaggggccttggccctgtctctgcctgctgaccctgccacccacgacagaaacaagcactgagcacccagccaggaggctcacaaagaggcctttatttatctagctcaaagtagacactatcacaatcttgtttgttactccttttactaaaatagttcaaatcaatgtttttaccacactatcaaaaagttctatttcttcttgtctccccacgtcagagtggttgaatagaaggtagaaacaggccgggagtccacgggctcccagctctaaacggcgccagggcaggaaggggtggctccaggtctcactgtggcaccttctacagaaaatagacgtagctgccgggcccggggacagaaaccagacgttccagtccatctccaaaaagcagcacaaatactttgccccacagtatgaaaaatatacacctctaccgctctgcagtcatgcatttagttttaagaaaaaaaaaaaa

SEQ ID NO: 332756 - DNA, 2665 bp, Artificial Sequence
  derived and/or modified sequence
ggtccccgacattccatatacaagatggccgcagtcggcaaggagagacgtcgctgaggggcttgcctgaagcgaggggattctaacattttcagagaaccttttggaaagaacaagcctacttcaataaatgaaggagaataaagaaaattcaagcccttcagtaacttcagcaaacctggaccacacaaagccatgttggtactgggataagaaagacttggctcatacaccctcacaacttgaaggacttgatccagccaccgaggcccggtaccgccgagagggcgctcggttcatctttgatgtgggcacacgtttggggctacactatgataccctggcaactggaataatttattttcatcgcttctatatgtttcattccttcaagcaattcccaagatatgtgacaggagcctgttgcctctttctggctgggaaagtagaagaaacaccaaaaaaatgtaaagatatcatcaaaacagctcgtagtttattaaatgatgtacaatttggccagtttggagatgacccaaaggaggaagtaatggttctggagagaatcttactgcagaccatcaagtttgatttacaggtagaacatccataccagttcctactaaaatatgcaaagcaactcaaaggtgataaaaacaaaattcaaaagttggttcaaatggcatggacatttgtaaatgacagtctctgcaccaccttgtcactgcagtgggaaccagagatcatagcagtagcagtgatgtatctcgcaggacgtttgtgcaaatttgaaatacaagaatggacctccaaacccatgtataggagatggtgggagcagtttgttcaagatgtcccggtcgacgttttggaagacatctgccaccaaatcctggatctttactcacaaggaaaacaacagatgcctcatcacaccccccatcagctgcaacagcccccatctcttcagcctacaccacaagtgccgcaagtacagcagtcacagccgtctcaaagctccgaaccatcccagccccagcagaaggacccccagcaaccagcccagcagcagcagccagcccaacagcccaagaaaccctctccgcagcccagttctccccgacaggttaagcgagccgtggtgagtgggctaaagcaggccctgggtagagcaggctttccaggtggcggcaacaccactgttgtttctcccaaagaagagaacaaagcagcagaaccaccaccacctaaaatccccaaaattgagaccactcatccaccgttgcctccagcccacccacctccagaccggaagcctcccctcgctgctgccttaggtgaggctgagccgccgggccctgtggatgccactgacctccccaaagtccagattccccctccggcccacccggcccctgtgcaccagccaccgccgctgccacaccggcccccgcccccacccccctccagctacatgaccgggatgtccaccaccagctcctacatgtctggagagggctaccagagcctgcagtccatgatgaagaccgagggaccctcctacggtgccctgccccccgcctacggcccacctgcacacctgccctaccacccccatgtctacccgcccaacccgcccccgccacctgtgcctcctcccccagcctccttccccccacctgccatcccaccccctactcctggctaccccccacccccacccacctacaaccccaacttcccacccccacccccacgcctcccgcctacccacgcagtcccccctcatcctcctccagggttgggcctgccgccagccagctacccacctcctgccgtcccccctggaggacagcctcctgtgcccccgcccattcccccacccggcatgcctccagttggggggctggggcgggcagcctggatgagataacgtgagccttttttccctctttgtttttttaacaagattttctaatcgacttgcagagtagttgaagtgggtaagcagcagggtaccttgtataatgcacgacagttgcagtatgggaagaatggaccgggcccctgggataaaatcagagtggtcctcacacctagaggacggggacaaccagctttcagagtagcctcatcagtgcccttgcagtctgactgtgtacacttggttcagctaatgtctgagagtcctgcactgggttactttatactagtgaggacgttaaccagccatattggctcaataaatagcttcggtaaggagttaatttccttctagaaatcagtgcctatttttcctggaaactcaattttaaatagtccaattccatctgaagccaagctgttgtcattttcattcggtgacattctctcccatgacacccagaaggggcagaagaaccacatttttcatttatagatgtttgcatcctttgtattaaaattattttgaaggggttgcctcattggatggctttttttttttcctccagggagaaggggagaaatgtacttggaaattaatgtatgtttacatctctttgcaaattcctgtacatagagatatattttttaagtgtgaatgtaacaacatactgtgaattccatcttggttacaaatgagactccttcagtcagttatccaaataaaagcagttctgaaact

SEQ ID NO: 332757 - DNA, 811 bp, Artificial Sequence
  derived and/or modified sequence
gatggccgcagtcggcaaggagagacgtcgctgaggggcttgcctgaagcgagggcatggagcttttggagagtgtctttattctgagtgaaagaaaaggaagaggatgaaaaagcaagaacagtttaaaggagctccttctctcatggaccacttccatccacccactccccaaatcacaagatgcacatttggtttacatcagtgaattcagtgatttgtgcagatgtgaattaacccaatcccatgacttgtctaagtgaaagtgcctacatggaataaactgaaaaggggtgctggatggaagagatggttagttttagaacataaatctttgtcaagattaagacaggcccaggttttgctgaagaatggaatctggaccagcgttagaggacctgtatgtctagtgaagaaaaaccagaagaaagattctaacattttcagagaaccttttggaaagaacaagcctacttcaataaatgaaggagaataaagaaaattcaagcccttcagtaacttcagcaaacctggaccacacaaagccatgttggtactgggataagaaagacttggctcatacaccctcacaacttgaaggacttgatccagccaccgaggcccggtaccgccgagagggcgctcggttcatctttgatgtgggcacacgtttggggctacactatgataccctggcaactggaataatttattttcatcgcttctatatgtttcattccttcaagcaattcccaagatatgtgacaggagcctgttgcctctttctggctgggaaagtagaagaaacacc

SEQ ID NO: 332758 - DNA, 936 bp, Artificial Sequence
  derived and/or modified sequence
attccatatacaagatggccgcagtcggcaaggagagacgtcgctgaggggcttgcctgaagcgaggggtgagtgacccaccgactgagggcagcgccgcccacctcccgcgtatctggaggtcggagtaggttatggccaaccgccgctatccactggcggagtctctctttccggattctgcctccctccgctaacctccggattctaacattttcagagaaccttttggaaagaacaagcctacttcaataaatgaaggagaataaagaaaattcaagcccttcagtaacttcagcaaacctggaccacacaaagccatgttggtactgggataagaaagacttggctcatacaccctcacaacttgaaggacttgatccagccaccgaggcccggtaccgccgagagggcgctcggttcatctttgatgtgggcacacgtttggggctacactatgataccctggcaactggaataatttattttcatcgcttctatatgtttcattccttcaagcaattcccaagatatgtgacaggagcctgttgcctctttctggctgggaaagtagaagaaacaccaaaaaaatgtaaagatatcatcaaaacagctcgtagtttattaaatgatgtacaatttggccagtttggagatgacccaaaggaggaagtaatggttctggagagaatcttactgcagaccatcaagtttgatttacaggtagaacatccataccagttcctactaaaatatgcaaagcaactcaaaggtgataaaaacaaaattcaaaagttggttcaaatggcatggacatttgtaaatgacagtctctgcaccaccttgtcactgcagtgggaaccagagatcatagcagtagcagtgatgtatctcgcaggacgtttgtgcaaatttgaaatacaagaatggacctcc

SEQ ID NO: 332759 - DNA, 1080 bp, Artificial Sequence
  derived and/or modified sequence
atgaaggagaacaaggagaacagcagccccagcgtgaccagcgccaacctggaccacaccaagccctgctggtactgggacaagaaggacctggcccacacccccagccagctggagggcctggaccccgccaccgaggccagatacagaagagagggcgccagattcatcttcgacgtgggcaccagactgggcctgcactacgacaccctggccaccggcatcatctacttccacagattctacatgttccacagcttcaagcagttccccagatacgtgaccggcgcctgctgcctgttcctggccggcaaggtggaggagacccccaagaagtgcaaggacatcatcaagaccgccagaagcctgctgaacgacgtgcagttcggccagttcggcgacgaccccaaggaggaggtgatggtgctggagagaatcctgctgcagaccatcaagttcgacctgcaggtggagcacccctaccagttcctgctgaagtacgccaagcagctgaagggcgacaagaacaagatccagaagctggtgcagatggcctggaccttcgtgaacgacagaaccagcctgtgcaccaccctgagcctgcagtgggagcccgagatcatcgccgtggccgtgatgtacctggccggcagactgtgcaagttcgagatccaggagtggaccagcaagcccatgtacagaagatggtgggagcagttcgtgcaggacgtgcccgtggacgtgctggaggacatctgccaccagatcctggacctgtacagccagggcaagcagcagatgccccaccacaccccccaccagctgcagcagccccccagcctgcagcccaccccccaggtgccccaggtgcagcagagccagcccagccagagcagcgagcccagccagccccagcagaaggacccccagcagcccgcccagcagcagcagcccgcccagcagcccaagaagcccagcccccagcccagcagccccagacaggtgaagagagccgtggtggtgagccccaaggaggagaacaaggccgccggcaaggccagcctgaagcacacctggtag

SEQ ID NO: 332760 - DNA, 1743 bp, Artificial Sequence
  derived and/or modified sequence
atgaaggagaacaaggagaacagcagccccagcgtgaccagcgccaacctggaccacaccaagccctgctggtactgggacaagaaggacctggcccacacccccagccagctggagggcctggaccccgccaccgaggccagatacagaagagagggcgccagattcatcttcgacgtgggcaccagactgggcctgcactacgacaccctggccaccggcatcatctacttccacagattctacatgttccacagcttcaagcagttccccagatacgtgaccggcgcctgctgcctgttcctggccggcaaggtggaggagacccccaagaagtgcaaggacatcatcaagaccgccagaagcctgctgaacgacgtgcagttcggccagttcggcgacgaccccaaggaggaggtgatggtgctggagagaatcctgctgcagaccatcaagttcgacctgcaggtggagcacccctaccagttcctgctgaagtacgccaagcagctgaagggcgacaagaacaagatccagaagctggtgcagatggcctggaccttcgtgaacgacagcctgtgcaccaccctgagcctgcagtgggagcccgagatcatcgccgtggccgtgatgtacctggccggcagactgtgcaagttcgagatccaggagtggaccagcaagcccatgtacagaagatggtgggagcagttcgtgcaggacgtgcccgtggacgtgctggaggacatctgccaccagatcctggacctgtacagccagggcaagcagcagatgccccaccacaccccccaccagctgcagcagccccccagcctgcagcccaccccccaggtgccccaggtgcagcagagccagcccagccagagcagcgagcccagccagccccagcagaaggacccccagcagcccgcccagcagcagcagcccgcccagcagcccaagaagcccagcccccagcccagcagccccagacaggtgaagagagccgtggtggtgagccccaaggaggagaacaaggccgccgagccccccccccccaagatccccaagatcgagaccacccacccccccctgccccccgcccaccccccccccgacagaaagccccccctggccgccgccctgggcgaggccgagccccccggccccgtggacgccaccgacctgcccaaggtgcagatccccccccccgcccaccccgcccccgtgcaccagcccccccccctgccccacagaccccccccccccccccccagcagctacatgaccggcatgagcaccaccagcagctacatgagcggcgagggctaccagagcctgcagagcatgatgaagaccgagggccccagctacggcgccctgccccccgcctacggcccccccgcccacctgccctaccacccccacgtgtacccccccaaccccccccccccccccgtgccccccccccccgccagcttccccccccccgccatccccccccccacccccggctaccccccccccccccccacctacaaccccaacttccccccccccccccccagactgccccccacccacgccgtgcccccccaccccccccccggcctgggcctgccccccgccagctaccccccccccgccgtgccccccggcggccagccccccgtgcccccccccatccccccccccggcatgccccccgtgggcggcctgggcagagccgcctggatgagatag

SEQ ID NO: 332761 - DNA, 1803 bp, Artificial Sequence
  derived and/or modified sequence
atgaaggagaacaaggagaacagcagccccagcgtgaccagcgccaacctggaccacaccaagccctgctggtactgggacaagaaggacctggcccacacccccagccagctggagggcctggaccccgccaccgaggccagatacagaagagagggcgccagattcatcttcgacgtgggcaccagactgggcctgcactacgacaccctggccaccggcatcatctacttccacagattctacatgttccacagcttcaagcagttccccagatacgtgaccggcgcctgctgcctgttcctggccggcaaggtggaggagacccccaagaagtgcaaggacatcatcaagaccgccagaagcctgctgaacgacgtgcagttcggccagttcggcgacgaccccaaggaggaggtgatggtgctggagagaatcctgctgcagaccatcaagttcgacctgcaggtggagcacccctaccagttcctgctgaagtacgccaagcagctgaagggcgacaagaacaagatccagaagctggtgcagatggcctggaccttcgtgaacgacagcctgtgcaccaccctgagcctgcagtgggagcccgagatcatcgccgtggccgtgatgtacctggccggcagactgtgcaagttcgagatccaggagtggaccagcaagcccatgtacagaagatggtgggagcagttcgtgcaggacgtgcccgtggacgtgctggaggacatctgccaccagatcctggacctgtacagccagggcaagcagcagatgccccaccacaccccccaccagctgcagcagccccccagcctgcagcccaccccccaggtgccccaggtgcagcagagccagcccagccagagcagcgagcccagccagccccagcagaaggacccccagcagcccgcccagcagcagcagcccgcccagcagcccaagaagcccagcccccagcccagcagccccagacaggtgaagagagccgtggtgagcggcctgaagcaggccctgggcagagccggcttccccggcggcggcaacaccaccgtggtgagccccaaggaggagaacaaggccgccgagccccccccccccaagatccccaagatcgagaccacccacccccccctgccccccgcccaccccccccccgacagaaagccccccctggccgccgccctgggcgaggccgagccccccggccccgtggacgccaccgacctgcccaaggtgcagatccccccccccgcccaccccgcccccgtgcaccagcccccccccctgccccacagaccccccccccccccccccagcagctacatgaccggcatgagcaccaccagcagctacatgagcggcgagggctaccagagcctgcagagcatgatgaagaccgagggccccagctacggcgccctgccccccgcctacggcccccccgcccacctgccctaccacccccacgtgtacccccccaaccccccccccccccccgtgccccccccccccgccagcttccccccccccgccatccccccccccacccccggctaccccccccccccccccacctacaaccccaacttccccccccccccccccagactgccccccacccacgccgtgcccccccaccccccccccggcctgggcctgccccccgccagctaccccccccccgccgtgccccccggcggccagccccccgtgcccccccccatccccccccccggcatgccccccgtgggcggcctgggcagagccgcctggatgagatag

SEQ ID NO: 332762 - DNA, 333 bp, Artificial Sequence
  derived and/or modified sequence
atgaaggagaacaaggagaacagcagccccagcgtgaccagcgccaacctggaccacaccaagccctgctggtactgggacaagaaggacctggcccacacccccagccagctggagggcctggaccccgccaccgaggccagatacagaagagagggcgccagattcatcttcgacgtgggcaccagactgggcctgcactacgacaccctggccaccggcatcatctacttccacagattctacatgttccacagcttcaagcagttccccagatacgtgaccggcgcctgctgcctgttcctggccggcaaggtggaggagaccccctag

SEQ ID NO: 332763 - DNA, 684 bp, Artificial Sequence
  derived and/or modified sequence
atgaaggagaacaaggagaacagcagccccagcgtgaccagcgccaacctggaccacaccaagccctgctggtactgggacaagaaggacctggcccacacccccagccagctggagggcctggaccccgccaccgaggccagatacagaagagagggcgccagattcatcttcgacgtgggcaccagactgggcctgcactacgacaccctggccaccggcatcatctacttccacagattctacatgttccacagcttcaagcagttccccagatacgtgaccggcgcctgctgcctgttcctggccggcaaggtggaggagacccccaagaagtgcaaggacatcatcaagaccgccagaagcctgctgaacgacgtgcagttcggccagttcggcgacgaccccaaggaggaggtgatggtgctggagagaatcctgctgcagaccatcaagttcgacctgcaggtggagcacccctaccagttcctgctgaagtacgccaagcagctgaagggcgacaagaacaagatccagaagctggtgcagatggcctggaccttcgtgaacgacagcctgtgcaccaccctgagcctgcagtgggagcccgagatcatcgccgtggccgtgatgtacctggccggcagactgtgcaagttcgagatccaggagtggaccagctag

SEQ ID NO: 332764 - protein, 511 aa, Artificial Sequence
  derived and/or modified sequence
MVDSTEYEVASQPEVETSPLGDGASPGPEQVKLKKEISLLNGVCLIVGNMIGSGIFVSPKGVLIYSASFGLSLVIWAVGGLFSVFGALCYAELGTTIKKSGASYAYILEAFGGFLAFIRLWTSLLIIEPTSQAIIAITFANYMVQPLFPSCFAPYAASRLLAAACICLLTFINCAYVKWGTLVQDIFTYAKVLALIAVIVAGIVRLGQGASTHFENSFEGSSFAVGDIALALYSALFSYSGWDTLNYVTEEIKNPERNLPLSIGISMPIVTIIYILTNVAYYTVLDMRDILASDAVAVTFADQIFGIFNWIIPLSVALSCFGGLNASIVAASRLFFVGSREGHLPDAICMIHVERFTPVPSLLFNGIMALIYLCVEDIFQLINYYSFSYWFFVGLSIVGQLYLRWKEPDRPRPLKLSVFFPIVFCLCTIFLVAVPLYSDTINSLIGIAIALSGLPFYFLIIRVPEHKRPLYLRRIVGSATRYLQVLCMSVAAEMDLEDGGEMPKQRDPKSN

SEQ ID NO: 332765 - protein, 484 aa, Artificial Sequence
  derived and/or modified sequence
MVDSTEYEVASQPEVETSPLGDGASPGPEQVKLKKEIYSASFGLSLVIWAVGGLFSVFGALCYAELGTTIKKSGASYAYILEAFGGFLAFIRLWTSLLIIEPTSQAIIAITFANYMVQPLFPSCFAPYAASRLLAAACICLLTFINCAYVKWGTLVQDIFTYAKVLALIAVIVAGIVRLGQGASTHFENSFEGSSFAVGDIALALYSALFSYSGWDTLNYVTEEIKNPERNLPLSIGISMPIVTIIYILTNVAYYTVLDMRDILASDAVAVTFADQIFGIFNWIIPLSVALSCFGGLNASIVAASRLFFVGSREGHLPDAICMIHVERFTPVPSLLFNGIMALIYLCVEDIFQLINYYSFSYWFFVGLSIVGQLYLRWKEPDRPRPLKLSVFFPIVFCLCTIFLVAVPLYSDTINSLIGIAIALSGLPFYFLIIRVPEHKRPLYLRRIVGSATRYLQVLCMSVAAEMDLEDGGEMPKQRDPKSN

SEQ ID NO: 332766 - protein, 141 aa, Artificial Sequence
  derived and/or modified sequence
MVDSTEYEVASQPEVETSPLGDGASPGPEQVKLKKEISLLNGVCLIVGNMIGSGIFVSPKGVLIYSASFGLSLVIWAVGGLFSVFGALCYAELGTTIKKSGASYAYILEAFGGFLAFIRLWTSLLIIEPTSQAIIAITFAN

SEQ ID NO: 332767 - protein, 44 aa, Artificial Sequence
  derived and/or modified sequence
MVDSTEYEVASQPEVETSPLGDGASPGPEQVKLKKEISLLNGVC

SEQ ID NO: 332768 - protein, 164 aa, Artificial Sequence
  derived and/or modified sequence
MVDSTEYEVASQPEVETSPLGDGASPGPEQVKLKKEISLLNGVCLIVGNMIGSGIFVSPKGVLIYSASFGLSLVIWAVGGLFSVFGALCYAELGTTIKKSGASYAYILEAFGGFLAFIRLWTSLLIIEPTSQAIIAITFANYMVQPLFPSCFAPYAASRLLAAA

SEQ ID NO: 332769 - protein, 122 aa, Artificial Sequence
  derived and/or modified sequence
MVDSTEYEVASQPEVETSPLGDGASPGPEQVKLKKEISLLNGVCLIVGNMIGSGIFVSPKGVLIYSASFGLSLVIWAVGGLFSVFGALCYAELGTTIKKSGASYAYILEAFGGFLAFIRLWT

SEQ ID NO: 332770 - protein, 115 aa, Artificial Sequence
  derived and/or modified sequence
MVDSTEYEVASQPEVETSPLGDGASPGPEQVKLKKEISLLNGVCLIVGNMIGSGIFVSPKGVLIYSASFGLSLVIWAVGGLFSVFGALCYAELGTTIKKSGASYAYILEAFGGFL

SEQ ID NO: 332771 - protein, 30 aa, Artificial Sequence
  derived and/or modified sequence
MVDSTEYEVASQPEVETSPLGDGASPGPEQ

SEQ ID NO: 332772 - protein, 310 aa, Artificial Sequence
  derived and/or modified sequence
MVDSTEYEVASQPEVETSPLGDGASPGPEQVKLKKEISLLNGVCLIVGNMIGSGIFVSPKGVLIYSASFGLSLVIWAVGGLFSVFGALCYAELGTTIKKSGASYAYILEAFGGFLAFIRLWTSLLIIEPTSQAIIAITFANYMVQPLFPSCFAPYAASRLLAAACICLLTFINCAYVKWGTLVQDIFTYAKVLALIAVIVAGIVRLGQGASTHFENSFEGSSFAVGDIALALYSALFSYSGWDTLNYVTEEIKNPERNLPLSIGISMPIVTIIYILTNVAYYTVLDMRDILASDAVAVAFLCGLKRRPSP

SEQ ID NO: 332773 - protein, 106 aa, Artificial Sequence
  derived and/or modified sequence
MVDSTEYEVASQPEVETSPLGDGASPGPEQVKLKKEISLLNGVCLIVGNMIGSGIFVSPKGVLIYSASFGLSLVIWAVGGLFSVFGALCYAELGTTIKKSGASYAY

SEQ ID NO: 332774 - protein, 116 aa, Artificial Sequence
  derived and/or modified sequence
MVDSTEYEVASQPEVETSPLGDGASPGPEQVKLKKEISLLNGVCLIVGNMIGSGIFVSPKGVLIYSASFGLSLVIWAVGGLFSVFGALCYAELGTTIKKSGASYAYILEAFGGFLA

SEQ ID NO: 332775 - DNA, 1536 bp, Artificial Sequence
  derived and/or modified sequence
atggtggacagcaccgagtacgaggtggccagccagcccgaggtggagaccagccccctgggcgacggcgccagccccggccccgagcaggtgaagctgaagaaggagatcagcctgctgaacggcgtgtgcctgatcgtgggcaacatgatcggcagcggcatcttcgtgagccccaagggcgtgctgatctacagcgccagcttcggcctgagcctggtgatctgggccgtgggcggcctgttcagcgtgttcggcgccctgtgctacgccgagctgggcaccaccatcaagaagagcggcgccagctacgcctacatcctggaggccttcggcggcttcctggccttcatcagactgtggaccagcctgctgatcatcgagcccaccagccaggccatcatcgccatcaccttcgccaactacatggtgcagcccctgttccccagctgcttcgccccctacgccgccagcagactgctggccgccgcctgcatctgcctgctgaccttcatcaactgcgcctacgtgaagtggggcaccctggtgcaggacatcttcacctacgccaaggtgctggccctgatcgccgtgatcgtggccggcatcgtgagactgggccagggcgccagcacccacttcgagaacagcttcgagggcagcagcttcgccgtgggcgacatcgccctggccctgtacagcgccctgttcagctacagcggctgggacaccctgaactacgtgaccgaggagatcaagaaccccgagagaaacctgcccctgagcatcggcatcagcatgcccatcgtgaccatcatctacatcctgaccaacgtggcctactacaccgtgctggacatgagagacatcctggccagcgacgccgtggccgtgaccttcgccgaccagatcttcggcatcttcaactggatcatccccctgagcgtggccctgagctgcttcggcggcctgaacgccagcatcgtggccgccagcagactgttcttcgtgggcagcagagagggccacctgcccgacgccatctgcatgatccacgtggagagattcacccccgtgcccagcctgctgttcaacggcatcatggccctgatctacctgtgcgtggaggacatcttccagctgatcaactactacagcttcagctactggttcttcgtgggcctgagcatcgtgggccagctgtacctgagatggaaggagcccgacagacccagacccctgaagctgagcgtgttcttccccatcgtgttctgcctgtgcaccatcttcctggtggccgtgcccctgtacagcgacaccatcaacagcctgatcggcatcgccatcgccctgagcggcctgcccttctacttcctgatcatcagagtgcccgagcacaagagacccctgtacctgagaagaatcgtgggcagcgccaccagatacctgcaggtgctgtgcatgagcgtggccgccgagatggacctggaggacggcggcgagatgcccaagcagagagaccccaagagcaactag

SEQ ID NO: 332776 - DNA, 1455 bp, Artificial Sequence
  derived and/or modified sequence
atggtggacagcaccgagtacgaggtggccagccagcccgaggtggagaccagccccctgggcgacggcgccagccccggccccgagcaggtgaagctgaagaaggagatctacagcgccagcttcggcctgagcctggtgatctgggccgtgggcggcctgttcagcgtgttcggcgccctgtgctacgccgagctgggcaccaccatcaagaagagcggcgccagctacgcctacatcctggaggccttcggcggcttcctggccttcatcagactgtggaccagcctgctgatcatcgagcccaccagccaggccatcatcgccatcaccttcgccaactacatggtgcagcccctgttccccagctgcttcgccccctacgccgccagcagactgctggccgccgcctgcatctgcctgctgaccttcatcaactgcgcctacgtgaagtggggcaccctggtgcaggacatcttcacctacgccaaggtgctggccctgatcgccgtgatcgtggccggcatcgtgagactgggccagggcgccagcacccacttcgagaacagcttcgagggcagcagcttcgccgtgggcgacatcgccctggccctgtacagcgccctgttcagctacagcggctgggacaccctgaactacgtgaccgaggagatcaagaaccccgagagaaacctgcccctgagcatcggcatcagcatgcccatcgtgaccatcatctacatcctgaccaacgtggcctactacaccgtgctggacatgagagacatcctggccagcgacgccgtggccgtgaccttcgccgaccagatcttcggcatcttcaactggatcatccccctgagcgtggccctgagctgcttcggcggcctgaacgccagcatcgtggccgccagcagactgttcttcgtgggcagcagagagggccacctgcccgacgccatctgcatgatccacgtggagagattcacccccgtgcccagcctgctgttcaacggcatcatggccctgatctacctgtgcgtggaggacatcttccagctgatcaactactacagcttcagctactggttcttcgtgggcctgagcatcgtgggccagctgtacctgagatggaaggagcccgacagacccagacccctgaagctgagcgtgttcttccccatcgtgttctgcctgtgcaccatcttcctggtggccgtgcccctgtacagcgacaccatcaacagcctgatcggcatcgccatcgccctgagcggcctgcccttctacttcctgatcatcagagtgcccgagcacaagagacccctgtacctgagaagaatcgtgggcagcgccaccagatacctgcaggtgctgtgcatgagcgtggccgccgagatggacctggaggacggcggcgagatgcccaagcagagagaccccaagagcaactag

SEQ ID NO: 332777 - DNA, 426 bp, Artificial Sequence
  derived and/or modified sequence
atggtggacagcaccgagtacgaggtggccagccagcccgaggtggagaccagccccctgggcgacggcgccagccccggccccgagcaggtgaagctgaagaaggagatcagcctgctgaacggcgtgtgcctgatcgtgggcaacatgatcggcagcggcatcttcgtgagccccaagggcgtgctgatctacagcgccagcttcggcctgagcctggtgatctgggccgtgggcggcctgttcagcgtgttcggcgccctgtgctacgccgagctgggcaccaccatcaagaagagcggcgccagctacgcctacatcctggaggccttcggcggcttcctggccttcatcagactgtggaccagcctgctgatcatcgagcccaccagccaggccatcatcgccatcaccttcgccaactag

SEQ ID NO: 332778 - DNA, 135 bp, Artificial Sequence
  derived and/or modified sequence
atggtggacagcaccgagtacgaggtggccagccagcccgaggtggagaccagccccctgggcgacggcgccagccccggccccgagcaggtgaagctgaagaaggagatcagcctgctgaacggcgtgtgctag

SEQ ID NO: 332779 - DNA, 495 bp, Artificial Sequence
  derived and/or modified sequence
atggtggacagcaccgagtacgaggtggccagccagcccgaggtggagaccagccccctgggcgacggcgccagccccggccccgagcaggtgaagctgaagaaggagatcagcctgctgaacggcgtgtgcctgatcgtgggcaacatgatcggcagcggcatcttcgtgagccccaagggcgtgctgatctacagcgccagcttcggcctgagcctggtgatctgggccgtgggcggcctgttcagcgtgttcggcgccctgtgctacgccgagctgggcaccaccatcaagaagagcggcgccagctacgcctacatcctggaggccttcggcggcttcctggccttcatcagactgtggaccagcctgctgatcatcgagcccaccagccaggccatcatcgccatcaccttcgccaactacatggtgcagcccctgttccccagctgcttcgccccctacgccgccagcagactgctggccgccgcctag

SEQ ID NO: 332780 - DNA, 369 bp, Artificial Sequence
  derived and/or modified sequence
atggtggacagcaccgagtacgaggtggccagccagcccgaggtggagaccagccccctgggcgacggcgccagccccggccccgagcaggtgaagctgaagaaggagatcagcctgctgaacggcgtgtgcctgatcgtgggcaacatgatcggcagcggcatcttcgtgagccccaagggcgtgctgatctacagcgccagcttcggcctgagcctggtgatctgggccgtgggcggcctgttcagcgtgttcggcgccctgtgctacgccgagctgggcaccaccatcaagaagagcggcgccagctacgcctacatcctggaggccttcggcggcttcctggccttcatcagactgtggacctag

SEQ ID NO: 332781 - DNA, 348 bp, Artificial Sequence
  derived and/or modified sequence
atggtggacagcaccgagtacgaggtggccagccagcccgaggtggagaccagccccctgggcgacggcgccagccccggccccgagcaggtgaagctgaagaaggagatcagcctgctgaacggcgtgtgcctgatcgtgggcaacatgatcggcagcggcatcttcgtgagccccaagggcgtgctgatctacagcgccagcttcggcctgagcctggtgatctgggccgtgggcggcctgttcagcgtgttcggcgccctgtgctacgccgagctgggcaccaccatcaagaagagcggcgccagctacgcctacatcctggaggccttcggcggcttcctgtag

SEQ ID NO: 332782 - DNA, 93 bp, Artificial Sequence
  derived and/or modified sequence
atggtggacagcaccgagtacgaggtggccagccagcccgaggtggagaccagccccctgggcgacggcgccagccccggccccgagcagtag

SEQ ID NO: 332783 - DNA, 933 bp, Artificial Sequence
  derived and/or modified sequence
atggtggacagcaccgagtacgaggtggccagccagcccgaggtggagaccagccccctgggcgacggcgccagccccggccccgagcaggtgaagctgaagaaggagatcagcctgctgaacggcgtgtgcctgatcgtgggcaacatgatcggcagcggcatcttcgtgagccccaagggcgtgctgatctacagcgccagcttcggcctgagcctggtgatctgggccgtgggcggcctgttcagcgtgttcggcgccctgtgctacgccgagctgggcaccaccatcaagaagagcggcgccagctacgcctacatcctggaggccttcggcggcttcctggccttcatcagactgtggaccagcctgctgatcatcgagcccaccagccaggccatcatcgccatcaccttcgccaactacatggtgcagcccctgttccccagctgcttcgccccctacgccgccagcagactgctggccgccgcctgcatctgcctgctgaccttcatcaactgcgcctacgtgaagtggggcaccctggtgcaggacatcttcacctacgccaaggtgctggccctgatcgccgtgatcgtggccggcatcgtgagactgggccagggcgccagcacccacttcgagaacagcttcgagggcagcagcttcgccgtgggcgacatcgccctggccctgtacagcgccctgttcagctacagcggctgggacaccctgaactacgtgaccgaggagatcaagaaccccgagagaaacctgcccctgagcatcggcatcagcatgcccatcgtgaccatcatctacatcctgaccaacgtggcctactacaccgtgctggacatgagagacatcctggccagcgacgccgtggccgtggccttcctgtgcggcctgaagagaagacccagcccctag

SEQ ID NO: 332784 - DNA, 321 bp, Artificial Sequence
  derived and/or modified sequence
atggtggacagcaccgagtacgaggtggccagccagcccgaggtggagaccagccccctgggcgacggcgccagccccggccccgagcaggtgaagctgaagaaggagatcagcctgctgaacggcgtgtgcctgatcgtgggcaacatgatcggcagcggcatcttcgtgagccccaagggcgtgctgatctacagcgccagcttcggcctgagcctggtgatctgggccgtgggcggcctgttcagcgtgttcggcgccctgtgctacgccgagctgggcaccaccatcaagaagagcggcgccagctacgcctactag

SEQ ID NO: 332785 - DNA, 351 bp, Artificial Sequence
  derived and/or modified sequence
atggtggacagcaccgagtacgaggtggccagccagcccgaggtggagaccagccccctgggcgacggcgccagccccggccccgagcaggtgaagctgaagaaggagatcagcctgctgaacggcgtgtgcctgatcgtgggcaacatgatcggcagcggcatcttcgtgagccccaagggcgtgctgatctacagcgccagcttcggcctgagcctggtgatctgggccgtgggcggcctgttcagcgtgttcggcgccctgtgctacgccgagctgggcaccaccatcaagaagagcggcgccagctacgcctacatcctggaggccttcggcggcttcctggcctag

SEQ ID NO: 332786 - DNA, 1536 bp, Artificial Sequence
  derived and/or modified sequence
atggtggactccaccgagtatgaggtggctagtcaaccggaagttgaaacgtctcccctgggcgacggggcgtccccaggtcccgagcaagtgaaactcaaaaaggaaatcagcctgctgaacggtgtctgtctaatagtcggcaacatgatcggctcggggatatttgtgagccccaaaggcgtgctgatctactcggcctcattcggcctctccctggttatttgggcggttggagggttattctcagtgttcggagcgctctgctatgccgaattgggcacaaccattaagaagagtggcgcatcctatgcctatatactagaagcctttgggggattcctggcgttcatcaggctctggacctcgctgttgattatcgagccaacaagccaggcgatcattgcaataactttcgccaattatatggtccagccgcttttcccctcatgcttcgctccctacgccgcttcacgattgctagccgccgcgtgcatctgtctgctcacattcatcaattgcgcgtacgtcaagtggggtactcttgtgcaggatattttcacgtacgcaaaggttcttgccttgatcgcggtcatagtcgctggcattgtacgtctgggccagggggcttccacccacttcgaaaactccttcgagggatcttcattcgctgtcggcgatatcgcccttgccctttactctgccctattctcctactccggatgggacactctgaactacgtaaccgaggagataaagaaccccgagagaaatctccctctttccatcggcatttccatgccgatcgtaactataatctatatacttacgaatgtcgcttactacaccgtgctggacatgagggatattcttgccagtgacgccgtcgccgtgaccttcgctgaccagatattcggcatttttaattggatcattcctctgagtgtcgcgctcagttgctttggggggctgaacgcctccatagtggctgcttctcggttgttttttgtagggagtcgagaaggccacctaccagatgctatttgtatgatccatgtggagaggttcacccctgtgccttccctgctgttcaacggtattatggcactcatctacttgtgcgtcgaggacatttttcagctgattaattattactctttcagttactggttctttgttgggctgagtattgtgggccaactatacctccgctggaaagagcctgacagaccacgtcctctaaagctgagcgtgtttttccccatcgtgttctgtctgtgtacgatttttctcgtcgctgtgcccctgtattctgatacgatcaatagcctgatcggcatcgctatcgccctgtcaggtctgccattttatttcttaatcattcgggtccctgagcataaaagacctctttatcttagacgtatagtggggagcgctacacggtacctccaggtgctgtgcatgtctgtggcagccgagatggatcttgaggacggcggggagatgcccaaacaacgcgatccgaagtccaattag

SEQ ID NO: 332787 - DNA, 1536 bp, Artificial Sequence
  derived and/or modified sequence
atggtcgattccaccgaatatgaggtagccagtcagcccgaagttgagacatcccctctgggggatggagcaagccctggccccgagcaggtgaagctcaagaaggagatttcccttctcaacggagtttgtctcatcgtgggtaacatgattggctcaggcatattcgtctccccaaagggtgtactgatctatagcgcttccttcggcctgtcattggtcatctgggccgttggcggcctgtttagcgtgtttggagccctgtgttacgcagagttgggcacaacaatcaagaagagcggcgccagttatgcctacatcctggaagcctttggaggattcctcgcttttatcaggttatggacaagcctcctaattatcgagcccacctcacaggccattatcgccattacctttgctaactacatggttcagcctctgttcccatcttgcttcgcaccgtacgcagctagccgcttgctggctgcggcttgcatctgcctccttaccttcattaactgcgcctatgttaaatggggtaccctcgtccaggacattttcacctatgcgaaagtgttggccctaatcgcagtcattgtggcgggtatcgtacgccttgggcaaggggcttcgacacacttcgagaactcctttgagggcagctctttcgccgtaggcgatatcgccttagccctttatagcgctctttttagttacagcggctgggacaccctaaactacgttacggaagagatcaagaatcccgaaaggaacctgcctttatcaatcggtatttcgatgccaatcgtgaccatcatctatattttaacaaatgtggcttattataccgtcctggatatgagagatatcctggctagtgacgcagtcgctgtgacttttgctgaccagatatttgggatttttaactggataatcccgctgtcagtggccctgagctgctttggaggactcaacgccagcatagtggcagccagccggctgttttttgtgggttcaagagaagggcatcttccagatgctatttgtatgatccacgtcgagcggttcacgcccgtgcctagtctgctctttaatggcattatggccctgatctacctgtgcgtggaggacatcttccagttgatcaattattacagttttagttactggttttttgttgggttgtccattgttggacaactatatcttagatggaaggagcccgatagaccgagacccctcaaactgtccgtcttctttcccatcgtattctgcctgtgcaccatcttcctggtcgcggtgcccctgtactccgacacaataaactcccttataggaatagcgattgctttgtcgggactgccgttctattttctgataatccgggtgcccgaacataagaggcctttatatctccgccggatcgttggcagcgccacgcggtaccttcaggtcctctgtatgtccgttgccgccgagatggacctggaggatgggggagagatgcctaagcaaagggatcctaagtcaaattag

SEQ ID NO: 332788 - DNA, 1536 bp, Artificial Sequence
  derived and/or modified sequence
atggtagactccacagagtatgaggtggcctcccagccggaggtcgagacatcacctctgggggacggcgcaagcccaggcccagagcaggtgaaattgaaaaaagaaattagccttctgaatggagtgtgcctgatcgtgggcaacatgatcggctctggcatcttcgtatccccaaagggcgtgctcatttatagcgcttccttcgggctgagtctggtgatctgggctgttggaggactgttctcagtgtttggcgctctgtgctacgccgagctcgggactacaatcaagaaaagtggcgccagctacgcctacattctggaggccttcggcggatttctcgcttttatcagactgtggacctccctccttatcatcgagcctacctcacaggcaatcattgcaataacgttcgccaattacatggttcagccactgttcccctcttgttttgctccttacgccgccagccgactcctcgcagcagcctgcatttgcctgttaacgttcatcaattgtgcatacgtgaaatggggcaccctcgttcaggatatctttacttacgctaaagtgctagcgctaatcgcagtcatcgttgcgggcatcgtgaggctgggacaaggcgcctccacccactttgagaacagctttgaaggatcttctttcgcagtcggggacatagcactggccttatactccgccctattcagctattccgggtgggataccctaaactacgtcaccgaggaaattaaaaaccccgagcggaatctgccattgagcataggaataagcatgcccatcgtgacaattatctacatccttaccaacgtggcgtactacactgtgttggatatgagagacatcctggcctcagacgctgtggccgtgacctttgcagaccaaatattcggaattttcaactggattattccattgagtgtggctctgagctgctttgggggcctgaatgcctccatagtggcggcttcacggctgttctttgtcgggtcaagggaaggccacctccctgacgccatttgcatgattcacgtcgaaagattcacccctgttccatcattactcttcaacgggatcatggccctgatttacctgtgtgtcgaggacatctttcagctgatcaattactatagcttctcctattggttcttcgtgggactgtccatcgtgggtcagttgtacctgaggtggaaagaaccagatagacccaggcctttgaagctatccgtgttttttccaatcgtcttttgcctgtgcacaatcttcctcgtggcggttcctctttactccgatactatcaatagcctgataggcattgctatagccctttcaggcctgcctttctacttcctcattatccgggttcctgagcacaagagacccctttacctgaggcggattgttggatcagccacaagatatcttcaggtcttatgtatgtcagtcgcagctgaaatggacctggaggatggaggggaaatgcctaaacagcgcgatcccaaatccaactag

SEQ ID NO: 332789 - DNA, 1536 bp, Artificial Sequence
  derived and/or modified sequence
atggttgacagtactgaatacgaggttgcttcgcagcctgaggtggagacctctccccttggggacggggccagcccagggcctgagcaggtgaagctcaagaaagagatcagcttgctcaatggagtttgtttaatcgttggcaatatgatcggcagtggcatctttgtgagtcccaaaggagttctgatttactctgccagcttcggactgagcctagtcatttgggctgtcggcggccttttttccgtgttcggtgctctctgctacgctgaattaggcaccacaatcaagaagtctggcgctagctatgcttatatattagaagcctttggtggcttcctcgcttttatccggctttggaccagcttgctaatcatagagcccacctcgcaggccattatcgctatcacctttgccaattatatggtgcagcccctgttccccagctgcttcgctccctatgccgcttcccggcttctcgctgctgcttgtatttgtctgctaaccttcattaactgtgcatatgttaagtggggcaccttggtgcaggacatattcacctatgctaaagttctcgctctgattgcagtgattgtcgctggaattgtccggctgggtcaaggtgcatctactcacttcgagaactcattcgaagggtcatcctttgccgttggtgacatcgccctcgccctgtattccgcgctctttagttatagtggatgggatacactcaattacgttacagaggaaatcaaaaatccagaaagaaacctccccctgtccatcgggatatctatgccaatcgtcacgattatttacatactaaccaacgtagcctactacaccgtgctggatatgcgtgatatcctcgctagtgacgcggtcgccgttactttcgcagaccagattttcggaatctttaactggattatcccactgagcgttgcactctcctgtttcgggggacttaatgcctccattgtggctgcctcaaggctcttctttgtggggtccagagagggacatttgcccgacgcgatttgcatgattcacgtggagcgttttacaccagttccaagcctgctgttcaacgggataatggcgctcatctatctgtgtgtggaggacatttttcagcttattaattactattcattctcatactggttcttcgtggggctgtctatcgtgggtcagctgtacttaagatggaaagagcctgaccgaccacgccctctgaagttgtccgtgttctttccaatcgtgttctgtttgtgcacaattttcttggtggccgtgcctttatatagcgatacaattaactctctcatcggtatcgccatcgccttgtccgggctacctttctactttctgattatcagggttcccgagcataaacgcccactctatttgcgtcggattgtgggaagcgccacgcggtatcttcaggtgctttgtatgagtgtggccgctgaaatggatctggaagacggaggcgagatgcccaagcaaagggacccaaagagcaattag

SEQ ID NO: 332790 - DNA, 1455 bp, Artificial Sequence
  derived and/or modified sequence
atggtagactccactgagtacgaggtagcgagtcagccagaagtggaaaccagccctctgggcgatggggcatcgcccggccccgaacaggtgaagctgaaaaaggagatctatagtgcctcttttggcctgtccctcgtcatttgggccgtgggcgggctctttagcgtcttcggggcgctctgctatgctgaattggggactactatcaagaagtccggtgcgagctacgcttatatcttggaggcatttggcgggttcctggccttcattcgtctttggacttcgctgctcattattgaacctacatctcaggccatcattgcaattacctttgccaattacatggtgcagcccctcttccctagctgctttgccccatatgccgcttctaggctgctagctgccgcctgcatctgcctgctaaccttcatcaactgcgcctacgtgaaatggggaacgcttgttcaggatatttttacgtacgccaaggtacttgcgcttattgccgtaattgtcgccggcattgttagactaggacagggagcctcaacacatttcgagaacagtttcgaaggcagcagcttcgccgtgggagacatcgccctagcactgtactccgccctttttagttattcaggctgggatactcttaattatgtcactgaagaaatcaagaacccagagcgaaacctgcccttgagcatcggcatctccatgcctatcgtgaccatcatctatattctgactaacgtggcctattatacggtgttagacatgagggatattctggcctccgacgcggtggccgtgacgttcgccgaccagatattcgggatctttaattggattatccccctgagcgtcgccttatcttgtttcggaggcctcaacgcttctatcgtcgccgcatctcggctgttctttgtaggtagtagagaagggcatctgccagacgccatctgtatgattcacgtggagcgcttcactccggtaccctccctgttatttaatggtattatggcccttatttacctgtgcgttgaggacatctttcagcttatcaactactattctttttcatactggttttttgtgggactgtctatagtcggtcaactctacctccggtggaaggagccagaccgaccccgaccgctgaaactctcggtattcttccctatcgtcttctgtctctgtaccatattcttagttgctgtgccactgtactcagatacaattaacagtctcatcgggatcgcgatcgcgctctccggacttccattctacttcctcatcatcagagtccccgaacacaaaagacctctgtatttacggcggatcgtgggtagcgccaccaggtacctgcaggtcctctgcatgagtgttgcggccgagatggacctggaggatggtggtgagatgcctaaacaacgcgaccccaagagcaactag

SEQ ID NO: 332791 - DNA, 426 bp, Artificial Sequence
  derived and/or modified sequence
atggtggatagtacagagtacgaagtggcctcccagccagaagttgagacatctcctcttggtgacggcgcaagcccaggcccagaacaggttaaattgaagaaggagatttctctattgaacggcgtctgcttaatcgtcgggaacatgattggaagcggaattttcgtctccccgaaaggggtcctgatatacagcgccagcttcgggttgtcactcgtgatctgggccgtgggagggctattcagcgtcttcggtgccctctgttatgccgaattgggaaccacgatcaagaagagcggtgcctcctacgcttatattctagaggccttcggaggattcctggcttttattcgcctgtggacctctctgttgattatcgaaccgacttctcaggcgattattgctattacatttgcaaactag

SEQ ID NO: 332792 - DNA, 135 bp, Artificial Sequence
  derived and/or modified sequence
atggttgattccactgagtacgaggtagccagccagccggaagtggagacctctcctctcggtgacggagcctcacctggtcctgagcaggtcaagctaaagaaggagatctccctgttgaacggtgtctgttag

SEQ ID NO: 332793 - DNA, 495 bp, Artificial Sequence
  derived and/or modified sequence
atggttgacagcaccgaatacgaggtggcctctcaacccgaggtggagactagcccactgggagacggagcttctcccggcccagaacaagtcaagctgaagaaggaaattagtctcctgaatggcgtgtgtctcatagttggtaacatgataggatcggggatctttgtgtcgccgaagggcgtgctgatttattccgcctcctttggtttatctctggtgatttgggccgtgggaggcctctttagcgtgttcggtgcactgtgttacgccgaactggggactactattaaaaagtcgggggcatcctatgcgtatattctggaggcttttggcggttttctggccttcattaggctgtggacgtccctcttaatcatcgagcctacctctcaggctatcatcgctatcactttcgctaattatatggtgcagcccctcttcccctcatgtttcgctccctatgcagcttcaagactgctggccgcagcctag

SEQ ID NO: 332794 - DNA, 369 bp, Artificial Sequence
  derived and/or modified sequence
atggtggacagcaccgagtacgaagtggccagtcagcctgaagtggaaactagccctctcggtgatggtgccagccccggccccgagcaggtgaaactgaaaaaggagataagccttctgaacggtgtgtgcttaattgtggggaacatgattggttccggcatcttcgtcagcccgaagggcgtgctgatttactccgcttcttttggtctgagcttagtaatttgggctgttggcggactgttcagcgtctttggggctctctgctatgcggaactggggaccacaatcaaaaagagtggggcctcttatgcctatatcctcgaggcctttggtgggtttctcgctttcatccggttgtggacttag

SEQ ID NO: 332795 - DNA, 1536 bp, Artificial Sequence
  derived and/or modified sequence
atggtcgactccaccgagtacgaggtggcatcacagcctgaagtcgaaacaagtcctctgggggatggtgcctcccccggcccagaacaggtgaaactcaaaaaggaaatttccttgctcaacggcgtatgcctcatcgtcggtaatatgatcggcagcggcatattcgtgtccccaaaaggtgtactcatttattcggcctcctttggactctcattggttatttgggctgtgggtggcctattttccgtcttcggcgctctttgctatgcagagctggggactacaatcaaaaagagcggtgcgagctatgcttacatcctggaggcattcggaggatttcttgcctttatcaggctgtggacttccctgcttataatcgagccgacaagtcaggccataatcgcaatcacatttgctaattatatggtgcagcccctctttccatcctgctttgccccctatgctgccagccggttactggcagctgcgtgtatttgcctgctgacatttatcaattgtgcttacgttaagtggggcaccctcgtgcaggatatatttacctacgcgaaggtcctcgcacttatcgccgttatcgttgcaggtatagtgcgcctgggccaaggagcctctactcatttcgagaattcattcgaagggtcctccttcgcagtcggagatatcgccctggccctctactcagctttattttcatattcagggtgggacaccctaaactacgtaacagaagagatcaagaatcctgagagaaatctcccgctttccattggtatatccatgccgatcgtgacaatcatttacatcttgacaaacgtagcttactacacggtcttagatatgagggacattctcgcatctgacgcggtcgccgtgaccttcgctgaccagatctttggaattttcaattggattattccactgagtgtcgcattgtcctgctttggcgggcttaacgcttcgattgtggctgcatctcgactattttttgtgggctcacgagagggccatctgcctgacgcgatctgcatgattcacgtcgaaaggtttacacctgtcccttctctgctgttcaacggaattatggccctgatctacctctgtgtcgaggacatattccaactgattaattattactccttctcctattggttttttgtcgggctgtctatagtcggccagctgtatctccgctggaaagaaccagatcgtcctaggcccctcaaactttcagtcttttttcccattgtgttttgcctatgcaccattttcttggtcgccgttcctctgtattcagacacaatcaatagcctgatcgggattgccatagccctctcagggttgccgttttacttcctgataatccgtgtccccgagcacaagcgaccactgtatttgcggaggattgtaggcagtgctacacgttacctccaggtcctctgcatgtccgtggctgccgagatggatttagaggatggcggcgagatgcctaaacagagagatcccaaatctaattag

SEQ ID NO: 332796 - DNA, 348 bp, Artificial Sequence
  derived and/or modified sequence
atggtggactctaccgaatacgaggtggcaagccagcccgaagtagaaacgagcccattgggagacggtgcctctcctggccccgagcaggtcaagcttaaaaaagaaatttccctgctgaatggcgtgtgcctgatcgtaggcaatatgattggttccggaatttttgtttcccccaagggagttctgatctatagcgcaagcttcggactgtctctcgttatttgggccgtcggggggttgttttcagtgtttggagccttatgttacgccgagctggggaccacaattaagaagtccggggcctcctatgcctacattctggaagcattcgggggatttctctag

SEQ ID NO: 332797 - DNA, 93 bp, Artificial Sequence
  derived and/or modified sequence
atggttgacagtacagaatacgaagtcgcgtcccagcccgaagtggagacctcccccttaggcgatggcgcaagcccgggcccggaacagtag

SEQ ID NO: 332798 - DNA, 933 bp, Artificial Sequence
  derived and/or modified sequence
atggtggatagtacagagtatgaggtggcctctcagccagaagttgagacaagcccattgggcgacggagcatccccggggccagaacaagttaaattaaagaaggagatctccctattaaacggagtgtgtcttatcgtcggcaatatgattggtagcggtatattcgtgagcccaaagggcgtgctcatttatagcgcctcttttgggctgagccttgtgatctgggcggtggggggactgttttccgtattcggtgccctctgctacgccgagttaggcaccactatcaagaagagtggggcatcttacgcctacattttagaggcatttgggggatttcttgcgtttattaggctttggacgagcctgctgatcatcgaaccaacgtcgcaggccatcattgccatcacttttgcaaactatatggttcaacctctcttcccctcttgttttgccccatacgctgccagccgtttgctggcggcggcctgcatctgcctcttaacatttattaattgcgcttacgtgaaatggggaacactggtgcaggatatcttcacgtacgccaaagtgctagccctcatcgcagttattgttgcgggaatcgtgcgactcggccagggggccagtacacattttgagaatagtttcgagggctcgtcctttgccgtcggcgacattgccctcgctctctactccgccctgtttagttactcaggctgggatacattgaactacgtgacggaagagattaagaaccccgaacgtaacctgcctctgtctattggcattagtatgcccatcgtgactatcatttacatattaacaaatgtcgcctactatactgtgttagacatgcgtgacatcctcgcgtctgatgccgtagcagtagccttcctttgcggacttaaacgtcgaccgtctccctag

SEQ ID NO: 332799 - DNA, 321 bp, Artificial Sequence
  derived and/or modified sequence
atggtggatagcacagaatacgaggtcgcctcacagcccgaggtggaaacatctcctctcggggatggcgccagcccgggccctgagcaggttaagctcaaaaaagagattagtctcctgaatggcgtgtgtctcattgttggtaacatgattggatccgggattttcgtgagccctaagggagtcctgatatacagcgcgtcatttggacttagtctcgttatttgggccgtgggcggcttattctcagtctttggagccctatgctacgctgaactcggcaccaccatcaaaaagagcggcgcttcttatgcatactag

SEQ ID NO: 332800 - DNA, 351 bp, Artificial Sequence
  derived and/or modified sequence
atggtagactcaacggagtatgaggtggcttcacaacctgaagtcgagacttccccccttggcgatggcgcgtccccgggcccagagcaggtgaaattgaagaaagaaatctctctactgaacggcgtttgcttaatcgttggtaacatgattgggtctgggatctttgttagccccaaaggcgtactgatttactccgcgtcttttggtttaagtcttgtcatctgggctgttggggggcttttctctgtattcggcgcactgtgttacgctgagttaggcaccaccattaagaagagcggggcatcgtacgcttatatcctggaggcttttgggggctttctagcatag

SEQ ID NO: 332801 - DNA, 1536 bp, Artificial Sequence
  derived and/or modified sequence
atggtggacagcacagaatatgaggtggccagccagcctgaggtggagaccagccccctgggagatggagccagccctggccctgagcaggtgaagctgaagaaggagatcagcctgctgaatggagtgtgcctgattgtgggcaacatgattggcagcggcatctttgtgagccccaagggcgtgctgatctacagcgccagctttggcctgagcctggtgatctgggccgtgggcggcctcttctctgtgtttggagccctgtgctacgccgagctgggcaccaccatcaagaagagcggggccagctatgcctacatcctggaggcctttggaggcttcctggccttcatccggctgtggaccagcctgctgatcatcgagcccaccagccaggccatcatcgccatcacctttgccaactacatggtgcagcccctcttccccagctgctttgccccctatgctgccagccggctgctggccgccgcctgcatctgcctgctgaccttcatcaactgtgcctacgtgaagtggggcaccctggtgcaggacatcttcacctacgccaaggtgctggccctgattgctgtgattgtggccggcatcgtgcggctgggccagggcgccagcacccactttgaaaattcctttgagggcagcagctttgctgtgggggacatcgccctggccctgtacagcgccctcttctcctacagcggctgggacaccctgaactacgtgacagaggagatcaagaaccctgagaggaacctgcccctgagcatcggcatctccatgcccatcgtgaccatcatctacatcctgaccaacgtggcctactacacagtgctggacatgagggacatcctggccagtgatgctgtggccgtgacctttgctgaccagatcttcggcatcttcaactggatcatccccctgtctgtggccctgagctgctttggaggcctgaatgccagcatcgtggccgccagccgcctcttctttgtgggcagccgggagggccacctgcctgatgccatctgcatgatccacgtggagcgcttcacccctgtgcccagcctgctcttcaacggcatcatggccctgatctacctgtgtgtggaggacatcttccagctgatcaactactacagcttctcctactggttctttgtgggcctgagcatcgtgggccagctgtacctgcgctggaaggagccagaccggccccggcccctgaagctgtctgtgttcttccccatcgtgttctgcctgtgcaccatcttcctggtggccgtgcccctgtacagcgacaccatcaacagcctgattggaattgccatcgccctgagcggcctgcccttctacttcctgatcatccgggtgcctgagcacaagaggcccctgtacctgcggagaattgtgggcagcgccacccgctacctgcaggtgctgtgcatgtctgtggccgctgagatggacctggaggatggaggagagatgcccaagcagagggaccccaagagcaactag

SEQ ID NO: 332802 - DNA, 1455 bp, Artificial Sequence
  derived and/or modified sequence
atggtggacagcacagaatatgaggtggccagccagcctgaggtggagaccagccccctgggagatggagccagccctggccctgagcaggtgaagctgaagaaggagatctacagcgccagctttggcctgagcctggtgatctgggccgtgggcggcctcttctctgtgtttggagccctgtgctacgccgagctgggcaccaccatcaagaagagcggggccagctatgcctacatcctggaggccttcggcggcttcctggccttcatccggctgtggaccagcctgctgatcatcgagcccaccagccaggccatcatcgccatcacctttgccaactacatggtgcagcccctcttccccagctgctttgccccctatgctgccagccggctgctggccgccgcctgcatctgcctgctgaccttcatcaactgtgcctacgtgaagtggggcaccctggtgcaggacatcttcacctacgccaaggtgctggccctgattgctgtgattgtggccggcatcgtgcggctgggccagggcgccagcacccactttgagaacagctttgagggcagcagctttgctgtgggggacatcgccctggccctgtacagcgccctcttctcctacagcggctgggacaccctgaactacgtgacagaggagatcaagaaccctgagaggaacctgcccctgagcatcggcatctccatgcccatcgtgaccatcatctacatcctgaccaacgtggcctactacacagtgctggacatgagggacatcctggccagtgatgctgtggccgtgacctttgctgaccagatcttcggcatcttcaactggatcatccccctgtctgtggccctgagctgcttcggcggcctgaatgccagcatcgtggccgccagccgcctcttctttgtgggcagccgggagggccacctgcctgatgccatctgcatgattcatgtggagcgcttcacccctgtgcccagcctgctcttcaacggcatcatggccctgatctacctgtgtgtggaggacatcttccagctgatcaactactacagcttctcctactggttctttgtgggcctgagcatcgtgggccagctgtacctgcgctggaaggagccagaccggccccggcccctgaagctgagcgtcttcttccccatcgtgttctgcctgtgcaccatcttcctggtggccgtgcccctgtacagcgacaccatcaacagcctcatcggcatcgccatcgccctgagcggcctgcccttctacttcctgatcatccgggtgcctgagcacaagaggcccctgtacctgcggcgcatcgtgggcagcgccacccgctacctgcaggtgctgtgcatgtctgtggccgctgagatggacctggaggatggaggagagatgcccaagcagagggaccccaagagcaactag

SEQ ID NO: 332803 - DNA, 426 bp, Artificial Sequence
  derived and/or modified sequence
atggtggacagcacagaatatgaggtggccagccagcctgaggtggagaccagccccctgggagatggagccagccctggccctgagcaggtgaagctgaagaaggagatcagcctgctgaatggagtgtgcctgattgtgggcaacatgattggcagcggcatctttgtgagccccaagggcgtgctgatctacagcgccagctttggcctgagcctggtgatctgggccgtgggcggcctcttctctgtgtttggagccctgtgctacgccgagctgggcaccaccatcaagaagagcggggccagctatgcctacatcctggaggcctttggaggcttcctggccttcatccggctgtggaccagcctgctgatcatcgagcccaccagccaggccatcatcgccatcacctttgccaactag

SEQ ID NO: 332804 - DNA, 135 bp, Artificial Sequence
  derived and/or modified sequence
atggtggacagcacagaatatgaggtggccagccagcctgaggtggagaccagccccctgggagatggagccagccctggccctgagcaggtgaagctgaagaaggagatcagcctgctgaatggagtgtgctag

SEQ ID NO: 332805 - DNA, 495 bp, Artificial Sequence
  derived and/or modified sequence
atggtggacagcacagaatatgaggtggccagccagcctgaggtggagaccagccccctgggagatggagccagccctggccctgagcaggtgaagctgaagaaggagatcagcctgctgaatggagtgtgcctgattgtgggcaacatgattggcagcggcatctttgtgagccccaagggcgtgctgatctacagcgccagctttggcctgagcctggtgatctgggccgtgggcggcctcttctctgtgtttggagccctgtgctacgccgagctgggcaccaccatcaagaagagcggggccagctatgcctacatcctggaggcctttggaggcttcctggccttcatccggctgtggaccagcctgctgatcatcgagcccaccagccaggccatcatcgccatcacctttgccaactacatggtgcagcccctcttccccagctgctttgccccctatgctgccagccggctgctggccgccgcctag

SEQ ID NO: 332806 - DNA, 369 bp, Artificial Sequence
  derived and/or modified sequence
atggtggacagcacagaatatgaggtggccagccagcctgaggtggagaccagccccctgggagatggagccagccctggccctgagcaggtgaagctgaagaaggagatcagcctgctgaatggagtgtgcctgattgtgggcaacatgattggcagcggcatctttgtgagccccaagggcgtgctgatctacagcgccagctttggcctgagcctggtgatctgggccgtgggcggcctcttctctgtgtttggagccctgtgctacgccgagctgggcaccaccatcaagaagagcggggccagctatgcctacatcctggaggcctttggaggcttcctggccttcatccggctgtggacctag

SEQ ID NO: 332807 - DNA, 348 bp, Artificial Sequence
  derived and/or modified sequence
atggtggacagcacagaatatgaggtggccagccagcctgaggtggagaccagccccctgggagatggagccagccctggccctgagcaggtgaagctgaagaaggagatcagcctgctgaatggagtgtgcctgattgtgggcaacatgattggcagcggcatctttgtgagccccaagggcgtgctgatctacagcgccagctttggcctgagcctggtgatctgggccgtgggcggcctcttctctgtgtttggagccctgtgctacgccgagctgggcaccaccatcaagaagagcggggccagctatgcctacatcctggaggcctttggaggcttcctgtag

SEQ ID NO: 332808 - DNA, 93 bp, Artificial Sequence
  derived and/or modified sequence
atggtggacagcacagaatatgaggtggccagccagcctgaggtggagaccagccccctgggagatggagccagccctggccctgagcagtag

SEQ ID NO: 332809 - DNA, 933 bp, Artificial Sequence
  derived and/or modified sequence
atggtggacagcacagaatatgaggtggccagccagcctgaggtggagaccagccccctgggagatggagccagccctggccctgagcaggtgaagctgaagaaggagatcagcctgctgaatggagtgtgcctgattgtgggcaacatgattggcagcggcatctttgtgagccccaagggcgtgctgatctacagcgccagctttggcctgagcctggtgatctgggccgtgggcggcctcttctctgtgtttggagccctgtgctacgccgagctgggcaccaccatcaagaagagcggggccagctatgcctacatcctggaggcctttggaggcttcctggccttcatccggctgtggaccagcctgctgatcatcgagcccaccagccaggccatcatcgccatcacctttgccaactacatggtgcagcccctcttccccagctgctttgccccctatgctgccagccggctgctggccgccgcctgcatctgcctgctgaccttcatcaactgtgcctacgtgaagtggggcaccctggtgcaggacatcttcacctacgccaaggtgctggccctgattgctgtgattgtggccggcatcgtgcggctgggccagggcgccagcacccactttgaaaattcctttgagggcagcagctttgctgtgggggacatcgccctggccctgtacagcgccctcttctcctacagcggctgggacaccctgaactacgtgacagaggagatcaagaaccctgagaggaacctgcccctgagcatcggcatctccatgcccatcgtgaccatcatctacatcctgaccaacgtggcctactacacagtgctggacatgagggacatcctggccagtgatgctgtggccgtggccttcctgtgtggcctgaagaggcggcccagcccctag

SEQ ID NO: 332810 - DNA, 321 bp, Artificial Sequence
  derived and/or modified sequence
atggtggacagcacagaatatgaggtggccagccagcctgaggtggagaccagccccctgggagatggagccagccctggccctgagcaggtgaagctgaagaaggagatcagcctgctgaatggagtgtgcctgattgtgggcaacatgattggcagcggcatctttgtgagccccaagggcgtgctgatctacagcgccagctttggcctgagcctggtgatctgggccgtgggcggcctcttctctgtgtttggagccctgtgctacgccgagctgggcaccaccatcaagaagagcggggccagctatgcctactag

SEQ ID NO: 332811 - DNA, 351 bp, Artificial Sequence
  derived and/or modified sequence
atggtggacagcacagaatatgaggtggccagccagcctgaggtggagaccagccccctgggagatggagccagccctggccctgagcaggtgaagctgaagaaggagatcagcctgctgaatggagtgtgcctgattgtgggcaacatgattggcagcggcatctttgtgagccccaagggcgtgctgatctacagcgccagctttggcctgagcctggtgatctgggccgtgggcggcctcttctctgtgtttggagccctgtgctacgccgagctgggcaccaccatcaagaagagcggggccagctatgcctacatcctggaggcctttggaggcttcctggcctag

SEQ ID NO: 332812 - DNA, 1536 bp, Artificial Sequence
  derived and/or modified sequence
atggtggacagcaccgagtacgaggtggccagccagcccgaggtggagaccagtcccctgggagatggagcaagtcccggacccgaacaggtgaagctcaagaaagaaatcagcctcctcaatggcgtatgcctgatcgtgggaaacatgattgggagtggcatctttgtgtctcctaagggcgtgctgatttactccgcgagcttcggactgtctctcgttatttgggccgttggaggtctgttcagcgtcttcggcgctctgtgctatgccgagctcgggacaaccatcaagaagtccggggcctcctacgcatacatccttgaagccttcgggggatttctggcttttattcggctgtggaccagcctgctcatcatcgaacctacttcacaggccatcatcgccatcacttttgccaattatatggtgcagccgctgttccccagctgcttcgccccatacgccgcgagtcggcttctggcagccgcttgcatctgtcttctgacattcattaattgtgcctacgtaaaatggggcacccttgtgcaggacatttttacctatgcaaaagttttagccctcatcgcggtcatcgttgctgggatcgtcagattgggccagggagccagcactcattttgaaaatagtttcgagggttccagtttcgctgtgggcgatatcgctctggctttgtacagtgccctgttttcatactctgggtgggatacactgaactacgtgactgaagagatcaagaaccccgagcgaaacctgcccctctcaattgggattagtatgccaattgtcacaatcatctacattcttaccaatgtagcctactacacagtcttggatatgagggacatcctggcaagtgacgcggtcgccgtcacgtttgctgatcagatatttggcatatttaactggattatacctctgtcagtagcactgtcttgtttcggcggcctaaatgcctcaattgtcgccgcctcgagactcttcttcgtgggatccagagaaggccacctgccagacgccatttgcatgattcacgtggagcgtttcactccggtgccctccttactgttcaatggcattatggcactgatctatctgtgcgttgaagacatcttccagttgatcaattactacagcttctcatattggttttttgtgggtttgtcaatcgtggggcagctgtatttgcgttggaaagaacccgaccgaccacgtcctttaaagctgtcagttttcttccctattgtgttctgtctatgcacgatctttctggttgctgtgcccctgtatagcgacactatcaactccctgataggcatcgccattgccttgtctggacttcccttttactttctaatcatccgcgtacctgagcacaagaggcccctctatctcagaaggatcgtgggctcagcaaccaggtatttgcaggtcctgtgcatgagtgtagccgcagagatggaccttgaggatggaggggaaatgccgaagcagcgagacccaaaaagcaactag

SEQ ID NO: 332813 - DNA, 1536 bp, Artificial Sequence
  derived and/or modified sequence
atggtggacagcaccgagtacgaggtggccagccagcccgaggtggagacttctcctctgggagacggagccagtcctggacctgagcaggtcaaactgaagaaagagatctcactcttgaacggggtgtgcctgatagtaggcaacatgatcggctccggtatatttgtgagtcccaaaggagtgctcatctacagcgcatcttttgggctttccctggtgatttgggccgtgggggggcttttcagcgtctttggagcactgtgttacgcagagctaggcacaactataaaaaagagcggggcgtcttacgcgtacatactcgaagccttcgggggattcttggcttttatacggctgtggacgtcactgctgatcatcgagccaacgtcccaggccattatcgcaatcaccttcgcaaactatatggtacagccactcttcccttcatgcttcgccccctacgcagcttctagactgttggccgccgcctgcatttgtcttttgacattcatcaattgcgcatacgtcaagtggggcacactggtgcaggatatcttcacctacgccaaggtcctggccctcatagcggttatcgtagctggcattgtgagactcggtcagggcgcaagtacccatttcgagaattcattcgaaggttcatccttcgccgtcggggatatcgctctcgctctctactcagcattgttttcctactctggttgggacactctaaattatgttacagaagagataaagaaccctgaacgaaacctgcccttgagcatagggatttctatgcctatcgtcactatcatctacatcctgacgaatgtggcatactacacagtgctcgatatgcgggacatcttggcgtcagacgccgtggcagtgacctttgccgatcagatattcggaatctttaattggataatccccctttctgtggccctgagttgtttcggaggcttgaacgcttcaatcgtggcggcttccaggctgttcttcgtgggcagccgcgagggccacctacccgatgcaatctgcatgatccatgtggaaaggttcactcctgtgccaagtcttctcttcaacgggatcatggctttaatttacctttgtgttgaggatatctttcagctgatcaactactacagtttttcttattggtttttcgttggcctatctattgtgggacagctgtacttacggtggaaggagcctgatcgccctagaccactgaagctcagtgtgttctttccaattgtgttctgcctttgcaccattttcttggtggctgtgccactttacagcgatacaatcaactcccttatcggaatagctatcgccctgtctggtcttccattttactttctgatcattagggttcctgaacataagaggcctctttatctaagacgcatcgtcggaagtgcaaccagataccttcaggtactgtgcatgtccgtcgccgctgaaatggatttggaagacggtggcgaaatgcccaaacagagagatcccaaatccaattag

SEQ ID NO: 332814 - DNA, 1536 bp, Artificial Sequence
  derived and/or modified sequence
atggtggacagcaccgagtacgaggtggccagccagcccgaggtggaaacctcaccattaggggacggcgctagccctggtcccgagcaggtgaaactgaaaaaagagatctcactgctgaatggagtgtgcctgattgttggcaacatgatcggctccggaatcttcgtttctccaaagggcgttctcatttatagtgcctcctttggcttgagtcttgtgatatgggcagtgggcggcctttttagtgtgttcggggcgttgtgttacgctgagttgggaacaacaatcaaaaaaagcggggcgtcatacgcctatattttggaggcttttggcgggtttttggcattcatcaggctctggacttccctgcttatcattgaaccaacctcccaagctattatcgccatcacattcgccaattatatggtccagccgctgttcccgtcttgctttgccccttatgccgccagccgcctgctcgccgccgcctgcatctgcctgctcacattcatcaactgcgcttacgtcaagtggggcaccctcgttcaggacatcttcacttacgccaaggtcctggcactcatcgctgtgattgtggcgggcatcgtgcggttaggacagggagcctcaacacacttcgaaaactcgttcgagggcagtagtttcgccgtgggggacattgcactggccctgtattctgcactttttagctactccggctgggataccctgaactatgttactgaggaaatcaaaaatccagaaaggaacttgcccttgagcattggcatctccatgcccatcgtgactatcatatatatcctgacaaacgtggcatattacacagtgcttgacatgagagatatactcgcctccgatgccgtggccgttacattcgcggaccagatatttggcatttttaactggatcattccactatctgtggccttatcgtgctttggcggcctgaatgccagcattgtggcggctagccggctgttttttgtgggatctcgggaggggcatttgcccgatgctatttgcatgatccatgtagagcggttcacccctgtgccgtcactcctgtttaacgggatcatggcacttatatatttatgcgtagaagacatcttccagctcataaactactactcattttcctattggttcttcgtcgggttgtccatcgtgggacagctctatctacgatggaaagaacccgacaggcccaggcctctgaaactgtccgttttcttccctattgtgttctgtttgtgtactatattcctcgtggccgtccccctgtattcagacacgattaattcactgattggcatcgctatcgctctgtcaggactgcccttctactttctgatcattcgcgtccccgagcataagaggcccctctatctgagaaggatcgtaggctcggcaacacggtatctgcaggtgctgtgcatgtccgtggccgcagaaatggaccttgaggacggaggcgaaatgcccaagcagagggacccgaaaagcaattag

SEQ ID NO: 332815 - DNA, 1536 bp, Artificial Sequence
  derived and/or modified sequence
atggtggacagcaccgagtacgaggtggccagccagcccgaggtggagacgagcccactgggcgacggcgcctcacctggaccagagcaagtgaaactgaagaaggagatcagtctgcttaatggggtctgcttaatcgtggggaatatgatcggttcaggtatatttgtatctcctaagggcgtacttatctactcagcatctttcggtctgtctctggtgatctgggcagtgggtggcctgttcagtgtcttcggagcactgtgctatgcagagctcgggacaactatcaaaaaatccggagcaagttacgcttacatcctagaagcgtttgggggattcctggcctttattaggctgtggacctccctgttgataattgagcccaccagccaagctattattgcaatcacattcgctaactacatggtgcagccgctgttcccctcatgcttcgccccatatgccgcttcaaggctgctagccgctgcatgtatctgtctcctgactttcattaactgcgcttacgtgaagtggggcaccctggttcaagacatttttacatacgcaaaggttctcgcacttatagcggtgattgtggctgggatagtacggctgggccagggggcgagtacacacttcgaaaactctttcgaaggcagctcttttgctgtcggggacatagccctcgccttgtacagcgccttattctcctactctggttgggacacactgaactatgttactgaggagataaaaaatccggagaggaatctacctctctcaattggcatctctatgccaatagtgaccattatatacatccttactaacgtggcttactatactgttttggatatgagagatattctggcctctgacgcggtcgccgtcaccttcgccgaccagatcttcggaattttcaattggattatccctctcagtgtcgcgctgtcatgctttggcggtctcaacgcttccatagtcgccgctagccgactgttcttcgtgggcagtcgcgagggccatctgcctgacgcaatctgcatgatccatgtcgaacgttttactcctgtgccgtccctcctcttcaatggtattatggccctcatttacctgtgtgtcgaggatatatttcaattaattaactattatagtttctcctattggttcttcgttggcctcagtattgtagggcagctctacctgagatggaaggagcccgatcgaccccggcccctgaagctgagtgtgttcttccccatcgtattttgcctctgcaccatcttcctggtggcagtgcctctttactccgatactatcaactctctcattggaattgctattgctttgagcggcctgccattctatttcctgatcattagagtgcccgaacacaagcgccccctctatctccgccgcattgtgggatctgccacgaggtatctgcaggtgctctgtatgtcagtggcagccgagatggatctggaagatggaggcgaaatgccgaagcaacgcgatccaaaaagcaattag

SEQ ID NO: 332816 - DNA, 1455 bp, Artificial Sequence
  derived and/or modified sequence
atggtggacagcaccgagtacgaggtggccagccagcccgaggtggagacctctcccctcggagatggggcttcacctgggccagagcaagttaaactgaaaaaggagatctactccgcttccttcggactaagcctcgttatatgggcggtgggcggcctcttttccgtatttggcgcactgtgttatgccgaactcggaactacaattaagaagtccggagcctcgtacgcgtacatccttgaggccttcggcggtttcttagctttcatccgtctctggacttcattattgattattgagcctacatctcaggccattattgcaataacgttcgccaattacatggtccagcccctcttcccgagttgttttgccccgtacgcagcgagtcgattgttggccgcagcctgcatatgccttctcaccttcattaactgtgcctatgtgaagtggggtaccctggtgcaggatatcttcacatatgcaaaagtgttagctctgatcgcagttatagtggcaggaatagtgcggctgggccaaggagctagtactcactttgagaacagcttcgagggatcgtcatttgctgtgggggatattgctctcgccctgtacagtgcgttgttcagctacagcgggtgggataccctgaattatgtgacagaagaaatcaagaatccggaaagaaacctccccctttccatcggaatttcaatgcctatcgtgacaatcatctatatcttgaccaacgtcgcctactacacggtactggatatgcgtgacatcctggcctctgatgctgtggctgtcacttttgctgatcaaatattcggaatctttaattggatcatacccctgtctgttgctctttcctgctttggaggcttaaacgcaagcatcgtggcagcctcacgactcttctttgtcggcagccgggagggacatctgcctgatgccatatgcatgatccacgtagaacgcttcacacctgtgcctagtctgctgttcaacggaatcatggccctgatttacttgtgcgtcgaggatatctttcagctgatcaactactacagcttctcgtattggtttttcgttgggctttccatcgtggggcagctttatctgcgctggaaggagcctgacaggcccagacctctcaagctgagtgtgttctttccaatcgtcttttgcctttgtaccatcttcctggtggccgtgcctctgtatagcgacaccataaactcactcattggcattgccattgcactgtctggactccccttctatttcctgataatcagggtcccagagcacaagcggcccctgtacctccgccggattgtgggttcagcaacacgctatttacaggttctctgtatgtccgttgcggcagagatggacctcgaggatggcggagagatgcccaaacagcgcgaccccaagtcgaactag

SEQ ID NO: 332817 - DNA, 426 bp, Artificial Sequence
  derived and/or modified sequence
atggtggacagcaccgagtacgaggtggccagccagcccgaggtggagacctccccattaggcgatggtgcgtccccaggacctgagcaggtcaaactgaaaaaagagatatctctactgaacggtgtatgtctgatcgttggaaacatgattggatcaggtatttttgttagccctaagggagtcctcatctactctgcttcatttggcctgtctctggtgatatgggctgtcgggggactgttttctgtctttggcgcactgtgttacgcagagttgggcacaaccatcaaaaaatctggcgcttcttacgcttatattctggaggcgttcgggggatttctggcctttatccggctgtggaccagcctgctaatcatcgaacctactagccaggcaataatcgccatcacctttgcaaactag

SEQ ID NO: 332818 - DNA, 135 bp, Artificial Sequence
  derived and/or modified sequence
atggtggacagcaccgagtacgaggtggccagccagcccgaggtggagacctcccctctgggtgatggggccagccctgggcccgagcaggtcaaacttaaaaaagaaatctctctcctgaacggggtgtgttag

SEQ ID NO: 332819 - DNA, 495 bp, Artificial Sequence
  derived and/or modified sequence
atggtggacagcaccgagtacgaggtggccagccagcccgaggtggaaacatccccattgggggatggcgcaagcccagggcccgagcaggtaaaactcaaaaaagagatttccttgctcaatggcgtgtgcctgatcgtgggcaacatgatcggtagcggcatcttcgtgtccccaaaaggggtcctgatttatagcgcgtctttcgggctctcactggtcatctgggcggttggcggactcttttccgtgtttggcgcactctgttatgctgagctcggaacgaccattaagaagtctggagcgtcttatgcttatatcctggaggccttcggcggttttctcgccttcattaggctttggacgagtttgctgattatcgagcctacgtcccaggcaatcattgcaataacctttgccaactacatggtccagcccctgtttccttcctgcttcgccccgtacgctgcctctagattgctagccgcggcatag

SEQ ID NO: 332820 - DNA, 369 bp, Artificial Sequence
  derived and/or modified sequence
atggtggacagcaccgagtacgaggtggccagccagcccgaggtggaaacttcacccctcggagacggcgcctcccccggacctgagcaagttaaattgaagaaggagataagcctcttgaatggagtatgcctcatagtggggaacatgatcggctctggcatatttgtctcacctaaaggagtgctcatctactccgcttctttcggcttgagcctggttatctgggcagtgggagggctgttttcagtgtttggagctctgtgttacgccgaattagggaccacaatcaagaaaagcggtgcgtcttatgcatatattttggaggccttcggtggctttttagcctttatcagactttggacatag

SEQ ID NO: 332821 - DNA, 1536 bp, Artificial Sequence
  derived and/or modified sequence
atggtggacagcaccgagtacgaggtggccagccagcccgaggtggaaacatccccattgggggatggtgccagccctggtcctgaacaagtaaaactcaaaaaagaaatttccctgctcaacggcgtttgtctgattgttggcaatatgattggcagtggaatatttgttagcccaaagggtgttttgatatactccgcgagctttgggttgagtctcgtgatttgggcagtggggggtctcttcagcgtgtttggggctctgtgctatgcggaactggggactaccataaaaaaatcaggtgcctcctacgcctacatcctggaggcttttggaggcttccttgcctttattaggttgtggactagcctgctcatcattgagcccacttcccaggctattattgcaattacctttgccaactatatggttcagccgctgtttcccagctgctttgcaccgtatgcggcctccagacttttggccgcggcctgtatctgcctcctgacatttatcaactgtgcatatgtgaaatggggtacactcgtgcaggacatatttacctatgctaaagtgcttgcactgattgccgttatcgtggcgggaattgtcaggctgggacagggcgcctccactcacttcgaaaattctttcgagggatccagctttgcggtgggtgatatcgccctagccctttacagcgcgctgttcagctattccggttgggatacactgaactatgtgacggaagaaattaaaaacccggagaggaaccttcctctgtcaattggaattagcatgcccatcgttaccatcatctacatcctcacgaacgttgcctattatacagtgcttgacatgagggatatcctcgcgtcagatgcagtagccgttacgtttgccgatcagatctttgggatctttaattggattatcccattgtccgtggcgctgagttgcttcggaggacttaacgctagcatcgtggcggcctcaagactcttcttcgtgggatctagagaggggcacttgccggacgccatttgcatgattcacgtggaaagattcactcccgttccttcgctgctctttaatgggatcatggcactgatttacctctgtgtcgaagacatcttccagctcataaattactacagtttctcttactggttttttgtgggtcttagtattgtcggccaactttacctaagatggaaggaacccgaccgaccccgccccttgaaactgtctgttttcttccccatagtgttctgtctttgcacaatttttctcgtggccgtgcccttatacagcgacacaattaatagtctgatcggaatcgcaattgctctcagtggcctccccttttatttccttattattagggtgcccgagcacaagcgtcctctgtaccttaggcggatcgtgggctccgctacaagatacctgcaggtcttgtgcatgtccgtggcagccgagatggacctagaagacggaggtgaaatgccaaaacagcgggatcctaaaagcaattag

SEQ ID NO: 332822 - DNA, 348 bp, Artificial Sequence
  derived and/or modified sequence
atggtggacagcaccgagtacgaggtggccagccagcccgaggtggagacctctccactcggcgacggagcatcacccggccccgagcaggtgaagcttaagaaggaaatatctctcttgaatggcgtttgcctgatcgtcgggaacatgatcggctcaggtatatttgtttctcccaagggcgtgttgatctactcagcttcctttggcctaagtctggttatttgggctgtgggcggactcttttctgtgttcggggcactctgttatgctgaactcggcacgaccattaagaagagtggggcgagctatgcctacattcttgaagccttcggcggcttcctgtag

SEQ ID NO: 332823 - DNA, 93 bp, Artificial Sequence
  derived and/or modified sequence
atggtggacagcaccgagtacgaggtggccagccagcccgaggtggagactagcccactgggtgacggcgcgtcccctgggcccgagcaatag

SEQ ID NO: 332824 - DNA, 933 bp, Artificial Sequence
  derived and/or modified sequence
atggtggacagcaccgagtacgaggtggccagccagcccgaggtggagacctccccactgggggatggcgctagtcctggccccgagcaagtgaagctgaagaaggagatctcgctgctaaatggtgtgtgtctgatcgttgggaacatgattggctctggcatcttcgtgtctccgaagggtgtgctcatctactccgcctcattcggactgtcgctggtgatttgggctgtgggcgggttattctccgtctttggggcgttgtgttacgctgagctggggaccaccataaagaaaagtggcgccagctacgcgtacattctggaggccttcggaggctttttggccttcattcgtctgtggacctccttgctgatcattgagcccacgagccaggcgataatcgcaattacgttcgccaattatatggttcaacctctgtttcctagttgtttcgctccctacgccgcaagtcgcctactcgcagcggcctgcatttgtctcctaactttcattaactgcgcatacgtgaaatggggaacactggtacaggacatcttcacctatgcaaaagttctggctctcatcgccgtgatcgttgccggaatcgttcgcttgggccaaggcgctagcacgcatttcgagaattcattcgaaggctcctctttcgctgtgggagatatcgctctggcactgtactctgccctgtttagctacagcggctgggatacactgaactacgtaacggaagaaattaagaatccagagcggaatttgccactctcaatcgggatctctatgcccattgtaaccatcatttacatacttaccaacgtggcttattacacagtcctggacatgcgggatattctggcctccgacgctgtagccgtggccttcctctgcggactcaagcgcaggccttcgccctag

SEQ ID NO: 332825 - DNA, 321 bp, Artificial Sequence
  derived and/or modified sequence
atggtggacagcaccgagtacgaggtggccagccagcccgaggtggagacctccccactcggcgacggagcttctcctggtccagagcaggtgaagttgaaaaaggaaatttccttgttaaacggcgtctgccttatcgtaggaaacatgattgggagcggtatctttgtgagtcccaagggcgttttgatttacagcgccagctttggactgtctctggttatttgggctgtcggcggtttgtttagtgtctttggagccctctgctatgccgagctcggcacaaccataaaaaagagcggagcgtcttatgcttattag

SEQ ID NO: 332826 - DNA, 351 bp, Artificial Sequence
  derived and/or modified sequence
atggtggacagcaccgagtacgaggtggccagccagcccgaggtggaaacctctcccctgggtgacggagcttcccccggtcctgagcaagtgaagcttaagaaagaaatttcgctgctgaatggcgtatgcctcatagttgggaatatgataggctccgggatttttgtctcacctaaaggagtactgatctacagcgcgtcctttggactttctcttgttatttgggcggtgggtggcctgttctccgtcttcggagcactgtgttacgccgaacttggaaccacgatcaagaaaagcggagctagttatgcatacatcctggaagctttcggcggttttctcgcatag

SEQ ID NO: 332827 - DNA, 1536 bp, Artificial Sequence
  derived and/or modified sequence
atggtggactctaccgagtatgaagtggcctcgcagcccgaagtagagacctcacctctgggggacggagccagtccaggccctgagcaagttaaactgaagaaagagatttccttattaaacggtgtgtgtctgatcgtcggaaatatgataggatccggtattttcgtaagccccaagggggtcctcatttattcggcctcctttggcctgtccctcgtaatatgggccgtcggcggtctctttagcgttttcggggcactgtgctacgccgagttaggcacaacgataaagaagagtggagcgagctacgcttatattcttgaggcattcggcggttttttagccttcataaggttatggacgagtttgctaatcatcgaaccaacaagtcaggctattattgccatcactttcgctaattatatggtacagcctttgttcccaagctgttttgccccttatgccgcaagccgattactggccgctgcttgtatatgtttgctcaccttcataaattgtgcctatgtcaaatggggcacactcgtgcaagacatctttacgtacgcaaaggtgctcgctctgattgccgtaatcgtggccggaatcgttaggctgggtcagggtgcatccacgcatttcgagaactccttcgagggctcctccttcgccgtcggcgatatcgctctggccctgtatagtgcactgtttagctatagcggctgggacacactgaattatgtgaccgaggagataaagaaccccgagagaaacttaccgctgagcatagggatttccatgccgattgtgaccatcatctatatactgacaaatgtcgcctactataccgtccttgatatgcgcgatatcctcgcctctgacgcagtggcagttacattcgccgatcagatcttcggcatcttcaactggattatacccctgtcagtggccctgagctgtttcgggggactaaatgcttcaattgtggcagcatcacgcctcttcttcgttgggtcccgggagggtcatttaccagacgccatttgtatgatccacgtcgagaggttcacaccagtgcccagcctgctctttaatgggataatggccctgatttatttatgcgtggaagatatatttcaactcattaattattacagtttcagttattggttcttcgtaggattaagtatcgtcggacaattatacttgcggtggaaggagccagatcggcctcgcccactgaagttgtcagtgtttttccccatcgtgttctgtttgtgtaccatattccttgtggccgtcccactatatagtgacactattaatagtctgattggcattgccatcgccctcagtggcctacccttctactttctgattattagagtaccagagcacaagagaccactctaccttaggagaattgttggctccgctacccgctaccttcaagtcctatgcatgtctgttgctgcggagatggacctcgaagacggaggggaaatgcctaaacagcgtgaccccaagagcaattag

SEQ ID NO: 332828 - DNA, 1536 bp, Artificial Sequence
  derived and/or modified sequence
atggttgatagcactgagtacgaggtcgcgagccagcccgaggtcgagacatcaccactgggcgatggcgcaagtccaggccctgagcaggtcaaactcaaaaaggaaattagtctgttgaatggcgtgtgtctgatcgtcggtaacatgattggcagcggcatttttgtctcaccaaagggcgtcctcatttactctgcatcattcggtttgagccttgtcatctgggctgttggaggcctcttcagcgtatttggcgcattatgctatgcagaactggggacaacgatcaagaagtccggagccagttacgcatacattctggaagcctttgggggatttctggccttcataaggttatggacaagtctgctcattattgaacccacaagtcaggccattattgcaataactttcgcaaactatatggtgcagccattgtttccctcatgctttgctccatatgcggcatccaggctcttggccgctgcatgtatatgtttgctgacctttatcaactgcgcctacgttaaatgggggactctcgtccaggacatctttacatacgctaaagtgttagctctgatcgcagtgatcgtggcgggtatcgtgcggctcggacagggagccagcacccacttcgaaaactcattcgagggatcgagttttgccgtgggtgatattgcgctggctctctacagcgcacttttctcatacagcgggtgggacacattgaactacgtgaccgaggagattaagaaccccgaacgaaacttgcctttgagcattgggatctcaatgccaattgtcacgataatctatatacttaccaatgtggcatattacacagtcctcgacatgcgggacatccttgcatctgacgcagttgccgtcacttttgccgaccagattttcggcatattcaactggattattcctctaagtgtcgccctgtcctgtttcgggggtttgaacgcaagcattgtggccgcttcccggctcttcttcgtggggagcagggaaggccatctgccagatgccatatgtatgatccatgtcgagcggtttactcccgtgccaagcctgctctttaacggtatcatggcccttatctatctgtgcgttgaagacattttccagctgatcaattactactcattcagttactggttctttgtgggacttagcatagtgggacagctctatttaagatggaaggagcccgacagaccccgaccgttaaaactttctgttttttttcctattgtgttctgcctgtgtactatttttctggtggccgtacctctgtacagcgacacaatcaattccctgatcgggatagccatcgcactttcaggcctcccattttacttcttaatcatccgcgtccctgagcacaagcgtccactctacttgcgacgcattgtggggtctgcgacacgctacctccaggtgctgtgcatgagcgtggccgctgagatggatcttgaagatggaggagaaatgcctaagcaaagagatccaaagtccaattag

SEQ ID NO: 332829 - DNA, 1536 bp, Artificial Sequence
  derived and/or modified sequence
atggttgactccaccgagtacgaggtggccagtcagcctgaggtggagacctcgcctctgggtgacggtgcttcacctggtcctgaacaggtaaagctcaaaaaggagatctctctgctaaatggggtgtgtctgatagtgggcaatatgatagggtccgggattttcgtgtctcccaagggcgtgctgatttatagcgcaagttttgggctgtcactcgtcatatgggccgtgggcggattgttctccgtgtttggagctctgtgttacgctgagctgggcacaaccataaaaaagtcaggcgcatcctacgcgtatatcttggaggccttcggcggtttcctggcttttattagactgtggactagtctgctaatcatcgaacctacttctcaggccatcattgccatcacatttgccaactacatggtacagcctttgtttccctcttgcttcgccccatacgctgccagtcggcttctggctgccgcttgtatttgcctgcttacgttcattaactgtgcttacgtgaaatggggtacccttgttcaggacatcttcacgtacgcgaaggttctggcgctcatcgctgtcatagtcgccggaatagttcgcctaggacagggggcttctacccatttcgagaatagcttcgaagggagttccttcgctgtgggcgacatcgctctcgctctctactcagccctgttctcctattccgggtgggatacccttaactatgtgaccgaggaaattaaaaatccagaacgaaatctgcccttatctattggaatatccatgcccatcgtgactatcatctacatccttacgaatgtggcatattatacggttttggatatgcgtgatatcctagccagcgacgcagtagctgtgactttcgcagaccaaatttttggcatcttcaactggatcattccgctttcagttgctttaagctgcttcggaggactcaacgcctctattgtggccgcaagtcggcttttctttgtgggttctagagaaggtcaccttcctgatgccatctgtatgatccatgttgagagatttaccccggttccgagcctcctcttcaatggcattatggcgctgatttacctgtgcgtggaggacatcttccagctcattaattactacagctttagctactggttttttgtagggctgtccatagtgggacagctctatctacgttggaaggagcccgacaggcctcgacccctcaaactatcagtgttctttccaattgtcttctgtctctgcacaatcttcctggtggccgttcctctgtattctgacactatcaactcgttaattgggatcgcaattgctctgtctggtctgcctttctattttcttatcatcagagtgcccgaacacaagcgcccactgtatctcaggcggattgtcgggagcgcaacgagatacctacaagttctttgtatgtctgtagcagcagaaatggatctggaggatggcggagaaatgcccaagcagcgagatccaaaatcgaattag

SEQ ID NO: 332830 - DNA, 1536 bp, Artificial Sequence
  derived and/or modified sequence
atggtggattccacagaatacgaagtggcctcacagcccgaagtggaaacaagcccacttggagacggtgcttcgcccggacccgagcaagtgaagctgaagaaagaaatttctctgctcaacggggtgtgcttgatcgtgggtaacatgatcggttcaggcatcttcgtctcccctaagggggtgctgatctatagcgcctcctttggcttgtcactggtgatctgggccgtgggaggtctatttagcgtatttggagctctgtgttacgcggagctgggaacgactatcaagaaatccggcgcttcttatgcgtacatcttagaggctttcgggggtttcctggccttcatccggctgtggacttcccttctaatcattgaacccaccagccaggccataattgcaattacattcgctaattatatggtgcagcccctgttcccatcatgctttgctccctatgccgcttctagactactggctgctgcctgcatttgcctgctgacatttatcaactgcgcttatgtcaaatggggaactctggtccaggatatttttacctatgccaaagttctcgcgctgattgcagtgatcgtggctggaattgtccggctgggacagggtgcctccacccatttcgaaaattctttcgaggggagttccttcgcggtgggggatatcgcactggctctgtacagtgccctgttctcatatagcggctgggataccctgaactacgtgactgaagaaatcaaaaatcctgagagaaatctacccctgagcatcgggatctctatgcctatcgttactatcatctatattctcactaacgtagcctactacactgtgctcgacatgcgtgatattcttgcttcagacgcagtcgctgtgacctttgcagatcagatctttggcatttttaattggatcattcccctttctgtggccctgagttgctttgggggactgaatgcctccatcgtagccgcttccagactgttctttgtggggagccgggagggtcacttgccagatgcaatatgcatgattcacgtagaacgtttcacccctgttccttcactcctgttcaacgggatcatggctctcatttacctttgcgtggaggatatctttcagctaatcaactattattccttcagttattggtttttcgtggggctgtcaatcgtgggacagctctatctacgctggaaggaacccgaccgccctcgaccactgaagttatctgtcttctttccgatagtcttctgtctatgcaccatttttctggtggcggtgccactgtatagtgatacgattaactcactcattggtatcgccatcgccctctcggggctgcccttttacttcctgataattcgggtgcctgaacataagcgccctctgtacctgcgaagaattgttggctccgctactcggtacctccaagtgttgtgcatgagcgtggctgcagaaatggatcttgaagacggcggtgagatgccaaagcagcgggaccctaagtcaaattag

SEQ ID NO: 332831 - DNA, 1455 bp, Artificial Sequence
  derived and/or modified sequence
atggtggactcaacagaatacgaggtggccagccagcccgaggttgagacttcgccactcggagacggagccagcccgggaccagaacaggtaaaactgaaaaaggagatctactcagccagcttcggtctttccctcgtcatttgggccgtaggcggtctattttctgtatttggtgccctctgctatgcagagctggggacaaccatcaagaagtctggtgcttcttacgcatacattttggaggccttcggcggatttcttgcgttcatcaggctctggacaagcttgctcattattgagcccacatcacaggcgattatcgcaattacgttcgctaattacatggtacagcccttattcccttcctgttttgcgccttatgcagcttcccgccttttggcagctgcttgtatctgtttactgacatttataaattgcgcgtatgtcaagtggggcactcttgtgcaggacatcttcacatatgcaaaggtacttgcgctcatcgccgtgatcgttgctggcatcgtgcggttagggcagggcgcatcaacccacttcgagaactcgttcgagggatcctcattcgctgtgggggacatcgccctcgccctgtattccgccttattcagttatagtgggtgggacactttaaactatgttactgaagagattaagaatccagagcgtaacctgccgctcagtatagggattagtatgcctattgtgacaataatctacatcctcactaatgtggcttactatacggttctcgatatgagagatatcttggcctctgacgccgtcgctgtgactttcgcagaccagattttcgggatcttcaactggataatccctttgtccgtcgccttgtcatgcttcgggggactgaatgcaagtattgtggcggcatcacggctgttcttcgtggggagtcgtgaagggcacctgccagatgccatatgtatgatccacgtggagcgctttaccccagttccctctctgttattcaacgggattatggcgcttatatacttgtgtgtcgaggacattttccaactgattaactactactcattcagttattggttcttcgttggcctgtccatcgttggccaattatacctccgttggaaggaaccagatcgccctagacccctaaagttgtccgtttttttcccaattgtgttttgcctctgtactatctttctggtcgctgtgcctctatactcagacactataaactcactcataggaatcgcaattgcattaagcggactccccttctattttctgattatcagagtgccagaacacaagagacctctctatctgcgcagaatcgttggctctgccacaagatatcttcaggtcctgtgtatgtccgtggcagctgagatggatttagaagatggtggggagatgcctaagcaaagggaccccaaatccaattag

SEQ ID NO: 332832 - DNA, 426 bp, Artificial Sequence
  derived and/or modified sequence
atggtggattccacagaatatgaggtggctagccagcctgaagtagagaccagtccacttggagacggtgcctcacccggtcccgaacaggtcaaacttaagaaggagatctctctgctcaacggggtttgtctcatcgtcgggaatatgattgggagtgggatttttgtgtcccccaagggcgtattgatttactctgcctccttcggactgtccttggtgatctgggcggtgggcggactgttcagtgtatttggagccctttgctacgcggaactcgggaccaccattaagaagagtggtgccagttacgcatacattctggaggcttttgggggatttctcgccttcattaggctctggacatccctactaataatcgaaccgactagccaggctatcatcgccatcacgttcgcaaattag

SEQ ID NO: 332833 - DNA, 135 bp, Artificial Sequence
  derived and/or modified sequence
atggtcgatagtacagagtacgaggtcgcttctcaaccggaggttgaaacaagccccttaggggacggcgcatcacctggaccagagcaggtgaagctgaagaaggaaatctccttacttaatggggtgtgctag

SEQ ID NO: 332834 - DNA, 495 bp, Artificial Sequence
  derived and/or modified sequence
atggttgacagcaccgaatacgaggttgcgtcccagcccgaagtcgagactagccctctgggtgatggggcatcccctggtcctgagcaagttaaactcaagaaagagattagcctcctcaacggtgtctgtctcatcgtgggtaatatgatcggttcagggatctttgtgtcgcccaaaggcgtgcttatttactctgcgagctttggactttctctagtgatttgggcagttgggggtcttttctccgtcttcggagctctatgttacgcagaactcggtaccactatcaagaaaagcggtgcgagttacgcctacatcttagaggccttcggaggcttcttagcctttattcgtctgtggacctctctcctaataatcgaacctacaagccaggcaatcatcgccattacctttgctaactacatggtgcagccactcttcccttcctgcttcgcaccatacgctgcttcaagactgctggctgccgcttag

SEQ ID NO: 332835 - DNA, 369 bp, Artificial Sequence
  derived and/or modified sequence
atggtggatagtaccgagtatgaagtggcaagtcaacccgaagtggagaccagtccacttggcgacggagcatctcctggacccgagcaggtgaagctgaaaaaggagatctcactccttaacggagtctgtttaatcgtgggaaatatgattggaagcggtatctttgttagccccaaaggagtgctgatctatagtgcaagtttcggattgtcgctcgtaatctgggctgtgggcggactgttctctgttttcggggctctctgttacgctgagctcgggaccaccattaaaaagtcaggagcctcctatgcctatattttagaagcttttggcggtttcctcgccttcatccggttatggacttag

SEQ ID NO: 332836 - DNA, 1536 bp, Artificial Sequence
  derived and/or modified sequence
atggtggatagcaccgagtatgaggttgcaagccaacctgaggtagagaccagccccctgggcgacggggcatcaccaggacccgagcaagttaaactaaaaaaggaaatcagcctgctaaatggcgtgtgcctgattgtcggcaacatgattggctcgggcattttcgtctcaccaaagggcgttctgatttactccgcctcatttgggttgtctttggttatctgggcggttggcggtctcttttctgtctttggagctctctgctacgccgaactggggaccacaatcaaaaagtccggtgcctcttacgcatatatactggaggccttcggcggattcttggctttcatccgactctggacctcgttgctcataatcgagcctacatctcaggccataatcgcaatcacttttgccaattacatggttcagcctctgttcccgtcctgttttgcaccctacgccgcttcacgcctactcgccgcagcctgcatctgcttattgacttttattaactgtgcttatgtaaaatggggcactcttgtacaagatatctttacatacgctaaggtccttgcactgatcgccgtaatcgtggctggcatcgtccgcctggggcagggagcaagcacccatttcgagaattccttcgagggaagttcctttgcagtcggagacatcgcactggccctgtatagtgcactgttctcctacagcggctgggacacccttaattatgtcactgaagaaatcaaaaaccccgagagaaacctgcctttgtcaatcgggatctccatgccaatcgttacaatcatttacattctcacaaacgttgcttattatacagttctggatatgagagatattctggccagtgatgcagtggccgtgacatttgccgaccagattttcggaatctttaactggatcatacctttgagtgtggcattgtcctgcttcggcggtctgaatgcctctattgtggcagcttctcggttgttttttgttgggagccgggagggccaccttccagacgcaatttgtatgatccatgtggaacggtttacacctgtgccaagcctgctattcaatggaatcatggcactcatctatctgtgcgtggaagatatcttccagttgatcaactactacagcttttcttattggttcttcgtcggactgagcattgttggccaactttatctgagatggaaggaacccgaccggccacgtccgctgaaattaagcgtcttttttccaattgtattttgcctctgcacaattttcctcgtggccgtgcctttgtatagtgacaccattaactctctaatagggattgcaatcgcactctctggcctccccttctatttcttaattatacgtgtgcccgagcataagcggcctttgtacctacggcgaatcgttggcagtgcaacgaggtatctgcaggtactttgcatgtcagtggccgctgaaatggatctcgaagacggtggcgagatgcctaaacaaagagacccaaagtctaattag

SEQ ID NO: 332837 - DNA, 348 bp, Artificial Sequence
  derived and/or modified sequence
atggtcgactccacagagtatgaggtcgcttcacagcctgaggtggagactagccctctgggtgatggcgcaagcccaggacctgaacaggtgaaattgaaaaaggaaatctcacttctgaatggggtgtgtctgatcgtaggaaacatgatcgggagcggcattttcgtttctccaaagggtgtccttatttacagtgcctcttttggcttgagcttagtgatatgggcggtaggagggttgttctccgtgttcggagcgttgtgttacgctgagctcggcactacgatcaagaaatctggggcatcttatgcgtacattctagaagccttcggcggatttctctag

SEQ ID NO: 332838 - DNA, 93 bp, Artificial Sequence
  derived and/or modified sequence
atggtggatagcacagagtacgaagtagcgagccagcccgaggtggagacatcgccgctaggtgacggtgcctcccctggacctgagcagtag

SEQ ID NO: 332839 - DNA, 933 bp, Artificial Sequence
  derived and/or modified sequence
atggtcgacagtaccgagtatgaagtggcttcccagcccgaggtggagaccagtcccctcggggacggcgcatctcccggtcctgagcaggttaaattgaagaaggaaattagcctgctcaacggagtatgtctcattgtcggtaacatgattggcagcgggattttcgtgtcacccaagggagttttaatttattccgcgtccttcgggctctctctggtcatttgggccgtcggcggactcttcagcgtgtttggcgctttatgttatgcggaactcgggactacaatcaagaaaagtggcgcttcttacgcgtatattctggaagcttttgggggatttctggctttcattcggctgtggacaagtttgttgatcattgagccgacttcccaagcaattatcgctatcacctttgcaaactatatggtccaaccgttgtttcccagctgttttgcgccttacgctgcctcccggctgttggcagccgcatgcatctgtcttctgactttcatcaattgtgcctacgtgaaatgggggacactcgtacaggatatctttacgtatgcaaaggtgctcgccctcatcgccgtgatcgtcgctggaatcgtccgcttaggtcagggggctagtacacattttgaaaattcattcgagggttcatccttcgccgtgggagacattgctcttgcgctctacagcgcgttgttcagttatagtggatgggacacactgaattatgttaccgaggaaataaaaaatcccgagcggaacttgcccctcagtatcggtatttctatgccgattgtcaccatcatttacatccttaccaacgtggcgtactacacggtcttggacatgcgagatatcctggcctccgacgctgtggccgtggcattcctttgtggtctgaagcgccgtcctagcccctag

SEQ ID NO: 332840 - DNA, 321 bp, Artificial Sequence
  derived and/or modified sequence
atggtcgatagcacggaatatgaagtggcgtctcaaccggaagtggagactagtcccctgggtgatggggcatcacccggtccggaacaagtgaaactgaagaaagaaattagcttgttaaacggtgtgtgcctgattgtgggaaatatgatcgggtccggtatttttgttagtcctaagggggtgttaatttatagcgcctccttcggcttgtccctggtaatctgggccgtaggaggcctctttagtgtgttcggtgctctgtgttatgccgagctgggcaccacaatcaagaaaagcggagccagttatgcatattag

SEQ ID NO: 332841 - DNA, 351 bp, Artificial Sequence
  derived and/or modified sequence
atggtggattccactgagtacgaggtggcctcacagccagaagttgagacctcacctcttggcgacggcgcatctccaggcccagagcaggtcaagctaaaaaaagagatatcgttacttaacggggtgtgcctcatcgtcggcaacatgatcggctctggaatcttcgttagtccaaagggagttcttatttatagcgcatctttcggcctgtccctcgtgatttgggcggttggcggactgttcagtgtctttggggctctctgctacgctgaattgggcaccactatcaagaagagtggcgctagctatgcctacattctggaagcattcggcggatttctggcatag

SEQ ID NO: 332842 - DNA, 2263 bp, Artificial Sequence
  derived and/or modified sequence
atttcagtccccgttaccctctgctttttctgctcctcagagtcaacagctgttgcagcatgagcgatacgcttggttctcctaactagcaccttcccctctcccctgactcagctggtagcccctcctccccgcacctgcccaaaggtcactggacaggcatttgtctggccttcccttttactgctggctgggaaggaggagcatcagaccacagatcctggaaggcacttctctccctgactgctgctcacactgccgtgagaacctgcttatatccaggaccaaggagtgagtggcaatgccaggaagctggtgaagggtttcctctcctccaccatggttgacagcactgagtatgaagtggcctcccagcctgaggtggaaacctcccctttgggtgatggggccagcccagggccggagcaggtgaagctgaagaaggagatctcactgcttaacggcgtgtgcctgattgtggggaacatgatcggctcgggcatctttgtttcccccaagggtgtgctcatatacagtgcctcctttggtctctctctggtcatctgggctgtcgggggcctcttctccgtctttggggccctttgttatgcggaactgggcaccaccattaagaaatctggggccagctatgcctatatcctggaggcctttggaggattccttgctttcatcagactctggacctccctgctcatcattgagcccaccagccaggccatcattgccatcacctttgccaactacatggtacagcctctcttcccgagctgcttcgccccttatgctgccagccgcctgctggctgctgcctgcatttgtctcttaaccttcattaactgtgcctatgtcaaatggggaaccctggtacaagatattttcacctatgctaaagtattggcactgatcgcggtcatcgttgcaggcattgttagacttggccagggagcctctactcattttgagaattcctttgagggttcatcatttgcagtgggtgacattgccctggcactgtactcagctctgttctcctactcaggctgggacaccctcaactatgtcactgaagagatcaagaatcctgagaggaacctgcccctctccattggcatctccatgcccattgtcaccatcatctatatcttgaccaatgtggcctattatactgtgctagacatgagagacatcttggccagtgatgctgttgctgtgacttttgcagatcagatatttggaatatttaactggataattccactgtcagttgcattatcctgttttggtggcctcaatgcctccattgtggctgcttctaggcttttctttgtgggctcaagagaaggccatctccctgatgccatctgcatgatccatgttgagcggttcacaccagtgccttctctgctcttcaatggtatcatggcattgatctacttgtgcgtggaagacatcttccagctcattaactactacagcttcagctactggttctttgtggggctttctattgtgggtcagctttatctgcgctggaaggagcctgatcgacctcgtcccctcaagctcagcgttttcttcccgattgtcttctgcctctgcaccatcttcctggtggctgttccactttacagtgatactatcaactccctcatcggcattgccattgccctctcaggcctgcccttttacttcctcatcatcagagtgccagaacataagcgaccgctttacctccgaaggatcgtggggtctgccacaaggtacctccaggtcctgtgtatgtcagttgctgcagaaatggatttggaagatggaggagagatgcccaagcaacgggatcccaaatctaactaaacaccatctggaatcctgatgtggaaagcaggggtttctggtctactggctagagctaaggaagttgaaaaggaaagctcacttctttggaggcacctgtccagaagcctggcctaggcagcttcaacctttgaacttactttttgaaatgaaaagtaatttatttgttttgctacatactgttccagacttttaaaggggacaatgaaggtgactgtggggaggagcatgtcaggtttgggcttggttgttttagaagcacctgggtgtgcctacctactcctcttttcttttaaaagggcccacaatgctccaatttcctgtctcctttagagagacatgaaactatcacaggtgctggatgacaataaaagtttatgttcctaaa

SEQ ID NO: 332843 - DNA, 2098 bp, Artificial Sequence
  derived and/or modified sequence
aatctcagcatgggaacaagcctttgtgtcacactgtgcaaccttcctccctttcttaaatgcttggggcatttgtctggccttcccttttactgctggctgggaaggaggagcatcagaccacagatcctggaaggcacttctctccctgactgctgctcacactgccgtgagaacctgcttatatccaggaccaaggaggcaatgccaggaagctggtgaagggtttcctctcctccaccatggttgacagcactgagtatgaagtggcctcccagcctgaggtggaaacctcccctttgggtgatggggccagcccagggccggagcaggtgaagctgaagaaggagatctcactgcttaacggcgtgtgcctgattgtggggaacatgatcggctcgggcatctttgtttcccccaagggtgtgctcatatacagtgcctcctttggtctctctctggtcatctgggctgtcgggggcctcttctccgtctttggggccctttgttatgcggaactgggcaccaccattaagaaatctggggccagctatgcctatatcctggaggcctttggaggattccttgctttcatcagactctggacctccctgctcatcattgagcccaccagccaggccatcattgccatcacctttgccaactacatggtacagcctctcttcccgagctgcttcgccccttatgctgccagccgcctgctggctgctgcctgcatttgtctcttaaccttcattaactgtgcctatgtcaaatggggaaccctggtacaagatattttcacctatgctaaagtattggcactgatcgcggtcatcgttgcaggcattgttagacttggccagggagcctctactcattttgagaattcctttgagggttcatcatttgcagtgggtgacattgccctggcactgtactcagctctgttctcctactcaggctgggacaccctcaactatgtcactgaagagatcaagaatcctgagaggaacctgcccctctccattggcatctccatgcccattgtcaccatcatctatatcttgaccaatgtggcctattatactgtgctagacatgagagacatcttggccagtgatgctgttgctgtgacttttgcagatcagatatttggaatatttaactggataattccactgtcagttgcattatcctgttttggtggcctcaatgcctccattgtggctgcttctaggcttttctttgtgggctcaagagaaggccatctccctgatgccatctgcatgatccatgttgagcggttcacaccagtgccttctctgctcttcaatggtatcatggcattgatctacttgtgcgtggaagacatcttccagctcattaactactacagcttcagctactggttctttgtggggctttctattgtgggtcagctttatctgcgctggaaggagcctgatcgacctcgtcccctcaagctcagcgttttcttcccgattgtcttctgcctctgcaccatcttcctggtggctgttccactttacagtgatactatcaactccctcatcggcattgccattgccctctcaggcctgcccttttacttcctcatcatcagagtgccagaacataagcgaccgctttacctccgaaggatcgtggggtctgccacaaggtacctccaggtcctgtgtatgtcagttgctgcagaaatggatttggaagatggaggagagatgcccaagcaacgggatcccaaatctaactaaacaccatctggaatcctgatgtggaaagcaggggtttctggtctactggctagagctaaggaagttgaaaaggaaagctcacttctttggaggcacctgtccagaagcctggcctaggcagcttcaacctttgaacttactttttgaaatgaaaagtaatttatttgttttgctacatactgttccagacttttaaaggggacaatgaaggtgactgtggggaggagcatgtcaggtttgggcttggttgttttagaagcacctgggtgtgcctacctactcctcttttcttttaaaagggcccacaatgctccaatttc

SEQ ID NO: 332844 - DNA, 2094 bp, Artificial Sequence
  derived and/or modified sequence
atttcagtccccgttaccctctgctttttctgctcctcagagtcaacagctgttgcagcatgagcgatacgcttggttctcctaactagcaccttcccctctcccctgactcagctggtagcccctcctccccgcacctgcccaaaggtcactggacagggcaatgccaggaagctggtgaagggtttcctctcctccaccatggttgacagcactgagtatgaagtggcctcccagcctgaggtggaaacctcccctttgggtgatggggccagcccagggccggagcaggtgaagctgaagaaggagatctcactgcttaacggcgtgtgcctgattgtggggaacatgatcggctcgggcatctttgtttcccccaagggtgtgctcatatacagtgcctcctttggtctctctctggtcatctgggctgtcgggggcctcttctccgtctttggggccctttgttatgcggaactgggcaccaccattaagaaatctggggccagctatgcctatatcctggaggcctttggaggattccttgctttcatcagactctggacctccctgctcatcattgagcccaccagccaggccatcattgccatcacctttgccaactacatggtacagcctctcttcccgagctgcttcgccccttatgctgccagccgcctgctggctgctgcctgcatttgtctcttaaccttcattaactgtgcctatgtcaaatggggaaccctggtacaagatattttcacctatgctaaagtattggcactgatcgcggtcatcgttgcaggcattgttagacttggccagggagcctctactcattttgagaattcctttgagggttcatcatttgcagtgggtgacattgccctggcactgtactcagctctgttctcctactcaggctgggacaccctcaactatgtcactgaagagatcaagaatcctgagaggaacctgcccctctccattggcatctccatgcccattgtcaccatcatctatatcttgaccaatgtggcctattatactgtgctagacatgagagacatcttggccagtgatgctgttgctgtgacttttgcagatcagatatttggaatatttaactggataattccactgtcagttgcattatcctgttttggtggcctcaatgcctccattgtggctgcttctaggcttttctttgtgggctcaagagaaggccatctccctgatgccatctgcatgatccatgttgagcggttcacaccagtgccttctctgctcttcaatggtatcatggcattgatctacttgtgcgtggaagacatcttccagctcattaactactacagcttcagctactggttctttgtggggctttctattgtgggtcagctttatctgcgctggaaggagcctgatcgacctcgtcccctcaagctcagcgttttcttcccgattgtcttctgcctctgcaccatcttcctggtggctgttccactttacagtgatactatcaactccctcatcggcattgccattgccctctcaggcctgcccttttacttcctcatcatcagagtgccagaacataagcgaccgctttacctccgaaggatcgtggggtctgccacaaggtacctccaggtcctgtgtatgtcagttgctgcagaaatggatttggaagatggaggagagatgcccaagcaacgggatcccaaatctaactaaacaccatctggaatcctgatgtggaaagcaggggtttctggtctactggctagagctaaggaagttgaaaaggaaagctcacttctttggaggcacctgtccagaagcctggcctaggcagcttcaacctttgaacttactttttgaaatgaaaagtaatttatttgttttgctacatactgttccagacttttaaaggggacaatgaaggtgactgtggggaggagcatgtcaggtttgggcttggttgttttagaagcacctgggtgtgcctacctactcctcttttcttttaaaagggcccacaatgctccaatttcctgtctcctttagagagacatgaaactatcacaggtg

SEQ ID NO: 332845 - DNA, 2447 bp, Artificial Sequence
  derived and/or modified sequence
gcatggaggacacagagagagagagtgctgtgtattccttccccgctactgtcctgtcctcagctaacttgctctgggacagcttccccagggctacagatactgcactcagctgactgtcctttcttctgggcccctggtcccagagcagagctgacaaaggagattcctgagagagcaccttcttatcacagaaagtgctgagccaagagctcctagctgccccttttgcagatgtgaagggccagtgaaccttggacccagatggttgcttaatactcctttccccctccctcactccttcctttgcgggctgcctcacctcctccacccttcttgcttaaatccataggcatttgtctggccttcccttttactgctggctgggaaggaggagcatcagaccacagatcctggaaggcacttctctccctgactgctgctcacactgccgtgagaacctgcttatatccaggaccaaggaggcaatgccaggaagctggtgaagggtttcctctcctccaccatggttgacagcactgagtatgaagtggcctcccagcctgaggtggaaacctcccctttgggtgatggggccagcccagggccggagcaggtgaagctgaagaaggagatctcactgcttaacggcgtgtgcctgattgtggggaacatgatcggctcgggcatctttgtttcccccaagggtgtgctcatatacagtgcctcctttggtctctctctggtcatctgggctgtcgggggcctcttctccgtctttggggccctttgttatgcggaactgggcaccaccattaagaaatctggggccagctatgcctatatcctggaggcctttggaggattccttgctttcatcagactctggacctccctgctcatcattgagcccaccagccaggccatcattgccatcacctttgccaactacatggtacagcctctcttcccgagctgcttcgccccttatgctgccagccgcctgctggctgctgcctgcatttgtctcttaaccttcattaactgtgcctatgtcaaatggggaaccctggtacaagatattttcacctatgctaaagtattggcactgatcgcggtcatcgttgcaggcattgttagacttggccagggagcctctactcattttgagaattcctttgagggttcatcatttgcagtgggtgacattgccctggcactgtactcagctctgttctcctactcaggctgggacaccctcaactatgtcactgaagagatcaagaatcctgagaggaacctgcccctctccattggcatctccatgcccattgtcaccatcatctatatcttgaccaatgtggcctattatactgtgctagacatgagagacatcttggccagtgatgctgttgctgtgacttttgcagatcagatatttggaatatttaactggataattccactgtcagttgcattatcctgttttggtggcctcaatgcctccattgtggctgcttctaggcttttctttgtgggctcaagagaaggccatctccctgatgccatctgcatgatccatgttgagcggttcacaccagtgccttctctgctcttcaatggtatcatggcattgatctacttgtgcgtggaagacatcttccagctcattaactactacagcttcagctactggttctttgtggggctttctattgtgggtcagctttatctgcgctggaaggagcctgatcgacctcgtcccctcaagctcagcgttttcttcccgattgtcttctgcctctgcaccatcttcctggtggctgttccactttacagtgatactatcaactccctcatcggcattgccattgccctctcaggcctgcccttttacttcctcatcatcagagtgccagaacataagcgaccgctttacctccgaaggatcgtggggtctgccacaaggtacctccaggtcctgtgtatgtcagttgctgcagaaatggatttggaagatggaggagagatgcccaagcaacgggatcccaaatctaactaaacaccatctggaatcctgatgtggaaagcaggggtttctggtctactggctagagctaaggaagttgaaaaggaaagctcacttctttggaggcacctgtccagaagcctggcctaggcagcttcaacctttgaacttactttttgaaatgaaaagtaatttatttgttttgctacatactgttccagacttttaaaggggacaatgaaggtgactgtggggaggagcatgtcaggtttgggcttggttgttttagaagcacctgggtgtgcctacctactcctcttttcttttaaaagggcccacaatgctccaatttcctgtctcctttagagagacatgaaactatcacaggtgctggatgacaataaaagtttatgttcct

SEQ ID NO: 332846 - DNA, 1996 bp, Artificial Sequence
  derived and/or modified sequence
cttttactgctggctgggaaggaggagcatcagaccacagatcctggaaggcacttctctccctgactgctgctcacactgccgtgagaacctgcttatatccaggaccaaggaggcaatgccaggaagctggtgaagggtttcctctcctccaccatggttgacagcactgagtatgaagtggcctcccagcctgaggtggaaacctcccctttgggtgatggggccagcccagggccggagcaggtgaagctgaagaaggagatatacagtgcctcctttggtctctctctggtcatctgggctgtcgggggcctcttctccgtctttggggccctttgttatgcggaactgggcaccaccattaagaaatctggggccagctatgcctatatcctggaggcctttggaggattccttgctttcatcagactctggacctccctgctcatcattgagcccaccagccaggccatcattgccatcacctttgccaactacatggtacagcctctcttcccgagctgcttcgccccttatgctgccagccgcctgctggctgctgcctgcatttgtctcttaaccttcattaactgtgcctatgtcaaatggggaaccctggtacaagatattttcacctatgctaaagtattggcactgatcgcggtcatcgttgcaggcattgttagacttggccagggagcctctactcattttgagaattcctttgagggttcatcatttgcagtgggtgacattgccctggcactgtactcagctctgttctcctactcaggctgggacaccctcaactatgtcactgaagagatcaagaatcctgagaggaacctgcccctctccattggcatctccatgcccattgtcaccatcatctatatcttgaccaatgtggcctattatactgtgctagacatgagagacatcttggccagtgatgctgttgctgtgacttttgcagatcagatatttggaatatttaactggataattccactgtcagttgcattatcctgttttggtggcctcaatgcctccattgtggctgcttctaggcttttctttgtgggctcaagagaaggccatctccctgatgccatctgcatgatccatgttgagcggttcacaccagtgccttctctgctcttcaatggtatcatggcattgatctacttgtgcgtggaagacatcttccagctcattaactactacagcttcagctactggttctttgtggggctttctattgtgggtcagctttatctgcgctggaaggagcctgatcgacctcgtcccctcaagctcagcgttttcttcccgattgtcttctgcctctgcaccatcttcctggtggctgttccactttacagtgatactatcaactccctcatcggcattgccattgccctctcaggcctgcccttttacttcctcatcatcagagtgccagaacataagcgaccgctttacctccgaaggatcgtggggtctgccacaaggtacctccaggtcctgtgtatgtcagttgctgcagaaatggatttggaagatggaggagagatgcccaagcaacgggatcccaaatctaactaaacaccatctggaatcctgatgtggaaagcaggggtttctggtctactggctagagctaaggaagttgaaaaggaaagctcacttctttggaggcacctgtccagaagcctggcctaggcagcttcaacctttgaacttactttttgaaatgaaaagtaatttatttgttttgctacatactgttccagacttttaaaggggacaatgaaggtgactgtggggaggagcatgtcaggtttgggcttggttgttttagaagcacctgggtgtgcctacctactcctcttttcttttaaaagggcccacaatgctccaatttcctgtctcctttagagagacatgaaactatcacaggtgctggatgacaataaaagtttatgttcct

SEQ ID NO: 332847 - DNA, 847 bp, Artificial Sequence
  derived and/or modified sequence
atctgggttttcaatcacggctccgccatcttgggtcatcgtacggaaggagagacaaaactgcagtacaggtttttgagagctgtcaaatctctgctatatcagtactggctaaattaggtgttaaatgattgagcttcaagatgggcaaatcatgacttcggactacattcctccttgcctggcggctgggaaattccgtccgcgctgctgctaagacttcagatgaaagacgctccggggactccggcatttgtctggccttcccttttactgctggctgggaaggaggagcatcagaccacagatcctggaaggcacttctctccctgactgctgctcacactgccgtgagaacctgcttatatccaggaccaaggaggcaatgccaggaagctggtgaagggtttcctctcctccaccatggttgacagcactgagtatgaagtggcctcccagcctgaggtggaaacctcccctttgggtgatggggccagcccagggccggagcaggtgaagctgaagaaggagatctcactgcttaacggcgtgtgcctgattgtggggaacatgatcggctcgggcatctttgtttcccccaagggtgtgctcatatacagtgcctcctttggtctctctctggtcatctgggctgtcgggggcctcttctccgtctttggggccctttgttatgcggaactgggcaccaccattaagaaatctggggccagctatgcctatatcctggaggcctttggaggattccttgctttcatcagactctggacctccctgctcatcattgagcccaccagccaggccatcattgccatcacctttgccaact

SEQ ID NO: 332848 - DNA, 741 bp, Artificial Sequence
  derived and/or modified sequence
gtcaaatctctgctatatcagtactggctaaattaggtgttaaatgattgagcttcaagatgggcaaatcatgacttcggactacattcctccttgcctggcggctgggaaattcctgggagtgctgacagcaaacaaatgacaccgggaatggacaatatcactgggaagcatgttccaggcagggagaacaggagttgcaaaagctgtgaggcgggagcatgcttgctgtgcggccaccgcagggaagccagtgaagctggagtggagtggggaagacagcagggaggcccatgcagacaaggacagcttctctctttctaggacctcccttacgacttggacccgactccagagtgcaattaaggggccggcaagttgggtagcaggctgagagtgtctaaaggacactaaaatatctttggaataattcaggcatttgtctggccttcccttttactgctggctgggaaggaggagcatcagaccacagatcctggaaggcacttctctccctgactgctgctcacactgccgtgagaacctgcttatatccaggaccaaggaggcaatgccaggaagctggtgaagggtttcctctcctccaccatggttgacagcactgagtatgaagtggcctcccagcctgaggtggaaacctcccctttgggtgatggggccagcccagggccggagcaggtgaagctgaagaaggagatctcactgcttaacggcgtgtgc

SEQ ID NO: 332849 - DNA, 720 bp, Artificial Sequence
  derived and/or modified sequence
tttgtgtcacactgtgcaaccttcctccctttcttaaatgcttggggcatttgtctggccttcccttttactgctggctgggaaggaggagcatcagaccacagatcctggaaggcacttctctccctgactgctgctcacactgccgtgagaacctgcttatatccaggaccaaggagtgagtggcaatgccaggaagctggtgaagggtttcctctcctccaccatggttgacagcactgagtatgaagtggcctcccagcctgaggtggaaacctcccctttgggtgatggggccagcccagggccggagcaggtgaagctgaagaaggagatctcactgcttaacggcgtgtgcctgattgtggggaacatgatcggctcgggcatctttgtttcccccaagggtgtgctcatatacagtgcctcctttggtctctctctggtcatctgggctgtcgggggcctcttctccgtctttggggccctttgttatgcggaactgggcaccaccattaagaaatctggggccagctatgcctatatcctggaggcctttggaggattccttgctttcatcagactctggacctccctgctcatcattgagcccaccagccaggccatcattgccatcacctttgccaactacatggtacagcctctcttcccgagctgcttcgccccttatgctgccagccgcctgctggctgctgcctg

SEQ ID NO: 332850 - DNA, 519 bp, Artificial Sequence
  derived and/or modified sequence
cattttcctctcagctgtctcctgttcggtgttttccagcatgtgctgcctggctgcagctgtctccctgccttggctcggggtgatatctctccagcagcaactctgggggcaatgccaggaagctggtgaagggtttcctctcctccaccatggttgacagcactgagtatgaagtggcctcccagcctgaggtggaaacctcccctttgggtgatggggccagcccagggccggagcaggtgaagctgaagaaggagatctcactgcttaacggcgtgtgcctgattgtggggaacatgatcggctcgggcatctttgtttcccccaagggtgtgctcatatacagtgcctcctttggtctctctctggtcatctgggctgtcgggggcctcttctccgtctttggggccctttgttatgcggaactgggcaccaccattaagaaatctggggccagctatgcctatatcctggaggcctttggaggattccttgctttcatcagactctggacct

SEQ ID NO: 332851 - DNA, 2272 bp, Artificial Sequence
  derived and/or modified sequence
gttttcctgttttccatttcagtccccgttaccctctgctttttctgctcctcagagtcaacagctgttgcagcatgagcgatacgcttggttctcctaactagcaccttcccctctcccctgactcagctggtagcccctcctccccgcacctgcccaaaggtcactggacaggcatttgtctggccttcccttttactgctggctgggaaggaggagcatcagaccacagatcctggaaggcacttctctccctgactgctgctcacactgccgtgagaacctgcttatatccaggaccaaggaggcaatgccaggaagctggtgaagggtttcctctcctccaccatggttgacagcactgagtatgaagtggcctcccagcctgaggtggaaacctcccctttgggtgatggggccagcccagggccggagcaggtgaagctgaagaaggagatctcactgcttaacggcgtgtgcctgattgtggggaacatgatcggctcgggcatctttgtttcccccaagggtgtgctcatatacagtgcctcctttggtctctctctggtcatctgggctgtcgggggcctcttctccgtctttggggccctttgttatgcggaactgggcaccaccattaagaaatctggggccagctatgcctatatcctggaggcctttggaggattccttgctttcatcagactctggacctccctgctcatcattgagcccaccagccaggccatcattgccatcacctttgccaactacatggtacagcctctcttcccgagctgcttcgccccttatgctgccagccgcctgctggctgctgcctgcatttgtctcttaaccttcattaactgtgcctatgtcaaatggggaaccctggtacaagatattttcacctatgctaaagtattggcactgatcgcggtcatcgttgcaggcattgttagacttggccagggagcctctactcattttgagaattcctttgagggttcatcatttgcagtgggtgacattgccctggcactgtactcagctctgttctcctactcaggctgggacaccctcaactatgtcactgaagagatcaagaatcctgagaggaacctgcccctctccattggcatctccatgcccattgtcaccatcatctatatcttgaccaatgtggcctattatactgtgctagacatgagagacatcttggccagtgatgctgttgctgtgacttttgcagatcagatatttggaatatttaactggataattccactgtcagttgcattatcctgttttggtggcctcaatgcctccattgtggctgcttctaggcttttctttgtgggctcaagagaaggccatctccctgatgccatctgcatgatccatgttgagcggttcacaccagtgccttctctgctcttcaatggtatcatggcattgatctacttgtgcgtggaagacatcttccagctcattaactactacagcttcagctactggttctttgtggggctttctattgtgggtcagctttatctgcgctggaaggagcctgatcgacctcgtcccctcaagctcagcgttttcttcccgattgtcttctgcctctgcaccatcttcctggtggctgttccactttacagtgatactatcaactccctcatcggcattgccattgccctctcaggcctgcccttttacttcctcatcatcagagtgccagaacataagcgaccgctttacctccgaaggatcgtggggtctgccacaaggtacctccaggtcctgtgtatgtcagttgctgcagaaatggatttggaagatggaggagagatgcccaagcaacgggatcccaaatctaactaaacaccatctggaatcctgatgtggaaagcaggggtttctggtctactggctagagctaaggaagttgaaaaggaaagctcacttctttggaggcacctgtccagaagcctggcctaggcagcttcaacctttgaacttactttttgaaatgaaaagtaatttatttgttttgctacatactgttccagacttttaaaggggacaatgaaggtgactgtggggaggagcatgtcaggtttgggcttggttgttttagaagcacctgggtgtgcctacctactcctcttttcttttaaaagggcccacaatgctccaatttcctgtctcctttagagagacatgaaactatcacaggtgctggatgacaataaaagtttatgttcctaaa

SEQ ID NO: 332852 - DNA, 596 bp, Artificial Sequence
  derived and/or modified sequence
cctttccccctccctcactccttcctttgcgggctgcctcacctcctccacccttcttgcttaaatccataggcatttgtctggccttcccttttactgctggctgggaaggaggagcatcagaccacagatcctggaaggcacttctctccctgactgctgctcacactgccgtgagaacctgcttatatccaggaccaaggagtgagtggcaatgccaggaagctggtgaagggtttcctctcctccaccatggttgacagcactgagtatgaagtggcctcccagcctgaggtggaaacctcccctttgggtgatggggccagcccagggccggagcaggtgaagctgaagaaggagatctcactgcttaacggcgtgtgcctgattgtggggaacatgatcggctcgggcatctttgtttcccccaagggtgtgctcatatacagtgcctcctttggtctctctctggtcatctgggctgtcgggggcctcttctccgtctttggggccctttgttatgcggaactgggcaccaccattaagaaatctggggccagctatgcctatatcctggaggcctttggaggattcct

SEQ ID NO: 332853 - DNA, 476 bp, Artificial Sequence
  derived and/or modified sequence
ttgcttaaatccataggcatttgtctggccttcccttttactgctggctgggaaggaggagcatcagaccacagatcctggaaggcacttctctccctgactgctgctcacactgccgtgagaacctgcttatatccaggaccaaggagtgagtggtgaagtgggtctacttgggctttgccagggctgaagactccagctaagggttaagggatgctctttgggcaggaggatggttgtgggtttccagcaggtttctgaagcctttagttttggcagacgtagagtccttggggaaaagagcagtgtcatgagacgctcccacagattagctgctggtaggggcaatgccaggaagctggtgaagggtttcctctcctccaccatggttgacagcactgagtatgaagtggcctcccagcctgaggtggaaacctcccctttgggtgatggggccagcccagggccggagcagg

SEQ ID NO: 332854 - DNA, 3017 bp, Artificial Sequence
  derived and/or modified sequence
tggagtgcagtggcctaatgtgggttcactgcaagctccgcctcccgggttcatgccattctcctcattctcctgcctcagcctcccgaatagctgggactacaggtgcccgccaccacgcccggctaatttttatttttttgtgtttttagtagagacggggtttcaccgtgttagccaggatggtcttgatctcctgaccttgtgatccgcctgcctcagcctcccaaagtgctgggattacaggcgtgagccaccgcgtctggcctgatttcctcatattttttaggaaagtggagtcaacttatatttgaggaaggcgtttataggaatttatgcttatcccagagatcttggtatgttttgtcaagaatgaaaaggcacgtgggtctggtggggatgcagtcagatatttgatctcttgactgtgtttcttttgaagtagtctgaggctcagactttggggcagtggcccaggcttggaggcaaccccccagtctctctttgcatggggaagtgtgcagagttctcttagaacacccagtcacatggtgtagagactgctcttacacttcctgtaatctcagcatgggaacaagcctttgtgtcacactgtgcaaccttcctccctttcttaaatgcttggggtgagagagaagagaggctagggtggggcatggaggacacagagagagagagtgctgtgtattccttccccgctactgtcctgtcctcagctaacttgctctgggacagcttccccagggctacagatactgcactcagctgactgtcctttcttctgggcccctggtcccagagcagagctgacaaaggagattcctgagagagcaccttcttatcacagaaagtgctgagccaagagctcctagctgccccttttgcagatgtgaagggccagtgaaccttggacccagatggttgcttaatactcctttccccctccctcactccttcctttgcgggctgcctcacctcctccacccttcttgcttaaatccataggcatttgtctggccttcccttttactgctggctgggaaggaggagcatcagaccacagatcctggaaggcacttctctccctgactgctgctcacactgccgtgagaacctgcttatatccaggaccaaggaggcaatgccaggaagctggtgaagggtttcctctcctccaccatggttgacagcactgagtatgaagtggcctcccagcctgaggtggaaacctcccctttgggtgatggggccagcccagggccggagcaggtgaagctgaagaaggagatctcactgcttaacggcgtgtgcctgattgtggggaacatgatcggctcgggcatctttgtttcccccaagggtgtgctcatatacagtgcctcctttggtctctctctggtcatctgggctgtcgggggcctcttctccgtctttggggccctttgttatgcggaactgggcaccaccattaagaaatctggggccagctatgcctatatcctggaggcctttggaggattccttgctttcatcagactctggacctccctgctcatcattgagcccaccagccaggccatcattgccatcacctttgccaactacatggtacagcctctcttcccgagctgcttcgccccttatgctgccagccgcctgctggctgctgcctgcatttgtctcttaaccttcattaactgtgcctatgtcaaatggggaaccctggtacaagatattttcacctatgctaaagtattggcactgatcgcggtcatcgttgcaggcattgttagacttggccagggagcctctactcattttgagaattcctttgagggttcatcatttgcagtgggtgacattgccctggcactgtactcagctctgttctcctactcaggctgggacaccctcaactatgtcactgaagagatcaagaatcctgagaggaacctgcccctctccattggcatctccatgcccattgtcaccatcatctatatcttgaccaatgtggcctattatactgtgctagacatgagagacatcttggccagtgatgctgttgctgtggcttttctttgtgggctcaagagaaggccatctccctgatgccatctgcatgatccatgttgagcggttcacaccagtgccttctctgctcttcaatggtatcatggcattgatctacttgtgcgtggaagacatcttccagctcattaactactacagcttcagctactggttctttgtggggctttctattgtgggtcagctttatctgcgctggaaggagcctgatcgacctcgtcccctcaagctcagcgttttcttcccgattgtcttctgcctctgcaccatcttcctggtggctgttccactttacagtgatactatcaactccctcatcggcattgccattgccctctcaggcctgcccttttacttcctcatcatcagagtgccagaacataagcgaccgctttacctccgaaggatcgtggggtctgccacaaggtacctccaggtcctgtgtatgtcagttgctgcagaaatggatttggaagatggaggagagatgcccaagcaacgggatcccaaatctaactaaacaccatctggaatcctgatgtggaaagcaggggtttctggtctactggctagagctaaggaagttgaaaaggaaagctcacttctttggaggcacctgtccagaagcctggcctaggcagcttcaacctttgaacttactttttgaaatgaaaagtaatttatttgttttgctacatactgttccagacttttaaaggggacaatgaaggtgactgtggggaggagcatgtcaggtttgggcttggttgttttagaagcacctgggtgtgcctacctactcctcttttcttttaaaagggcccacaatgctccaatttcctgtctcctttagagagacatgaaactatcacaggtgctggatgacaataaaagtttatgttcct

SEQ ID NO: 332855 - DNA, 572 bp, Artificial Sequence
  derived and/or modified sequence
atattttttaggaaagtggagtcaacttatatttgaggaaggcgtttataggaatttatgcttatcccagagatcttggcatttgtctggccttcccttttactgctggctgggaaggaggagcatcagaccacagatcctggaaggcacttctctccctgactgctgctcacactgccgtgagaacctgcttatatccaggaccaaggaggcaatgccaggaagctggtgaagggtttcctctcctccaccatggttgacagcactgagtatgaagtggcctcccagcctgaggtggaaacctcccctttgggtgatggggccagcccagggccggagcaggtgaagctgaagaaggagatctcactgcttaacggcgtgtgcctgattgtggggaacatgatcggctcgggcatctttgtttcccccaagggtgtgctcatatacagtgcctcctttggtctctctctggtcatctgggctgtcgggggcctcttctccgtctttggggccctttgttatgcggaactgggcaccaccattaagaaatctggggccagctatgcctatat

SEQ ID NO: 332856 - DNA, 569 bp, Artificial Sequence
  derived and/or modified sequence
ttgctgcccgacgccttcccagcttagtggagcccactttctttggcatttgtctggccttcccttttactgctggctgggaaggaggagcatcagaccacagatcctggaaggcacttctctccctgactgctgctcacactgccgtgagaacctgcttatatccaggaccaaggaggcaatgccaggaagctggtgaagggtttcctctcctccaccatggttgacagcactgagtatgaagtggcctcccagcctgaggtggaaacctcccctttgggtgatggggccagcccagggccggagcaggtgaagctgaagaaggagatctcactgcttaacggcgtgtgcctgattgtggggaacatgatcggctcgggcatctttgtttcccccaagggtgtgctcatatacagtgcctcctttggtctctctctggtcatctgggctgtcgggggcctcttctccgtctttggggccctttgttatgcggaactgggcaccaccattaagaaatctggggccagctatgcctatatcctggaggcctttggaggattccttgcttt

SEQ ID NO: 332857 - DNA, 609 bp, Artificial Sequence
  derived and/or modified sequence
atgagaaccagcatgagcgaggccgccaccagatggagctgccagggcagctgccagaagacctgcttcagcagagtgagaccctggagaagaagatgcagctgcggcgacagcagcagcagaagaagaagaagctgctgcaccggcagcctgggccccatgcccagactgcccagcctgtggcccctgagcctgcccctgagaagcctgagcagcccccacagagtgcagggcctgggcccccccagaagactgaagagccagctgctgcccagattcttctggagaagacagcaggagcccctgagcagcttccccggcagaaacgagggcggcagcgagatggagatcctgggcgtgtgccccgtgagccccggcgccctgagctacatggagagccccaccggcttctggagacccagagaggccagcagcctggagctggccaagggcatcagcaagagaagacacttcctgcccgcccccgccctgtgccccaaccccagaagcagcgaggccttccccggccagagcgtgagcagatggcccttcgacatcaaggagaccgcccccggccccagcctgagcgccctgctgcccacctgctag

SEQ ID NO: 332858 - DNA, 609 bp, Artificial Sequence
  derived and/or modified sequence
atgaggactagcatgagcgaggccgccacaagatggagttgtcaggggtcttgtcagaagacatgtttctctagagtgagaccgtggcggcgaaggtgctcgtgcggggattcctctagccggcggagacgatcctgttgcactggcagtctggggcctatgccccggctccctagtctctggccactcagcttgccactgagaagtctgtcctccccccatcgggtgcagggcctcggacccccacgtaggctcaagtcacagctgctcccccgcttcttctggcgccgccagcaggagcctctctccagcttccctggccgcaatgagggaggcagcgagatggaaatactgggtgtttgccctgtgtcccccggcgctctatcctatatggagagcccaactggcttttggagacccagagaagcctcttccttagaactggcaaagggaataagcaagaggagacacttcctccccgctcccgctctgtgccccaacccccgctcttccgaggcttttcctggccagtccgtgagccggtggcctttcgacattaaggagacggccccaggacccagcctgagcgccttgctacctacatgttag

SEQ ID NO: 332859 - DNA, 2844 bp, Artificial Sequence
  derived and/or modified sequence
gctcctcctcttcctctcccgcccgcgccgcggccctcccgtccctgcgcggcctcggcggcctcggcggcggcggcggcggcggcggcggcagcagcgcggcccctttaaacgcctgcggcgccccccgcccccgccatcgcgcctccattttcccggccgcccgcgccgagcgccgcgcccgccccgggcccctccgccgccgccggcccggacatggccgccaacatgtacagggtcggagactacgtctactttgagaactcctccagcaacccatacctgatccggagaatcgaggagctcaacaagacggccaatgggaacgtggaggccaaagtggtgtgcttctaccggaggcgggacatctccagcaccctcatcgccctggccgacaagcacgcaaccctgtcagtctgctataaggccggaccgggggcggacaacggcgaggaaggggaaatagaagaggaaatggagaacccggaaatggtggacctgcccgagaaactaaagcaccagctgcggcatcgggagctgttcctctcccggcagctggagtctctgcccgccacgcacatcaggggcaagtgcagcgtcaccctgctcaacgagaccgagtcgctcaagtcctacctggagcgggaggatttcttcttctattctctagtctacgacccacagcagaagaccctgctggcagataaaggagagattcgagtaggaaaccggtaccaggcagacatcaccgacttgttaaaagaaggcgaggaggatggccgagaccagtccaggttggagacccaggtgtgggaggcgcacaacccactcacagacaagcagatcgaccagttcctggtggtggcccgctctgtgggcaccttcgcacgggccctggactgcagcagctccgtccgacagcccagcctgcacatgagcgccgcagctgcctcccgagacatcaccctgttccacgccatggatactctccacaagaacatctacgacatctccaaggccatctcggcgctggtgccgcagggcgggcccgtgctctgcagggacgagatggaggagtggtctgcatcagaggccaaccttttcgaggaagccctggaaaaatatgggaaggatttcacggacattcagcaagattttctcccgtggaagtcgctgaccagcatcattgagtactactacatgtggaagaccaccgacagatacgtgcagcagaaacgcttgaaagcagctgaagctgagagcaagttaaagcaagtttatattcccaactataacaagccaaatccgaaccaaatcagcgtcaacaacgtcaaggccggtgtggtgaacggcacgggggcgccgggccagagccctggggctggccgggcctgcgagagctgttacaccacacagtcttaccagtggtattcttggggtccccctaacatgcagtgtcgtctctgcgcatcttgttggacatattggaagaaatatggtggcttgaaaatgccaacccggttagatggagagaggccaggaccaaaccgcagtaacatgagtccccacggcctcccagcccggagcagcgggagccccaagtttgccatgaagaccaggcaggctttctatctgcacacgacgaagctgacgcggatcgcccggcgcctgtgccgtgagatcctgcgcccgtggcacgctgcgcggcacccctacctgcccatcaacagcgcggccatcaaggccgagtgcacggcgcggctgcccgaagcctcccagagcccgctggtgctgaagcaggcggtacgcaagccgctggaagccgtgcttcggtatcttgagacccacccccgcccccccaagcctgaccccgtgaaaagcgtgtccagcgtgctcagcagcctgacgcccgccaaggtggcccccgtcatcaacaacggctcccccaccatcctgggcaagcgcagctacgagcagcacaacggggtggacggcaacatgaagaagcgcctcttgatgcccagtaggggcacgtcctcaggtctggcaaaccacggacaggccaggcacatgggaccaagccggaacctcctgctcaacgggaagtcctaccccaccaaagtgcgcctgatccgggggggctccctgcccccagtcaagcggcggcggatgaactggatcgacgccccggatgacgtgttctacatggccacagaggagaccaggaagatccgcaagctgctctcatcctcggaaaccaagcgtgctgcccgccggccctacaagcccatcgccctgcgccagagccaggccctgccgccgcggccaccgccacctgcgcccgtcaacgacgagcccatcgtcatcgaggactaggggccgcccccacctgcggccgccccccgcccctcgcccgcccacacggccccttcccagccagcccgccgcccgcccctcagtttggtagtgccccacctcccgccctcacctgcagagaaacgcgctccttggcggacactgggggaggagaggaagaagcgcggctaacttattccgagaatgccgaggagttgtcgtttttagctttgtgtttactttttggctggagcggagatgaggggccaccccgtgcccctgtgctgcggggccttttgcccggaggccgggccctaaggttttgttgtgttctgttgaaggtgccattttaaattttatttttattactttttttgtagatgaacttgagctctgtaacttacacctggaatgttaggatcgtgcggccgcggccggccgagctgcctggcggggttggcccttgtcttttcaagtaattttcatatt

SEQ ID NO: 332860 - DNA, 2144 bp, Artificial Sequence
  derived and/or modified sequence
ccgccgccgccggcccggacatggccgccaacatgtacagggtcggagactacgtctactttgagaactcctccagcaacccatacctgatccggagaatcgaggagctcaacaagacggccaatgggaacgtggaggccaaagtggtgtgcttctaccggaggcgggacatctccagcaccctcatcgccctggccgacaagcacgcaaccctgtcagtctgctataaggccggaccgggggcggacaacggcgaggaaggggaaatagaagaggaaatggagaacccggaaatggtggacctgcccgagaaactaaagcaccagctgcggcatcgggagctgttcctctcccggcagctggagtctctgcccgccacgcacatcaggggcaagtgcagcgtcaccctgctcaacgagaccgagtcgctcaagtcctacctggagcgggaggatttcttcttctattctctagtctacgacccacagcagaagaccctgctggcagataaaggagagattcgagtaggaaaccggtaccaggcagacatcaccgacttgttaaaagaaggcgaggaggatggccgagaccagtccaggttggagacccaggtgtgggaggcgcacaacccactcacagacaagcagatcgaccagttcctggtggtggcccgctctgtgggcaccttcgcacgggccctggactgcagcagctccgtccgacagcccagcctgcacatgagcgccgcagctgcctcccgagacatcaccctgttccacgccatggatactctccacaagaacatctacgacatctccaaggccatctcggcgctggtgccgcagggcgggcccgtgctctgcagggacgagatggaggagtggtctgcatcagaggccaaccttttcgaggaagccctggaaaaatatgggaaggatttcacggacattcagcaagattttctcccgtggaagtcgctgaccagcatcattgagtactactacatgtggaagaccaccgacagatacgtgcagcagaaacgcttgaaagcagctgaagctgagagcaagttaaagcaagtttatattcccaactataacaagccaaatccgaaccaaatcagcgtcaacaacgtcaaggccggtgtggtgaacggcacgggggcgccgggccagagccctggggctggccgggcctgcgagagctgttacatgtcgtctctgcgcatcttgttggacatattggaagaaatatggtggcttgaaaatgccaacccggttagatggagagaggccaggaccaaaccgcagtaacatgagtccccacggcctcccagcccggagcagcgggagccccaagtttgccatgaagaccaggcaggctttctatctgcacacgacgaagctgacgcggatcgcccggcgcctgtgccgtgagatcctgcgcccgtggcacgctgcgcggcacccctacctgcccatcaacagcgcggccatcaaggccgagtgcacggcgcggctgcccgaagcctcccagagcccgctggtgctgaagcaggcggtacgcaagccgctggaagccgtgcttcggtatcttgagacccacccccgcccccccaagcctgaccccgtgaaaagcgtgtccagcgtgctcagcagcctgacgcccgccaaggtggcccccgtcatcaacaacggctcccccaccatcctgggcaagcgcagctacgagcagcacaacggggtggacggcaacatgaagaagcgcctcttgatgcccagtaggggtctggcaaaccacggacaggccaggcacatgggaccaagccggaacctcctgctcaacgggaagtcctaccccaccaaagtgcgcctgatccgggggggctccctgcccccagtcaagcggcggcggatgaactggatcgacgccccggatgacgtgttctacatggccacagaggagaccaggaagatccgcaagctgctctcatcctcggaaaccaagcgtgctgcccgccggccctacaagcccatcgccctgcgccagagccaggccctgccgccgcggccaccgccacctgcgcccgtcaacgacgagcccatcgtcatcgaggactaggggccgcccccacctgcggccgc

SEQ ID NO: 332861 - protein, 628 aa, Artificial Sequence
  derived and/or modified sequence
MVDLPEKLKHQLRHRELFLSRQLESLPATHIRGKCSVTLLNETESLKSYLEREDFFFYSLVYDPQQKTLLADKGEIRVGNRYQADITDLLKEGEEDGRDQSRLETQVWEAHNPLTDKQIDQFLVVARSVGTFARALDCSSSVRQPSLHMSAAAASRDITLFHAMDTLHKNIYDISKAISALVPQGGPVLCRDEMEEWSASEANLFEEALEKYGKDFTDIQQDFLPWKSLTSIIEYYYMWKTTDRYVQQKRLKAAEAESKLKQVYIPNYNKPNPNQISVNNVKAGVVNGTGAPGQSPGAGRACESCYTTQSYQWYSWGPPNMQCRLCASCWTYWKKYGGLKMPTRLDGERPGPNRSNMSPHGLPARSSGSPKFAMKTRQAFYLHTTKLTRIARRLCREILRPWHAARHPYLPINSAAIKAECTARLPEASQSPLVLKQAVRKPLEAVLRYLETHPRPPKPDPVKSVSSVLSSLTPAKVAPVINNGSPTILGKRSYEQHNGVDGNMKKRLLMPSRGTSSGLANHGQARHMGPSRNLLLNGKSYPTKVRLIRGGSLPPVKRRRMNWIDAPDDVFYMATEETRKIRKLLSSSETKRAARRPYKPIALRQSQALPPRPPPPAPVNDEPIVIED

SEQ ID NO: 332862 - protein, 255 aa, Artificial Sequence
  derived and/or modified sequence
MKTRQAFYLHTTKLTRIARRLCREILRPWHAARHPYLPINSAAIKAECTARLPEASQSPLVLKQAVRKPLEAVLRYLETHPRPPKPDPVKSVSSVLSSLTPAKVAPVINNGSPTILGKRSYEQHNGVDGNMKKRLLMPSRGTYLGLANHGQARHMGPSRNLLLNGKSYPTKVRLIRGGSLPPVKRRRMNWIDAPDDVFYMATEETRKIRKLLSSSETKRAARRPYKPIALRQSQALPPRPPPPAPVNDEPIVIED

SEQ ID NO: 332863 - DNA, 1887 bp, Artificial Sequence
  derived and/or modified sequence
atggtggacctgcccgagaagctgaagcaccagctgagacacagagagctgttcctgagcagacagctggagagcctgcccgccacccacatcagaggcaagtgcagcgtgaccctgctgaacgagaccgagagcctgaagagctacctggagagagaggacttcttcttctacagcctggtgtacgacccccagcagaagaccctgctggccgacaagggcgagatcagagtgggcaacagataccaggccgacatcaccgacctgctgaaggagggcgaggaggacggcagagaccagagcagactggagacccaggtgtgggaggcccacaaccccctgaccgacaagcagatcgaccagttcctggtggtggccagaagcgtgggcaccttcgccagagccctggactgcagcagcagcgtgagacagcccagcctgcacatgagcgccgccgccgccagcagagacatcaccctgttccacgccatggacaccctgcacaagaacatctacgacatcagcaaggccatcagcgccctggtgccccagggcggccccgtgctgtgcagagacgagatggaggagtggagcgccagcgaggccaacctgttcgaggaggccctggagaagtacggcaaggacttcaccgacatccagcaggacttcctgccctggaagagcctgaccagcatcatcgagtactactacatgtggaagaccaccgacagatacgtgcagcagaagagactgaaggccgccgaggccgagagcaagctgaagcaggtgtacatccccaactacaacaagcccaaccccaaccagatcagcgtgaacaacgtgaaggccggcgtggtgaacggcaccggcgcccccggccagagccccggcgccggcagagcctgcgagagctgctacaccacccagagctaccagtggtacagctggggcccccccaacatgcagtgcagactgtgcgccagctgctggacctactggaagaagtacggcggcctgaagatgcccaccagactggacggcgagagacccggccccaacagaagcaacatgagcccccacggcctgcccgccagaagcagcggcagccccaagttcgccatgaagaccagacaggccttctacctgcacaccaccaagctgaccagaatcgccagaagactgtgcagagagatcctgagaccctggcacgccgccagacacccctacctgcccatcaacagcgccgccatcaaggccgagtgcaccgccagactgcccgaggccagccagagccccctggtgctgaagcaggccgtgagaaagcccctggaggccgtgctgagatacctggagacccaccccagaccccccaagcccgaccccgtgaagagcgtgagcagcgtgctgagcagcctgacccccgccaaggtggcccccgtgatcaacaacggcagccccaccatcctgggcaagagaagctacgagcagcacaacggcgtggacggcaacatgaagaagagactgctgatgcccagcagaggcaccagcagcggcctggccaaccacggccaggccagacacatgggccccagcagaaacctgctgctgaacggcaagagctaccccaccaaggtgagactgatcagaggcggcagcctgccccccgtgaagagaagaagaatgaactggatcgacgcccccgacgacgtgttctacatggccaccgaggagaccagaaagatcagaaagctgctgagcagcagcgagaccaagagagccgccagaagaccctacaagcccatcgccctgagacagagccaggccctgccccccagaccccccccccccgcccccgtgaacgacgagcccatcgtgatcgaggactag

SEQ ID NO: 332864 - DNA, 768 bp, Artificial Sequence
  derived and/or modified sequence
atgaagaccagacaggccttctacctgcacaccaccaagctgaccagaatcgccagaagactgtgcagagagatcctgagaccctggcacgccgccagacacccctacctgcccatcaacagcgccgccatcaaggccgagtgcaccgccagactgcccgaggccagccagagccccctggtgctgaagcaggccgtgagaaagcccctggaggccgtgctgagatacctggagacccaccccagaccccccaagcccgaccccgtgaagagcgtgagcagcgtgctgagcagcctgacccccgccaaggtggcccccgtgatcaacaacggcagccccaccatcctgggcaagagaagctacgagcagcacaacggcgtggacggcaacatgaagaagagactgctgatgcccagcagaggcacctacctgggcctggccaaccacggccaggccagacacatgggccccagcagaaacctgctgctgaacggcaagagctaccccaccaaggtgagactgatcagaggcggcagcctgccccccgtgaagagaagaagaatgaactggatcgacgcccccgacgacgtgttctacatggccaccgaggagaccagaaagatcagaaagctgctgagcagcagcgagaccaagagagccgccagaagaccctacaagcccatcgccctgagacagagccaggccctgccccccagaccccccccccccgcccccgtgaacgacgagcccatcgtgatcgaggactag

SEQ ID NO: 332865 - DNA, 1887 bp, Artificial Sequence
  derived and/or modified sequence
atggtggacctgcccgagaaactcaaacaccaactgcggcatcgggagctgttcctaagccggcagcttgaaagtctcccagcgacacatattagaggaaaatgttcagtgactctcctcaacgaaactgaatcacttaaaagctatctggagcgcgaagacttctttttctacagcctggtctacgacccccagcagaaaaccttgctcgccgataagggtgagattcgggtgggaaatagatatcaggccgatatcacggatctactgaaggagggagaggaggatgggagagatcaatctcgcctggaaacccaggtttgggaagctcacaatccattgaccgacaaacagattgatcagtttttagtcgttgcacgatccgtggggacattcgccagggctttggactgttcttcctctgtccggcaaccaagtctccacatgtccgcggcagcagcatcaagggatataacactgtttcacgcgatggacactctgcataagaatatttacgatatctccaaagccatcagcgccctggttccgcaaggagggcctgtgctgtgcagagacgaaatggaggagtggagtgcctccgaagcgaatctattcgaagaagcactggagaaatatggcaaagatttcaccgatatccagcaggatttcctcccctggaaatccctgaccagcatcatcgaatactactacatgtggaagaccacagatcgctacgtgcagcaaaaaagattaaaagctgcagaagctgaaagtaaacttaaacaggtgtatattccaaattataataaacccaacccgaatcagatttctgtgaataacgtgaaggcaggcgtcgtaaacggaacgggcgcgccaggccagtcacctggcgctgggcgcgcctgcgaaagctgttatactactcagtcctaccagtggtattcctgggggccccctaatatgcagtgcagactgtgcgcttcctgttggacttactggaaaaagtacggaggtctcaagatgccaaccagactcgacggcgaacgcccgggccctaaccgaagcaatatgtcacctcacgggttacccgccaggtcctctggtagccctaaatttgctatgaagactagacaggccttttatcttcacacgacgaagttgacgcgcattgcaaggcgcttgtgcagagagatcctgaggccctggcatgcagcgcgccatccctatctgcccatcaacagtgcagctatcaaagcggagtgtacggcaagattaccagaggcaagccagtccccactcgtgctgaaacaggcagttagaaagccattagaagctgtcttacgctacctggagactcacccccgtcccccaaagcctgatccagtaaaatccgtcagtagcgtattatccagcctcaccccggccaaggtcgcgccagtgattaacaacggctccccaaccattctcggtaaaaggagttatgaacagcacaatggcgtggacggcaacatgaagaaaaggctgcttatgccatctcggggaacttcatcgggcttagcaaaccacggccaagctagacatatgggaccttccagaaacctcctcctgaacggaaaatcttatcccaccaaggtgagattgattcgtggcggctctctgccaccagttaaacgaagaagaatgaactggatcgatgctccggacgacgtgttctacatggctaccgaggagacgaggaaaattaggaagttgctgtcctcttccgagactaagagggctgcaagaaggccttacaagcctattgcattgcgccaatcccaggctcttccgccacgtccacctccgcctgcacctgtgaacgatgagccaatagtgattgaagactag

SEQ ID NO: 332866 - DNA, 768 bp, Artificial Sequence
  derived and/or modified sequence
atgaagacacgccaagcgttttatttgcacactaccaagctgacgcgaatagcgcggcgcctctgcagggagattctgcgcccctggcacgctgctcgccatccttacctgcctattaacagcgctgctatcaaagccgagtgcaccgcacgtcttcctgaggcttcacaaagtcccctggtactcaaacaggctgtacgtaaacctctggaagcggtcctgaggtacctggagacacacccaaggccgcctaaaccagatccagttaagtctgtgtcttccgtgttgagctcacttacaccggccaaggttgcacccgtgattaataatggctctcccaccattctgggaaagaggtcctacgaacagcataacggggtggatggtaatatgaaaaagaggttgctcatgccgtcacgcggaacctacctgggattggctaaccatgggcaggctcgccacatggggcctagccgtaacctcctgctgaacggcaaatcatatccaacaaaggtccgcttgatccgcggcggatcactcccgccagtaaaaaggagacgaatgaactggatagacgcgccagatgacgtgttctatatggccacagaagaaacccgaaagatcaggaagcttctcagttcaagtgagaccaaacgggcggcccggcggccctacaagcctattgcccttcgccagagccaggccttgccaccccggcccccccccccagccccggtcaacgatgaacccatcgtgatagaggattag

SEQ ID NO: 332867 - DNA, 1887 bp, Artificial Sequence
  derived and/or modified sequence
atggtggacctgcctgagaagctgaagcaccagctgcggcaccgggagctgttcctgagccggcagctggagagcctgcctgccacccacatccggggcaagtgcagcgtgaccctgctgaatgaaacagagagcctgaagagctacctggagcgggaggacttcttcttctacagcctggtgtatgacccccagcagaagaccctgctggccgacaagggggagatccgggtgggcaaccgctaccaggccgacatcacagacctgctgaaggagggggaggaggatggccgggaccagagccggctggagacccaggtgtgggaggcccacaaccccctgacagacaagcagattgaccagttcctggtggtggcccggtctgtgggcacctttgcccgggccctggactgcagcagctctgtgcggcagcccagcctgcacatgtctgctgctgctgccagccgggacatcaccctcttccacgccatggacaccctgcacaagaacatctatgacatcagcaaggccatcagcgccctggtgccccagggcggccctgtgctgtgcagagatgagatggaggagtggagcgccagcgaggccaacctgtttgaggaggccctggagaagtatggcaaggacttcacagacatccagcaggacttcctgccctggaagagcctgaccagcatcatcgagtactactacatgtggaagaccacagacagatatgtgcagcagaagaggctgaaggctgctgaggccgagagcaagctgaagcaggtgtacatccccaactacaacaagcccaaccccaaccagatctctgtgaacaacgtgaaggccggcgtggtgaatggaactggagcccctggccagagccctggggccggccgggcctgtgagagctgctacaccacccagagctaccagtggtacagctggggcccccccaacatgcagtgccgcctgtgtgccagctgctggacctactggaagaagtatggaggcctgaagatgcccacccggctggatggagagcggcccggccccaacagaagcaacatgagcccccacggcctgcctgcccggagcagcggcagccccaagtttgccatgaagacccggcaggccttctacctgcacaccaccaagctgacccgcatcgcccggcggctgtgccgggagatcctgcggccctggcacgccgcccggcacccctacctgcccatcaacagcgctgccatcaaggccgagtgcacagcccggctgcctgaggccagccagagccccctggtgctgaagcaggccgtgaggaagcccctggaggccgtgctgcgctacctggagacccacccccggccccccaagccagaccctgtgaagtctgtgtcctctgtgctgagcagcctgaccccagccaaggtggcccctgtgatcaacaacggcagccccaccatcctgggcaagaggagctatgagcagcacaacggggtggatggcaacatgaagaagaggctgctgatgcccagccggggcaccagcagcggcctggccaaccacggccaggcccggcacatgggccccagcaggaacctgctgctgaatggcaagagctaccccaccaaggtgcggctcatccggggcggcagcctgccccctgtgaagagaagaaggatgaactggattgatgccccagatgatgtgttctacatggccacagaggagaccaggaagatcaggaagctgctgagcagcagcgagaccaagagagctgcccggcggccctacaagcccatcgccctgcggcagagccaggccctgccccccaggcctcctcctccagcccctgtgaatgatgagcccatcgtgattgaagattag

SEQ ID NO: 332868 - DNA, 768 bp, Artificial Sequence
  derived and/or modified sequence
atgaagacccggcaggccttctacctgcacaccaccaagctgaccagaattgcccggcggctgtgccgggagatcctgcggccctggcatgctgcccggcacccctacctgcccatcaacagcgctgccatcaaggcagaatgtacagcccggctgcctgaggccagccagagccccctggtgctgaagcaggccgtgaggaagcccctggaggccgtgctgcgctacctggagacccaccccaggcctcccaagccagaccctgtgaagtctgtgtcctctgtgctgagcagcctgaccccagccaaggtggcccctgtgatcaacaacggcagccccaccatcctgggcaagaggagctatgagcagcacaatggagtggatggcaacatgaagaagaggctgctgatgcccagccggggcacctacctgggcctggccaaccacggccaggcccggcacatgggccccagcaggaacctgctgctgaatggcaagagctaccccaccaaggtgcggctcatccggggcggcagcctgccccctgtgaagagaagaaggatgaactggattgatgccccagatgatgtgttctacatggccacagaggagaccaggaagatcaggaagctgctgagcagcagcgagaccaagagagctgcccggcggccctacaagcccatcgccctgcggcagagccaggccctgcccccccggcccccacctccagcccctgtgaatgatgagcccatcgtgattgaggactag

SEQ ID NO: 332869 - DNA, 1673 bp, Artificial Sequence
  derived and/or modified sequence
cgctgaccagcatcattgagtactactacatgtggaagaccaccgacagatacgtgcagcagaaacgcttgaaagcagctgaagctgagagcaagttaaagcaagtttatattcccaactataacaagccaaatccgaaccaaatcagcgtcaacaacgtcaaggccggtgtggtgaacggcacgggggcgccgggccagagccctggggctggccgggcctgcgagagctgttacaccacacagtcttaccagtggtattcttggggtccccctaacatgcagtgtcgtctctgcgcatcttgttggacatattggaagaaatatggtggcttgaaaatgccaacccggttagatggagagaggccaggaccaaaccgcagtaacatgagtccccacggcctcccagcccggagcagcgggagccccaagtttgccatgaagaccaggcaggctttctatctgcacacgacgaagctgacgcggatcgcccggcgcctgtgccgtgagatcctgcgcccgtggcacgctgcgcggcacccctacctgcccatcaacagcgcggccatcaaggccgagtgcacggcgcggctgcccgaagcctcccagagcccgctggtgctgaagcaggcggtacgcaagccgctggaagccgtgcttcggtatcttgagacccacccccgcccccccaagcctgaccccgtgaaaagcgtgtccagcgtgctcagcagcctgacgcccgccaaggtggcccccgtcatcaacaacggctcccccaccatcctgggcaagcgcagctacgagcagcacaacggggtggacggcaacatgaagaagcgcctcttgatgcccagtaggggcacttacctgggtctggcaaaccacggacaggccaggcacatgggaccaagccggaacctcctgctcaacgggaagtcctaccccaccaaagtgcgcctgatccgggggggctccctgcccccagtcaagcggcggcggatgaactggatcgacgccccggatgacgtgttctacatggccacagaggagaccaggaagatccgcaagctgctctcatcctcggaaaccaagcgtgctgcccgccggccctacaagcccatcgccctgcgccagagccaggccctgccgccgcggccaccgccacctgcgcccgtcaacgacgagcccatcgtcatcgaggactaggggccgcccccacctgcggccgccccccgcccctcgcccgcccacacggccccttcccagccagcccgccgcccgcccctcagtttggtagtgccccacctcccgccctcacctgcagagaaacgcgctccttggcggacactgggggaggagaggaagaagcgcggctaacttattccgagaatgccgaggagttgtcgtttttagctttgtgtttactttttggctggagcggagatgaggggccaccccgtgcccctgtgctgcggggccttttgcccggaggccgggccctaaggttttgttgtgttctgttgaaggtgccattttaaattttatttttattactttttttgtagatgaacttgagctctgtaacttacacctggaatgttaggatcgtgcggccgcggccggccgagctgcctggcggggttggcccttgtcttttcaagtaattttcatatt

SEQ ID NO: 332870 - DNA, 1887 bp, Artificial Sequence
  derived and/or modified sequence
atggtggacctgcccgagaagctgaagcaccagctgcggcaccgggagctgtttctatctcgccagctggaatccctccctgcaacccacatacgcggaaaatgctcagtgaccttgcttaatgagacagagagtctcaagtcctatctggaacgcgaggattttttcttttatagtctggtctacgaccctcagcaaaagacattgctggctgataaaggtgagattcgggtcggaaaccggtaccaggctgatataactgacctgctgaaagagggggaggaagatgggcgcgaccagagtagactcgaaacccaggtgtgggaggctcataacccgttgacagacaagcagattgatcaatttctagttgtggcaaggtctgtggggaccttcgctcgggctctcgattgtagttcttccgttagacagccctcgctgcatatgtccgcagctgcagcctctagagatattactctgtttcatgcaatggacaccttacataaaaatatttacgacatctctaaggctatctccgccctggtgccccagggagggccagtactttgtcgagacgagatggaggaatggtccgcctccgaggccaatctcttcgaagaggctttggagaagtatggcaaagacttcacagatattcagcaggatttcctaccctggaagagtctgacatcaattatcgaatattactacatgtggaaaacgacagaccgctatgtgcagcagaagcgactaaaagcagccgaagcagaatcgaagctgaaacaggtgtatatccctaactacaataaacctaatccaaaccagatatctgtgaacaatgtcaaggcaggcgtagtgaatgggactggagcccctggccagtccccgggggctggccgcgcatgtgagtcttgctacaccacacaatcctatcagtggtatagctggggtcctccgaatatgcagtgtcgcctttgtgccagttgctggacttactggaagaagtatggcggcttgaaaatgccgactcggcttgacggagagagacccggtcctaaccggtctaatatgagccctcacggcttgcctgcccgcagttctggttcccccaaatttgcgatgaagacccgtcaggccttctacctgcataccactaaactcacacgtattgcccgccgattatgtagggaaattctccggccatggcacgccgcccggcatccttacctccctataaattcggcggctattaaggccgaatgcacggctcgtctgcccgaagcgtcacagagccccctggtgcttaaacaggccgtgcggaagcctctggaggccgtactgaggtacctagagacgcatcctaggcccccaaaaccagaccctgtcaaatccgtctcctctgtgttgtcatctctcaccccagcaaaggtcgctccagtgatcaataacggttccccaaccattctgggcaaaaggtcctacgaacagcacaatggtgtagacgggaatatgaagaaacgcctgctgatgccatcgcgaggaacttcttccggtttggccaaccacggccaggcccggcacatgggaccctcccggaacctgctcctgaacgggaaaagctatcccacaaaggtcagactcatccgagggggctccctgccccccgttaaacgcagacgaatgaattggattgacgcacccgacgacgtattctacatggctactgaggaaactcgaaaaatcaggaaacttctttcaagctcagagacgaaaagggccgctagacgaccctacaaacccatagctttgcgacagtcacaggctttgccacctcgacctccacctcccgctcctgtgaacgacgagccaattgtgattgaagactag

SEQ ID NO: 332871 - DNA, 768 bp, Artificial Sequence
  derived and/or modified sequence
atgaagacccggcaggccttctacctgcacaccaccaagctgacccgcatcgcccgacgactgtgcagggagattctcaggccctggcacgccgctcggcatccctacctcccaattaattctgctgccatcaaggcagagtgtaccgcccgactccccgaggcctcacaatctccactggttctgaaacaggctgtccgcaaacccttggaggccgttttgcggtacctggagacacatccaaggcctcccaagccagatcccgtaaaatccgtatctagcgtgttatcctcactgacccctgcaaaggtggccccagtcattaataacggcagccctaccatcctggggaagagatcctatgagcaacataacggcgttgatggaaacatgaagaaaagactccttatgccgagtagaggcacctacctgggcctggccaaccacggtcaggccagacatatgggaccctccagaaacctgttactgaatggtaagagttaccccaccaaggtaagacttattcgaggcggctccttgcccccggtgaagaggcgccgaatgaattggatagatgcaccagacgatgttttttacatggcaaccgaggagactagaaaaatcaggaagctgctcagttcctcagagaccaaacgggccgccaggcgcccttataaacccatcgccctccgacaaagtcaagctctacccccccgtccccccccccctgcaccggtaaatgacgagccaatcgtcattgaagattag

SEQ ID NO: 332872 - DNA, 1887 bp, Artificial Sequence
  derived and/or modified sequence
atggttgatctcccagagaaactaaaacatcagctgcgacaccgagagctatttctgtccagacagctggagagtctccccgctactcacatacgtggcaaatgctccgtcacactcctgaatgagaccgagtctctgaagagttacttggagcgagaggatttcttcttttattcactggtctacgatccacaacagaagaccttgctggccgataaaggcgagattcgcgtgggaaaccgctatcaggccgacattaccgacctgctcaaggagggggaggaggatggcagagaccagtcaagacttgagactcaggtgtgggaggcccacaaccctcttacagacaagcagattgatcagtttcttgttgtggccaggtccgtcggaaccttcgccagagcactcgactgtagtagctctgtgcgtcagcctagcctgcacatgagcgccgcagctgccagcagagacatcactttattccacgcgatggatacgctccataaaaatatttatgatatcagcaaggccatctcagccctcgttccacaggggggacccgtgttgtgccgtgacgaaatggaggagtggtccgcctcagaagccaatctgttcgaagaagctctggagaagtacggcaaagactttacggatattcaacaggatttcctgccatggaaaagcctgaccagtatcatagaatattattatatgtggaaaacaacggaccgatatgttcagcagaagcggctgaaagctgctgaggctgagtctaaactgaagcaggtgtacattccgaattataacaaaccaaatcctaaccaaatctcagtgaacaacgtgaaagctggggtggtcaacgggacgggggcacccggacaatcccctggcgctggcagggcctgcgagagctgttacaccacccagtcatatcagtggtattcatggggtccaccaaacatgcagtgtaggctatgtgccagttgctggacctactggaagaagtacggtgggctcaaaatgccgacgagattggacggcgaacgccctggtccaaaccggtccaacatgtcaccccacgggcttcccgctcgaagcagcggcagccctaagtttgctatgaagactagacaggcattctaccttcacactacgaagctcacccgcatcgctcgaaggctgtgccgggaaatattgcgaccttggcacgccgctagacacccgtatctgcccatcaatagcgctgcaataaaggccgagtgtaccgcacggctgcctgaagcatcccagagccctctggtcttgaaacaggcagtgcgcaaaccccttgaagctgttctacgctaccttgagacccacccacgtcccccaaagccagaccctgtgaagagtgtttcttctgttctatcctccctcacacctgccaaagtggcacctgttatcaataatggatcgccaacaattctaggcaaaagatcatatgaacagcataacggggtggatggcaatatgaagaaaagactgctgatgccctcccggggaacgagctccgggctcgccaaccacggtcaggccagacacatggggcctagcaggaatctcctgctgaatggcaagagctatcccacaaaggtgcgacttatccggggaggctcattaccccctgttaagcgaagacggatgaattggatagatgctcccgacgacgtcttttacatggccactgaggagactcgcaaaattaggaaattgcttagctccagtgaaaccaagcgcgctgccagaagaccgtataagcctatagctctgcgtcagtctcaagctctgccccctagacctccccctcccgctcctgtgaatgacgagcccattgtgatcgaagattag

SEQ ID NO: 332873 - DNA, 768 bp, Artificial Sequence
  derived and/or modified sequence
atgaaaactagacaagcattctaccttcacaccactaagctgacacggatcgccagacgattatgccgcgagatactgaggccctggcatgcagctcgccatccatacctgcctattaactccgccgctataaaggccgagtgcactgccaggcttccagaggcttctcagtcccctttggtattgaaacaggcagtgagaaagcccctcgaggcagtacttcgatatctggaaactcacccacgtccgcctaagccagatccggttaaatctgtgtcttcggtgctttcatcactaacaccggcaaaagtggcaccagtgattaacaatggatcacccactatattgggaaagcgatcttacgaacaacataatggggtggatggcaatatgaagaaacggctgctgatgccttcccgcggaacgtacctgggattggctaatcacggtcaggccagacacatggggccatcccggaacttgttactgaatggaaaatcctatcctacaaaggttcgcttaattcggggtgggagtttgccccctgtgaagcggcgaagaatgaactggatcgatgcccctgacgatgttttctatatggccacagaggagacaaggaagatccggaagctcttgagcagtagcgagacaaaacgcgcagccaggagaccttataaaccaatcgccttgaggcagagccaggcgctgcccccaagaccccctcctccggcacccgtgaacgatgagcctattgttattgaagactag

SEQ ID NO: 332874 - DNA, 234 bp, Artificial Sequence
  derived and/or modified sequence
atggtgcgggagttgtggatgtggaatgtggaagaggaagagcacgaggtgggcatctgcacgtggggcgggcagcactgtggatgccctgccaagtctctcccagggcctcaccccggaggcgtgtccgctccccaatctgctagccagctcatggtcaagcttctggtctggcaaaaaagcgtgcataaacttaggaagaatagaaatgcctacagctgcggcccgctgtag

SEQ ID NO: 332875 - protein, 276 aa, Artificial Sequence
  derived and/or modified sequence
MPKTCQCYVGTKTTNPSAWPSREMKKKKLPSDSGDLEALEGKDKEKESTVHIETHQNTSKNVAAVQPMKRGQKSKMKKMKEKYKDQDEEDRELIMKLLGSAGSNKEEKGKKGKKGKTKDEPVKKQPQKPRGGQRVSDNIKKETPFLEVITHELQDFAVDDPHDDKEEQDLDQQGNEENLFDSLTGQPHPEDVLLFAIPICAPYTTMTNYKYKVKLTPGVQKKGKAAKTALNSFMHSKEATAREKDLFRSVKDTDLSRNIPGKVKVSAPNLLNVKRK

SEQ ID NO: 332876 - DNA, 201 bp, Artificial Sequence
  derived and/or modified sequence
atgaatctgcaggcacaacccaaggcgcaaaacaaacgcaaaaggtgccttttcggtggccaggaaccagcacctaaggaacaacccccacctctgcaaccaccccagcagagcattagagtcaaagaggaacagtacctagggcacgagggcccgggcggggcagtgagtacctcacagccggtggagctgccaccatag

SEQ ID NO: 332877 - DNA, 201 bp, Artificial Sequence
  derived and/or modified sequence
atgaacctgcaggcccagcccaaggcccagaacaagaggaagcgctgcctgtttggaggccaggagcccgcccccaaggagcagcccccacccctgcagcccccccagcagagcatccgggtgaaggaggagcagtacctgggccacgagggccctgggggcgctgtgtccaccagccagcctgtggagctgcccccatag

SEQ ID NO: 332878 - DNA, 201 bp, Artificial Sequence
  derived and/or modified sequence
atgaacctgcaggcccagcccaaggcccagaacaagcggaagcggtgcctcttcggagggcaagagcccgcgcctaaggagcagccccccccactccagcctccacagcaatcgatccgggtgaaggaagagcagtacctgggccacgaagggccgggtggggccgtcagtacatctcagcccgtagagctgcccccatag

SEQ ID NO: 332879 - DNA, 201 bp, Artificial Sequence
  derived and/or modified sequence
atgaatctacaggcgcagcccaaggcccagaataagcgaaagcggtgtcttttcggtggccaggagccagcaccaaaagaacagcccccacccctccagccacctcaacaatctattagagtcaaagaagaacagtatctgggccatgaaggcccaggaggggcagtgtctacatcacagcctgtggagctccccccttag

SEQ ID NO: 332880 - DNA, 558 bp, Artificial Sequence
  derived and/or modified sequence
aaagcttggatggagagagtgagctacagtaggcttgtagctggccagaaggggcttctctctaaagccgctcagcttctctggggaattggaatccagacaagaaggaaaatggtgccagaaccctgtggagcatcatgaactgggaagagtagctgagccccagagcctctctggaagagaaaggaagagccagcagttctttctcccagtgtccgacctcactgtccagcgtcttcctctgcccctgctctgccctccctggctcctggactagagcccggcttccagcaggacgtttccccaggggatgggcgactgttgaaggggatctcaccgccagggctcagttggccacatcatgaacctccaggcccagcccaaggctcagaacaagcggaagcgttgcctcttcgggggccaggaaccagctcccaaggagcagccccctcccctgcagcccccccagcagtccatcagagtgaaggaggagcagtacctcgggcacgagggtccaggaggggcagtctccacctctcagcctgtggaactgccccc

SEQ ID NO: 332881 - DNA, 201 bp, Artificial Sequence
  derived and/or modified sequence
atgaacctgcaggcccagcccaaggcccagaacaagagaaagagatgcctgttcggcggccaggagcccgcccccaaggagcagcccccccccctgcagcccccccagcagagcatcagagtgaaggaggagcagtacctgggccacgagggccccggcggcgccgtgagcaccagccagcccgtggagctgcccccctag

SEQ ID NO: 332882 - DNA, 547 bp, Artificial Sequence
  derived and/or modified sequence
actcgcccgccaccctgcgctgccgccgctctgaggagttaaaggtagcctcaaaatcaagtgacaagtgtctttgtaagggacaagtagacccattacagagaagacgacgcgcagaaaaggaggaagcagtgtgctcatggaggcggagattggagtgatgtaaccgcaagccgaggaatgcttatagtcaccagaagctggaagagtcaaaggacacattctcccctcaagccccagtgggagcacggcccagctggattttggacttctggcctccagaactagacagggcctcactgtgtcacccagggtggaatacagtggtgtgatcatagctcactgcagcctggaattcctgggctcaagcaaccctgccacctcagccttccaagtagctaggactacagaacatccatgatagcagtcttctgtaaatcgaacttttcaagaattctctgaaggaaccaagtaggatattcttacatcatgacttaatgtgaatgcaagaacaagaaataggttttatctctaaatataatgaagg

SEQ ID NO: 332883 - DNA, 237 bp, Artificial Sequence
  derived and/or modified sequence
gtgctgctgttcatcttctacctgctgatcttcatgttcagcttcttcgagaccagaagccacagcgtgacccaggccggcgtgcagtggcacgaccacagcagcctgcagccccagctgcccggcctgaagcagagccccaccagcgccagccagagcagctgggaccacggctgcgcccccagacaccccatccacctgccccagacccccaaggtgctgggcctgcaggtgtag

SEQ ID NO: 332884 - DNA, 237 bp, Artificial Sequence
  derived and/or modified sequence
gtgctgttattcatattttacctgcttatctttatgttttccttcttcgaaaccagatcgcatagcgtaacccaggcaggcgtacagtggcacgaccattcttctcttcagccgcaactgccgggcctcaagcagagccctacctctgcatctcaaagctcttgggaccacggttgcgcaccccgtcaccccatacatctcccccaaactccaaaagttctcggattgcaagtctag

SEQ ID NO: 332885 - DNA, 237 bp, Artificial Sequence
  derived and/or modified sequence
gtgctgctcttcatcttctacctgctgatcttcatgttctccttctttgagaccaggagccacagcgtgacccaggccggcgtgcagtggcatgaccacagcagcctgcagccccagctgcccggcctgaagcagagccccaccagcgccagccagagctcctgggaccacggctgtgcccccaggcaccccatccacctgccccagacccccaaggtgctgggcctgcaggtgtag

SEQ ID NO: 332886 - DNA, 237 bp, Artificial Sequence
  derived and/or modified sequence
gtgctgctgttcatcttctacctgctgatcttcatgttcagcttcttcgagacccggtctcactctgtcacgcaggccggagtccagtggcacgatcactcttctttgcagccacaactgcccggcttgaaacagagccccacaagcgccagccagtcatcctgggaccatggttgtgctccaagacaccccattcatctgccccagacccccaaggtgctgggactacaggtctag

SEQ ID NO: 332887 - DNA, 237 bp, Artificial Sequence
  derived and/or modified sequence
gtgcttctgtttatattctatctgcttattttcatgttctccttctttgagactagatcccatagtgtcacacaggctggggtccagtggcacgaccattcctcacttcaacctcagctcccaggtttgaagcagtcacccacgtcggcctcccagagtagttgggatcacgggtgtgctccaagacacccgatacacctcccccagacacccaaggtactgggcctacaagtgtag

SEQ ID NO: 332888 - DNA, 237 bp, Artificial Sequence
  derived and/or modified sequence
gtcttgctttttattttttatttacttatatttatgtttagtttttttgagacaaggtctcactctgtcactcaggctggagtgcagtggcatgatcatagctcactgcagccccaacttcctgggctcaagcaatcccccacctcagcctctcagagtagctgggaccacgggtgtgccccacgacacccaatccaccttccccagactcccaaagtgctgggattacaagtatga

SEQ ID NO: 332889 - protein, 148 aa, Artificial Sequence
  derived and/or modified sequence
MRLGCELGIGFLFGGVAYGTSFSRRRLATSRDMGWKMASPTDGTDLEASLLSFEKLDRASPDLWPEQLPGVAEFAASFKSPITSSPPKWMAEIERDDIDMLKELGSLTTANLMEKVRGLQNLAYQLGLDESREMTRGKFLNILEKPKK

SEQ ID NO: 332890 - DNA, 447 bp, Artificial Sequence
  derived and/or modified sequence
atgagactgggctgcgagctgggcatcggcttcctgttcggcggcgtggcctacggcaccagcttcagcagaagaagactggccaccagcagagacatgggctggaagatggccagccccaccgacggcaccgacctggaggccagcctgctgagcttcgagaagctggacagagccagccccgacctgtggcccgagcagctgcccggcgtggccgagttcgccgccagcttcaagagccccatcaccagcagcccccccaagtggatggccgagatcgagagagacgacatcgacatgctgaaggagctgggcagcctgaccaccgccaacctgatggagaaggtgagaggcctgcagaacctggcctaccagctgggcctggacgagagcagagagatgaccagaggcaagttcctgaacatcctggagaagcccaagaagtag

SEQ ID NO: 332891 - DNA, 447 bp, Artificial Sequence
  derived and/or modified sequence
atgagattgggatgcgaacttggcatcgggttcttattcggaggcgtggcttacggcacaagcttctcccgccggcgcctcgccacaagtagagatatgggatggaagatggcaagtcctactgacggtaccgatttagaagccagcttactgtccttcgagaagcttgatagggcgagtccagacttatggcccgagcaactgccaggcgtcgcggaattcgctgcctcgttcaaatcccccatcacttcctcaccacccaagtggatggccgaaattgagcgggacgacattgacatgcttaaggagcttggatctctgacgaccgccaacctgatggaaaaagtccgggggttgcagaatctggcataccaactgggtcttgacgagtcccgtgaaatgacccgagggaagttccttaacatactggaaaagccaaagaaatag

SEQ ID NO: 332892 - DNA, 447 bp, Artificial Sequence
  derived and/or modified sequence
atgaggctgggctgtgagctgggcatcggcttcctgtttggaggagtggcctacggcaccagcttcagcagaagaaggctggccaccagccgggacatgggctggaagatggccagccccacagatggaacagacctggaggccagcctgctgagctttgagaagctggaccgggccagcccagacctgtggccagagcagctgcccggggtggccgagtttgctgccagcttcaagagccccatcaccagcagcccccccaagtggatggccgagattgaaagagatgacatcgacatgctgaaggagctgggcagcctgaccacagccaacctgatggagaaggtgcggggcctgcagaacctggcctaccagctgggcctggatgagagccgggagatgacccggggcaagttcctgaacatcctggagaagcccaagaagtag

SEQ ID NO: 332893 - DNA, 2774 bp, Artificial Sequence
  derived and/or modified sequence
aacatccgcgtaaggggcgtggctatacttaggggcggggctaggcaaagattgccctatgaggcgagggaatgagactgggctgcgagttggggatagggtttctctttgggggcgtggcttatggaacctcgttttcccgccgacggttggccacgtcacgtgacatgggttggaagatggcgtctcccacagacgggacagatctggaagcatctttgctaagttttgaaaaacttgaccgtgcctcaccagatctttggccagaacaattaccaggtgttgctgaatttgcagcttccttcaaaagtcctattactagttctccacccaaatggatggctgagatagaacgtgatgacatcgacatgttgaaagaactggggagtctcaccacggctaatttgatggagaaggttcgaggcctacagaacctagcctatcagctggggctggatgagtccagagagatgacacgggggaaattcctcaatattctagagaagcccaagaagtagcagctgcttgcggacaggatgtcctggggtccgaaaccaagctcccttcccggtgcacctctaacaatgcacacctcactgcttgcttgggagaggccagagggtgtacctccaggactgccctctcccctgctcctggcactctacacgtctgaggacattcagcagcaagagaagaatctgctctacccaaggatcattgcagttactcaatcaactttcagacttgaaccttcttagcctcggatattggtaacagctgagggcatatcattcttaaaggtcgaagtcctgctttctcatttctggaagtgattcaggagccccaggatcttacggttgatttgactcagtcatggcagtcagttgtgacatgttgattggatgggttcttttgaattgttcttgatctcttagaaagtgtttacgatgtgaggagaccagagaccaagtagattctggaccagaccatgcagcctgacctgtgaactctccagtatatactaagttcccagaatccccagctgaagaaaccagaatcttctcgaaatgtatatctgttttttaaaacttctatacctcttatgatagtcccatttgcttttcattccttacttcccagccccaccttctagttctgacttcgggcagagggatccctgagtccctcctggaattagcttgtatagtgaaaggcccatccaaggttgtctaaagaccaatgtgaaggtgacagaaaggacttttgagttctaattaatctgttacagcttcaagcaagaaagtcagtatagcctgaaagacaagagaaacgggatggtttataggagttcccatttggttgaaagctagaagccctaattgaccttaaagtaacatgctatgggatggtgggattgtcccctctgacagcacatatgaaatagttcatctatataatagaaacgcacacacacgaaaaagaatcttctgacttaaatacaactttcatggagttcttcaccacttatctgtctctgttaaaatctgaaaatctagcccatggctaaaatctattatatgtgttctccatatttcttgtataagccagtccccagcatctgatgttttgagaagtgcatggagtttcctaaactttgcacaaaagaatatcctggggccgggcatggtggctcacgcctgtaatcccagcactttgggaggccgaggcaggtggatcataggtcaaaagatcgagaccatcctggccaatatggtgaaaccctgtctctactaaaatacaaaaattagctgggcatgatggtgcatgcctatagtcccagctacttgggggcctgaggcacgagaatcgcttgaattcgggaggtggaggttgcagtgagccgaaattatgccactgcactccagcctgggcaacagagtgagactctgtctcagaaaaaaaaaaaaaaaaaaaaaaaaaaaaagaatatccctgtggcaatagtctgatggtgtttggacacaagaaaagttatggttttgagtcgtgagtgtttgctagggcatggcactcttcagtttaacagctgatccattaaaccttttctgacatttgtgccttgttctcatgctagaattaatgctggatttttctctcatttgaccatcaatgtagttttacttattgaaaggaaaaaagacttaacacaagataggaaagatgagtatgagaagtaaaacattctgctggggtgctacatagaaggttaggttgtaggggctttgattttaatttaaacttattatcgattgatatttctgtatctcactaaatgcggttgaagagtgtgtgtgtgtgtgtgcgcgcgcgcatgtggccaaaaaatagtgccataatgtcaaattcttcctttgctctgtttttgagagttgatgacatcaggcacttttcagtgtttggggaaattgattgggatacctcccccaaaccaactcaagtctgtaactggaagccaggtggttggttttctggtccgctttgtcctctttcttttaccgtcatcctattcaccagcacttaatgtaagtagatgttttagaattgcaatatttattggtttagtatttgtcatccttagaaatgttaatgatgtatttttatattgataatataaatttatgtacagtatgtgtgtatatgtatttcaggatgttatagtattgtactttgtatgtgatggtttttgtgtcttcataataaatatgtccctttta

SEQ ID NO: 332894 - DNA, 447 bp, Artificial Sequence
  derived and/or modified sequence
atgcggctgggctgcgagctgggcatcggcttcctgttcggcggcgtcgcttatgggaccagcttttcccgaagaaggcttgcgacctcaagagatatggggtggaaaatggcgagcccaacagatggtacagatttggaggccagtcttctgagctttgagaaattggacagggcatctccagatctgtggccagagcaactccccggggttgccgagtttgccgcctcttttaagtctcccataacctcttccccccctaagtggatggctgaaatcgagagggatgatatcgatatgttgaaagagctgggctcacttacgaccgcaaacctgatggaaaaggtccgtggccttcagaacctggcttatcagctaggattagacgaatcacgagagatgacccggggaaagttcttaaatatactcgagaagcccaagaagtag

SEQ ID NO: 332895 - DNA, 447 bp, Artificial Sequence
  derived and/or modified sequence
atgagactaggatgtgagttggggatcggctttcttttcggcggtgtggcctatgggacctcattctcccgccgaagactggcgacctcccgtgatatgggatggaagatggcttcccccactgacggcacagaccttgaagcgtcgctcctgtcctttgagaagcttgatcgcgcttccccagacctgtggccagaacagctgccaggagtggccgagtttgcagcttcatttaaatcacctatcacatcaagccctcccaaatggatggcagaaatcgagagggatgacatagacatgctaaaggaactgggaagcttgaccaccgcgaatctgatggagaaggtaagaggattgcagaatctggcataccaactcggcttagatgagtctcgcgaaatgaccagaggaaaatttcttaacatactcgagaagcccaaaaagtag

SEQ ID NO: 332896 - protein, 445 aa, Artificial Sequence
  derived and/or modified sequence
MWAGSCTSISTRGSARQSHERLIDKSRVTCVKWVPGSESLFLVAHSSGNMYLYNVEHTCGTTAPHYQLLKQGESFAVHTCKSKSTRNPLLKWTVGEGALNEFAFSPDGKFLACVSQDGFLRVFNFDSVELHGTMKSYFGGLLCVCWSPDGKYIVTGGEDDLVTVWSFVDCRVIARGHGHKSWVSVVAFDPYTTSVEEGDPMEFSGSDEDFQDLLHFGRDRANSTQSRLSKRNSTDSRPVSVTYRFGSVGQDTQLCLWDLTEDILFPHQPLSRARTHTNVMNATSPPAGSNGNSVTTPGNSVPPPLPRSNSLPHSAVSNAGSKSSVMDGAIASGVSKFATLSLHDRKERHHEKDHKRNHSMGHISSKSSDKLNLVTKTKTDPAKTLGTPLCPRMEDVPLLEPLICKKIAHERLTVLIFLEDCIVTACQEGFICTWGRPGKVVSFNP

SEQ ID NO: 332897 - DNA, 1338 bp, Artificial Sequence
  derived and/or modified sequence
atgtgggccggcagctgcaccagcatcagcaccagaggcagcgccagacagagccacgagagactgatcgacaagagcagagtgacctgcgtgaagtgggtgcccggcagcgagagcctgttcctggtggcccacagcagcggcaacatgtacctgtacaacgtggagcacacctgcggcaccaccgccccccactaccagctgctgaagcagggcgagagcttcgccgtgcacacctgcaagagcaagagcaccagaaaccccctgctgaagtggaccgtgggcgagggcgccctgaacgagttcgccttcagccccgacggcaagttcctggcctgcgtgagccaggacggcttcctgagagtgttcaacttcgacagcgtggagctgcacggcaccatgaagagctacttcggcggcctgctgtgcgtgtgctggagccccgacggcaagtacatcgtgaccggcggcgaggacgacctggtgaccgtgtggagcttcgtggactgcagagtgatcgccagaggccacggccacaagagctgggtgagcgtggtggccttcgacccctacaccaccagcgtggaggagggcgaccccatggagttcagcggcagcgacgaggacttccaggacctgctgcacttcggcagagacagagccaacagcacccagagcagactgagcaagagaaacagcaccgacagcagacccgtgagcgtgacctacagattcggcagcgtgggccaggacacccagctgtgcctgtgggacctgaccgaggacatcctgttcccccaccagcccctgagcagagccagaacccacaccaacgtgatgaacgccaccagcccccccgccggcagcaacggcaacagcgtgaccacccccggcaacagcgtgcccccccccctgcccagaagcaacagcctgccccacagcgccgtgagcaacgccggcagcaagagcagcgtgatggacggcgccatcgccagcggcgtgagcaagttcgccaccctgagcctgcacgacagaaaggagagacaccacgagaaggaccacaagagaaaccacagcatgggccacatcagcagcaagagcagcgacaagctgaacctggtgaccaagaccaagaccgaccccgccaagaccctgggcacccccctgtgccccagaatggaggacgtgcccctgctggagcccctgatctgcaagaagatcgcccacgagagactgaccgtgctgatcttcctggaggactgcatcgtgaccgcctgccaggagggcttcatctgcacctggggcagacccggcaaggtggtgagcttcaacccctag

SEQ ID NO: 332898 - DNA, 1338 bp, Artificial Sequence
  derived and/or modified sequence
atgtgggcaggtagctgtacaagcatctctacgcgcggtagtgctcggcagtcccatgagcggctcatcgataagtcaagagtgacctgtgtcaagtgggtccctggatccgaatcactgtttctggtggcccacagcagtgggaacatgtacctgtacaacgtagagcacacatgcggaacaacagcgccccactatcagctgctgaagcagggcgaatccttcgcggtacatacatgcaaaagcaagtcaactagaaatcctctcttgaagtggacggtcggggaaggagcactgaatgaatttgcgttctcacctgacgggaaattcctggcttgtgtctcccaggacgggttcttaagagttttcaacttcgattccgtggaattgcatggcacaatgaagagttattttggcggactgctgtgcgtgtgctggagccctgatggtaagtacatcgtgaccgggggagaggacgatctggtcacagtgtggagctttgtggattgtagggtgatagcccgcggccacggccataaatcctgggtttcagtggttgcctttgatccctatacaaccagcgtggaggagggcgaccccatggaattttccggaagcgatgaagactttcaagatctgttgcacttcgggcgtgatagagccaatagcactcagtcgagactgtctaagagaaactccaccgatagcagaccagtttcagtgacctataggttcggatccgtcggccaggacacgcagttgtgtctgtgggatctgacagaagacattctattcccacaccaacccctgagccgtgcccgcactcataccaatgttatgaacgccacaagtccccctgctgggtctaatgggaacagtgtgacaacaccgggcaactcagtacccccacccctcccgcgcagcaattccctgccccattccgccgtgagcaatgcaggaagcaaatccagcgtcatggatggggcaattgcctcaggtgttagtaagtttgcaactctcagtctccacgacagaaaggagagacaccacgaaaaggaccacaaacggaaccacagtatgggccatattagctctaagagctcagataaacttaatctcgtaacaaagacaaaaaccgatcccgcaaaaacactgggcaccccactgtgtcctcgcatggaagacgtgccattactggagccactcatttgtaaaaaaattgcccatgaacggctgactgtgctcattttccttgaggactgtatcgtcaccgcctgtcaggagggctttatatgtacctggggacgcccaggaaaagtcgtttccttcaatccatag

SEQ ID NO: 332899 - DNA, 1338 bp, Artificial Sequence
  derived and/or modified sequence
atgtgggccggcagctgcaccagcatcagcacccggggcagcgcccggcagagccatgagcggctgattgacaagagccgggtgacctgtgtgaagtgggtgcccggcagcgagagcctcttcctggtggcccacagcagcggcaacatgtacctgtacaacgtggagcacacctgtggcaccacagccccccactaccagctgctgaagcagggcgagagctttgctgtgcacacctgcaagagcaagagcaccaggaaccccctgctgaagtggacagtgggggagggcgccctgaatgaatttgccttctccccagatggcaagttcctggcctgtgtgtcccaggacggcttcctgcgggtcttcaactttgattctgtggagctgcacggcaccatgaagagctactttggaggcctgctgtgtgtgtgctggagcccagatggcaagtacatcgtgactggaggagaagatgacctggtgacagtgtggagctttgtggactgccgggtgattgcccggggccacggccacaagtcctgggtgtctgtggtggcctttgacccctacaccacctctgtggaggagggggaccccatggagttcagcggcagtgatgaggacttccaggacctgctgcacttcggccgggaccgggccaacagcacccagagccggctgagcaagaggaacagcacagacagcaggcctgtgtctgtgacctacagatttggatctgtgggccaggacacccagctgtgcctgtgggacctgacagaggacatcctcttcccccaccagcccctgagccgggcccggacccacaccaacgtgatgaatgccaccagccccccagctggcagcaatggaaattctgtgaccaccccaggcaacagcgtgcccccacccctgcccaggagcaacagcctgccccacagcgctgtgtccaatgccggcagcaagagctctgtgatggatggagccatcgccagcggcgtgtccaagtttgccaccctgagcctgcatgacaggaaggagcggcaccacgagaaggaccacaagaggaaccacagcatgggccacatcagcagcaagagcagtgacaagctgaacctggtgaccaagaccaagacagatcctgccaagaccctgggcacccccctgtgccccaggatggaggatgtgcccctgctggagcccctcatctgcaagaagatcgcccacgagcggctgactgtgctgatcttcctggaggactgcatcgtgacagcctgccaggagggcttcatctgcacctggggccggcctgggaaggtggtgtccttcaacccctag

SEQ ID NO: 332900 - DNA, 1338 bp, Artificial Sequence
  derived and/or modified sequence
atgtgggccggcagctgcaccagcatcagcacccggggcagcgcccgtcaatcccatgaacggttaattgacaagtctagggtaacctgcgtcaaatgggttcccgggtctgagtctctgttcctggtagctcactcttccggaaatatgtatctgtacaatgtggaacacacctgcggtacaacagcaccgcattatcagctgttgaagcagggagagtcatttgcagtccacacgtgtaaaagcaaatcaacccgtaacccactgctgaagtggacggtgggtgagggagcgctgaacgaattcgcttttagcccagatggtaaattcctcgcctgtgtctcacaggatggattccttcgggtgtttaacttcgatagcgttgagctgcacggtaccatgaagtcttacttcggaggcttgctgtgcgtgtgctggagcccagacggcaagtacatagtgactggcggggaagacgacttggtgaccgtgtggagcttcgtcgactgcagggtcattgcgaggggccatgggcacaaatcatgggtgagcgtcgtggcatttgacccatacacaactagtgtggaggagggggatccaatggaattttccggaagcgatgaggatttccaggacttattgcactttggtcgcgatcgagcgaactcaactcagtcccgtctttctaaacggaacagcactgatagcagaccggtgtccgtgacctatcgctttggcagtgtcggacaggatacacaattgtgtctgtgggatctcacagaagatattctgtttccccaccagccattatcacgcgcccgcacgcacaccaacgttatgaacgctacctccccacccgcagggtccaatggcaatagtgtcaccactcccggcaactccgtgccgccaccactccctaggagcaattcactcccacactcagcagtgtctaatgcaggctcgaagagcagcgtgatggacggggcaatcgcaagtggggtgtccaaatttgccacattgtcccttcatgataggaaggaacggcatcacgaaaaggaccataagcgcaaccattctatggggcatatttcctcaaaaagctctgacaaactaaatctcgtgaccaagaccaagacagaccctgccaaaacccttggcactcctctttgcccccgcatggaagatgttccgctgctagagcccctcatctgcaagaagatcgcacacgaacgcttaaccgtcctgatcttcctggaggattgtattgtcaccgcatgtcaggaggggttcatctgcacctggggtcgtcccggcaaggtggtgagcttcaacccatag

SEQ ID NO: 332901 - DNA, 1338 bp, Artificial Sequence
  derived and/or modified sequence
atgtgggctgggagctgtactagcataagtactcggggttcagcgcgtcagagccacgagcgacttatcgataaatcaagagtgacctgtgttaagtgggtgcccggttctgaaagcttattcctcgtggctcactctagcgggaacatgtatctatacaacgtggagcatacctgtggcaccactgcaccacattatcaactcctgaagcagggggaatctttcgcggtccatacctgtaaatccaaatcgactcggaacccgctcctgaagtggaccgtgggcgagggggcattgaatgagtttgcattctcccccgacgggaagtttctagcttgcgtgagtcaggacggctttctcagggtgtttaatttcgatagcgtagaattgcacggcacaatgaagtcgtatttcggcggtctgctctgtgtttgctggtcacctgacggcaaatatatcgtgactggcggagaggacgatttggtgactgtgtggagcttcgtggattgcagggtaatagccaggggtcatgggcacaagtcctgggtgtcagtcgttgctttcgatccttacaccacctctgtggaggagggcgatcccatggagttctccgggagcgatgaagactttcaggatcttctgcacttcgggcgtgatagggccaatagtacacaatcgcgcttgagcaagagaaatagcacagatagtcgcccagttagtgttacttaccgatttggctccgtgggccaggacacacaactctgcctttgggacctgaccgaagacatcctatttccgcatcagccgctttcaagggctcggacgcacaccaacgtcatgaatgcaacctccccccctgcgggaagtaatggtaacagtgtgacaacacccggtaatagcgtgccccctcctctgccaaggtctaacagcctgccccattctgcagtctccaatgctggtagcaagagctctgtcatggatggcgcaatcgctagcggtgtttccaaattcgcaaccttaagcctgcatgataggaaagaaagacatcacgagaaagatcataaacgcaatcacagtatgggccatattagctccaaaagttctgacaagttaaatctggtgactaagaccaagaccgacccagcgaaaactttgggtacacctctctgtccccgtatggaggatgtgcctctgctggagcccctcatctgcaagaagatcgcccacgagcggttaactgttctcattttcctggaagattgcattgtaaccgcttgccaggaaggctttatatgtacctgggggagaccgggtaaggtggtttcgttcaatccgtag

SEQ ID NO: 332902 - DNA, 2235 bp, Artificial Sequence
  derived and/or modified sequence
ggtgggcgtgatccgggcacttagggcaggatgaacgctgctttccaagatggcgacggagggaggagggaaggagatgaacgagattaagacccaattcaccacccgggaaggtctgtacaagctgctgccgcactcggagtacagccggcccaaccgggtgcccttcaactcgcagggatccaaccctgtccgcgtctccttcgtaaacctcaacgaccagtctggcaacggcgaccgcctctgcttcaatgtgggccgggagctgtacttctatatctacaagggggtccgcaagacaatcccatgagagactaatagacaagtcacgagttacctgtgtcaaatgggttcccggttcggaaagccttttcctagtagcccactcgagtgggaacatgtacttatataatgtggagcacacttgtggcaccacagccccccactaccagcttctgaagcagggagagagctttgccgtgcacacttgcaagagcaaatccacgaggaaccctctccttaagtggacggtgggcgagggggccctcaacgagtttgctttctccccagatggcaagttcttagcgtgcgtgagccaggacgggtttctgcgggtgttcaactttgactcagtggagctgcacggtacgatgaaaagctactttgggggcttgctgtgtgtgtgctggagcccggatggcaagtacatcgtgacaggtggggaggacgacttggtgacagtctggtcctttgtagactgccgagtaatagccagaggccacgggcacaagtcctgggtcagtgttgtagcgtttgacccttataccactagtgtagaagaaggtgaccctatggagtttagtggcagcgatgaggacttccaagaccttcttcattttggcagagatcgagcaaatagtacacagtccaggctctccaaacggaactctacagacagccgccccgtaagtgtcacgtatcggtttggttccgtgggccaggacacacagctctgtttatgggaccttacagaagatatccttttccctcaccaacccctctcaagagcaaggacacacacaaatgtcatgaatgccacgagtcctcctgctggaagcaatgggaacagtgttacaacacccgggaactctgtgccgcctcctctgccacggtccaacagccttccacattcagcagtctcaaatgctggcagcaaaagcagtgtcatggacggggccattgcttctggggtcagcaaatttgcaacactttcactacatgaccggaaggagaggcaccacgagaaagatcacaagcgaaatcatagcatgggacacatttctagcaagagcagtgacaaactgaatctagttaccaaaaccaaaacggaccctgctaaaactctgggaacgcccctgtgtcctcgaatggaagatgttcccttgttagagccgctgatatgtaaaaagatagcacatgagagactgactgtactaatatttcttgaagactgtatagtcactgcttgtcaggagggatttatttgcacatggggaaggcctggtaaagtggtaagttttaatccttaatgctgcaccagatctagaacttgaataggtagtgacttttttctttttcgtgggaggggtggggtgtacaatgaatgtgaatgacacttcttattcttaatgtaaatctcaatgcatcagagccataattttggatactgcatgccatgtaattctgaatcatttgataatttaccttagagcatttaaaaaaatataatcaaactaattgccagccaagtcagtcatcctcctgggagtatatagagtcccaaggttagcgctcctgtattagactatttcaattttaggaaaatcatgaccatgtggggaaacaatgactttaaaatgctgaaattaaaatttatgctttaactggaatattttttgcttaactactcaattagaatattgtacacctgatcaatgtgtgttcagcacagatggccatgaattgtcatttatagtccaattttttatcttaatcataaaatgtttaggaatctatgaaatttaactttaggaacaaaacgtttagcagggttgattgatattatttttacattgttctggcaatccacagaaagagaagagccttaatttttaaaacccattttagtcattttatgacaattaaagttgtttaataaacatcttttttcaaaga

SEQ ID NO: 332903 - protein, 1643 aa, Artificial Sequence
  derived and/or modified sequence
MSSTLHSVFFTLKVSILLGSLLGLCLGLEFMGLPNQWARYLRWDASTRSDLSFQFKTNVSTGLLLYLDDGGVCDFLCLSLVDGRVQLRFSMDCAETAVLSNKQVNDSSWHFLMVSRDRLRTVLMLDGEGQSGELQPQRPYMDVVSDLFLGGVPTDIRPSALTLDGVQAMPGFKGLILDLKYGNSEPRLLGSRGVQMDAEGPCGERPCENGGICFLLDGHPTCDCSTTGYGGKLCSEGSSGDPCLSHLMMSEQAREENVATFRGSEYLCYDLSQNPIQSSSDEITLSFKTWQRNGLILHTGKSADYVNLALKDGAVSLVINLGSGAFEAIVEPVNGKFNDNAWHDVKVTRNLRQVTISVDGILTTTGYTQEDYTMLGSDDFFYVGGSPSTADLPGSPVSNNFMGCLKEVVYKNNDIRLELSRLARIADTKMKIYGEVVFKCENVATLDPINFETPEAYISLPKWNTKRMGSISFDFRTTEPNGLILFTHGKPQERKDARSQKNTKVDFFAVELLDGNLYLLLDMGSGTIKVKATQKKANDGEWYHVDIQRDGRSGTISVNSRRTPFTASGESEILDLEGDMYLGGLPENRAGLILPTELWTAMLNYGYVGCIRDLFIDGRSKNIRQLAEMQNAAGVKSSCSRMSAKQCDSYPCKNNAVCKDGWNRFICDCTGTGYWGRTCEREASILSYDGSMYMKIIMPMVMHTEAEDVSFRFMSQRAYGLLVATTSRDSADTLRLELDGGRVKLMVNLDCIRINCNSSKGPETLYAGQKLNDNEWHTVRVVRRGKSLKLTVDDDVAEGTMVGDHTRLEFHNIETGIMTEKRYISVVPSSFIGHLQSLMFNGLLYIDLCKNGDIDYCELKARFGLRNIIADPVTFKTKSSYLSLATLQAYTSMHLFFQFKTTSPDGFILFNSGDGNDFIAVELVKGYIHYVFDLGNGPNVIKGNSDRPLNDNQWHNVVITRDNSNTHSLKVDTKVVTQVINGAKNLDLKGDLYMAGLAQGMYSNLPKLVASRDGFQGCLASVDLNGRLPDLINDALHRSGQIERGCEGPSTTCQEDSCANQGVCMQQWEGFTCDCSMTSYSGNQCNDPGATYIFGKSGGLILYTWPANDRPSTRSDRLAVGFSTTVKDGILVRIDSAPGLGDFLQLHIEQGKIGVVFNIGTVDISIKEERTPVNDGKYHVVRFTRNGGNATLQVDNWPVNEHYPTGRQLTIFNTQAQIAIGGKDKGRLFQGQLSGLYYDGLKVLNMAAENNPNIKINGSVRLVGEVPSILGTTQTTSMPPEMSTTVMETTTTMATTTTRKNRSTASIQPTSDDLVSSAECSSDDEDFVECEPSTARGELVIPLLVEDPLATPPIATRAPSITLPPTFRPLLTIIETTKDSLSMTSEAGLPCLSDQGSDGCDDDGLVISGYGSGETFDSNLPPTDDEDFYTTFSLVTDKSLSTSIFEGGYKAHAPKWESKDFRPNKVSETSRTTTTSLSPELIRFTASSSSGMVPKLPAGKMNNRDLKPQPDIVLLPLPTAYELDSTKLKSPLITSPMFRNVPTANPTEPGIRRVPGASEVIRESSSTTGMVVGIVAAAALCILILLYAMYKYRNRDEGSYQVDETRNYISNSAQSNGTLMKEKQQSSKSGHKKQKNKDREYYV

SEQ ID NO: 332904 - DNA, 4932 bp, Artificial Sequence
  derived and/or modified sequence
atgtcatcgactttacactccgtattctttaccctgaaagttagtatcttactgggcagtctgctggggttatgtctgggactggagtttatgggacttcccaaccagtgggctcgctatctgcgctgggatgcatctacccgctctgacctatccttccagtttaagaccaatgtgagcacggggctgctgctgtatctcgatgacgggggggtatgcgatttcctctgtctgagtctagtggacgggagggtgcagctgaggttcagcatggactgcgcagagaccgccgtgctgagcaataaacaggtgaatgatagctcctggcactttctcatggtaagtcgggacaggctcagaaccgtgctgatgttagacggcgaagggcagtctggcgaattacaaccccagaggccatatatggacgtggtctcggacttgttcttgggcggagtgccaaccgacattagaccaagcgcccttactcttgacggcgtgcaggcaatgcctggattcaagggcctaattcttgatctgaagtatggcaactccgaacctaggttgcttggcagcagaggagtgcaaatggacgccgagggcccttgcggggagcggccctgcgaaaatggggggatctgttttttgttggacggccaccctacctgcgattgtagtacaaccgggtacggcggtaaactgtgctcagagggcagtagcggcgacccatgcctcagccatcttatgatgtccgagcaggccagagaagaaaacgtggctacattcaggggaagcgaatacttgtgttatgacctgtcccagaaccctatccagagctcctcagacgagatcaccctgagcttcaaaacttggcagcgaaacggtctcatcctgcatacgggtaaatcggcggactatgtaaacctcgccctgaaagacggggccgtcagcctagtgattaacctcggctccggagccttcgaggctatcgttgaacctgtcaatggaaagttcaacgacaacgcttggcacgacgtgaaggtgacacggaacctcaggcaggtcacgatttccgtcgacggtattctcaccacaactgggtacacgcaggaggactatacaatgctcgggtcagacgactttttctacgtgggtggcagcccgtcaacagccgaccttccaggcagcccagtgtccaataactttatgggctgtctgaaagaagtggtttataaaaacaatgatattcggttggagctgagcaggctggctagaatagccgacactaaaatgaaaatctacggcgaggtcgtctttaaatgtgagaatgtggccacactcgatcccatcaacttcgaaactccggaggcgtacatctccctccctaagtggaataccaagcgtatgggttccatcagtttcgatttcaggactaccgagcccaatggacttatattgttcacacacggcaaaccgcaggagcggaaggatgcccgctcacagaaaaataccaaagtggacttctttgccgtggagctcctcgatggaaatctctatctacttctggacatggggtcggggacaatcaaagtaaaggccacgcaaaaaaaggctaacgacggcgaatggtatcacgttgatatccagagagacgggaggtctgggacgatctctgtgaatagccgtcgcacaccatttaccgcatccggtgaatcagaaatcctggatttggaaggagacatgtatctgggcggattgccggagaatagggcgggactcattttgccgaccgagctctggacagcaatgctgaattacggctatgtgggctgtatccgggacttgtttattgacggacggagcaaaaatatcagacaactcgctgaaatgcagaatgccgccggcgtgaaatctagctgcagccgtatgtctgccaaacagtgtgactcatacccttgcaaaaacaacgcggtgtgtaaggacggctggaacaggtttatctgtgactgcacagggaccggctattggggacgtacatgtgagcgagaggcctccatattgagctatgacggctccatgtacatgaagattatcatgccgatggtgatgcacaccgaggcagaggacgtgtcctttcggttcatgagccaacgggcctacggattactcgtggccaccacgtccagggacagcgctgataccctgagactcgagctggatggagggcgggttaagcttatggtgaacctcgattgcattaggatcaactgtaatagcagcaagggccctgaaacactgtatgccggacaaaagctgaatgacaacgagtggcacaccgttagggttgttcggcgcggtaagtctctcaagctcaccgtcgatgatgatgtagcagaagggaccatggtgggagaccacactagactggagttccacaacattgaaaccggcatcatgactgaaaagcgctacatcagtgtggtcccttcatcgttcattgggcacctacagagtctgatgttcaatgggctactgtatatcgatctgtgcaagaacggggacatcgattattgtgaactaaaagctcggtttggccttcgcaacattattgccgatcctgttacattcaaaaccaaaagcagctatctgtcactcgctacgctgcaggcttatactagcatgcacttgttttttcagttcaagaccaccagtccagatggttttattttatttaacagcggcgacggcaacgacttcattgcggttgagctcgttaagggatacatccactacgtttttgacctggggaatggtccaaacgtgattaaagggaactccgaccggccgctgaatgacaaccaatggcataatgtagtaatcaccagggataactcgaatactcatagcttgaaggtggatacgaaggtggtaacccaggttattaatggtgctaagaacttggacctcaaaggcgatctctacatggcaggacttgcccagggcatgtacagcaaccttccaaagctagtggcgagtcgagacggatttcagggctgccttgctagcgtcgacctgaatgggcgtttgcctgatctgataaatgacgccctgcatcggtctggacagattgagcgaggttgcgagggaccctctactacatgccaggaggactcttgcgccaatcagggggtgtgcatgcaacagtgggaaggctttacatgtgactgttccatgacctcttatagcggtaaccagtgtaatgatcccggagccacctatattttcggcaagagcggtggcctgatcctatacacctggcctgcaaacgatcggccttcaactaggagtgaccggctggccgttgggttcagtaccaccgtcaaggacggcatcttagttcgcatagatagcgcgcctggcttaggggactttcttcaactccatatcgaacaagggaaaattggggtcgtcttcaacattggcacagtcgatatctcgatcaaagaagagcgaacacctgtgaatgatgggaaataccacgtggtcaggttcacccgaaacggtgggaacgctacactgcaagtggataactggccagtgaacgagcactaccctactggtcgtcagctcacaatttttaatactcaggcccaaatcgcaataggaggaaaagacaagggccggctgttccagggccagctctctggactgtactacgacggcctgaaggtcttaaatatggctgccgaaaacaatccgaacatcaagatcaacggtagtgtcagacttgttggagaagtcccctccattctggggacaacacagaccacctcaatgccccctgaaatgagtacaacagtgatggagactacaaccactatggccaccaccacaactcgcaagaatcggagtactgcttcaatccagcccaccagcgacgacctcgtgtcaagcgcagagtgcagctccgacgatgaagacttcgttgagtgcgaaccttctaccgccagaggtgagctggttattcccctcctggtagaggaccccctcgcaacgcctccaatcgcgacaagagccccaagcatcacactgccacccacttttaggccactgctcactattatagagacaaccaaggacagcctttcaatgacctcggaagctggccttccttgcctgtcagatcagggctctgacgggtgcgacgatgacggtctggtaatttctggctacgggagcggcgagacattcgacagtaacctgccccctactgacgatgaggacttttatacaacattcagccttgtgactgacaagtctctgagcacgtccatcttcgagggcggctataaggcacatgcacctaaatgggagtctaaggactttcggcctaataaagtttccgaaacctcacgcacaacaaccacgtccttgtcaccagagctcatccgtttcacagcttccagcagtagcgggatggtacccaagctaccggctgggaagatgaacaatagagatctgaaaccacagcccgacatcgtgctgctcccactccctaccgcctatgagttagattcgacaaagctgaagtccccactgatcacatctcctatgtttagaaacgtgcctactgcaaaccctaccgagcctgggatcaggcgagtgcccggagcatctgaggtcattcgggaaagttcaagcaccactggaatggtcgttgggatcgtggcggcggccgccctttgtatcctgattctactttatgccatgtacaaatacagaaaccgcgacgaaggatcataccaggtcgacgagactcgcaactatattagtaattccgcgcagagcaacgggacccttatgaaggaaaagcagcagtccagcaagtccggccataagaagcagaaaaacaaagatcgtgaatactatgtatag

SEQ ID NO: 332905 - DNA, 4932 bp, Artificial Sequence
  derived and/or modified sequence
atgagcagcaccctgcacagcgtcttcttcaccctgaaggtgtccatcctgctgggcagcctgctgggcctgtgcctgggcctggagttcatgggcctgcccaaccagtgggcccgctacctgcgctgggatgccagcaccaggagtgacctgtccttccagttcaagaccaacgtgtccacaggcctgctgctgtacctggatgatggaggagtgtgtgacttcctgtgcctgagcctggtggatggccgggtgcagctgcgcttctccatggactgtgccgagacagctgtgctgagcaacaagcaggtgaatgacagctcctggcacttcctgatggtgtcccgggaccggctgaggacagtgctgatgctggatggagagggccagagcggggagctgcagccccagaggccctacatggatgtggtgtctgacctcttcctgggcggcgtgcccacagacatccggcccagcgccctgaccctggatggagtgcaggccatgcctggcttcaagggcctcatcctggacctgaagtatggcaacagcgagccccggctgctgggcagcagaggagtgcagatggatgctgagggcccctgtggggagcggccctgtgaaaatggaggcatctgcttcctgctggatggccaccccacctgtgactgcagcaccaccggctatggaggcaagctgtgcagcgagggcagcagcggggacccctgcctgagccacctgatgatgtctgagcaggcccgggaggagaatgtggccaccttccggggcagcgagtacctgtgctatgacctgagccagaaccccatccagagcagcagtgatgagatcaccctgtccttcaagacctggcagagaaatggcctcatcctgcacacaggcaagtctgctgactatgtgaacctggccctgaaggatggagctgtgtccctggtgatcaacctgggcagcggggcctttgaggccatcgtggagcctgtgaatggcaagttcaatgacaatgcctggcatgatgtgaaggtgaccaggaacctgcggcaggtgaccatctctgtggatggcatcctgaccaccaccggctacacccaggaggactacaccatgctgggcagtgatgacttcttctacgtgggcggcagccccagcacagctgacctgcccggcagccctgtgagcaacaacttcatgggctgcctgaaggaggtggtgtacaagaacaatgacatccggctggagctgagccggctggccagaattgctgacaccaagatgaagatctatggagaggtggtgttcaagtgtgaaaatgtggccaccctggaccccatcaactttgagaccccagaggcctacatcagcctgcccaagtggaacaccaagaggatgggcagcatcagctttgacttccgcaccacagagcccaacggcctcatcctcttcacccacggcaagccccaggagaggaaggatgcccggagccagaagaacaccaaggtggacttctttgctgtggagctgctggatggcaacctgtacctgctgctggacatgggcagcggcaccatcaaggtgaaggccacccagaagaaggccaatgatggagagtggtaccacgtggacatccagagagatggccgcagcggcaccatctctgtgaacagcaggaggacccccttcaccgccagcggggagagcgagatcctggacctggagggggacatgtacctgggcggcctgcctgaaaatagagctggcctcatcctgcccacagagctgtggacagccatgctgaactacggctacgtgggctgcatccgggacctcttcattgatggccgcagcaagaacatccggcagctggccgagatgcagaatgctgctggggtgaagagcagctgcagcaggatgtctgccaagcagtgtgacagctacccctgcaagaacaatgctgtgtgcaaggatggctggaaccgcttcatctgtgactgcaccggcaccggctactggggccgcacctgtgagcgggaggccagcatcctgtcctatgatggctccatgtacatgaagatcatcatgcccatggtgatgcacacagaagcagaagatgtgtccttccgcttcatgagccagagggcctacggcctgctggtggccaccaccagccgggacagcgctgacaccctgcggctggagctggatggcggccgggtgaagctgatggtgaacctggactgcatccgcatcaactgcaacagcagcaagggccctgagaccctgtatgccggccagaagctgaatgacaatgagtggcacacagtgcgggtggtgagaagaggcaagagcctgaagctgactgtggatgatgatgtggccgagggcaccatggtgggggaccacacccggctggagttccacaacattgaaacaggcatcatgacagagaagcgctacatctctgtggtgcccagcagcttcatcggccacctgcagagcctgatgtttaatggcctgctgtacatcgacctgtgcaagaatggagacatcgactactgtgagctgaaggccaggtttggcctgaggaacatcatcgctgaccctgtgaccttcaagaccaagagcagctacctgagcctggccaccctgcaggcctacacctccatgcacctgttcttccagttcaagaccaccagcccagatggcttcatcctcttcaacagcggagatggaaatgacttcatcgctgtggagctggtgaagggctacatccactacgtgtttgacctgggcaatggccccaacgtcatcaagggcaacagcgaccggcccctgaatgacaaccagtggcacaacgtggtgatcacccgggacaacagcaacacccacagcctgaaggtggacaccaaggtggtgacccaggtgatcaatggagccaagaacctggacctgaagggggacctgtacatggccggcctggcccagggcatgtacagcaacctgcccaagctggtggccagcagagatggcttccagggctgcctggcctctgtggacctgaatggccgcctgcctgacctgatcaatgatgccctgcacaggagcggccagatcgagcggggctgtgagggccccagcaccacctgccaggaggacagctgtgccaaccagggcgtgtgcatgcagcagtgggagggcttcacctgtgactgcagcatgaccagctacagcggcaaccagtgcaatgaccccggggccacctacatctttgggaagagcggcggcctcatcctgtacacctggccagccaatgaccggcccagcaccaggagtgaccggctggccgtgggcttcagcaccaccgtgaaggatggcatcctggtgagaattgacagcgcccctggcctgggggacttcctgcagctgcacatcgagcagggcaagattggagtggtgttcaacattggaacagtggacatcagcatcaaggaggagaggacccctgtgaatgatggcaagtaccacgtggtgcgcttcaccagaaatggaggaaatgccaccctgcaggtggacaactggcctgtgaatgagcactaccccaccggccggcagctgaccatcttcaacacccaggcccagatcgccatcggcggcaaggacaagggccgcctcttccagggccagctgagcggcctgtactatgatggcctgaaggtgctgaacatggctgctgagaacaaccccaacatcaagatcaatggatctgtgcggctggtgggggaggtgcccagcatcctgggcaccacccagaccacctccatgcctcctgagatgagcaccaccgtgatggagaccaccaccaccatggccaccaccaccaccaggaagaacagaagcacagccagcatccagcccaccagtgatgacctggtgtcctctgcagaatgttccagtgatgatgaagattttgtggagtgtgagcccagcacagcccggggggagctggtgatccccctgctggtggaggaccccctggccaccccacccatcgccacccgggcccccagcatcaccctgccccccaccttccggcccctgctgaccatcatcgagaccaccaaggacagcctgtccatgaccagcgaggccggcctgccctgcctgagtgaccagggcagtgatggctgtgatgatgatggcctggtgatcagcggctacggcagcggggagacctttgacagcaacctgcccccaacagatgatgaggacttctacaccaccttcagcctggtgacagacaagagcctgagcaccagcatctttgaaggaggctacaaggcccacgcccccaagtgggagagcaaggacttccggcccaacaaggtgtctgagaccagcaggaccaccaccaccagcctgagccctgagctgatccgcttcaccgccagcagcagcagcggcatggtgcccaagctgcctgctgggaagatgaacaacagagacctgaagccccagcctgacatcgtgctgctgcccctgcccacagcctatgagctggacagcaccaagctgaagagccccctcatcaccagccccatgttcagaaatgtgcccacagccaaccccacagagcccggcatccggcgggtgcctggggccagcgaggtgatccgggagagcagcagcaccaccggcatggtggtgggcatcgtggccgccgccgccctgtgcatcctgatcctgctgtatgccatgtacaagtacagaaacagagatgagggcagctaccaggtggatgagaccaggaactacatcagcaacagcgcccagagcaatggcaccctgatgaaggagaagcagcagagcagcaagagcggccacaagaagcagaagaacaaggaccgggagtactacgtgtag

SEQ ID NO: 332906 - DNA, 4932 bp, Artificial Sequence
  derived and/or modified sequence
atgagcagcaccctgcacagcgtgttcttcaccctgaaggtgagcatactgctcggctccctactgggcttgtgcctaggcctggaatttatgggactccctaatcaatgggcgaggtatctccggtgggatgcatccaccagaagtgatctttcctttcagtttaagaccaatgtcagcactggccttttactctacctcgacgatggtggcgtctgcgatttcttgtgcctgagtcttgtagatgggcgagtgcagctgagatttagcatggactgtgctgaaaccgccgtgctgtctaataagcaggtaaatgactcgtcttggcatttcctcatggtctcaagagacagactgaggactgtgcttatgctggacggagaaggccagagcggtgagctgcaacctcaacggccatacatggatgtggtcagtgatctgttccttggaggtgtcccgaccgacattcgacccagcgcgctgacccttgacggcgtacaggccatgcccggtttcaagggactgatactagatctgaaatacgggaattccgagcccagacttctgggttccagaggggtgcagatggacgccgaaggcccatgcggagagcggccttgtgagaacgggggcatatgctttctgctcgacgggcatccgacttgtgactgcagcacgactgggtatggcggcaaactgtgtagcgaaggtagcagcggggacccttgcctgtcccatctgatgatgagtgagcaggcaagagaggaaaacgtggccacgtttcgaggttctgagtatctgtgttatgatctgtcccaaaaccccatccagagttcctcagatgagattacactgtcctttaagacctggcagaggaacggactcatactgcacactggtaaatccgctgactacgtgaatctagcccttaaagacggtgctgtgtctcttgtgattaatctcggtagcggagcattcgaggcgattgtggagcccgtgaatggcaaatttaacgacaatgcttggcatgatgtcaaggtgacccggaatctgaggcaggtcactatctccgtcgatgggatcctaaccactaccggatacacccaggaagactacactatgttaggttcggacgacttcttttacgtgggtggatcaccatcgacagccgatctgcccggttctcctgtaagcaacaactttatgggttgcctgaaggaggtggtttacaaaaataatgatatccgtcttgaattgagtcgcctcgcgcggatcgctgatacaaaaatgaaaatttatggggaggtggtgtttaaatgcgaaaatgtcgcaactctcgatcccatcaactttgaaacccccgaagcctacatctcgctgccgaaatggaacaccaagagaatgggaagtatctccttcgactttcgaactaccgagcctaacggcctgatcctgttcacacacgggaaacctcaggagcgaaaagatgctaggagccaaaaaaacactaaggtcgacttcttcgccgtggaactgctggatggcaatctctacctgttgttagacatgggcagcggtactattaaagtaaaggccactcagaagaaggccaacgacggggagtggtatcacgtagacatccaaagagacggtaggtctggtacaatctctgttaattcccgtcggacccctttcacagctagtggagagtccgaaatcctcgatctggagggggatatgtaccttggaggcttgcctgagaatcgggccggactcatcctgcctactgagttatggaccgccatgctgaactacggatatgtggggtgtataagggatttgtttattgacggacgttccaagaacattagacagttagcagagatgcagaatgccgccggagtcaagtcttcttgttctcggatgtcagccaagcaatgcgatagctacccttgcaagaacaatgccgtgtgtaaggacggctggaacagatttatctgtgactgcacaggtaccggctattggggaaggacctgcgagagggaagcttctatcctctcttatgacggttccatgtatatgaagataatcatgcccatggtgatgcatactgaagccgaggatgtgagttttagattcatgagccagcgagcttatggcctcctagtggccactacctcccgagactcagctgatactctccgactggaattggacggaggccgcgtaaagctaatggtcaacctggactgtatcaggatcaattgtaactcctctaaaggacccgaaaccttgtacgccggacagaaacttaatgataacgagtggcatacagtccgcgtcgtgagaagagggaagagcttgaaactgactgtcgatgacgatgtcgcagaaggaactatggtgggcgatcacacgaggctcgagtttcataatatcgagacagggatcatgacagagaagcgctatatctccgtcgtgccctctagctttataggccaccttcagagtctcatgtttaacggactgttgtatatagacctctgcaaaaatggcgatattgattattgtgaactgaaggcccgatttggcctgcggaacatcatcgcagatccggtcacgttcaagactaagtccagctatctctccctcgccactctgcaagcctatacatcaatgcaccttttttttcagtttaaaacgactagccccgacggattcatattgttcaatagcggcgacggaaacgattttatagccgtggaacttgtcaagggatatatccactatgtcttcgacttaggcaatgggcctaacgtgattaaggggaactccgaccggccgctcaatgataaccagtggcataatgtggtcatcacgcgggacaattccaatacgcattcacttaaagtagatacaaaggtggtcacccaggtaatcaatggagccaagaatctggatctgaagggtgatctgtacatggccggcctggcgcagggcatgtactcaaacctcccaaaactggtggccagccgagatggattccagggctgcctagcttcagtcgatttaaacgggagactgcccgatctcattaacgacgctctgcacagaagcgggcagattgagcgcggctgtgagggcccttctaccacatgtcaggaggactcctgtgcgaatcagggggtctgtatgcaacagtgggaaggcttcacctgcgactgcagtatgacctcttattcagggaaccaatgtaacgatccaggagctacttatattttcggcaaatccggtggcctgatactgtacacctggcccgccaacgacagaccatccacacgatctgataggctcgccgtcggcttctcaacaactgtgaaagatgggatcctagtcaggattgactcagctccgggacttggtgatttcctgcagctgcacattgagcagggcaaaatcggtgtggtgtttaatattggaaccgtggacatatctattaaagaggagaggacaccagtaaacgacggtaaataccatgtggtcaggttcacacggaatggcggtaacgccacacttcaagtcgacaactggcctgtcaatgagcactatcctactgggagacagctgacaattttcaacacacaagctcagattgctatcggtggcaaggataaggggcggctctttcaggggcagctcagcggactgtactacgacggcctgaaggtgctgaatatggccgctgaaaacaaccccaacattaagattaatggttccgtcagactggtgggagaagtgccaagcattttggggacaacccagacaaccagcatgccccctgagatgtccacgaccgtcatggagaccaccaccactatggccactaccacaaccagaaaaaataggagcactgctagcatccagcccacgagtgatgacttagttagttcagctgagtgctcttccgatgacgaggacttcgttgaatgtgaaccttctactgcaagaggagagctagtgatcccactgttagtggaggacccattggcaacacccccaattgccacccgggcgccatccatcacgctgcccccaacttttcggcctctgctcactatcattgaaactaccaaagattctttaagtatgacatcagaggcgggactgccctgcctgtccgatcagggctccgacggatgtgacgatgatggcctcgtgatatccggatacggctccggcgagacattcgattcaaatttacctccgaccgatgatgaagatttctacaccacgttttccctggtgactgataagtccctctccacttctatttttgagggaggatataaagcccacgccccgaagtgggagagcaaagattttagacctaataaagtgtctgagacctctaggacaactacgacctctctctcacctgaactcataaggtttaccgcatccagcagctcaggtatggtacccaagctgccggctggaaagatgaataacagggatctcaagccccagcccgacatcgtgttgcttcctcttccaactgcctacgagcttgacagcaccaagctgaaatcccccctcattacttctcctatgttccgaaacgtccccactgcaaacccaactgaacctgggatccgccgggtgccgggcgcttcagaggtgattcgtgagagctcctccacaacaggaatggtggtcggaatcgtggcagccgcggccctctgcatactgatccttctgtacgcgatgtataagtataggaacagggacgaagggtcctaccaagtggacgagaccaggaactatatctcaaactccgcccaatctaacggcaccctaatgaaagaaaaacagcagtccagcaagtcagggcataaaaaacagaagaacaaggatagagagtactatgtgtag

SEQ ID NO: 332907 - DNA, 4932 bp, Artificial Sequence
  derived and/or modified sequence
atgagctccacactccactcggttttcttcaccctgaaggtcagcatcctgctggggtccctgctggggctctgcctgggccttgagttcatgggcctccccaaccagtgggcccgctacctccgctgggatgccagcacacgcagtgacctgagtttccagttcaagaccaacgtctctacggggctgctcctctacctggatgatggcggcgtctgcgacttcctatgcctctccctggtggatggccgcgttcagctccgcttcagcatggactgtgccgagactgccgtgctgtccaacaagcaggtgaatgacagcagctggcacttcctcatggtgagccgtgaccgcctgcgcacggtgctgatgcttgatggcgagggccagtctggggagctgcagccccagcggccctacatggatgtggtcagtgacttgttccttggtggagtccctactgacatacgaccttctgccctgacccttgatggagttcaggccatgcccggcttcaaggggttaattctggatctcaagtatggaaactcggagcctcggcttctggggagccggggtgtccagatggatgccgagggaccctgtggtgagcgtccctgtgaaaatggtgggatctgctttctcctggacggccaccccacctgtgactgttctaccactggctatggtggcaagctctgctcagaaggaagctcgggggacccctgcctctcccacctcatgatgagtgaacaagctcgagaggagaatgtggccactttccgaggctcagagtatctgtgctacgacctgtctcagaacccgatccagagcagcagtgatgaaatcaccctctcctttaagacctggcagcgtaacggcctcatcctgcacacgggcaagtcggctgactatgtcaacctggctctgaaggatggtgcggtctccttggtcattaacctggggtccggggcctttgaggccattgtggagccagtgaatggaaaattcaacgacaacgcctggcatgatgtcaaagtgacacgcaacctccggcaggtgacaatctctgtggatggcattcttaccacgacgggctacactcaagaggactataccatgctgggctcggacgacttcttctatgtaggaggaagcccaagtaccgctgacttgcctggctcccctgtcagcaacaacttcatgggctgccttaaagaggttgtttataagaataatgacatccgtctggagctgtctcgcctggcccggattgcggacaccaagatgaaaatctatggcgaagttgtgtttaagtgtgagaatgtggccacactggaccccatcaactttgagaccccagaggcttacatcagcttgcccaagtggaacactaaacgtatgggctccatctcctttgacttccgcaccacagagcccaatggcctgatcctcttcactcatggaaagccccaagagaggaaggatgctcggagccagaagaatacaaaagtagacttctttgccgtggaactcctcgatggcaacctgtacttgctgcttgacatgggctctggcaccatcaaagtgaaagccactcagaagaaagccaatgatggggaatggtaccatgtggacattcagcgagatggcagatcaggtactatatcagtgaacagcaggcgcacgccattcaccgccagtggggagagcgagatcctggacctggaaggagacatgtacctgggagggctgccggagaaccgtgctggccttattctccccaccgagctgtggactgccatgctcaactatggctacgtgggctgcatccgcgacctattcattgatgggcgcagcaagaacattcgacagctggcagagatgcagaatgctgcgggtgtcaagtcctcctgttcacggatgagtgccaagcagtgtgacagctacccctgcaagaataatgctgtgtgcaaggacggctggaaccgcttcatctgcgactgcaccggcaccggatactggggaagaacctgcgaaagggaggcatccatcctgagctatgatggtagcatgtacatgaagatcatcatgcccatggtcatgcatactgaggcagaggatgtgtccttccgcttcatgtcccagcgagcttatgggctgctggtggctacgacctccagggactctgccgacaccctgcgtctggagctggatggggggcgtgtcaagctcatggttaacctagactgtatcaggataaactgtaactccagcaaaggaccagagaccttgtatgcagggcagaagctcaatgacaacgagtggcacaccgttcgggtggtgcggagaggaaaaagccttaagttaaccgtggatgatgatgtggctgagggtacaatggtgggagaccatacccgtttggagttccacaacattgaaacgggaatcatgactgagaaacgctacatctccgttgtcccctccagctttattggccatctgcagagcctcatgtttaatggccttctctacattgacttgtgcaaaaatggtgacattgattattgtgagctgaaggctcgttttggactgaggaacatcatcgctgaccctgtcacctttaagaccaagagcagctacctgagccttgccactcttcaggcttacacctccatgcacctcttcttccagttcaagaccacctcaccagatggcttcattctcttcaatagtggtgatggcaatgacttcattgcagtcgagcttgtcaaggggtatatacactacgtttttgacctcggaaacggtcccaatgtgatcaaaggcaacagtgaccgccccctgaatgacaaccagtggcacaatgtcgtcatcactcgggacaatagtaacactcatagcctgaaagtggacaccaaagtggtcactcaggttatcaatggtgccaaaaatctggatttgaaaggtgatctctatatggctggtctggcccaaggcatgtacagcaacctcccaaagctcgtggcctctcgagatggctttcagggctgtctagcatcagtggacttgaatggacgcctgccagacctcatcaatgatgctcttcatcggagcggacagatcgagcgtggctgtgaaggacccagtaccacctgccaggaagattcatgtgccaaccagggggtctgcatgcaacaatgggagggcttcacctgtgattgttctatgacctcttattctggaaaccagtgcaatgatcctggcgctacgtacatctttgggaaaagtggtgggcttatcctctacacctggccagccaatgacaggcccagcacgcggtctgaccgccttgccgtgggcttcagcaccactgtgaaggatggcatcttggtccgcatcgacagtgctccaggacttggtgacttcctccagcttcacatagaacaggggaaaattggagttgtcttcaacattggcacagttgacatctccatcaaagaggagagaacccctgtaaatgacggcaaataccatgtggtacgcttcaccaggaacggcggcaacgccaccctgcaggtggacaactggccagtgaatgaacattatcctacaggccggcagttaaccatcttcaacactcaggcgcaaatagccattggtggaaaggacaaaggacgcctcttccaaggccaactctctgggctctattatgatggtttgaaagtactgaacatggcggctgagaacaaccccaatattaaaatcaatggaagtgttcggctggttggagaagtcccatcaattttgggaacaacacagacgacctccatgccaccagaaatgtctactactgtcatggaaaccactactacaatggcgactaccacaacccgtaagaatcgctctacagccagcattcagccaacatcagatgatcttgtttcatctgctgaatgttcaagtgatgatgaagactttgttgaatgtgagccgagtacagcaagaggtgaattagttatccctcttcttgtagaagaccctttagctacccctcctattgctactcgtgcaccttccattacactcccccctacctttcgccccctcctcaccattattgagaccaccaaagattccctgtccatgacctctgaggcggggttaccttgcttgtcggaccaaggcagcgatggttgtgatgatgatggcttggtgatatctgggtatggctcaggggaaacctttgactctaacctgccccctactgatgatgaagatttttacaccaccttctccttggtaacagataagagtctttccacttcaatcttcgaaggtggctacaaagcacatgcgcccaagtgggaatccaaggactttagacctaacaaagtctccgaaactagtaggactactaccacatctttatcccctgagctgatccgcttcacagcttcctcctcgtctgggatggtgcccaaattgccagctggcaaaatgaataaccgtgatctcaaaccccagcctgatatagtcttgcttccgttgcccactgcctatgagctagacagcaccaaactgaagagcccactaattacttcccccatgttccgtaatgtgcccacagcaaaccccacggagccgggaatcagacgggttccgggggcctcagaggtgatccgggagtcgagcagcacaacagggatggtcgtcggcattgtggctgctgccgccctctgcatcttgatcctcctgtacgccatgtacaagtacaggaacagggacgaggggtcctatcaagtggacgagacgcggaactacatcagcaactccgcccagagcaacggcacgctcatgaaggagaagcagcagagctcgaagagcggccacaagaaacagaaaaacaaggacagggagtattacgtgtaa

SEQ ID NO: 332908 - DNA, 4932 bp, Artificial Sequence
  derived and/or modified sequence
atgagctccaccctgcactccgtgtttttcacacttaaggtgtcgattctgctggggagtctgctgggcctctgcctcggactggagttcatgggcctccccaaccagtgggcccgatacctaaggtgggatgcgagcactcggtccgacctctcctttcagtttaaaacaaacgtgtcgaccggactgctcttatatttagacgacggaggcgtgtgtgatttcctttgtctgtcactggtagatggcagagttcagctgcgtttttctatggactgtgctgagaccgcggtccttagtaacaaacaagtaaacgattcaagttggcacttccttatggtctcgcgggataggttaaggactgttctgatgctggacggggaagggcagtccggagaactgcagcctcaacgcccttatatggatgtggtctccgatttatttctggggggtgttccaactgacattcgcccatctgccctaacccttgacggggtccaagctatgcccggattcaaagggctcatcctggacctgaaatacggaaatagcgagcctcgcttgctaggctcacgcggtgtccagatggatgcagaaggtccttgcggagagcgcccttgcgagaatggtggcatttgcttcctccttgatggccatccaacatgtgattgttcgaccactggttacgggggtaaattatgtagcgaaggatcctctggggacccttgcctgtctcacctcatgatgtccgagcaggcacgcgaggaaaacgtcgctacatttcgtgggagtgagtacctgtgctatgatctgagccagaaccctatccagtcaagctccgatgaaatcaccctctcattcaagacttggcagaggaatggtttgattttacacactggcaagtctgccgattacgtcaaccttgctctcaaggatggtgccgtgagcctggtaattaatctggggtcaggggcatttgaagccatcgtggagcccgtgaacggcaaattcaacgacaacgcatggcatgatgtaaaggtcactcgcaatctgcggcaggtgaccataagcgtcgatgggatcctcacaactacagggtacacacaggaggattacacaatgctggggagcgatgacttcttctatgtaggtggttcaccaagtactgcagacttgcctggttctccagtaagtaataacttcatggggtgtctgaaggaggtcgtgtacaagaacaatgacattcggctggaactcagccggctcgcaagaattgcagataccaaaatgaaaatctatggagaggtggtttttaagtgtgaaaacgtcgctacacttgatcctatcaatttcgagacccctgaggcttacatctcactgccgaagtggaatacaaagcggatggggtccatctcgtttgacttcagaactacagagcctaacggactgatcctctttacccacgggaaaccacaagagcgaaaggacgctcgctcgcagaaaaacacaaaagtagacttctttgcggtcgaactgttagatggaaatctgtacctgctgctcgatatgggttcagggacaattaaggtcaaagcaacacaaaagaaagccaacgatggcgagtggtatcatgttgacatccagcgggacgggagatcgggtaccatttcggtcaattctaggagaaccccatttaccgcgtcgggagaatctgaaatcctggatctggagggggatatgtatctggggggactcccagagaaccgagccggactcatcttaccaacggagctgtggactgctatgttgaactacgggtatgtcggatgcattcgtgacctctttattgacgggcgtagtaagaacatacgccagcttgctgagatgcagaacgctgccggagtgaaatcttcgtgcagtcgaatgtccgctaagcagtgtgactcatatccttgcaagaacaacgctgtgtgtaaagacggctggaatcgcttcatatgcgattgtactggcacaggatattggggacgtacttgtgaacgggaggcctccattctgagctacgatgggagtatgtatatgaaaatcattatgccaatggtgatgcacacggaagcagaagatgtgtcctttcggttcatgtcccagagagcttacggcctcctggtcgctactacgtcaagggatagcgcggatacactacggttggaattagacgggggtcgcgttaagctcatggtcaatttagattgtattagaataaactgtaatagctcgaaaggccctgaaacattatatgccggtcagaaattaaacgataatgaatggcatacagtgagggtcgtcagaaggggcaaatcactgaagttgacagtcgacgacgacgtggcagaaggaaccatggtgggtgaccacacccgcttagagttccataatatcgaaacaggaatcatgacggaaaagcgctatatctccgtggtaccaagctcgtttatcggacacctgcagtcactgatgttcaacggtttgctctatatcgatctgtgtaaaaatggggacatcgactattgcgagctcaaggcacgctttggacttagaaacattatcgcagacccagtcacatttaagactaagagttcatacctttccctagctacactccaggcgtatacatccatgcacttgttctttcagtttaagacaacgtccccagatggtttcatcctgttcaatagtggtgatggcaatgatttcattgccgtggagctggttaaaggatacatacattatgtgttcgatctgggcaatgggcctaatgtcattaagggtaactcagacaggccacttaatgataaccagtggcataacgtggtgattacccgcgacaactcgaatacccactcccttaaggtcgataccaaggttgtcacccaagtcattaatggcgctaagaacctcgacctgaagggcgacctctatatggccggacttgctcaggggatgtatagtaatctcccaaagctagtggcctctagggacggtttccagggatgtctcgcatctgtggacttgaacgggaggctgcccgatctgatcaacgacgctctgcatcggagcggacaaattgaacgtgggtgtgaggggccatctacaacttgtcaggaggattcttgtgccaatcagggcgtttgcatgcagcagtgggagggatttacttgcgattgctccatgacaagttactccggcaatcagtgcaacgaccctggagcaacctacatcttcggtaagagcggaggactgatactctatacatggccggctaacgatcgcccaagtacaaggagcgaccggcttgccgtgggtttctctaccaccgtgaaggatgggatccttgtgaggattgacagcgcacctggcctgggagacttcctgcagctgcacatcgaacaaggaaaaatcggcgtcgtgttcaacataggaacagtggacattagcattaaagaagagcggacacccgtcaacgatggcaagtaccatgtagtacgattcacccgtaacggagggaatgctacacttcaggtggacaactggccagttaacgaacattacccgacaggcagacagttgacgatttttaatacccaggcccagatagcaataggcggtaaggacaagggtcgacttttccagggtcagctttctggcttatattacgacgggcttaaggtcttgaatatggcggctgagaacaacccgaacataaaaataaatgggtctgtgcggctcgttggtgaagttccttccatcctgggcaccacgcagactactagcatgccacccgagatgtccaccacagtgatggagaccaccaccacgatggcaactacaacaacaagaaagaaccgatcgacagcctccattcaaccaacgtctgatgatcttgttagttcagcagagtgtagcagcgatgatgaagatttcgtggagtgcgagccaagcacggctcgtggcgagcttgtaataccgcttctggtcgaggaccctctggctacaccaccaattgccacacgagctcctagcatcaccctaccccctacgtttcgaccgctccttaccatcatcgagactacgaaggactcattgtccatgacaagcgaagcaggattgccatgtctctcagaccagggatccgatggatgcgatgacgacggtttggtcatatcggggtatggtagtggggaaacatttgactcgaatctaccaccgacagatgacgaggatttttacaccacttttagtctggtgaccgataagagtctgtccacatcgatcttcgagggtggatataaggcccatgcacccaaatgggagtcaaaggactttcggccaaataaggtttctgaaacttcgcggaccaccacaacctctcttagtcccgaactcattcgtttcactgcttcctcttcttccgggatggtccctaagctgcctgcaggtaagatgaacaatagagacctcaagccacaacccgatattgtgttgctgccactacctaccgcgtacgaactggatagtactaaactgaagtctcctctcatcacatcccccatgttccgcaatgtcccgacggcgaatcccaccgagcccggaatacgccgtgtgccaggcgcatcagaagtaattcgggagagctcctccaccactggaatggttgttggaattgtcgccgctgctgctctgtgtattctaattttgctgtatgcgatgtacaaatacaggaaccgggacgagggatcataccaggttgacgagactcgcaattacatcagcaactcagcgcagtctaatgggacgctgatgaaagaaaaacagcagtcaagcaagtcgggccacaagaagcaaaagaataaggacagggagtactatgtctag

SEQ ID NO: 332909 - DNA, 4932 bp, Artificial Sequence
  derived and/or modified sequence
atgagcagcaccctgcacagcgtgttcttcaccctgaaggtgagcatcctgctgggcagcctgctgggcctgtgcctgggcctggagttcatgggcctgcccaaccagtgggccagatacctgagatgggacgccagcaccagaagcgacctgagcttccagttcaagaccaacgtgagcaccggcctgctgctgtacctggacgacggcggcgtgtgcgacttcctgtgcctgagcctggtggacggcagagtgcagctgagattcagcatggactgcgccgagaccgccgtgctgagcaacaagcaggtgaacgacagcagctggcacttcctgatggtgagcagagacagactgagaaccgtgctgatgctggacggcgagggccagagcggcgagctgcagccccagagaccctacatggacgtggtgagcgacctgttcctgggcggcgtgcccaccgacatcagacccagcgccctgaccctggacggcgtgcaggccatgcccggcttcaagggcctgatcctggacctgaagtacggcaacagcgagcccagactgctgggcagcagaggcgtgcagatggacgccgagggcccctgcggcgagagaccctgcgagaacggcggcatctgcttcctgctggacggccaccccacctgcgactgcagcaccaccggctacggcggcaagctgtgcagcgagggcagcagcggcgacccctgcctgagccacctgatgatgagcgagcaggccagagaggagaacgtggccaccttcagaggcagcgagtacctgtgctacgacctgagccagaaccccatccagagcagcagcgacgagatcaccctgagcttcaagacctggcagagaaacggcctgatcctgcacaccggcaagagcgccgactacgtgaacctggccctgaaggacggcgccgtgagcctggtgatcaacctgggcagcggcgccttcgaggccatcgtggagcccgtgaacggcaagttcaacgacaacgcctggcacgacgtgaaggtgaccagaaacctgagacaggtgaccatcagcgtggacggcatcctgaccaccaccggctacacccaggaggactacaccatgctgggcagcgacgacttcttctacgtgggcggcagccccagcaccgccgacctgcccggcagccccgtgagcaacaacttcatgggctgcctgaaggaggtggtgtacaagaacaacgacatcagactggagctgagcagactggccagaatcgccgacaccaagatgaagatctacggcgaggtggtgttcaagtgcgagaacgtggccaccctggaccccatcaacttcgagacccccgaggcctacatcagcctgcccaagtggaacaccaagagaatgggcagcatcagcttcgacttcagaaccaccgagcccaacggcctgatcctgttcacccacggcaagccccaggagagaaaggacgccagaagccagaagaacaccaaggtggacttcttcgccgtggagctgctggacggcaacctgtacctgctgctggacatgggcagcggcaccatcaaggtgaaggccacccagaagaaggccaacgacggcgagtggtaccacgtggacatccagagagacggcagaagcggcaccatcagcgtgaacagcagaagaacccccttcaccgccagcggcgagagcgagatcctggacctggagggcgacatgtacctgggcggcctgcccgagaacagagccggcctgatcctgcccaccgagctgtggaccgccatgctgaactacggctacgtgggctgcatcagagacctgttcatcgacggcagaagcaagaacatcagacagctggccgagatgcagaacgccgccggcgtgaagagcagctgcagcagaatgagcgccaagcagtgcgacagctacccctgcaagaacaacgccgtgtgcaaggacggctggaacagattcatctgcgactgcaccggcaccggctactggggcagaacctgcgagagagaggccagcatcctgagctacgacggcagcatgtacatgaagatcatcatgcccatggtgatgcacaccgaggccgaggacgtgagcttcagattcatgagccagagagcctacggcctgctggtggccaccaccagcagagacagcgccgacaccctgagactggagctggacggcggcagagtgaagctgatggtgaacctggactgcatcagaatcaactgcaacagcagcaagggccccgagaccctgtacgccggccagaagctgaacgacaacgagtggcacaccgtgagagtggtgagaagaggcaagagcctgaagctgaccgtggacgacgacgtggccgagggcaccatggtgggcgaccacaccagactggagttccacaacatcgagaccggcatcatgaccgagaagagatacatcagcgtggtgcccagcagcttcatcggccacctgcagagcctgatgttcaacggcctgctgtacatcgacctgtgcaagaacggcgacatcgactactgcgagctgaaggccagattcggcctgagaaacatcatcgccgaccccgtgaccttcaagaccaagagcagctacctgagcctggccaccctgcaggcctacaccagcatgcacctgttcttccagttcaagaccaccagccccgacggcttcatcctgttcaacagcggcgacggcaacgacttcatcgccgtggagctggtgaagggctacatccactacgtgttcgacctgggcaacggccccaacgtgatcaagggcaacagcgacagacccctgaacgacaaccagtggcacaacgtggtgatcaccagagacaacagcaacacccacagcctgaaggtggacaccaaggtggtgacccaggtgatcaacggcgccaagaacctggacctgaagggcgacctgtacatggccggcctggcccagggcatgtacagcaacctgcccaagctggtggccagcagagacggcttccagggctgcctggccagcgtggacctgaacggcagactgcccgacctgatcaacgacgccctgcacagaagcggccagatcgagagaggctgcgagggccccagcaccacctgccaggaggacagctgcgccaaccagggcgtgtgcatgcagcagtgggagggcttcacctgcgactgcagcatgaccagctacagcggcaaccagtgcaacgaccccggcgccacctacatcttcggcaagagcggcggcctgatcctgtacacctggcccgccaacgacagacccagcaccagaagcgacagactggccgtgggcttcagcaccaccgtgaaggacggcatcctggtgagaatcgacagcgcccccggcctgggcgacttcctgcagctgcacatcgagcagggcaagatcggcgtggtgttcaacatcggcaccgtggacatcagcatcaaggaggagagaacccccgtgaacgacggcaagtaccacgtggtgagattcaccagaaacggcggcaacgccaccctgcaggtggacaactggcccgtgaacgagcactaccccaccggcagacagctgaccatcttcaacacccaggcccagatcgccatcggcggcaaggacaagggcagactgttccagggccagctgagcggcctgtactacgacggcctgaaggtgctgaacatggccgccgagaacaaccccaacatcaagatcaacggcagcgtgagactggtgggcgaggtgcccagcatcctgggcaccacccagaccaccagcatgccccccgagatgagcaccaccgtgatggagaccaccaccaccatggccaccaccaccaccagaaagaacagaagcaccgccagcatccagcccaccagcgacgacctggtgagcagcgccgagtgcagcagcgacgacgaggacttcgtggagtgcgagcccagcaccgccagaggcgagctggtgatccccctgctggtggaggaccccctggccaccccccccatcgccaccagagcccccagcatcaccctgccccccaccttcagacccctgctgaccatcatcgagaccaccaaggacagcctgagcatgaccagcgaggccggcctgccctgcctgagcgaccagggcagcgacggctgcgacgacgacggcctggtgatcagcggctacggcagcggcgagaccttcgacagcaacctgccccccaccgacgacgaggacttctacaccaccttcagcctggtgaccgacaagagcctgagcaccagcatcttcgagggcggctacaaggcccacgcccccaagtgggagagcaaggacttcagacccaacaaggtgagcgagaccagcagaaccaccaccaccagcctgagccccgagctgatcagattcaccgccagcagcagcagcggcatggtgcccaagctgcccgccggcaagatgaacaacagagacctgaagccccagcccgacatcgtgctgctgcccctgcccaccgcctacgagctggacagcaccaagctgaagagccccctgatcaccagccccatgttcagaaacgtgcccaccgccaaccccaccgagcccggcatcagaagagtgcccggcgccagcgaggtgatcagagagagcagcagcaccaccggcatggtggtgggcatcgtggccgccgccgccctgtgcatcctgatcctgctgtacgccatgtacaagtacagaaacagagacgagggcagctaccaggtggacgagaccagaaactacatcagcaacagcgcccagagcaacggcaccctgatgaaggagaagcagcagagcagcaagagcggccacaagaagcagaagaacaaggacagagagtactacgtgtag

SEQ ID NO: 332910 - DNA, 3649 bp, Artificial Sequence
  derived and/or modified sequence
ttcttcagtgcccagttttctgccgtgggatggtgttaggcccgggaagaacagagcctaaatgcacccctctacccacttccaccgggatcttgacgaagctcgagaggagaatgtggccactttccgaggctcagagtatctgtgctacgacctgtctcagaacccgatccagagcagcagtgatgaaatcaccctctcctttaagacctggcagcgtaacggcctcatcctgcacacgggcaagtcggctgactatgtcaacctggctctgaaggatggtgcggtctccttggtcattaacctggggtccggggcctttgaggccattgtggagccagtgaatggaaaattcaacgacaacgcctggcatgatgtcaaagtgacacgcaacctccggcaggtgacaatctctgtggatggcattcttaccacgacgggctacactcaagaggactataccatgctgggctcggacgacttcttctatgtaggaggaagcccaagtaccgctgacttgcctggctcccctgtcagcaacaacttcatgggctgccttaaagaggttgtttataagaataatgacatccgtctggagctgtctcgcctggcccggattgcggacaccaagatgaaaatctatggcgaagttgtgtttaagtgtgagaatgtggccacactggaccccatcaactttgagaccccagaggcttacatcagcttgcccaagtggaacactaaacgtatgggctccatctcctttgacttccgcaccacagagcccaatggcctgatcctcttcactcatggaaagccccaagagaggaaggatgctcggagccagaagaatacaaaagtagacttctttgccgtggaactcctcgatggcaacctgtacttgctgcttgacatgggctctggcaccatcaaagtgaaagccactcagaagaaagccaatgatggggaatggtaccatgtggacattcagcgagatggcagatcaggtactatatcagtgaacagcaggcgcacgccattcaccgccagtggggagagcgagatcctggacctggaaggagacatgtacctgggagggctgccggagaaccgtgctggccttattctccccaccgagctgtggactgccatgctcaactatggctacgtgggctgcatccgcgacctattcattgatgggcgcagcaagaacattcgacagctggcagagatgcagaatgctgcgggtgtcaagtcctcctgttcacggatgagtgccaagcagtgtgacagctacccctgcaagaataatgctgtgtgcaaggacggctggaaccgcttcatctgcgactgcaccggcaccggatactggggaagaacctgcgaaagggaggcatccatcctgagctatgatggtagcatgtacatgaagatcatcatgcccatggtcatgcatactgaggcagaggatgtgtccttccgcttcatgtcccagcgagcttatgggctgctggtggctacgacctccagggactctgccgacaccctgcgtctggagctggatggggggcgtgtcaagctcatggttaacttagactgtatcaggataaactgtaactccagcaaaggaccagagaccttgtatgcagggcagaagctcaatgacaacgagtggcacaccgttcgggtggtgcggagaggaaaaagccttaagttaaccgtggatgatgatgtggctgagggtacaatggtgggagaccatacccgtttggagttccacaacattgaaacgggaatcatgactgagaaacgctacatctccgttgtcccctccagctttattggccatctgcagagcctcatgtttaatggccttctctacattgacttgtgcaaaaatggtgacattgattattgtgagctgaaggctcgttttggactgaggaacatcatcgctgaccctgtcacctttaagaccaagagcagctacctgagccttgccactcttcaggcttacacctccatgcacctcttcttccagttcaagaccacctcaccagatggcttcattctcttcaatagtggtgatggcaatgacttcattgcagtcgagcttgtcaaggggtatatacactacgtttttgacctcggaaacggtcccaatgtgatcaaaggcaacagtgaccgccccctgaatgacaaccagtggcacaatgtcgtcatcactcgggacaatagtaacactcatagcctgaaagtggacaccaaagtggtcactcaggttatcaatggtgccaaaaatctggatttgaaaggtgatctctatatggctggtctggcccaaggcatgtacagcaacctcccaaagctcgtggcctctcgagatggctttcagggctgtctagcatcagtggacttgaatggacgcctgccagacctcatcaatgatgctcttcatcggagcggacagatcgagcgtggctgtgaaggacccagtaccacctgccaggaagattcatgtgccaaccagggggtctgcatgcaacaatgggagggcttcacctgtgattgttctatgacctcttattctggaaaccagtgcaatgatcctggcgctacgtacatctttgggaaaagtggtgggcttatcctctacacctggccagccaatgacaggcccagcacgcggtctgaccgccttgccgtgggcttcagcaccactgtgaaggatggcatcttggtccgcatcgacagtgctccaggacttggtgacttcctccagcttcacatagaacaggggaaaattggagttgtcttcaacattggcacagttgacatctccatcaaagaggagagaacccctgtaaatgacggcaaataccatgtggtacgcttcaccaggaacggcggcaacgccaccctgcaggtggacaactggccagtgaatgaacattatcctacaggccggcagttaaccatcttcaacactcaggcgcaaatagccattggtggaaaggacaaaggacgcctcttccaaggccaactctctgggctctattatgatggtttgaaagtactgaacatggcggctgagaacaaccccaatattaaaatcaatggaagtgttcggctggttggagaagtcccatcaattttgggaacaacacagacgacctccatgccaccagaaatgtctactactgtcatggaaaccactactacaatggcgactaccacaacccgtaagaatcgctctacagccagcattcagccaacatcagatgatcttgtttcatctgctgaatgttcaagtgatgatgaagactttgttgaatgtgagccgagtacagcaaaccccacggagccgggaatcagacgggttccgggggcctcagaggtgatccgggagtcgagcagcacaacagggatggtcgtcggcattgtggctgctgccgccctctgcatcttgatcctcctgtacgccatgtacaagtacaggaacagggacgaggggtcctatcaagtggacgagacgcggaactacatcagcaactccgcccagagcaacggcacgctcatgaaggagaagcagcagagctcgaagagcggccacaagaaacagaaaaacaaggacagggagtattacgtgtaa

SEQ ID NO: 332911 - DNA, 4156 bp, Artificial Sequence
  derived and/or modified sequence
caggactggagggcttgaggaatgtggtggtccctctcttcgttgtttctgccccctgaggttgtgctttctcagggatatgcactctgcacttccattcctgcagtgaaattaactcgagcttggcagctcgagaggagaatgtggccactttccgaggctcagagtatctgtgctacgacctgtctcagaacccgatccagagcagcagtgatgaaatcaccctctcctttaagacctggcagcgtaacggcctcatcctgcacacgggcaagtcggctgactatgtcaacctggctctgaaggatggtgcggtctccttggtcattaacctggggtccggggcctttgaggccattgtggagccagtgaatggaaaattcaacgacaacgcctggcatgatgtcaaagtgacacgcaacctccggcaggtgacaatctctgtggatggcattcttaccacgacgggctacactcaagaggactataccatgctgggctcggacgacttcttctatgtaggaggaagcccaagtaccgctgacttgcctggctcccctgtcagcaacaacttcatgggctgccttaaagaggttgtttataagaataatgacatccgtctggagctgtctcgcctggcccggattgcggacaccaagatgaaaatctatggcgaagttgtgtttaagtgtgagaatgtggccacactggaccccatcaactttgagaccccagaggcttacatcagcttgcccaagtggaacactaaacgtatgggctccatctcctttgacttccgcaccacagagcccaatggcctgatcctcttcactcatggaaagccccaagagaggaaggatgctcggagccagaagaatacaaaagtagacttctttgccgtggaactcctcgatggcaacctgtacttgctgcttgacatgggctctggcaccatcaaagtgaaagccactcagaagaaagccaatgatggggaatggtaccatgtggacattcagcgagatggcagatcaggtactatatcagtgaacagcaggcgcacgccattcaccgccagtggggagagcgagatcctggacctggaaggagacatgtacctgggagggctgccggagaaccgtgctggccttattctccccaccgagctgtggactgccatgctcaactatggctacgtgggctgcatccgcgacctattcattgatgggcgcagcaagaacattcgacagctggcagagatgcagaatgctgcgggtgtcaagtcctcctgttcacggatgagtgccaagcagtgtgacagctacccctgcaagaataatgctgtgtgcaaggacggctggaaccgcttcatctgcgactgcaccggcaccggatactggggaagaacctgcgaaagggaggcatccatcctgagctatgatggtagcatgtacatgaagatcatcatgcccatggtcatgcatactgaggcagaggatgtgtccttccgcttcatgtcccagcgagcttatgggctgctggtggctacgacctccagggactctgccgacaccctgcgtctggagctggatggggggcgtgtcaagctcatggttaacttagactgtatcaggataaactgtaactccagcaaaggaccagagaccttgtatgcagggcagaagctcaatgacaacgagtggcacaccgttcgggtggtgcggagaggaaaaagccttaagttaaccgtggatgatgatgtggctgagggtacaatggtgggagaccatacccgtttggagttccacaacattgaaacgggaatcatgactgagaaacgctacatctccgttgtcccctccagctttattggccatctgcagagcctcatgtttaatggccttctctacattgacttgtgcaaaaatggtgacattgattattgtgagctgaaggctcgttttggactgaggaacatcatcgctgaccctgtcacctttaagaccaagagcagctacctgagccttgccactcttcaggcttacacctccatgcacctcttcttccagttcaagaccacctcaccagatggcttcattctcttcaatagtggtgatggcaatgacttcattgcagtcgagcttgtcaaggggtatatacactacgtttttgacctcggaaacggtcccaatgtgatcaaaggcaacagtgaccgccccctgaatgacaaccagtggcacaatgtcgtcatcactcgggacaatagtaacactcatagcctgaaagtggacaccaaagtggtcactcaggttatcaatggtgccaaaaatctggatttgaaaggtgatctctatatggctggtctggcccaaggcatgtacagcaacctcccaaagctcgtggcctctcgagatggctttcagggctgtctagcatcagtggacttgaatggacgcctgccagacctcatcaatgatgctcttcatcggagcggacagatcgagcgtggctgtgaaggacccagtaccacctgccaggaagattcatgtgccaaccagggggtctgcatgcaacaatgggagggcttcacctgtgattgttctatgacctcttattctggaaaccagtgcaatgatcctggcgctacgtacatctttgggaaaagtggtgggcttatcctctacacctggccagccaatgacaggcccagcacgcggtctgaccgccttgccgtgggcttcagcaccactgtgaaggatggcatcttggtccgcatcgacagtgctccaggacttggtgacttcctccagcttcacatagaacaggggaaaattggagttgtcttcaacattggcacagttgacatctccatcaaagaggagagaacccctgtaaatgacggcaaataccatgtggtacgcttcaccaggaacggcggcaacgccaccctgcaggtggacaactggccagtgaatgaacattatcctacaggccggcagttaaccatcttcaacactcaggcgcaaatagccattggtggaaaggacaaaggacgcctcttccaaggccaactctctgggctctattatgatggtttgaaagtactgaacatggcggctgagaacaaccccaatattaaaatcaatggaagtgttcggctggttggagaagtcccatcaattttgggaacaacacagacgacctccatgccaccagaaatgtctactactgtcatggaaaccactactacaatggcgactaccacaacccgtaagaatcgctctacagccagcattcagccaacatcagatgatcttgtttcatctgctgaatgttcaagtgatgatgaagactttgttgaatgtgagccgagtacagcaaaccccacggagccgggaatcagacgggttccgggggcctcagaggtgatccgggagtcgagcagcacaacagggatggtcgtcggcattgtggctgctgccgccctctgcatcttgatcctcctgtacgccatgtacaagtacaggaacagggacgaggggtcctatcaagtggacgagacgcggaactacatcagcaactccgcccagagcaacggcacgctcatgaaggagaagcagcagagctcgaagagcggccacaagaaacagaaaaacaaggacagggagtattacgtgtaaacatgcgaacactgctcacacgcgagttttcacagttatttctatccacgcctatgaatctttggacggtgagatctcacagatgtcagaactgctggaactatgaaatggggtatataaccacgactctggtggggaaaaccgttttttaaaggacacacacacacacagcgatgcatctctctctaaagctcagccacggctgcggcaaggtcccagcggtcgctgggagacagaaggttttgtgccctgctgtatcataaagcacacacttagcgctctggagccggacggtggctccaccacttccgcaggcctggaaacttccttctccggaggaccttttactaaaaggtagaagacttcatggcttacttgttccataactccaagtgagtctgtaatgtttgtgaagcttgactgtaaccatgttttttctgtttaattatgtaaaaaacaaaactacaacaacaaaaaaa

SEQ ID NO: 332912 - protein, 1392 aa, Artificial Sequence
  derived and/or modified sequence
MSSTLHSVFFTLKVSILLGSLLGLCLGLEFMGLPNQWARYLRWDASTRSDLSFQFKTNVSTGLLLYLDDGGVCDFLCLSLVDGRVQLRFSMDCAETAVLSNKQVNDSSWHFLMVSRDRLRTVLMLDGEGQSGELQPQRPYMDVVSDLFLGGVPTDIRPSALTLDGVQAMPGFKGLILDLKYGNSEPRLLGSRGVQMDAEGPCGERPCENGGICFLLDGHPTCDCSTTGYGGKLCSEGLSHLMMSEQGRWKAREENVATFRGSEYLCYDLSQNPIQSSSDEITLSFKTWQRNGLILHTGKSADYVNLALKDGAVSLVINLGSGAFEAIVEPVNGKFNDNAWHDVKVTRNLRQVTISVDGILTTTGYTQEDYTMLGSDDFFYVGGSPSTADLPGSPVSNNFMGCLKEVVYKNNDIRLELSRLARIADTKMKIYGEVVFKCENVATLDPINFETPEAYISLPKWNTKRMGSISFDFRTTEPNGLILFTHGKPQERKDARSQKNTKVDFFAVELLDGNLYLLLDMGSGTIKVKATQKKANDGEWYHVDIQRDGRSGTISVNSRRTPFTASGESEILDLEGDMYLGGLPENRAGLILPTELWTAMLNYGYVGCIRDLFIDGRSKNIRQLAEMQNAAGVKSSCSRMSAKQCDSYPCKNNAVCKDGWNRFICDCTGTGYWGRTCEREASILSYDGSMYMKIIMPMVMHTEAEDVSFRFMSQRAYGLLVATTSRDSADTLRLELDGGRVKLMVNLGKGPETLYAGQKLNDNEWHTVRVVRRGKSLKLTVDDDVAEGTMVGDHTRLEFHNIETGIMTEKRYISVVPSSFIGHLQSLMFNGLLYIDLCKNGDIDYCELKARFGLRNIIADPVTFKTKSSYLSLATLQAYTSMHLFFQFKTTSPDGFILFNSGDGNDFIAVELVKGYIHYVFDLGNGPNVIKGNSDRPLNDNQWHNVVITRDNSNTHSLKVDTKVVTQVINGAKNLDLKGDLYMAGLAQGMYSNLPKLVASRDGFQGCLASVDLNGRLPDLINDALHRSGQIERGCEGPSTTCQEDSCANQGVCMQQWEGFTCDCSMTSYSGNQCNDPGATYIFGKSGGLILYTWPANDRPSTRSDRLAVGFSTTVKDGILVRIDSAPGLGDFLQLHIEQGKIGVVFNIGTVDISIKEERTPVNDGKYHVVRFTRNGGNATLQVDNWPVNEHYPTGNTDNERFQMVKQKIPFKYNRPVEEWLQEKGRQLTIFNTQAQIAIGGKDKGRLFQGQLSGLYYDGLKVLNMAAENNPNIKINGSVRLVGEVPSILGTTQTTSMPPEMSTTVMETTTTMATTTTRKNRSTASIQPTSDDLVSSAECSSDDEDFVECEPSTGRSARSSNAARSLRAALTWTWRLTYTFTPIIFISCVVHS

SEQ ID NO: 332913 - DNA, 4179 bp, Artificial Sequence
  derived and/or modified sequence
atgagttctacactgcattccgtcttcttcaccctcaaagtgtctattctgcttgggtccttgcttggactgtgcttgggcctcgaattcatgggcttaccaaaccagtgggctaggtatctgagatgggatgcctccacacggagcgatctgtccttccagtttaagaccaatgttagtacaggcttacttctctacttggatgatggcggcgtctgtgacttcttatgccttagtctcgtggacggacgcgtgcagcttcgattctcaatggattgtgctgaaactgccgtactgtccaacaagcaagtcaatgatagctcttggcacttcctaatggtcagtcgagataggctgcgcacagtgctaatgttagatggagaaggtcagtctggggagctccaacctcaacgcccttatatggacgtagtgtccgatttgttcctcggcggtgttcctacagatattcgcccctccgcactcacactcgacggagtgcaggcaatgccaggctttaagggcctcattttggatctgaaatatgggaattccgagcccaggctactgggttctagaggagtccaaatggacgccgagggcccttgcggcgagagaccctgcgagaacggcggtatctgcttcttgctcgacggccacccgacctgcgattgttcgacgactgggtacggcgggaaattgtgctccgagggtctgtcccatttgatgatgtcggagcaggggaggtggaaggctcgtgaagagaatgtcgcgacttttcgcggttccgaatatctgtgttatgacctgtcccagaacccaatacagtccagttctgatgagatcacattgagtttcaagacctggcagagaaacggccttattttgcatacaggaaaaagcgctgactacgttaatttagccttaaaagacggagccgtttccttagtcataaatctgggatctggagcttttgaggctattgtggagcccgtgaatggcaaatttaacgacaatgcatggcatgacgtaaaagtaactcggaacttgcgacaagttaccatttccgtcgacggtatcttgacaacaaccggctacacgcaagaagattatacgatgctgggtagtgacgacttcttctacgtaggtggctctccatccaccgcagatctccctggctcccccgtctccaacaactttatgggttgtttgaaggaggtcgtgtataagaacaatgatataaggctggaattaagccgactcgctcgaatcgcggatacaaagatgaaaatctacggagaggtggtcttcaaatgtgagaacgttgcgacccttgatcccatcaattttgaaacccccgaggcatatatctctctgcccaaatggaacacgaaacgtatgggttctatctcttttgactttcgcacgactgagccaaacggcctaattctcttcactcatggcaaaccccaggagcgtaaggacgcccggtcccagaagaacacaaaagttgatttttttgcggtggaactgcttgatggcaacttgtatctgttgctcgacatgggctccggcacgatcaaggtgaaggcaacccagaaaaaggccaatgacggagaatggtatcacgtcgatattcaaagggatggccgcagcggtaccatcagcgtgaattcgaggcggactccctttacagcaagcggcgagagcgaaattctcgaccttgagggggatatgtacctgggtgggctgccagaaaacagggcagggctgattctaccaaccgagttgtggaccgcaatgctcaactatggctacgtaggctgcattagagatcttttcatagacggccgttctaagaatattaggcaacttgcagaaatgcagaacgccgcaggggtgaagagttcatgttccaggatgagcgccaaacagtgtgactcatatccgtgcaagaataatgccgtgtgcaaggacggctggaatagatttatctgcgactgtacaggtacaggctactgggggagaacatgcgaacgcgaggcgtctatccttagttatgacggctccatgtatatgaagatcattatgcccatggtgatgcacaccgaagccgaagatgtgtcttttagattcatgagccaaagagcctacgggctgctggtagcaacaacttccagggactcagccgataccctgcgtctggagctagacggcggacgcgtgaaactgatggtgaaccttggtaaagggcccgaaaccctgtacgccggacagaagctgaacgacaatgaatggcacactgttagggtggtccggcgggggaagagtctgaagctgacagtggacgatgacgtggctgaaggcacgatggtgggagatcatacacgcttggagttccataacattgaaactgggattatgactgaaaagcggtatatctctgttgtacccagctcctttattggtcacctgcagagcctgatgttcaacgggctgctgtacattgacctctgcaagaacggcgatattgactactgcgagctcaaggcaagattcggtctgcgtaatatcatcgctgatcctgtgacctttaaaactaaatcttcctatctgtccctggctaccctgcaggcttacacctccatgcatctgttctttcagtttaagacaacctcaccagatggatttattttatttaacagcggcgacggaaatgatttcatagcagtggagctggtgaagggctatatccattatgtctttgacctgggcaacggccctaacgtgatcaaaggcaatagcgatcgccccctgaacgataaccaatggcataacgtggtcataactcgtgataactccaatacacacagtctcaaggtagatacaaaagtagtaacacaggttattaacggcgccaaaaatctggacctgaaaggcgacctctacatggcaggattggcccagggcatgtacagtaatttgccaaaactggtagcaagcagagacggattccagggctgcctcgcctcagtggatctgaatggacggcttccagatttgataaacgatgctttgcacaggtctgggcagatcgagagagggtgcgagggaccatcaactacatgccaagaggacagttgtgccaaccagggcgtgtgcatgcagcagtgggaaggctttacttgcgactgttccatgacaagctatagtggcaatcagtgtaacgaccccggagctacatacatattcggaaagtccgggggtttgatcctgtatacatggcctgcaaacgatcggccttccacaagatctgatcgcctagctgtgggattctctacaaccgtgaaagatggcatattggtgcgcatcgacagtgcacccggcctcggagacttcctccagctgcacattgagcagggtaagattggggtggtttttaatatcgggacagtcgacatcagtattaaggaggagcgaactccagtgaacgatggcaaataccatgtcgtgcgcttcacacgtaacgggggtaatgctactctgcaggtcgataactggcccgtgaatgagcattatcccaccgggaatactgataacgagcggttccagatggtgaagcaaaagatcccattcaagtataaccgccccgtggaagagtggttgcaagagaaaggacgccagctgaccattttcaacactcaagcacaaattgccattggtggcaaagacaagggaagattgttccagggccagctgagtggactgtattacgacggtctcaaagtgttaaatatggccgctgagaataaccccaacataaagatcaacggttctgtgcgactggtcggcgaagttccctctatccttggaaccacccagacaacctctatgccacctgaaatgtccactacagtaatggaaaccaccaccacaatggccacaacaactacaagaaagaaccgtagcactgcgtccatccaaccgacttctgatgatctcgtaagcagcgcagagtgctcttctgacgatgaagacttcgtggaatgtgaaccatctactggacgaagcgccaggtccagcaacgcagcccgatctctacgagcagcactcacgtggacctggcgtctcacatacacttttacacccatcatatttatctcctgtgtcgtccattcatag

SEQ ID NO: 332914 - DNA, 4179 bp, Artificial Sequence
  derived and/or modified sequence
atgagcagcaccctgcacagcgtcttcttcaccctgaaggtgtccatcctgctgggcagcctgctgggcctgtgcctgggcctggagttcatgggcctgcccaaccagtgggcccgctacctgcgctgggatgccagcaccaggagtgacctgtccttccagttcaagaccaacgtgtccacaggcctgctgctgtacctggatgatggaggagtgtgtgacttcctgtgcctgagcctggtggatggccgggtgcagctgcgcttctccatggactgtgccgagacagctgtgctgagcaacaagcaggtgaatgacagctcctggcacttcctgatggtgtcccgggaccggctgaggacagtgctgatgctggatggagagggccagagcggggagctgcagccccagaggccctacatggatgtggtgtctgacctcttcctgggcggcgtgcccacagacatccggcccagcgccctgaccctggatggagtgcaggccatgcctggcttcaagggcctcatcctggacctgaagtatggcaacagcgagccccggctgctgggcagcagaggagtgcagatggatgctgagggcccctgtggggagcggccctgtgaaaatggaggcatctgcttcctgctggatggccaccccacctgtgactgcagcaccaccggctatggaggcaagctgtgcagcgagggcctgagccacctgatgatgtctgagcagggccgctggaaggcccgggaggagaatgtggccaccttccggggcagcgagtacctgtgctatgacctgagccagaaccccatccagagcagcagtgatgagatcaccctgtccttcaagacctggcagagaaatggcctcatcctgcacacaggcaagtctgctgactatgtgaacctggccctgaaggatggagctgtgtccctggtgatcaacctgggcagcggggcctttgaggccatcgtggagcctgtgaatggcaagttcaatgacaatgcctggcatgatgtgaaggtgaccaggaacctgcggcaggtgaccatctctgtggatggcatcctgaccaccaccggctacacccaggaggactacaccatgctgggcagtgatgacttcttctacgtgggcggcagccccagcacagctgacctgcccggcagccctgtgagcaacaacttcatgggctgcctgaaggaggtggtgtacaagaacaatgacatccggctggagctgagccggctggccagaattgctgacaccaagatgaagatctatggagaggtggtgttcaagtgtgaaaatgtggccaccctggaccccatcaactttgagaccccagaggcctacatcagcctgcccaagtggaacaccaagaggatgggcagcatcagctttgacttccgcaccacagagcccaacggcctcatcctcttcacccacggcaagccccaggagaggaaggatgcccggagccagaagaacaccaaggtggacttctttgctgtggagctgctggatggcaacctgtacctgctgctggacatgggcagcggcaccatcaaggtgaaggccacccagaagaaggccaatgatggagagtggtaccacgtggacatccagagagatggccgcagcggcaccatctctgtgaacagcaggaggacccccttcaccgccagcggggagagcgagatcctggacctggagggggacatgtacctgggcggcctgcctgaaaatagagctggcctcatcctgcccacagagctgtggacagccatgctgaactacggctacgtgggctgcatccgggacctcttcattgatggccgcagcaagaacatccggcagctggccgagatgcagaatgctgctggggtgaagagcagctgcagcaggatgtctgccaagcagtgtgacagctacccctgcaagaacaatgctgtgtgcaaggatggctggaaccgcttcatctgtgactgcaccggcaccggctactggggccgcacctgtgagcgggaggccagcatcctgtcctatgatggctccatgtacatgaagatcatcatgcccatggtgatgcacacagaagcagaagatgtgtccttccgcttcatgagccagagggcctacggcctgctggtggccaccaccagccgggacagcgctgacaccctgcggctggagctggatggcggccgggtgaagctgatggtgaacctgggcaaaggacctgagaccctgtatgccggccagaagctgaatgacaatgagtggcacacagtgcgggtggtgcggcggggcaagagcctgaagctgactgtggatgatgatgtggccgagggcaccatggtgggggaccacacccggctggagttccacaacatcgagaccggcatcatgacagagaagcgctacatctctgtggtgcccagcagcttcatcggccacctgcagagcctgatgttcaacggcctgctgtacatcgacctgtgcaagaatggagacatcgactactgtgagctgaaggcccgcttcggcctgaggaacatcatcgctgaccctgtgaccttcaagaccaagagcagctacctgagcctggccaccctgcaggcctacacctccatgcacctgttcttccagttcaagaccaccagcccagatggcttcatcctcttcaacagcggagatggaaatgacttcatcgctgtggagctggtgaagggctacatccactacgtgtttgacctgggcaatggccccaacgtcatcaagggcaacagcgaccggcccctgaatgacaaccagtggcacaacgtggtgatcacccgggacaacagcaacacccacagcctgaaggtggacaccaaggtggtgacccaggtgatcaacggggccaagaacctggacctgaagggggacctgtacatggccggcctggcccagggcatgtacagcaacctgcccaagctggtggccagcagagatggcttccagggctgcctggcctctgtggacctgaatggccgcctgcctgacctgatcaatgatgccctgcacaggagcggccagatcgagcggggctgtgagggccccagcaccacctgccaggaggacagctgtgccaaccagggcgtgtgcatgcagcagtgggagggcttcacctgtgactgcagcatgaccagctacagcggcaaccagtgcaatgaccccggggccacctacatctttgggaagagcggcggcctcatcctgtacacctggccagccaatgaccggcccagcaccaggagtgaccggctggccgtgggcttcagcaccaccgtgaaggatggcatcctggtgagaattgattctgcccctggcctgggggacttcctgcagctgcacatcgagcagggcaagattggagtggtgttcaacatcggcaccgtggacatcagcatcaaggaggagaggacccctgtgaatgatggcaagtaccacgtggtgcgcttcaccagaaatggaggaaatgccaccctgcaggtggacaactggcctgtgaatgagcactaccccaccggcaacacagacaatgaacgcttccagatggtgaagcagaagatccccttcaagtacaacagacctgtggaggagtggctgcaggagaagggccggcagctgaccatcttcaacacccaggcccagatcgccatcggcggcaaggacaagggccgcctcttccagggccagctgagcggcctgtactatgatggcctgaaggtgctgaacatggctgctgagaacaaccccaacatcaagatcaatggatctgtgcggctggtgggggaggtgcccagcatcctgggcaccacccagaccacctccatgcctcctgagatgagcaccaccgtgatggagaccaccaccaccatggccaccaccaccaccaggaagaacagaagcacagccagcatccagcccaccagtgatgacctggtgagcagcgctgagtgcagcagtgatgatgaggactttgtggagtgtgagcccagcacaggccgcagcgcccggagcagcaatgctgcccggagcctgcgggccgccctgacctggacctggaggctgacctacaccttcacccccatcatcttcatcagctgtgtggtgcacagctag

SEQ ID NO: 332915 - DNA, 4179 bp, Artificial Sequence
  derived and/or modified sequence
atgagcagcaccctgcacagcgtgttcttcaccctgaaggtgagcatcctactcgggtcccttcttggcctctgcctcgggctggaattcatgggcctccccaaccagtgggcccgctatctccgatgggacgcctcgacccgctccgatctctcattccagttcaaaaccaacgtgagtactggcttgctgttgtaccttgatgacgggggggtgtgtgattttctgtgtctgagcctggtggacgggcgcgttcaactccgattttccatggattgtgccgagaccgcagtgctgagtaacaagcaggtgaatgatagcagctggcatttcttgatggtgagtcgagaccgcctgaggacggtattaatgcttgacggcgaaggccagtccggcgaactgcagccccagcggccttatatggacgtagtttcagacctgttcctcggcggcgtccctaccgatatccggccttctgccctgactctggacggggtgcaggcaatgccaggattcaaaggcctaattctggacctgaagtacggaaacagcgagccccggttactgggtagccggggcgtgcaaatggacgccgaaggcccctgcggtgagaggccttgtgagaatgggggcatctgtttccttcttgatggacatcccacgtgtgattgcagcacaactggatatggtggtaaattgtgcagtgaaggtcttagtcatttaatgatgtccgagcagggccgctggaaggcgagagaagagaacgtggccacttttcgcggtagtgaatacctttgttacgatcttagccaaaatcccatccagtcctcttcagatgagatcaccctctcgtttaaaacttggcagagaaatggccttattctccataccggaaagagcgctgattacgtaaacttagcactgaaagacggcgccgtctccttggttataaacctcggctccggggcttttgaagctatcgtggagccggttaacggaaagtttaatgacaacgcgtggcacgacgtcaaggtgaccaggaacctgcggcaggtaacaatctccgtggacggaattctgacaaccaccgggtatacccaggaagattataccatgctagggtctgacgattttttctacgtcggaggcagcccctctacggccgatttgccaggctctcctgtttccaataattttatgggttgcctgaaggaggttgtgtataagaataacgatatccgcctggagctgagccgactggctagaatcgccgacacgaaaatgaagatctacggagaggtggtcttcaaatgtgagaacgttgccacgcttgacccgattaacttcgaaactcctgaggcgtatatatcactccctaagtggaataccaaacgcatgggcagcatctccttcgacttccgtacaactgagcctaatgggctcatcctctttacccatggcaagccgcaggagcgaaaggacgcacgtagccagaagaacacgaaagttgacttctttgctgttgagttgttggatggaaatctttatctgttactagacatgggctctggtacgatcaaagtgaaggctacccaaaaaaaggctaatgatggagaatggtaccacgtggacatccagcgggatggcagatctggcactattagtgtaaactctagaaggactccttttactgccagtggggaatcggagattctggacctggagggtgacatgtatctagggggactacccgagaatcgggcaggcttgatactgcccaccgaactgtggacagctatgctgaattatgggtacgtcggatgcatccgagatctattcatcgacgggcgcagcaagaacataaggcagcttgctgagatgcagaacgcagccggtgtaaaaagcagctgcagtaggatgtccgctaaacagtgtgactcttacccctgtaagaacaacgctgtctgcaaagatggctggaaccgatttatctgtgattgcacgggtactggctattgggggagaacctgtgagcgcgaggcctccatactatcttacgacgggtccatgtatatgaaaatcatcatgccaatggtgatgcatacagaagccgaggacgtatcattcaggttcatgagccagcgcgcatacggtcttttggtcgcaactacctctcgcgacagtgccgacactctgagactggaactggacggaggcagagtcaaactgatggtaaacctgggcaagggccctgagaccctgtatgctggtcagaagttaaacgataatgaatggcataccgttagggttgttaggagaggcaaatccctgaaacttaccgtggacgacgatgtggctgagggcactatggtcggagatcacaccaggttggaatttcacaacattgagaccgggattatgactgaaaagagatatatttcggtggtaccaagcagctttatcggccatctgcagtctctgatgttcaatggactgctatacattgacttgtgtaaaaatggagacatagattactgtgagctgaaggctcgctttggcctgaggaatatcattgcagatcccgtgactttcaaaacaaagtcgtcctacctttccctcgcaacattgcaggcctacaccagcatgcaccttttttttcaattcaagacaacctcacctgatgggtttatcctgtttaattctggggatgggaatgactttattgccgtcgagctcgtgaaggggtacattcattacgtgtttgatttaggcaatggacctaatgttattaagggaaacagcgatcgacctttaaacgacaaccaatggcacaatgtggtaatcacgcgtgataacagtaacacacatagcttgaaagtggatacgaaagtagtgacccaagtgatcaatggagccaaaaacctggacttgaagggggatctgtatatggcaggattggcccagggaatgtactcaaatttacccaaacttgtggcatcccgcgatgggtttcaggggtgcctggcaagcgtggacttgaatggaagactgcccgatctcataaacgacgcccttcatcggtccggtcaaatagaacgaggttgcgagggcccctcaacaacttgtcaggaagactcctgtgctaatcagggtgtttgcatgcagcagtgggaggggtttacttgcgattgctctatgactagctattcaggcaaccagtgcaatgatcccggcgccacatacatttttgggaaatctggaggtctcatcttgtatacgtggcccgcgaacgatcgaccctccactcgatctgaccgcttggccgttggcttttccaccacagtcaaagacggaattcttgtaaggattgacagcgccccaggcctgggcgatttccttcagttgcacatagagcagggaaaaatcggcgtggtattcaatattgggactgtggacatctctatcaaagaagagaggactcccgtcaatgatggcaagtatcatgtagtaaggtttactcgcaacgggggcaatgccaccctgcaggtggacaattggccagttaatgagcattaccccactgggaataccgacaacgagagatttcagatggtcaaacagaagatcccattcaagtataaccggcccgtcgaagagtggcttcaggagaaaggccgacagttgacaatcttcaatactcaagcacaaatagctatcggtggaaaggacaaaggacgattattccaagggcaactgtccggactctactatgatggcctcaaagtccttaacatggccgcggaaaacaacccgaacatcaaaatcaatggctctgtgcgcctagtgggggaggttccttctatattgggaacaacacagaccaccagtatgcctccagagatgagcactacagtgatggagacgacgacaaccatggccaccactacgacccgaaaaaaccggtctaccgcaagcatccagcccacctcagacgacctagtttcttccgcggagtgttcctctgatgacgaggactttgtcgaatgtgagccatctacgggtcgatccgcccgttccagcaatgccgccagatccttgcgagccgctctaacctggacatggcggctcacgtacactttcactccaattatcttcatctcctgtgtggtgcactcttag

SEQ ID NO: 332916 - DNA, 4179 bp, Artificial Sequence
  derived and/or modified sequence
atgagctccacactccactcggttttcttcaccctgaaggtcagcatcctgctggggtccctgctggggctctgcctgggccttgagttcatgggcctccccaaccagtgggcccgctacctccgctgggatgccagcacacgcagtgacctgagtttccagttcaagaccaacgtctctacggggctgctcctctacctggatgatggcggcgtctgcgacttcctatgcctctccctggtggatggccgcgttcagctccgcttcagcatggactgtgccgagactgccgtgctgtccaacaagcaggtgaatgacagcagctggcacttcctcatggtgagccgtgaccgcctgcgcacggtgctgatgcttgatggcgagggccagtctggggagctgcagccccagcggccctacatggatgtggtcagtgacttgttccttggtggagtccctactgacatacgaccttctgccctgacccttgatggagttcaggccatgcccggcttcaaggggttaattctggatctcaagtatggaaactcggagcctcggcttctggggagccggggtgtccagatggatgccgagggaccctgtggtgagcgtccctgtgaaaatggtgggatctgctttctcctggacggccaccccacctgtgactgttctaccactggctatggtggcaagctctgctcagaaggcctctcccacctcatgatgagtgaacaaggtaggtggaaagctcgagaggagaatgtggccactttccgaggctcagagtatctgtgctacgacctgtctcagaacccgatccagagcagcagtgatgaaatcaccctctcctttaagacctggcagcgtaacggcctcatcctgcacacgggcaagtcggctgactatgtcaacctggctctgaaggatggtgcggtctccttggtcattaacctggggtccggggcctttgaggccattgtggagccagtgaatggaaaattcaacgacaacgcctggcatgatgtcaaagtgacacgcaacctccggcaggtgacaatctctgtggatggcattcttaccacgacgggctacactcaagaggactataccatgctgggctcggacgacttcttctatgtaggaggaagcccaagtaccgctgacttgcctggctcccctgtcagcaacaacttcatgggctgccttaaagaggttgtttataagaataatgacatccgtctggagctgtctcgcctggcccggattgcggacaccaagatgaaaatctatggcgaagttgtgtttaagtgtgagaatgtggccacactggaccccatcaactttgagaccccagaggcttacatcagcttgcccaagtggaacactaaacgtatgggctccatctcctttgacttccgcaccacagagcccaatggcctgatcctcttcactcatggaaagccccaagagaggaaggatgctcggagccagaagaatacaaaagtagacttctttgccgtggaactcctcgatggcaacctgtacttgctgcttgacatgggctctggcaccatcaaagtgaaagccactcagaagaaagccaatgatggggaatggtaccatgtggacattcagcgagatggcagatcaggtactatatcagtgaacagcaggcgcacgccattcaccgccagtggggagagcgagatcctggacctggaaggagacatgtacctgggagggctgccggagaaccgtgctggccttattctccccaccgagctgtggactgccatgctcaactatggctacgtgggctgcatccgcgacctattcattgatgggcgcagcaagaacattcgacagctggcagagatgcagaatgctgcgggtgtcaagtcctcctgttcacggatgagtgccaagcagtgtgacagctacccctgcaagaataatgctgtgtgcaaggacggctggaaccgcttcatctgcgactgcaccggcaccggatactggggaagaacctgcgaaagggaggcatccatcctgagctatgatggtagcatgtacatgaagatcatcatgcccatggtcatgcatactgaggcagaggatgtgtccttccgcttcatgtcccagcgagcttatgggctgctggtggctacgacctccagggactctgccgacaccctgcgtctggagctggatggggggcgtgtcaagctcatggttaacttaggcaaaggaccagagaccttgtatgcagggcagaagctcaatgacaacgagtggcacaccgttcgggtggtgcggagaggaaaaagccttaagttaaccgtggatgatgatgtggctgagggtacaatggtgggagaccatacccgtttggagttccacaacattgaaacgggaatcatgactgagaaacgctacatctccgttgtcccctccagctttattggccatctgcagagcctcatgtttaatggccttctctacattgacttgtgcaaaaatggtgacattgattattgtgagctgaaggctcgttttggactgaggaacatcatcgctgaccctgtcacctttaagaccaagagcagctacctgagccttgccactcttcaggcttacacctccatgcacctcttcttccagttcaagaccacctcaccagatggcttcattctcttcaatagtggtgatggcaatgacttcattgcagtcgagcttgtcaaggggtatatacactacgtttttgacctcggaaacggtcccaatgtgatcaaaggcaacagtgaccgccccctgaatgacaaccagtggcacaatgtcgtcatcactcgggacaatagtaacactcatagcctgaaagtggacaccaaagtggtcactcaggttatcaatggtgccaaaaatctggatttgaaaggtgatctctatatggctggtctggcccaaggcatgtacagcaacctcccaaagctcgtggcctctcgagatggctttcagggctgtctagcatcagtggacttgaatggacgcctgccagacctcatcaatgatgctcttcatcggagcggacagatcgagcgtggctgtgaaggacccagtaccacctgccaggaagattcatgtgccaaccagggggtctgcatgcaacaatgggagggcttcacctgtgattgttctatgacctcttattctggaaaccagtgcaatgatcctggcgctacgtacatctttgggaaaagtggtgggcttatcctctacacctggccagccaatgacaggcccagcacgcggtctgaccgccttgccgtgggcttcagcaccactgtgaaggatggcatcttggtccgcatcgacagtgctccaggacttggtgacttcctccagcttcacatagaacaggggaaaattggagttgtcttcaacattggcacagttgacatctccatcaaagaggagagaacccctgtaaatgacggcaaataccatgtggtacgcttcaccaggaacggcggcaacgccaccctgcaggtggacaactggccagtgaatgaacattatcctacaggcaacactgataatgaacgcttccaaatggtaaaacagaaaatccccttcaaatataatcggcctgtagaggagtggctgcaggaaaaaggccggcagttaaccatcttcaacactcaggcgcaaatagccattggtggaaaggacaaaggacgcctcttccaaggccaactctctgggctctattatgatggtttgaaagtactgaacatggcggctgagaacaaccccaatattaaaatcaatggaagtgttcggctggttggagaagtcccatcaattttgggaacaacacagacgacctccatgccaccagaaatgtctactactgtcatggaaaccactactacaatggcgactaccacaacccgtaagaatcgctctacagccagcattcagccaacatcagatgatcttgtttcatctgctgaatgttcaagtgatgatgaagactttgttgaatgtgagccgagtacaggtaggtcagccagaagctctaatgcagctagatcactccgtgccgcccttacatggacatggcgactcacttacacatttactcctatcatcttcatctcctgtgtagttcactcatag

SEQ ID NO: 332917 - DNA, 4179 bp, Artificial Sequence
  derived and/or modified sequence
atgtcatctacattgcactccgtattctttacacttaaagtaagtatcctgctgggcagtctgttaggcctgtgtcttggactcgaatttatgggactccctaatcagtgggctaggtacctgcggtgggacgcgtcgactaggagtgacctttcctttcagtttaagaccaatgtatccacagggctcctgctgtacttggatgatgggggtgtttgcgattttctgtgcctgtccttggtggacggcagggtgcaattgaggttctccatggattgcgccgaaaccgcagtgctgagtaacaagcaagtaaatgattccagctggcattttttgatggtgagccgggaccggctgaggaccgtgttgatgctcgatggcgaaggccagagcggggagctgcagcctcagagaccatatatggatgtggtatctgacctgttcctgggtggcgtccctacagacatccggccttccgccctcaccctggacggagtacaggctatgcctggttttaagggtttgatactcgatctgaagtacggaaatagtgagcccaggctgctcggcagcaggggcgttcagatggatgctgaggggccttgcggggagcgcccatgtgagaacgggggaatttgctttcttttagatggccatccaacgtgcgattgtagcaccaccggatacgggggaaagctctgctctgagggactgagccatctgatgatgagtgagcagggtcgctggaaggctcgtgaggagaacgtagccacctttcgaggctcagagtacctgtgttacgatctaagccagaatcctattcagagctccagcgacgagataactctatcgttcaagacctggcagagaaatggcctcatcctgcataccggtaagagtgccgactacgtgaaccttgctctcaaagacggtgctgtttcgcttgtgatcaacctcggctctggtgccttcgaggccatcgtcgagccggtgaatgggaaatttaacgataatgcgtggcatgacgtgaaggtcacgagaaaccttcgtcaagttaccatctcggtggacggaatcctgaccactacaggctacacgcaggaggactatacaatgcttggttcagacgacttcttttatgtgggcggttccccttctaccgcagatctcccagggtctccagtcagtaacaacttcatgggatgtctcaaggaagtcgtgtacaagaacaatgatatacgtctggagctgtccagactggcccgtatagcggacaccaagatgaaaatctacggcgaggtagtcttcaagtgcgagaatgtcgccacgctcgacccgataaactttgagacgcctgaagcgtacatcagcttgcctaagtggaacactaaaaggatgggcagtatctcctttgacttccgcacaacagaacctaacgggctgatactttttacgcacggtaagccacaagaacgcaaagacgcgagaagccagaagaatacaaaagttgattttttcgccgtagaattgctggatggaaatctttacctgctgctagacatgggaagcggcactattaaggtcaaggccacacagaagaaagcaaacgacggagaatggtatcatgtggacatccagagggacggacggagcggcacaatctcagtcaactccagaagaacaccctttaccgcgtctggcgaatctgagattctcgatctcgaaggcgacatgtatctgggaggcctcccggaaaatcgggctggcttgatactgccgaccgagctttggaccgcaatgctcaattatggttacgtcggttgcataagagatttgtttatcgacggccgttccaagaatattcgacagttggccgaaatgcagaacgctgccggagtgaaatccagttgctctcgaatgagtgctaaacagtgcgactcctatccctgtaaaaacaacgctgtttgcaaagacgggtggaacaggtttatatgtgactgcactggaacgggctactgggggaggacgtgtgagcgggaagctagcatcctgtcgtatgacgggagtatgtatatgaagatcattatgcccatggtgatgcacaccgaggcagaggatgtgagctttagatttatgagtcagagggcatatgggttgctcgtggctaccacctcccgggactctgccgacactctgcgccttgaattagacggcggtagggtcaagctgatggtgaaccttggaaagggtccggagacgctgtacgctggccaaaagctcaatgataacgaatggcataccgtccgagtggtaaggagagggaaatctttgaagctgaccgtcgatgacgatgttgccgagggaactatggttggagaccacacccgacttgaattccacaatattgagaccggcattatgaccgaaaaacggtatatcagtgtggtgccttcttcatttattggccacttgcagtcccttatgttcaacggattgctctacattgacttgtgcaagaacggagatattgattactgcgagctgaaggctagattcggactgaggaacattatcgcagaccccgtcacattcaagacaaagtcgtcctatctctccctagctacactgcaggcgtatacaagcatgcacctgtttttccagtttaagactacgagtcccgacggcttcatcctctttaattcaggagatggtaatgacttcattgccgtggagctggtgaaagggtacatacattatgtgttcgatttgggaaatggccctaacgtaatcaagggcaattctgacagaccattgaatgataaccagtggcacaatgttgtgatcacaagggataattcgaatacccactcgctcaaggtggacacaaaagtcgtgacccaggtcattaatggagccaagaacctagacctaaagggcgacctgtatatggctggtctcgcacaggggatgtacagtaatcttcctaaactggttgcttcacgtgacggctttcaggggtgtttggcctccgtggatctaaatggccgtctgcctgatttaattaatgatgcgctgcatcgctctggacagatcgaaagggggtgcgaggggccttccaccacgtgtcaagaggacagctgtgccaaccagggtgtctgcatgcaacaatgggaaggttttacttgcgattgttctatgacatcatactccggcaatcagtgtaacgaccctggcgcaacctacatcttcggcaaatctggcggattgattctctacacctggcctgccaatgatcgaccgtcaaccaggagcgacagactggccgtcggattctcaactaccgttaaggacggaatcctggtccgaatcgatagtgctcccggtctgggcgattttctacagttgcacatcgagcaaggcaaaatcggcgtcgtgtttaacattggcacagttgacatttctataaaggaagagagaacccccgttaatgatggcaaataccacgtcgtcagattcacaaggaacgggggaaatgctacactgcaggtggataactggcccgtgaacgaacactaccctacaggaaacaccgacaacgagaggtttcagatggttaagcagaagattccctttaaatacaatcggcctgtggaagagtggctacaggagaaaggcagacaactgacaatttttaacacccaagcccaaattgccatcgggggaaaagacaaaggcaggttatttcagggacagctttcaggcctgtactacgacggactaaaggtgctgaacatggccgcagaaaacaaccctaatatcaaaataaatggctctgtgcgacttgtcggggaggtccctagtatcctggggactactcagactacctccatgccgccagaaatgtctaccacagtgatggagaccacgactaccatggccaccaccaccacgcggaagaataggtccacagccagcatccagcctacttccgacgacctcgtttccagcgccgagtgtagttccgacgatgaggactttgtggagtgtgagccttctactggcaggagcgcccgaagcagcaacgccgcacgcagtctacgggctgctcttacctggacatggagactcacctatacttttactcccattatcttcattagttgtgtcgtccactcctag

SEQ ID NO: 332918 - DNA, 4179 bp, Artificial Sequence
  derived and/or modified sequence
atgagcagcaccctgcacagcgtgttcttcaccctgaaggtgagcatcctgctgggcagcctgctgggcctgtgcctgggcctggagttcatgggcctgcccaaccagtgggccagatacctgagatgggacgccagcaccagaagcgacctgagcttccagttcaagaccaacgtgagcaccggcctgctgctgtacctggacgacggcggcgtgtgcgacttcctgtgcctgagcctggtggacggcagagtgcagctgagattcagcatggactgcgccgagaccgccgtgctgagcaacaagcaggtgaacgacagcagctggcacttcctgatggtgagcagagacagactgagaaccgtgctgatgctggacggcgagggccagagcggcgagctgcagccccagagaccctacatggacgtggtgagcgacctgttcctgggcggcgtgcccaccgacatcagacccagcgccctgaccctggacggcgtgcaggccatgcccggcttcaagggcctgatcctggacctgaagtacggcaacagcgagcccagactgctgggcagcagaggcgtgcagatggacgccgagggcccctgcggcgagagaccctgcgagaacggcggcatctgcttcctgctggacggccaccccacctgcgactgcagcaccaccggctacggcggcaagctgtgcagcgagggcctgagccacctgatgatgagcgagcagggcagatggaaggccagagaggagaacgtggccaccttcagaggcagcgagtacctgtgctacgacctgagccagaaccccatccagagcagcagcgacgagatcaccctgagcttcaagacctggcagagaaacggcctgatcctgcacaccggcaagagcgccgactacgtgaacctggccctgaaggacggcgccgtgagcctggtgatcaacctgggcagcggcgccttcgaggccatcgtggagcccgtgaacggcaagttcaacgacaacgcctggcacgacgtgaaggtgaccagaaacctgagacaggtgaccatcagcgtggacggcatcctgaccaccaccggctacacccaggaggactacaccatgctgggcagcgacgacttcttctacgtgggcggcagccccagcaccgccgacctgcccggcagccccgtgagcaacaacttcatgggctgcctgaaggaggtggtgtacaagaacaacgacatcagactggagctgagcagactggccagaatcgccgacaccaagatgaagatctacggcgaggtggtgttcaagtgcgagaacgtggccaccctggaccccatcaacttcgagacccccgaggcctacatcagcctgcccaagtggaacaccaagagaatgggcagcatcagcttcgacttcagaaccaccgagcccaacggcctgatcctgttcacccacggcaagccccaggagagaaaggacgccagaagccagaagaacaccaaggtggacttcttcgccgtggagctgctggacggcaacctgtacctgctgctggacatgggcagcggcaccatcaaggtgaaggccacccagaagaaggccaacgacggcgagtggtaccacgtggacatccagagagacggcagaagcggcaccatcagcgtgaacagcagaagaacccccttcaccgccagcggcgagagcgagatcctggacctggagggcgacatgtacctgggcggcctgcccgagaacagagccggcctgatcctgcccaccgagctgtggaccgccatgctgaactacggctacgtgggctgcatcagagacctgttcatcgacggcagaagcaagaacatcagacagctggccgagatgcagaacgccgccggcgtgaagagcagctgcagcagaatgagcgccaagcagtgcgacagctacccctgcaagaacaacgccgtgtgcaaggacggctggaacagattcatctgcgactgcaccggcaccggctactggggcagaacctgcgagagagaggccagcatcctgagctacgacggcagcatgtacatgaagatcatcatgcccatggtgatgcacaccgaggccgaggacgtgagcttcagattcatgagccagagagcctacggcctgctggtggccaccaccagcagagacagcgccgacaccctgagactggagctggacggcggcagagtgaagctgatggtgaacctgggcaagggccccgagaccctgtacgccggccagaagctgaacgacaacgagtggcacaccgtgagagtggtgagaagaggcaagagcctgaagctgaccgtggacgacgacgtggccgagggcaccatggtgggcgaccacaccagactggagttccacaacatcgagaccggcatcatgaccgagaagagatacatcagcgtggtgcccagcagcttcatcggccacctgcagagcctgatgttcaacggcctgctgtacatcgacctgtgcaagaacggcgacatcgactactgcgagctgaaggccagattcggcctgagaaacatcatcgccgaccccgtgaccttcaagaccaagagcagctacctgagcctggccaccctgcaggcctacaccagcatgcacctgttcttccagttcaagaccaccagccccgacggcttcatcctgttcaacagcggcgacggcaacgacttcatcgccgtggagctggtgaagggctacatccactacgtgttcgacctgggcaacggccccaacgtgatcaagggcaacagcgacagacccctgaacgacaaccagtggcacaacgtggtgatcaccagagacaacagcaacacccacagcctgaaggtggacaccaaggtggtgacccaggtgatcaacggcgccaagaacctggacctgaagggcgacctgtacatggccggcctggcccagggcatgtacagcaacctgcccaagctggtggccagcagagacggcttccagggctgcctggccagcgtggacctgaacggcagactgcccgacctgatcaacgacgccctgcacagaagcggccagatcgagagaggctgcgagggccccagcaccacctgccaggaggacagctgcgccaaccagggcgtgtgcatgcagcagtgggagggcttcacctgcgactgcagcatgaccagctacagcggcaaccagtgcaacgaccccggcgccacctacatcttcggcaagagcggcggcctgatcctgtacacctggcccgccaacgacagacccagcaccagaagcgacagactggccgtgggcttcagcaccaccgtgaaggacggcatcctggtgagaatcgacagcgcccccggcctgggcgacttcctgcagctgcacatcgagcagggcaagatcggcgtggtgttcaacatcggcaccgtggacatcagcatcaaggaggagagaacccccgtgaacgacggcaagtaccacgtggtgagattcaccagaaacggcggcaacgccaccctgcaggtggacaactggcccgtgaacgagcactaccccaccggcaacaccgacaacgagagattccagatggtgaagcagaagatccccttcaagtacaacagacccgtggaggagtggctgcaggagaagggcagacagctgaccatcttcaacacccaggcccagatcgccatcggcggcaaggacaagggcagactgttccagggccagctgagcggcctgtactacgacggcctgaaggtgctgaacatggccgccgagaacaaccccaacatcaagatcaacggcagcgtgagactggtgggcgaggtgcccagcatcctgggcaccacccagaccaccagcatgccccccgagatgagcaccaccgtgatggagaccaccaccaccatggccaccaccaccaccagaaagaacagaagcaccgccagcatccagcccaccagcgacgacctggtgagcagcgccgagtgcagcagcgacgacgaggacttcgtggagtgcgagcccagcaccggcagaagcgccagaagcagcaacgccgccagaagcctgagagccgccctgacctggacctggagactgacctacaccttcacccccatcatcttcatcagctgcgtggtgcacagctag

SEQ ID NO: 332919 - protein, 66 aa, Artificial Sequence
  derived and/or modified sequence
EASCARMDVPVMQRIAQGLCTSSCTAQKCMTGICKKVDSHPTCFCGGCSNANDVSLDTLISQLPHN

SEQ ID NO: 332920 - DNA, 137 bp, Artificial Sequence
  derived and/or modified sequence
tacaagaaaatcacagtaacatttataaaacacagaagtgtgaacacacagctattgaccttgaaaacagtgaaagagggtcagctgtagaactaagacataagcaaagtttttcaatcaagaatacatgggtggcc

SEQ ID NO: 332921 - protein, 480 aa, Artificial Sequence
  derived and/or modified sequence
MAQGSGDQRAVGVADPEESSPNMIVYCKIEDIITKMQDDKTGGVPIRTVKSFLSKIPSVVTGTDIVQWLMKNLSIEDPVEAIHLGSLIAAQGYIFPISDHVLTMKDDGTFYRFQAPYFWPSNCWEPENTDYAIYLCKRTMQNKARLELADYEAENLARLQRAFARKWEFIFMQAEAQVKIDRKKDKTERKILDSQERAFWDVHRPVPGCVNTTEMDIRKCRRLKNPQKVKKSVYGVTEESQAQSPVHVLSQPIRKTTKEDIRKQITFLNAQIDRHCLKMSKVAESLIAYTEQYVEYDPLITPAEPSNPWISDDVALWDIEMSKEPSQQRVKRWGFSFDEILKDQVGRDQFLRFLESEFSSENLRFWLAVQDLKKQPLQDVAKRVEEIWQEFLAPGAPSAINLDSHSYEITSQNVKDGGRYTFEDAQEHIYKLMKSDSYARFLRSNAYQDLLLAKKKPESEQGRRTSLEKFTRSVCLQLLF

SEQ ID NO: 332922 - protein, 539 aa, Artificial Sequence
  derived and/or modified sequence
MKNLSIEDPVEAIHLGSLIAAQGYIFPISDHVLTMKDDGTFYRFQAPYFWPSNCWEPENTDYAIYLCKRTMQNKARLELADYEAENLARLQRAFARKWEFIFMQAEAQVKIDRKKDKTERKILDSQERAFWDVHRPVPGCVNTTEMDIRKCRRLKNPQKVKKSVYGVTEESQAQSPVHVLSQPIRKTTKEDIRKQITFLNAQIDRHCLKMSKVAESLIAYTEQYVEYDPLITPAEPSNPWISDDVALWDIEMSKEPSQQRVKRWGFSFDEILKDQVGRDQFLRFLESEFSSENLRFWLAVQDLKKQPLQDVAKRVEEIWQEFLAPGAPSAINLDSHSYEITSQNVKDGGRYTFEDAQEHIYKLMKSDSYARFLRSNAYQDLLLAKKKPESEQGRRTSLEKFTRSVNVQNTRPAGAWSIFMAALPMAVWLRTPRSCHGLSESRLLGLPSLHDGLREGQSLPQSCPGSSSTAAEGARERASNGRSLARRQHCQCHGQGEETQLCLWSRLESSKRSQRASSLRTSKAKKKRQTVKQGPKAWP

SEQ ID NO: 332923 - DNA, 1443 bp, Artificial Sequence
  derived and/or modified sequence
atggcgcagggttctggtgaccagcgtgcagtcggtgtcgccgaccccgaagagtcctcccccaacatgattgtgtattgcaagatcgaggatatcattactaaaatgcaggacgacaagaccgggggtgtcccaatcaggacagtcaagagcttcttgtccaagatcccgtcagtggttaccggaaccgacattgttcagtggttgatgaagaacctttctatcgaggaccccgtcgaagccatccatctgggctccctgatcgcagctcagggatacatcttccctatttccgaccacgtgctgacaatgaaggacgacggaacgttctataggtttcaagccccatatttctggccttccaactgttgggagcccgagaataccgactatgccatctatctgtgtaaacgaaccatgcagaacaaagctcggctggagttagctgattatgaggccgaaaatctggccaggctgcaacgcgcttttgcaaggaagtgggaattcatttttatgcaggcagaggcgcaggtgaagattgataggaagaaggataagactgagaggaaaattctagacagccaggaacgggcattttgggacgttcatcggcccgttccagggtgcgtcaatacaactgagatggatataagaaaatgccggcggctgaagaatccacaaaaggtgaaaaagtcagtgtacggcgttactgaagagagccaggctcagtctcctgtgcacgtcctctcacagccaattaggaagactacgaaggaggacattcgaaaacagattacatttttaaatgcccaaattgataggcattgcctaaagatgtcaaaggtggcagagtccctgatcgcctacactgagcagtatgtggagtatgatcccctcattacccctgccgaacccagtaacccctggatttccgatgatgtcgccctctgggacatcgaaatgtctaaagaaccgtcccagcagcgtgtgaaacgctggggcttctcattcgacgagatcctgaaagaccaggttgggagggaccagtttctacggtttctcgaatctgagtttagctctgaaaaccttcggttttggttagcagttcaggacttaaagaaacagcccctgcaggatgtggccaagcgggtcgaggagatctggcaggagtttctagcccccggcgccccaagtgcaatcaacctggattctcatagttatgaaattacgagccaaaatgtgaaagacggcgggagatacacgtttgaggatgcccaggagcacatatataagttaatgaagtctgactcttacgcacgttttcttcgcagcaatgcctaccaagatctcctgctcgcaaaaaaaaaaccagagagcgagcaggggaggcggacctccctggagaagtttactcgcagtgtgtgcctgcagctactcttctag

SEQ ID NO: 332924 - DNA, 1620 bp, Artificial Sequence
  derived and/or modified sequence
atgaagaacctctccatcgaagatcccgtcgaggccatacatctgggcagcttaatcgccgcccagggatacatttttcccatttccgatcatgtcttgacgatgaaagatgacggaactttctatcgcttccaagcgccatatttctggccatctaactgctgggaaccggagaacactgattatgccatatatctgtgcaagcgaacaatgcagaataaggccaggctggagctggccgactatgaggccgagaacctcgcaaggctgcaaagagcattcgccaggaagtgggagtttatctttatgcaggcggaagcccaggtcaagattgatcggaaaaaggacaagaccgagaggaaaatccttgactctcaggaacgagccttctgggacgttcacagacctgtgccgggatgcgtcaatacgacagagatggacatccgaaagtgtcggcggttgaagaatccccagaaagtcaaaaaatcagtgtacggggtgactgaagagtcccaggcacagtcacctgtgcacgtgctgtctcaacccatccgaaaaacaacaaaagaggacatccggaagcagataactttcctgaacgcccagattgaccgacactgcctgaaaatgtcaaaggtggccgaatccttgattgcttacaccgagcaatacgtggaatacgatcccctaataacacctgccgagccatccaatccttggataagcgatgatgtggcgctttgggacattgaaatgtctaaggagccttcccaacagagggttaaaaggtggggcttcagcttcgatgagatcctgaaggaccaggtgggaagggatcagttcctcaggttcctggaatccgagttttcatctgaaaacctccggttttggctcgctgttcaggacctgaaaaaacagccacttcaagacgtggccaaaagggtcgaagaaatctggcaggaattcctggctccaggcgccccctctgccattaatctggacagccatagctacgaaatcactagtcagaacgtgaaagacgggggaaggtacacctttgaggacgcccaagaacatatctacaagttgatgaagtccgattcctatgcacgttttctgcggtcaaacgcctaccaagatctgcttctcgctaaaaagaagcctgagtccgagcaggggaggcgtacctccctcgaaaagttcacccgctccgtcaacgtccagaacacacggcccgctggcgcttggagcatattcatggccgctctgccgatggccgtgtggctacgtactcctcggtcttgtcacgggttaagcgagtcaagactcttggggttaccaagcctgcacgacggcctgcgggaagggcagtctctgcctcagagctgtccaggttcttctagcaccgctgctgagggtgctcgggaacgcgcctccaatggccgaagcctcgcccgaagacagcattgccagtgccatggacagggcgaggagacgcaactgtgcctgtggtcgcggttggaatcaagtaagcgtagtcagcgcgcatcatccctgcgaacaagtaaggcaaagaaaaaacgtcagactgtgaagcaaggtccaaaggcttggccgtag

SEQ ID NO: 332925 - DNA, 1443 bp, Artificial Sequence
  derived and/or modified sequence
atggcccagggcagcggggaccagagagctgtgggcgtggccgaccctgaggagagcagccccaacatgattgtgtactgcaagattgaggacatcatcaccaagatgcaggatgacaagacaggaggagtgcccatcagaacagtgaagagcttcctgagcaagatccccagcgtggtgactggaacagacatcgtgcagtggctgatgaagaacctgagcattgaggaccctgtggaggccatccacctgggcagcctgattgctgcccagggctacatcttccccatcagtgaccacgtgctgaccatgaaggatgatggcaccttctaccgcttccaggccccctacttctggcccagcaactgctgggagccagaaaatacagattatgccatctacctgtgcaagaggaccatgcagaacaaggcccggctggagctggccgactatgaagctgagaacctggcccggctgcagagggcctttgccaggaagtgggagttcatcttcatgcaggccgaggcccaggtgaagattgacaggaagaaggacaagacagagaggaagatcctggacagccaggagcgggccttctgggatgtgcacaggcctgtgcccggctgtgtgaacaccacagagatggacatcagaaaatgtagaaggctgaagaacccccagaaggtgaagaagtctgtgtatggagtgacagaggagagccaggcccagagccctgtgcacgtgctgagccagcccatcaggaagaccaccaaggaggacatcaggaagcagatcaccttcctgaatgcccagattgacagacactgcctgaagatgagcaaggtggccgagagcctgattgcctacacagagcagtatgtggagtatgaccccctcatcaccccagctgagcccagcaacccctggatcagtgatgatgtggccctgtgggacatcgagatgagcaaggagcccagccagcagagggtgaagcgctggggcttctcctttgatgagatcctgaaggaccaggtgggccgggaccagttcctgcgcttcctggagagcgagttcagcagcgagaacctgcgcttctggctggccgtgcaggacctgaagaagcagcccctgcaggatgtggccaagagggtggaggagatctggcaggagttcctggcccctggggcccccagcgccatcaacctggacagccacagctatgagatcaccagccagaatgtgaaggatggcggccgctacacctttgaagatgcccaggagcacatctacaagctgatgaagagtgacagctatgcccgcttcctgcggagcaatgcctaccaggacctgctgctggccaagaagaagccagagagcgagcagggccgccgcaccagcctggagaagttcaccaggtctgtgtgcctgcagctgctcttctag

SEQ ID NO: 332926 - DNA, 1620 bp, Artificial Sequence
  derived and/or modified sequence
atgaagaacctgagcattgaagatcctgtggaggccatccacctgggcagcctgattgctgcccagggctacatcttccccatcagtgaccacgtgctgaccatgaaggatgatggcaccttctaccgcttccaggccccctacttctggcccagcaactgctgggagcctgagaacacagattatgccatctacctgtgcaagaggaccatgcagaacaaggcccggctggagctggccgactatgaagctgagaacctggcccggctgcagagggcctttgccaggaagtgggagttcatcttcatgcaggccgaggcccaggtgaagattgacaggaagaaggacaagacagagaggaagatcctggacagccaggagcgggccttctgggatgtgcacaggcctgtgcccggctgtgtgaacaccacagagatggacatcaggaagtgccggcggctgaagaacccccagaaggtgaagaagtctgtgtatggagtgacagaggagagccaggcccagagccctgtgcacgtgctgagccagcccatcaggaagaccaccaaggaggacatcaggaagcagatcaccttcctgaatgcccagattgacagacactgcctgaagatgagcaaggtggccgagagcctcatcgcctacacagagcagtatgtggagtatgaccccctcatcaccccagctgagcccagcaacccctggatcagtgatgatgtggccctgtgggacatcgagatgagcaaggagcccagccagcagagggtgaagcgctggggcttctcctttgatgagatcctgaaggaccaggtgggccgggaccagttcctgcgcttcctggagagcgagttcagcagcgagaacctgcgcttctggctggccgtgcaggacctgaagaagcagcccctgcaggatgtggccaagagggtggaggagatctggcaggagttcctggcccctggggcccccagcgccatcaacctggacagccacagctatgagatcaccagccagaatgtgaaggatggcggccgctacacctttgaagatgcccaggagcacatctacaagctgatgaagagtgacagctatgcccgcttcctgcggagcaatgcctaccaggacctgctgctggccaagaagaagccagagagcgagcagggccgccgcaccagcctggagaagttcaccaggtctgtgaatgtgcagaacaccaggcctgctggggcctggagcatcttcatggccgccctgcccatggctgtgtggctgcggacccccaggagctgccacggcctgtctgagagccggctgctgggcctgcccagcctgcatgatggcctgcgggagggccagagcctgccccagagctgccccggcagcagcagcacagctgctgagggcgcccgggagcgggccagcaatggccgcagcctggcccggcggcagcactgccagtgccacggccagggcgaggagacccagctgtgcctgtggagccggctggagagcagcaagaggagccagagggccagcagcctgcggaccagcaaggccaagaagaagaggcagacagtgaagcagggccccaaggcctggccctag

SEQ ID NO: 332927 - DNA, 1443 bp, Artificial Sequence
  derived and/or modified sequence
atggcccagggcagcggcgaccagcgggccgtgggcgtggccgacccagaagagtcttcaccaaatatgatcgtttattgtaagatcgaggacattatcacaaaaatgcaagatgacaagactgggggtgtgcctatcagaaccgtgaagtcgttcctgagcaagataccatcagttgttactgggacagatatcgtccagtggctgatgaagaacttgtctatcgaggacccggtcgaagccatccacctggggagcctgatcgccgcacagggatacatctttcctatttcagatcacgtgctgacgatgaaggatgacggcacattctaccgcttccaagcgccatacttctggccctctaattgctgggagccagaaaatactgattatgccatttatctttgcaaaaggaccatgcaaaataaggcaaggttagagctcgccgactacgaggctgaaaatcttgctcggctgcagagagcttttgcccggaaatgggagttcatctttatgcaggctgaagcccaggtgaagatcgatagaaaaaaagataaaacagaacggaagattttggattctcaggagcgtgccttctgggacgttcatagaccagttccaggttgtgtcaataccaccgagatggacatacgtaagtgtcggaggctgaagaacccccaaaaagtgaagaagagtgtttacggcgtaaccgaggaatcacaagcacagtccccagtacacgtgctttcccaacctattcgcaaaaccacgaaggaagatatacgtaaacagatcacatttctgaacgcccagattgaccggcactgcctcaaaatgagcaaagtcgcagaatccttgatagcgtatactgaacagtacgtcgagtatgacccacttattaccccagctgaacctagcaacccctggatctctgatgacgtagccctgtgggacatcgaaatgtcaaaggagccatctcaacagcgcgtgaaaaggtgggggtttagctttgacgaaatcctcaaagatcaggtgggacgcgatcagttcttgcgattcttggagtcagagttttcatctgaaaatcttaggttctggctagcggtacaggatctgaaaaaacagcctctgcaggacgtagccaagagggtggaggaaatttggcaggaattccttgctcctggggcaccttcagcaattaaccttgattcacattcctacgagattaccagtcagaacgtgaaagatgggggcaggtacacttttgaagatgcgcaggagcatatatacaaactgatgaagtccgactcttacgcccgcttcttgcgctccaacgcttatcaggatctcctccttgccaagaagaaaccggagagcgaacagggacgccgcacctccttggagaagtttactaggtccgtctgcctgcagttgctgttctag

SEQ ID NO: 332928 - DNA, 1620 bp, Artificial Sequence
  derived and/or modified sequence
atgaagaacctgagcatcgaggaccccgtggaggccatccacctggggtctctcatcgcagctcaaggatacattttccctattagcgatcacgtgctgaccatgaaggatgacggcaccttttatcggttccaagcaccctacttctggccctcgaattgttgggagccagagaatacagattacgcgatatacctgtgtaagcgcacgatgcaaaacaaggccagactggaactggctgactacgaggccgagaaccttgcccggctgcaacgcgccttcgcccgcaaatgggaatttatttttatgcaggctgaagcccaggtcaagatcgataggaagaaggataagaccgagcgaaagatcctggatagccaagaacgggccttttgggacgtgcatcgtcccgttcccggctgcgtaaatacgaccgagatggacattcgtaaatgtcgcaggctgaaaaacccccagaaagtgaaaaaatctgtttatggtgttactgaggagagccaggcacaatcccctgttcatgtgctgtctcagcctattcggaagacaactaaggaggacatcaggaaacagatcacattcttgaatgcgcaaatcgaccggcattgcttgaagatgagcaaagttgcagaatccttgattgcatatactgaacaatacgtcgaatatgaccccctgattactcctgcagagccgtctaacccatggattagcgatgacgtggccctctgggatatcgagatgtcaaaagaacccagccagcaacgcgtaaagaggtggggcttctcctttgatgaaatcctgaaggatcaggtgggcagggatcagttcctccggtttttggaaagcgagtttagcagcgaaaatttgaggttttggcttgctgtacaagatctgaagaagcagcctctacaggacgtggccaaaagagtcgaagaaatttggcaagagtttcttgctccgggcgcaccatctgcaatcaacctcgattctcactcctacgaaataacttcacaaaatgtgaaggacggcggccgttacacttttgaggatgcccaagagcacatttacaagctcatgaaatccgattcttatgcaaggtttctgcgctccaatgcctaccaggacctgttgcttgccaagaagaagccagaatcagagcaaggccggcgcacatcactcgaaaaatttacccggagcgttaacgtccagaatactcggcccgccggggcatggtctatctttatggcagctctccccatggcagtttggctgcgcacacctcgaagttgtcacggtctgagtgagtcacgcttgcttggactcccatcattacacgatggtttacgggaaggccagagtctgcctcaaagttgtcccgggagcagctctacagcagcagagggcgctagggagagagcatcaaacggcagaagtctcgctcgccgacagcactgtcagtgccacggccagggcgaggagactcagttatgtctctggtccagattggagtcctccaaaagatcccaacgtgcgagctccctccgaacaagtaaggccaagaaaaagcggcaaaccgtcaagcaaggccccaaggcgtggccctag

SEQ ID NO: 332929 - DNA, 1443 bp, Artificial Sequence
  derived and/or modified sequence
atggcacagggatcaggcgaccagagggccgtgggtgtggcagaccctgaggaaagcagccctaacatgatcgtgtactgcaagattgaagacataataaccaaaatgcaggacgacaagacaggaggagttcctatccgaactgtgaaatcttttctctctaaaatcccctcagtggtgactggaacggacatcgtgcagtggttaatgaaaaacctctccatcgaggaccccgtcgaggcgattcatctgggatctctaatcgccgctcagggatatatcttccccatatccgaccatgtcctgacaatgaaagatgatggcactttttataggtttcaagcgccttacttctggccatctaattgttgggaaccagaaaacactgattacgccatctatttatgtaagcgcaccatgcagaacaaagcgaggctggagctggctgattacgaagccgaaaacctcgccagactgcagcgggcattcgctaggaagtgggaattcatattcatgcaagcagaagcacaggtgaaaattgaccgcaaaaaggataagacggaacgcaagattctggatagtcaagagagggccttctgggatgtccataggcctgtgcctggttgtgtgaacaccacagaaatggatatcaggaagtgccggcgtctcaagaatccacagaaggttaagaaaagcgtctatggggtgacagaggagtcccaggcacaaagtcccgtccacgttctcagccagccaatacggaagacaactaaggaagacatccgtaagcagatcacgtttctgaacgcgcagatcgatcgacactgtctgaaaatgagtaaagtcgccgagagtctaattgcctacacggagcagtatgtggaatatgacccgctgattacaccagccgagcccagcaatccctggatctccgacgacgtggccctctgggacatcgaaatgtctaaagaaccatctcagcagcgggtgaagcgttggggcttttctttcgacgagattctaaaagatcaagtcggtcgcgatcaatttttaaggtttcttgagagtgaattttcgtcagaaaaccttcgattctggctggctgtccaagatcttaaaaaacaaccactgcaggacgtagccaagcgtgtcgaagaaatctggcaggagtttctggcccctggggcaccctctgctattaatctggactcacactcttacgaaattacttctcagaacgtgaaagatggtgggaggtatacatttgaagacgcccaagagcacatctacaaattgatgaagtcagacagctatgccagattcctgcgatcaaacgcataccaggacctgttgctggccaagaagaagcctgagtcagagcagggcaggcgaacctcattggagaagttcacaaggtccgtgtgcctgcagcttcttttttag

SEQ ID NO: 332930 - DNA, 1620 bp, Artificial Sequence
  derived and/or modified sequence
atgaagaacctgagtatcgaagatccggtcgaagcaattcatcttggaagcctgatagccgctcagggctatatttttcccatcagcgaccacgtgctcacaatgaaggacgacggcacattctatagattccaggccccttacttctggccttctaactgctgggagcccgagaacacagattacgctatatacctctgtaaacgcaccatgcagaacaaggcaaggctggaactggccgactacgaggccgagaacctggcaagactgcaaagagcctttgcacgcaagtgggagtttatattcatgcaggctgaagctcaggttaaaatagatcgaaaaaaagacaagacggagcgaaagatcctggattcccaggaacgcgctttctgggacgtacatcggcctgtgcccggttgcgtgaatactactgagatggacataaggaagtgccggagactaaaaaacccacagaaagtgaaaaagtccgtttacggagtcacagaagagtctcaggcgcagtcgccagtgcacgtgctctcccagcccatcagaaaaaccactaaggaggacattagaaaacaaatcacctttctgaatgcacagattgatcggcattgtctaaaaatgtctaaagtggcagaaagtctgatcgcctatacagagcagtacgtcgagtatgatccactgattactccagctgagccaagcaatccatggatcagcgacgatgtggcattgtgggatatcgaaatgtccaaggaaccctctcagcagcgggtgaaaagatggggcttcagtttcgatgaaatcctaaaagatcaggtggggcgagaccaatttctgaggtttctcgaatctgaattttcaagcgaaaacctccggttttggctcgcggtgcaagacttgaaaaaacaacccttgcaagacgtggccaaacgcgtggaagaaatttggcaggagtttttagctcccggagccccttctgcaatcaaccttgatagccacagttacgagatcacttcacagaatgtgaaggacggaggaaggtacacctttgaggacgctcaggagcatatttataagctcatgaagtctgactcatacgctcgttttttaaggagtaatgcttatcaggatttgctgctggcaaagaaaaaaccagaatccgaacaaggtaggcgaacatccttggaaaaattcactaggtcggtaaacgtgcagaacacgcgacctgccggagcatggagcatattcatggccgcactccccatggctgtgtggttaagaacacccagatcctgccatggactgtctgaatcaagacttctgggcctgccgagcctgcacgatggcttacgggaaggccaatcgctacctcagagctgcccaggatcctcttcgacggcggcagagggagctcgggagcgagcaagtaacggacggtcacttgcacgaaggcagcactgtcagtgtcacgggcagggagaggagacacagctttgcctttggagccgtctcgagtcatctaagcgttcccagagggcctcctccctgaggactagcaaagccaagaaaaaaagacagacagtgaaacagggacccaaggcctggccatag

SEQ ID NO: 332931 - DNA, 1497 bp, Artificial Sequence
  derived and/or modified sequence
atggctcaaggatccggggatcaaagagcagtgggggttgctgacccagaggagagttctccaaacatgatcgtttactgcaaaattgaagacatcattacaaagatgcaagatgacaagacagggggtgtgcccatcagaacagtcaagagctttctctccaaaatccccagtgtcgtcacaggtactgacattgtgcagtggcttatgaagaacctttccattgaggacccagttgaagcaatacacttggggagccttatcgctgcccagggctacatctttccaatctcagaccatgttctcaccatgaaggatgatggcaccttttatcgtttccaggctccgtacttctggccttcgaactgctgggaacctgaaaacactgactatgccatctatctctgtaagaggacaatgcaaaataaagcaaggctggaactggcagattatgaagcagaaaacttagcaagactccagagggcctttgcgaggaagtgggaattcatctttatgcaagcagaagcacaagtaaagattgaccggaaaaaagacaagacagaaaggaaaattttggatagtcaagaacgagccttttgggatgtccacaggcctgtgccaggctgtgtgaacacaacagaaatggatatccgaaaatgtcgacgtttgaagaatccacaaaaggttaaaaagtccgtgtatggcgtgactgaagagtcccaggcacagagcccggtgcatgtactcagccaaccaatcaggaaaacaacaaaagaggacatccggaaacagataacatttttgaacgcacagatcgacagacattgtttgaaaatgtccaaagtggctgaaagtttaattgcctacacggaacaatatgtggaatatgaccctttgataacaccagctgagccatccaacccttggatcagcgatgacgttgctttgtgggacatagagatgagcaaagagcccagccaacagcgagtaaaaagatggggcttctctttcgatgagatattgaaggaccaggtggggcgggaccagtttctacgattcctggagtccgaattcagttcagaaaacctcaggttctggctggctgtccaagatcttaagaaacaacccctacaggatgtggccaagagggtagaagaaatctggcaagagtttctggctccaggggctccaagtgcaatcaacctggattctcacagctatgagataaccagtcaaaatgtcaaagatggagggagatatacatttgaagacgcccaggagcacatctacaagctgatgaagagtgacagctatgcccgcttcctccggtcaaatgcttaccaggatttgctgctggccaagaagaagccagaaagtgagcaaggtcgtagaacttccctagaaaagttcactcgcagtgtgtgtctgcagcttctcttctagggatgaaaatgcaaaaaagagcaagcggctccctctgcagaaggtgcacccttg

SEQ ID NO: 332932 - DNA, 1828 bp, Artificial Sequence
  derived and/or modified sequence
cgttgcaggtactgacattgtgcagtggcttatgaagaacctttccattgaggacccagttgaagcaatacacttggggagccttatcgctgcccagggctacatctttccaatctcagaccatgttctcaccatgaaggatgatggcaccttttatcgtttccaggctccgtacttctggccttcgaactgctgggaacctgaaaacactgactatgccatctatctctgtaagaggacaatgcaaaataaagcaaggctggaactggcagattatgaagcagaaaacttagcaagactccagagggcctttgcgaggaagtgggaattcatctttatgcaagcagaagcacaagtaaagattgaccggaaaaaagacaagacagaaaggaaaattttggatagtcaagaacgagccttttgggatgtccacaggcctgtgccaggctgtgtgaacacaacagaaatggatatccgaaaatgtcgacgtttgaagaatccacaaaaggttaaaaagtccgtgtatggcgtgactgaagagtcccaggcacagagcccggtgcatgtactcagccaaccaatcaggaaaacaacaaaagaggacatccggaaacagataacatttttgaacgcacagatcgacagacattgtttgaaaatgtccaaagtggctgaaagtttaattgcctacacggaacaatatgtggaatatgaccctttgataacaccagctgagccatccaacccttggatcagcgatgacgttgctttgtgggacatagagatgagcaaagagcccagccaacagcgagtaaaaagatggggcttctctttcgatgagatattgaaggaccaggtggggcgggaccagtttctacgattcctggagtccgaattcagttcagaaaacctcaggttctggctggctgtccaagatcttaagaaacaacccctacaggatgtggccaagagggtagaagaaatctggcaagagtttctggctccaggggctccaagtgcaatcaacctggattctcacagctatgagataaccagtcaaaatgtcaaagatggagggagatatacatttgaagacgcccaggagcacatctacaagctgatgaagagtgacagctatgcccgcttcctccggtcaaatgcttaccaggatttgctgctggccaagaagaagccagaaagtgagcaaggtcgtagaacttccctagaaaagttcactcgcagtgtgaatgtgcagaacacaaggcctgcgggtgcctggtctatcttcatggctgctttgccaatggccgtgtggctccgcacaccaagaagctgccacgggctgtcagagtcaaggcttctgggacttccttcactccatgatggcctgagagaaggacagagcctgcctcagtcctgtccggggagcagcagcaccgcagcagagggggccagagaaagagcatccaatggcaggagtctggcaaggcgacagcactgccaatgtcacggtcaaggagaggagacccaactctgcctgtggtccagactggaaagttcaaagagaagtcagagagcttcaagtctgaggacttcaaaggctaagaagaaaagacagactgtcaagcaaggaccgaaagcctggccttaacatcatagcacattacactgggaaatggagatggagcatccaagacaacacttaacccaaccttgtaatcttctgcagcaaaagtggtgggggaattctgatacgtgctctgtcctggttaatactagaaggttctgaggcatccataattctaaataattaaaggagtcaatcaat

SEQ ID NO: 332933 - DNA, 1443 bp, Artificial Sequence
  derived and/or modified sequence
atggcccagggcagcggcgaccagagagccgtgggcgtggccgaccccgaggagagcagccccaacatgatcgtgtactgcaagatcgaggacatcatcaccaagatgcaggacgacaagaccggcggcgtgcccatcagaaccgtgaagagcttcctgagcaagatccccagcgtggtgaccggcaccgacatcgtgcagtggctgatgaagaacctgagcatcgaggaccccgtggaggccatccacctgggcagcctgatcgccgcccagggctacatcttccccatcagcgaccacgtgctgaccatgaaggacgacggcaccttctacagattccaggccccctacttctggcccagcaactgctgggagcccgagaacaccgactacgccatctacctgtgcaagagaaccatgcagaacaaggccagactggagctggccgactacgaggccgagaacctggccagactgcagagagccttcgccagaaagtgggagttcatcttcatgcaggccgaggcccaggtgaagatcgacagaaagaaggacaagaccgagagaaagatcctggacagccaggagagagccttctgggacgtgcacagacccgtgcccggctgcgtgaacaccaccgagatggacatcagaaagtgcagaagactgaagaacccccagaaggtgaagaagagcgtgtacggcgtgaccgaggagagccaggcccagagccccgtgcacgtgctgagccagcccatcagaaagaccaccaaggaggacatcagaaagcagatcaccttcctgaacgcccagatcgacagacactgcctgaagatgagcaaggtggccgagagcctgatcgcctacaccgagcagtacgtggagtacgaccccctgatcacccccgccgagcccagcaacccctggatcagcgacgacgtggccctgtgggacatcgagatgagcaaggagcccagccagcagagagtgaagagatggggcttcagcttcgacgagatcctgaaggaccaggtgggcagagaccagttcctgagattcctggagagcgagttcagcagcgagaacctgagattctggctggccgtgcaggacctgaagaagcagcccctgcaggacgtggccaagagagtggaggagatctggcaggagttcctggcccccggcgcccccagcgccatcaacctggacagccacagctacgagatcaccagccagaacgtgaaggacggcggcagatacaccttcgaggacgcccaggagcacatctacaagctgatgaagagcgacagctacgccagattcctgagaagcaacgcctaccaggacctgctgctggccaagaagaagcccgagagcgagcagggcagaagaaccagcctggagaagttcaccagaagcgtgtgcctgcagctgctgttctag

SEQ ID NO: 332934 - DNA, 1620 bp, Artificial Sequence
  derived and/or modified sequence
atgaagaacctgagcatcgaggaccccgtggaggccatccacctgggcagcctgatcgccgcccagggctacatcttccccatcagcgaccacgtgctgaccatgaaggacgacggcaccttctacagattccaggccccctacttctggcccagcaactgctgggagcccgagaacaccgactacgccatctacctgtgcaagagaaccatgcagaacaaggccagactggagctggccgactacgaggccgagaacctggccagactgcagagagccttcgccagaaagtgggagttcatcttcatgcaggccgaggcccaggtgaagatcgacagaaagaaggacaagaccgagagaaagatcctggacagccaggagagagccttctgggacgtgcacagacccgtgcccggctgcgtgaacaccaccgagatggacatcagaaagtgcagaagactgaagaacccccagaaggtgaagaagagcgtgtacggcgtgaccgaggagagccaggcccagagccccgtgcacgtgctgagccagcccatcagaaagaccaccaaggaggacatcagaaagcagatcaccttcctgaacgcccagatcgacagacactgcctgaagatgagcaaggtggccgagagcctgatcgcctacaccgagcagtacgtggagtacgaccccctgatcacccccgccgagcccagcaacccctggatcagcgacgacgtggccctgtgggacatcgagatgagcaaggagcccagccagcagagagtgaagagatggggcttcagcttcgacgagatcctgaaggaccaggtgggcagagaccagttcctgagattcctggagagcgagttcagcagcgagaacctgagattctggctggccgtgcaggacctgaagaagcagcccctgcaggacgtggccaagagagtggaggagatctggcaggagttcctggcccccggcgcccccagcgccatcaacctggacagccacagctacgagatcaccagccagaacgtgaaggacggcggcagatacaccttcgaggacgcccaggagcacatctacaagctgatgaagagcgacagctacgccagattcctgagaagcaacgcctaccaggacctgctgctggccaagaagaagcccgagagcgagcagggcagaagaaccagcctggagaagttcaccagaagcgtgaacgtgcagaacaccagacccgccggcgcctggagcatcttcatggccgccctgcccatggccgtgtggctgagaacccccagaagctgccacggcctgagcgagagcagactgctgggcctgcccagcctgcacgacggcctgagagagggccagagcctgccccagagctgccccggcagcagcagcaccgccgccgagggcgccagagagagagccagcaacggcagaagcctggccagaagacagcactgccagtgccacggccagggcgaggagacccagctgtgcctgtggagcagactggagagcagcaagagaagccagagagccagcagcctgagaaccagcaaggccaagaagaagagacagaccgtgaagcagggccccaaggcctggccctag

SEQ ID NO: 332935 - protein, 460 aa, Artificial Sequence
  derived and/or modified sequence
MAQGSGDQRAVGVADPEESSPNMIVYCKIEDIITKMQDDKTGGVPIRTVKSFLSKIPSVVTGTDIVQWLMKNLSIEDPVEAIHLGSLIAAQGYIFPISDHVLTMKDDGTFYRFQAPYFWPSNCWEPENTDYAIYLCKRTMQNKARLELADYEAENLARLQRAFARKWEFIFMQAEAQVKIDRKKDKTERKILDSQERAFWDVHRPVPGCVNTTEMDIRKCRRLKNPQKVKKSVYGVTEESQAQSPVHVLSQPIRKTTKEDIRKQITFLNAQIDRHCLKMSKVAESLIAYTEQYVEYDPLITPAEPSNPWISDDVALWDIEMSKEPSQQRVKRWGFSFDEILKDQVGRDQFLRFLESEFSSENLRFWLAVQDLKKQPLQDVAKRVEEIWQEFLAPGAPSAINLDSHSYEITSQNVKDGGRYTFEDAQEHIYKLMKSDSYARFLRSNAYQDLLLAKKKVWLL

SEQ ID NO: 332936 - protein, 432 aa, Artificial Sequence
  derived and/or modified sequence
IEDIITKMQDDKTGGVPIRTVKSFLSKIPSVVTGTDIVQWLMKNLSIEDPVEAIHLGSLIAAQGYIFPISDHVLTMKDDGTFYRFQAPYFWPSNCWEPENTDYAIYLCKRTMQNKARLELADYEAENLARLQRAFARKWEFIFMQAEAQVKIDRKKDKTERKILDSQERAFWDVHRPVPGCVNTTEMDIRKCRRLKNPQKVKKSVYGVTEESQAQSPVHVLSQPIRKTTKEDIRKQITFLNAQIDRHCLKMSKVAESLIAYTEQYVEYDPLITPAEPSNPWISDDVALWDIEMSKEPSQQRVKRWGFSFDEILKDQVGRDQFLRFLESEFSSENLRFWLAVQDLKKQPLQDVAKRVEEIWQEFLAPGAPSAINLDSHSYEITSQNVKDGGRYTFEDAQEHIYKLMKSDSYARFLRSNAYQDLLLAKKKVWLL

SEQ ID NO: 332937 - DNA, 1383 bp, Artificial Sequence
  derived and/or modified sequence
atggcccagggtagtggtgaccaacgagcagtcggtgtggctgaccctgaagaatcctctcctaacatgattgtgtattgtaagatcgaggatatcattaccaaaatgcaggacgataagacaggcggtgtgcctatcagaactgtgaaatctttcctgtctaaaattcccagcgtcgtgaccggcactgatatcgtgcaatggttgatgaagaatctctccattgaggatcccgtggaagctattcatctcggcagcctaattgcagcccagggctacatcttccccatctccgaccacgtcctcactatgaaagacgatggaaccttctatagatttcaggccccctatttttggccttccaactgctgggaacccgagaatactgactacgccatctatctctgcaaaagaactatgcagaacaaggcaagactggagttggctgactatgaagcagaaaatttggcaagactgcagagggcgtttgctcgcaagtgggagtttattttcatgcaggcagaggcccaggtgaagatcgatcggaaaaaggataagacggagagaaagattctcgactcacaagaacgcgccttttgggatgtgcaccggcccgttccaggctgcgtcaacacaacagagatggatatccgaaaatgccgtaggctcaagaatcctcagaaagtaaaaaaatccgtctacggagtcacagaggagtctcaggcacagagccctgtacacgtcctgtctcaaccaatcaggaaaacgacaaaagaagacattaggaagcagattaccttcctgaatgcccagattgataggcactgtttgaagatgtctaaagttgctgagtctttgatcgcttacaccgagcagtacgtggagtatgatccactgatcaccccagcagagccgtcaaatccttggatctctgacgatgtggctctgtgggacatcgaaatgagcaaggagccctcacagcagcgagtaaagaggtgggggttttctttcgatgagatactcaaggaccaggtgggtcgcgaccagttcttgcgtttcctggaaagtgagttttctagtgagaacctgcgcttttggcttgcagtccaggacctaaaaaaacagcctttgcaggacgtggctaagcgagtggaagagatctggcaggagttccttgctcctggcgcccctagtgccattaaccttgactcccattcatacgaaatcacaagtcagaatgtcaaagacggtggcaggtacacctttgaggatgcccaggagcacatctacaaactgatgaagtccgattcctacgctagattcctcagaagcaacgcttatcaggatctactgttagcaaagaaaaaggtgtggctcctctag

SEQ ID NO: 332938 - DNA, 1299 bp, Artificial Sequence
  derived and/or modified sequence
atcgaagatatcatcacaaaaatgcaggacgacaagaccggtggtgtgcctatacggaccgtgaaatcctttttgtcaaagataccttctgtggtcactgggaccgatatcgtccagtggctaatgaagaacctgagcattgaagaccccgtggaagccatacacctgggcagtctgattgctgcacaggggtatatcttcccaatctccgatcacgtccttacaatgaaagacgacggcacattttataggtttcaggctccttacttctggccctccaattgttgggaacccgaaaacacagattacgccatttacctgtgtaaacgaactatgcagaataaggctcgactcgaattagccgactacgaagcagaaaacctagctcgcctgcagcgcgctttcgcaaggaagtgggagttcatctttatgcaagccgaggcccaggtgaaaatcgaccggaaaaaagacaagaccgaaaggaagattctcgattctcaggagcgggcattctgggacgtacatcgacctgtccccggctgtgtaaacacgaccgagatggacatccggaagtgccgtagattaaaaaatccacaaaaggtgaaaaaaagtgtctatggagtgaccgaagaatcacaggcccaaagtcctgtgcacgtcctgtcccaaccaattcgcaagactacaaaagaggacatcagaaagcagattaccttcctgaatgcccagattgaccgccactgcctgaaaatgagcaaggttgcagaaagcctcatcgcatatacagaacagtatgttgagtatgaccccctgatcactcctgcggaacctagtaatccgtggattagcgacgatgtggcactgtgggatattgagatgtccaaggaaccatcccagcaaagggttaaaagatgggggttctctttcgacgaaatcctgaaggatcaggttggccgcgaccagttcctgcgattcctagaatcagagttctcttcagaaaatctgcggttctggctggcagtccaagacctcaagaagcaacccctacaggatgtggctaagcgagtggaagaaatttggcaggagttcttggcccctggtgcgcctagtgccattaacctggacagtcattcttatgaaatcacctctcagaacgttaaagacggaggtcgctatacatttgaggacgcacaagaacatatttataagctgatgaagagtgactcctatgctcgttttttgcggtccaatgcttaccaagatctgctgctggcaaaaaagaaagtctggctcctgtag

SEQ ID NO: 332939 - DNA, 1398 bp, Artificial Sequence
  derived and/or modified sequence
atggctcaggggtcaggagaccagcgggcggtgggggtggctgacccggaggagtcaagcccgaacatgatagtgtactgcaagatagaagatataatcactaagatgcaagatgacaaaacaggcggtgtgcccattcgcaccgttaagtccttcctctcaaagattccatctgtcgtcacaggaaccgacatcgtgcagtggctaatgaaaaatctgagcattgaagatcctgtggaagcgatccacctgggcagcttgatcgccgcccagggctacatttttcccataagcgaccacgtgcttaccatgaaagacgatgggacattctatcgcttccaagcgccctacttctggccctcaaactgctgggaacctgagaacaccgactatgccatatacctgtgtaagcgtaccatgcaaaataaggcgagactcgaactcgcagactacgaggctgagaacttggcgcgactgcagagagcattcgcccgcaagtgggagttcatctttatgcaggctgaggctcaggtcaagatcgacagaaaaaaagacaagaccgagaggaaaatactagactcccaggaaagggcgttttgggatgtccaccgcccagtgcccggctgcgtgaatactaccgagatggacataagaaaatgtcggcggctgaagaatccccagaaggttaagaagagtgtgtacggtgttactgaggagagccaggcccaatctcccgtccatgtgctttcacagcccatccgaaaaactaccaaagaagatatacggaagcaaatcacttttcttaacgcccaaatcgatcgacactgcctgaaaatgtcaaaggtcgctgaaagcctgatcgcatacaccgagcagtatgtggaatacgatcctttgatcaccccagccgaaccaagtaatccatggatttccgatgatgtggcactgtgggatatcgagatgagtaaggagccctcgcagcagagagtcaagcgttgggggtttagctttgacgaaatcctgaaagatcaggtggggcgcgatcagttcctcaggttcctcgaaagcgaatttagctctgagaacctgaggttttggttggctgtacaggatctgaaaaagcaaccactccaggacgtggccaagcgcgtggaggagatctggcaagagttcttagcacccggggcaccttctgctattaaccttgattcacacagttacgaaattacgtcccaaaacgttaaagacggcggtcggtacacattcgaagacgcacaagagcatatatacaagctgatgaagtcagattcatatgctcgattcttacggtcaaacgcataccaggaccttctgctggctaaaaagaaaaaagtgagcaaggttgtggagctgccttag

SEQ ID NO: 332940 - DNA, 1383 bp, Artificial Sequence
  derived and/or modified sequence
atggcccagggcagcggggaccagagagctgtgggcgtggccgaccctgaggagagcagccccaacatgattgtgtactgcaagattgaggacatcatcaccaagatgcaggatgacaagacaggaggagtgcccatcagaacagtgaagagcttcctgagcaagatccccagcgtggtgactggaacagacatcgtgcagtggctgatgaagaacctgagcattgaggaccctgtggaggccatccacctgggcagcctgattgctgcccagggctacatcttccccatcagtgaccacgtgctgaccatgaaggatgatggcaccttctaccgcttccaggccccctacttctggcccagcaactgctgggagccagaaaatacagattatgccatctacctgtgcaagaggaccatgcagaacaaggcccggctggagctggccgactatgaagctgagaacctggcccggctgcagagggcctttgccaggaagtgggagttcatcttcatgcaggccgaggcccaggtgaagattgacaggaagaaggacaagacagagaggaagatcctggacagccaggagcgggccttctgggatgtgcacaggcctgtgcccggctgtgtgaacaccacagagatggacatcagaaaatgtagaaggctgaagaacccccagaaggtgaagaagtctgtgtatggagtgacagaggagagccaggcccagagccctgtgcacgtgctgagccagcccatcaggaagaccaccaaggaggacatcaggaagcagatcaccttcctgaatgcccagattgacagacactgcctgaagatgagcaaggtggccgagagcctgattgcctacacagagcagtatgtggagtatgaccccctcatcaccccagctgagcccagcaacccctggatcagtgatgatgtggccctgtgggacatcgagatgagcaaggagcccagccagcagagggtgaagcgctggggcttctcctttgatgagatcctgaaggaccaggtgggccgggaccagttcctgcgcttcctggagagcgagttcagcagcgagaacctgcgcttctggctggccgtgcaggacctgaagaagcagcccctgcaggatgtggccaagagggtggaggagatctggcaggagttcctggcccctggggcccccagcgccatcaacctggacagccacagctatgagatcaccagccagaatgtgaaggatggcggccgctacacctttgaagatgcccaggagcacatctacaagctgatgaagagtgacagctatgcccgcttcctgcggagcaatgcctaccaggacctgctgctggccaagaagaaggtgtggctgctgtag

SEQ ID NO: 332941 - DNA, 1299 bp, Artificial Sequence
  derived and/or modified sequence
attgaggacatcatcaccaagatgcaggatgacaagacaggaggagtgcccatcagaacagtgaagagcttcctgagcaagatccccagcgtggtgactggaacagacatcgtgcagtggctgatgaagaacctgagcattgaggaccctgtggaggccatccacctgggcagcctgattgctgcccagggctacatcttccccatcagtgaccacgtgctgaccatgaaggatgatggcaccttctaccgcttccaggccccctacttctggcccagcaactgctgggagccagaaaatacagattatgccatctacctgtgcaagaggaccatgcagaacaaggcccggctggagctggccgactatgaagctgagaacctggcccggctgcagagggcctttgccaggaagtgggagttcatcttcatgcaggccgaggcccaggtgaagattgacaggaagaaggacaagacagagaggaagatcctggacagccaggagcgggccttctgggatgtgcacaggcctgtgcccggctgtgtgaacaccacagagatggacatcagaaaatgtagaaggctgaagaacccccagaaggtgaagaagtctgtgtatggagtgacagaggagagccaggcccagagccctgtgcacgtgctgagccagcccatcaggaagaccaccaaggaggacatcaggaagcagatcaccttcctgaatgcccagattgacagacactgcctgaagatgagcaaggtggccgagagcctgattgcctacacagagcagtatgtggagtatgaccccctcatcaccccagctgagcccagcaacccctggatcagtgatgatgtggccctgtgggacatcgagatgagcaaggagcccagccagcagagggtgaagcgctggggcttctcctttgatgagatcctgaaggaccaggtgggccgggaccagttcctgcgcttcctggagagcgagttcagcagcgagaacctgcgcttctggctggccgtgcaggacctgaagaagcagcccctgcaggatgtggccaagagggtggaggagatctggcaggagttcctggcccctggggcccccagcgccatcaacctggacagccacagctatgagatcaccagccagaatgtgaaggatggcggccgctacacctttgaagatgcccaggagcacatctacaagctgatgaagagtgacagctatgcccgcttcctgcggagcaatgcctaccaggacctgctgctggccaagaagaaggtgtggctgctgtag

SEQ ID NO: 332942 - DNA, 1398 bp, Artificial Sequence
  derived and/or modified sequence
atggcccagggcagcggggaccagagagctgtgggcgtggccgaccctgaggagagcagccccaacatgattgtgtactgcaagattgaggacatcatcaccaagatgcaggatgacaagacaggaggagtgcccatcagaacagtgaagagcttcctgagcaagatccccagcgtggtgactggaacagacatcgtgcagtggctgatgaagaacctgagcattgaggaccctgtggaggccatccacctgggcagcctgattgctgcccagggctacatcttccccatcagtgaccacgtgctgaccatgaaggatgatggcaccttctaccgcttccaggccccctacttctggcccagcaactgctgggagccagaaaatacagattatgccatctacctgtgcaagaggaccatgcagaacaaggcccggctggagctggccgactatgaagctgagaacctggcccggctgcagagggcctttgccaggaagtgggagttcatcttcatgcaggccgaggcccaggtgaagattgacaggaagaaggacaagacagagaggaagatcctggacagccaggagcgggccttctgggatgtgcacaggcctgtgcccggctgtgtgaacaccacagagatggacatcagaaaatgtagaaggctgaagaacccccagaaggtgaagaagtctgtgtatggagtgacagaggagagccaggcccagagccctgtgcacgtgctgagccagcccatcaggaagaccaccaaggaggacatcaggaagcagatcaccttcctgaatgcccagattgacagacactgcctgaagatgagcaaggtggccgagagcctgattgcctacacagagcagtatgtggagtatgaccccctcatcaccccagctgagcccagcaacccctggatcagtgatgatgtggccctgtgggacatcgagatgagcaaggagcccagccagcagagggtgaagcgctggggcttctcctttgatgagatcctgaaggaccaggtgggccgggaccagttcctgcgcttcctggagagcgagttcagcagcgagaacctgcgcttctggctggccgtgcaggacctgaagaagcagcccctgcaggatgtggccaagagggtggaggagatctggcaggagttcctggcccctggggcccccagcgccatcaacctggacagccacagctatgagatcaccagccagaatgtgaaggatggcggccgctacacctttgaagatgcccaggagcacatctacaagctgatgaagagtgacagctatgcccgcttcctgcggagcaatgcctaccaggacctgctgctggccaagaagaagaaggtgtccaaggtggtggagctgccctag

SEQ ID NO: 332943 - DNA, 1383 bp, Artificial Sequence
  derived and/or modified sequence
atggcccagggcagcggcgaccagcgggccgtgggcgtggccgaccccgaagagtccagccccaacatgatcgtgtattgcaaaatcgaagatatcataacaaaaatgcaggacgataagaccggtggtgtgcccattagaaccgttaagagtttcttaagtaagattcctagtgttgttactggaaccgatatcgttcagtggctgatgaaaaacctgtctatcgaagatcccgtggaggctatacatctgggatctttgatcgcagcccaggggtatatttttccgattagcgaccatgttctgacaatgaaggacgatggaacgttctacaggtttcaggccccatacttttggccaagtaactgttgggaacccgaaaacactgactatgctatctacctgtgcaaacggactatgcagaacaaagctcgactggagcttgcagactatgaggccgaaaacctcgccaggctccagcgggcgttcgccaggaaatgggagtttatcttcatgcaggcagaagcccaggtgaagatcgaccgaaaaaaagacaaaacagaacgcaaaatcctggactcacaggagcgggcattctgggacgtgcataggccagtcccagggtgtgtgaacacgacggagatggacattagaaagtgtcgccgactaaagaaccctcagaaagtcaagaaaagcgtgtatggcgtgaccgaggagagtcaggctcagtctcctgtgcacgttctaagtcagcccattcgaaaaacaaccaaagaggatatccgtaaacagatcactttcctaaatgcccagattgacagacactgtctcaaaatgagcaaggtcgccgaatccttaatcgcctatactgagcagtatgtcgagtacgaccctctgattacacctgctgaacccagcaacccctggatatccgatgacgtggcgctgtgggatatcgaaatgagtaaggagcctagccagcaacgcgtgaaacggtggggattctctttcgacgagatcttgaaagaccaggtaggacgggatcagtttttacgtttcttagagagtgaattttcaagcgagaacttgcgcttttggctggccgttcaagacctgaaaaagcagcccttacaggatgttgcaaagcgggttgaggaaatatggcaagagtttctggcgccaggcgcaccatctgccattaacctcgatagtcactcgtacgagataacgagccagaacgtaaaagatggagggagatataccttcgaggatgcacaggaacatatttataagctgatgaaaagtgactcttatgcaaggttcttgcggagcaacgcatatcaagatttgcttctggcaaagaaaaaggtgtggctcttgtag

SEQ ID NO: 332944 - DNA, 1299 bp, Artificial Sequence
  derived and/or modified sequence
atcgaggacatcatcaccaagatgcaggacgacaagaccggcggcgtgcctattcggactgtgaagtcttttttgtctaaaatcccgagtgtcgttacaggtaccgacatcgtccagtggctgatgaagaatctgtctatcgaggacccagttgaagctatacacttgggatccctgatcgcagcccagggctacatttttccaatcagcgaccacgtcttgacaatgaaggatgatggcaccttctacagatttcaggcaccctatttctggccctcaaactgctgggaacctgagaatacagattacgctatatacctgtgtaaacggaccatgcagaacaaggctcggctggaacttgcggactacgaggccgaaaatcttgcacgcctgcagagagcttttgccagaaaatgggaatttatcttcatgcaagcagaggcccaggtgaagatcgatcgcaagaaagacaaaactgagcgaaagattttagattcacaagagcgggcattctgggacgtgcaccgtcccgtgcctgggtgcgtcaacacgacggagatggacatacgaaagtgtcggcggttgaagaacccgcagaaagtgaaaaaaagcgtatacggagtcacagaagagtctcaggctcagagtccggtgcatgtcctttctcagccgattcggaaaacaacaaaggaagacattcgcaagcagatcaccttcctgaacgctcagattgataggcactgcctgaagatgagcaaagtggcagagagtctgatagcttacactgagcaatacgtcgagtatgacccgttaatcacccctgcggagccctccaatccatggatctctgatgatgtagcactgtgggacatagaaatgagcaaggaacctagccagcaacgtgttaaaagatgggggttttccttcgacgaaatacttaaggaccaggtgggaagggaccagtttctacgttttttggaatctgagttctcctctgaaaacctgcgcttctggctggctgtccaagatcttaaaaaacagcccctccaggacgtcgccaagcgcgtcgaggagatttggcaggagttcctggcgcccggtgccccttcagccatcaatttggacagccacagttacgaaatcactagtcagaacgtaaaggacggcgggagatatacctttgaagacgcacaggagcatatttacaagctgatgaaaagcgacagctacgcccggttcttacggtccaatgcatatcaggatttactgctagccaagaaaaaagtttggcttttatag

SEQ ID NO: 332945 - DNA, 1398 bp, Artificial Sequence
  derived and/or modified sequence
atggcccagggcagcggcgaccagcgggccgtgggcgtggccgacccagaagagtcgtctcctaacatgattgtatattgtaaaattgaagacattataacaaagatgcaagacgataaaaccgggggagttccgattagaacagtcaaatcttttcttagtaagatccccagcgtggtcacagggactgatatagtacagtggctgatgaaaaatctgtctatagaggacccagtggaagctattcatttgggcagtctcattgctgcccaggggtatatttttcccatctccgatcacgttttgactatgaaggatgacggaaccttctaccgcttccaagccccctacttctggccctccaactgctgggagccagaaaacacggattacgccatttacctgtgcaagaggaccatgcagaataaggctcgcctggagctcgcggattatgaggccgaaaaccttgcgcggctgcaacgcgcttttgccagaaaatgggagtttatttttatgcaggcagaagcgcaggttaaaatcgacagaaaaaaagacaagacagaacggaagatcctggatagccaagagagggccttctgggatgtccacaggcctgttcctggatgcgtgaatactacagaaatggacattagaaagtgtcgccggctcaagaacccccagaaagtgaagaaatccgtctacggtgttactgaggagagtcaggcccagtctcctgtgcatgtcctttcacagcccatcaggaaaaccaccaaagaagatatcagaaaacaaattaccttcttgaacgcgcaaattgatcgtcactgtctgaagatgtccaaagtagcggagagcctgatcgcttataccgaacaatacgtggaatacgatccgctcatcacccctgccgaaccatcgaatccttggatctccgacgatgtggcgttgtgggacatcgagatgtccaaggagccatctcagcagcgggtgaagcggtggggtttttcattcgacgagattctgaaggatcaggtcggtagggatcagttcctacggttcctggagagcgagtttagctccgagaacttacgcttctggttggcagtgcaggatctcaaaaagcagcccttacaggacgtagccaagcgcgtggaagaaatttggcaggagtttctggctcccggcgctccttccgccattaacctggactcccactcttatgagatcacatctcagaacgtgaaggatggcgggcgctacaccttcgaagatgctcaagagcacatatacaagctcatgaagtcagactcttacgcccgcttcctaagaagcaacgcctaccaggatctactcttggccaaaaaaaaaaaagtctcaaaggtggtggagctgccatag

SEQ ID NO: 332946 - DNA, 1383 bp, Artificial Sequence
  derived and/or modified sequence
atggcacagggatccggtgaccagcgggctgtcggggttgccgaccctgaggagtccagtccaaacatgatcgtatactgtaagattgaagatataataacaaaaatgcaggacgacaaaactggaggtgtcccaatccgaacagtcaagtcatttcttagtaaaattccaagcgtggtaacagggaccgacattgtgcaatggctgatgaaaaatctgagtatagaggacccggttgaggctatccatctaggtagcctgattgctgctcagggctatatctttcctatctccgatcatgtgctgactatgaaggatgatgggacattctaccgcttccaggctccatacttctggccttccaattgctgggagcccgagaacacggattatgccatctatttgtgtaaaagaacaatgcagaacaaagcacgactagaactggctgactacgaagctgagaatctggccagactgcagagagcctttgctcgaaaatgggagttcatcttcatgcaggcggaagcgcaagttaaaattgataggaagaaggacaagacagaacggaaaattctcgattctcaggagagagccttctgggacgtgcaccggccagtccctgggtgcgtgaacacaactgagatggatatccggaaatgtagacgccttaagaatccacagaaggtgaagaagagcgtttatggggtgaccgaagaatcacaggcccagtctcctgtgcacgtgttgagccagcctatccgcaagaccaccaaagaagacattaggaagcagattacattcctgaacgcccaaattgataggcactgcttgaaaatgtcaaaggtagcggagtcccttatcgcttataccgagcagtatgttgagtacgaccctctgatcacccctgccgagcctagcaatccctggatcagcgacgatgtggccctgtgggacatcgagatgagcaaagaacctagtcagcagcgggtcaagaggtggggattcagcttcgatgagatactcaaagaccaggtggggagagaccagttcctgagatttttagagagcgagttctcctcagaaaatctcaggttttggttggccgttcaggatcttaaaaagcagcctctccaggacgttgccaagagggtggaagagatctggcaggaattcctggcccctggcgctccttctgcaattaacctggatagccactcatatgaaataacatcccagaatgtgaaggacggcggacgatatacttttgaagacgcacaggaacatatatataaattaatgaagagcgactcttatgcacggtttctgcgctccaatgcctaccaggacttgttactcgccaagaaaaaagtctggctgttgtag

SEQ ID NO: 332947 - DNA, 1299 bp, Artificial Sequence
  derived and/or modified sequence
atcgaggatatcatcactaagatgcaggatgataagacggggggagtgccaattcgtacagtgaaaagcttcttgagcaagattcctagcgtggtgacaggtacggatatcgtgcagtggttgatgaagaacctgtccatcgaggaccccgtggaggccatccacctcggtagcctgattgccgcacaaggctatatatttccaatatccgatcacgtcctgaccatgaaagacgacgggaccttttatcgcttccaagccccatacttctggccatcgaactgctgggagccagagaatactgattacgccatctatctgtgtaagcggaccatgcagaacaaagctagacttgagctggctgattacgaggcagagaacctagccagacttcagagggcatttgcgcgaaagtgggagtttatctttatgcaagctgaggctcaggtgaaaattgatcgtaagaaagacaagaccgagagaaaaatccttgattcacaggaaagggcattctgggacgtgcacaggccagtgcccggatgcgttaacacaactgagatggacatcaggaaatgtagaaggctgaaaaatccgcagaaggtgaagaagagcgtctatggcgtcacggaggagagccaggcacaatccccagtgcacgtcctttcccaaccaatcagaaaaactaccaaggaggacatccgcaaacaaatcaccttccttaacgcccagatcgacaggcattgcctgaagatgtccaaggtcgccgaatcactgatcgcctacaccgaacaatacgtggaatacgatcccctgattacccccgctgagccctcgaacccatggattagcgacgatgtagcactatgggatattgagatgtcaaaagagccatcacagcaacgcgtcaagcgatggggcttttctttcgatgagattctgaaagaccaggtgggcagagatcagtttctgcgttttttagagtctgagttctcatctgaaaacttacgcttttggctggctgtgcaggatctgaagaaacaacccctgcaggacgtggccaagcgcgtggaggagatttggcaggagttcctggcgcctggtgctcccagtgccattaatttggacagccacagttacgagataacctcccaaaatgtcaaggatggtggcagatacacctttgaggatgcccaagaacacatttacaagctgatgaagagtgactcttacgctcggttcctgcggtccaatgcatatcaggacctgttactcgcaaaaaagaaggtttggctgctatag

SEQ ID NO: 332948 - DNA, 1398 bp, Artificial Sequence
  derived and/or modified sequence
atggctcaaggaagtggggatcagcgggcagtaggcgtcgccgaccccgaagagtctagccccaacatgattgtgtattgtaagattgaagacatcatcacaaaaatgcaagatgacaagacgggtggtgttccaatacgcaccgttaagtctttcttgtcaaaaattccctccgtcgtgacaggcacagacattgtgcagtggcttatgaagaacttgagtattgaagaccctgtggaggcaatccatctaggcagcctaatcgcagcacaagggtacatctttccaatctctgaccatgttctcactatgaaagatgacgggaccttttacagatttcaggcaccttatttttggccatcgaattgctgggagcctgagaatacagactatgcgatttatctctgtaagcgaacaatgcaaaacaaagcccgattggagctagcagattatgaagcagagaacttagcaaggctgcagcgggcatttgctcgtaagtgggaatttatattcatgcaagctgaagctcaagtgaagatagaccgaaagaaagacaagaccgagagaaagatcttagactctcaggaaagggccttttgggacgtgcataggccagtgccgggttgtgtgaacactactgaaatggacatacgcaaatgtcggaggctgaagaatccccagaaagttaaaaagtctgtgtatggcgtcacagaggagtctcaggcccagagccctgtccacgtactcagtcaacccattcggaagactaccaaggaggatattcggaaacagattacattcctcaacgcacaaattgatcgccattgcttgaagatgagcaaggttgctgagtcactgatcgcatacacggagcagtacgtggagtacgacccgctgataacacctgctgaacctagcaatccctggattagcgacgatgtagcactgtgggacatcgagatgtccaaggagcccagtcagcagagggtgaaaagatgggggttttcctttgacgaaattttaaaagatcaggtgggcagggaccagttcctgcggtttttggagtcagaattttcaagtgagaacctgagattctggctggctgtacaggacctcaagaagcaacctctccaggacgtggccaagcgggtcgaggagatatggcaggaatttctagccccaggagcccctagcgccatcaatcttgattctcacagctatgagattacctctcagaatgtcaaggatggcggtcggtatacatttgaggatgctcaggagcatatctacaagctgatgaaaagcgatagctacgctcgctttctgaggagcaatgcctaccaggatctcttgcttgcaaagaagaagaaagtgtccaaagtcgtagagctaccgtag

SEQ ID NO: 332949 - DNA, 1564 bp, Artificial Sequence
  derived and/or modified sequence
atggctcaaggatccggggatcaaagagcagtgggggttgctgacccagaggagagttctccaaacatgatcgtttactgcaaaattgaagacatcattacaaagatgcaagatgacaagacagggggtgtgcccatcagaacagtcaagagctttctctccaaaatccccagtgtcgtcacaggtactgacattgtgcagtggcttatgaagaacctttccattgaggacccagttgaagcaatacacttggggagccttatcgctgcccagggctacatctttccaatctcagaccatgttctcaccatgaaggatgatggcaccttttatcgtttccaggctccgtacttctggccttcgaactgctgggaacctgaaaacactgactatgccatctatctctgtaagaggacaatgcaaaataaagcaaggctggaactggcagattatgaagcagaaaacttagcaagactccagagggcctttgcgaggaagtgggaattcatctttatgcaagcagaagcacaagtaaagattgaccggaaaaaagacaagacagaaaggaaaattttggatagtcaagaacgagccttttgggatgtccacaggcctgtgccaggctgtgtgaacacaacagaaatggatatccgaaaatgtcgacgtttgaagaatccacaaaaggttaaaaagtccgtgtatggcgtgactgaagagtcccaggcacagagcccggtgcatgtactcagccaaccaatcaggaaaacaacaaaagaggacatccggaaacagataacatttttgaacgcacagatcgacagacattgtttgaaaatgtccaaagtggctgaaagtttaattgcctacacggaacaatatgtggaatatgaccctttgataacaccagctgagccatccaacccttggatcagcgatgacgttgctttgtgggacatagagatgagcaaagagcccagccaacagcgagtaaaaagatggggcttctctttcgatgagatattgaaggaccaggtggggcgggaccagtttctacgattcctggagtccgaattcagttcagaaaacctcaggttctggctggctgtccaagatcttaagaaacaacccctacaggatgtggccaagagggtagaagaaatctggcaagagtttctggctccaggggctccaagtgcaatcaacctggattctcacagctatgagataaccagtcaaaatgtcaaagatggagggagatatacatttgaagacgcccaggagcacatctacaagctgatgaagagtgacagctatgcccgcttcctccggtcaaatgcttaccaggatttgctgctggccaagaagaaggtgtggctactgtgatgggcagtgtggagcctggcctcctgtcgattcccctgctggaggatgccaatggaggggctcctttggaggaggccgacaccctcatacatggctctaatgcccattttttctaagaactagaggaaagaaaaattataggaacttttgataactccagcccagatctcatggatgaagg

SEQ ID NO: 332950 - DNA, 1480 bp, Artificial Sequence
  derived and/or modified sequence
attgaagacatcattacaaagatgcaagatgacaagacagggggtgtgcccatcagaacagtcaagagctttctctccaaaatccccagtgtcgtcacaggtactgacattgtgcagtggcttatgaagaacctttccattgaggacccagttgaagcaatacacttggggagccttatcgctgcccagggctacatctttccaatctcagaccatgttctcaccatgaaggatgatggcaccttttatcgtttccaggctccgtacttctggccttcgaactgctgggaacctgaaaacactgactatgccatctatctctgtaagaggacaatgcaaaataaagcaaggctggaactggcagattatgaagcagaaaacttagcaagactccagagggcctttgcgaggaagtgggaattcatctttatgcaagcagaagcacaagtaaagattgaccggaaaaaagacaagacagaaaggaaaattttggatagtcaagaacgagccttttgggatgtccacaggcctgtgccaggctgtgtgaacacaacagaaatggatatccgaaaatgtcgacgtttgaagaatccacaaaaggttaaaaagtccgtgtatggcgtgactgaagagtcccaggcacagagcccggtgcatgtactcagccaaccaatcaggaaaacaacaaaagaggacatccggaaacagataacatttttgaacgcacagatcgacagacattgtttgaaaatgtccaaagtggctgaaagtttaattgcctacacggaacaatatgtggaatatgaccctttgataacaccagctgagccatccaacccttggatcagcgatgacgttgctttgtgggacatagagatgagcaaagagcccagccaacagcgagtaaaaagatggggcttctctttcgatgagatattgaaggaccaggtggggcgggaccagtttctacgattcctggagtccgaattcagttcagaaaacctcaggttctggctggctgtccaagatcttaagaaacaacccctacaggatgtggccaagagggtagaagaaatctggcaagagtttctggctccaggggctccaagtgcaatcaacctggattctcacagctatgagataaccagtcaaaatgtcaaagatggagggagatatacatttgaagacgcccaggagcacatctacaagctgatgaagagtgacagctatgcccgcttcctccggtcaaatgcttaccaggatttgctgctggccaagaagaaggtgtggctactgtgatgggcagtgtggagcctggcctcctgtcgattcccctgctggaggatgccaatggaggggctcctttggaggaggccgacaccctcatacatggctctaatgcccattttttctaagaactagaggaaagaaaaattataggaacttttgataactccagcccagatctcatggatgaagg

SEQ ID NO: 332951 - DNA, 1383 bp, Artificial Sequence
  derived and/or modified sequence
atggcccagggcagcggcgaccagagagccgtgggcgtggccgaccccgaggagagcagccccaacatgatcgtgtactgcaagatcgaggacatcatcaccaagatgcaggacgacaagaccggcggcgtgcccatcagaaccgtgaagagcttcctgagcaagatccccagcgtggtgaccggcaccgacatcgtgcagtggctgatgaagaacctgagcatcgaggaccccgtggaggccatccacctgggcagcctgatcgccgcccagggctacatcttccccatcagcgaccacgtgctgaccatgaaggacgacggcaccttctacagattccaggccccctacttctggcccagcaactgctgggagcccgagaacaccgactacgccatctacctgtgcaagagaaccatgcagaacaaggccagactggagctggccgactacgaggccgagaacctggccagactgcagagagccttcgccagaaagtgggagttcatcttcatgcaggccgaggcccaggtgaagatcgacagaaagaaggacaagaccgagagaaagatcctggacagccaggagagagccttctgggacgtgcacagacccgtgcccggctgcgtgaacaccaccgagatggacatcagaaagtgcagaagactgaagaacccccagaaggtgaagaagagcgtgtacggcgtgaccgaggagagccaggcccagagccccgtgcacgtgctgagccagcccatcagaaagaccaccaaggaggacatcagaaagcagatcaccttcctgaacgcccagatcgacagacactgcctgaagatgagcaaggtggccgagagcctgatcgcctacaccgagcagtacgtggagtacgaccccctgatcacccccgccgagcccagcaacccctggatcagcgacgacgtggccctgtgggacatcgagatgagcaaggagcccagccagcagagagtgaagagatggggcttcagcttcgacgagatcctgaaggaccaggtgggcagagaccagttcctgagattcctggagagcgagttcagcagcgagaacctgagattctggctggccgtgcaggacctgaagaagcagcccctgcaggacgtggccaagagagtggaggagatctggcaggagttcctggcccccggcgcccccagcgccatcaacctggacagccacagctacgagatcaccagccagaacgtgaaggacggcggcagatacaccttcgaggacgcccaggagcacatctacaagctgatgaagagcgacagctacgccagattcctgagaagcaacgcctaccaggacctgctgctggccaagaagaaggtgtggctgctgtag

SEQ ID NO: 332952 - DNA, 1299 bp, Artificial Sequence
  derived and/or modified sequence
atcgaggacatcatcaccaagatgcaggacgacaagaccggcggcgtgcccatcagaaccgtgaagagcttcctgagcaagatccccagcgtggtgaccggcaccgacatcgtgcagtggctgatgaagaacctgagcatcgaggaccccgtggaggccatccacctgggcagcctgatcgccgcccagggctacatcttccccatcagcgaccacgtgctgaccatgaaggacgacggcaccttctacagattccaggccccctacttctggcccagcaactgctgggagcccgagaacaccgactacgccatctacctgtgcaagagaaccatgcagaacaaggccagactggagctggccgactacgaggccgagaacctggccagactgcagagagccttcgccagaaagtgggagttcatcttcatgcaggccgaggcccaggtgaagatcgacagaaagaaggacaagaccgagagaaagatcctggacagccaggagagagccttctgggacgtgcacagacccgtgcccggctgcgtgaacaccaccgagatggacatcagaaagtgcagaagactgaagaacccccagaaggtgaagaagagcgtgtacggcgtgaccgaggagagccaggcccagagccccgtgcacgtgctgagccagcccatcagaaagaccaccaaggaggacatcagaaagcagatcaccttcctgaacgcccagatcgacagacactgcctgaagatgagcaaggtggccgagagcctgatcgcctacaccgagcagtacgtggagtacgaccccctgatcacccccgccgagcccagcaacccctggatcagcgacgacgtggccctgtgggacatcgagatgagcaaggagcccagccagcagagagtgaagagatggggcttcagcttcgacgagatcctgaaggaccaggtgggcagagaccagttcctgagattcctggagagcgagttcagcagcgagaacctgagattctggctggccgtgcaggacctgaagaagcagcccctgcaggacgtggccaagagagtggaggagatctggcaggagttcctggcccccggcgcccccagcgccatcaacctggacagccacagctacgagatcaccagccagaacgtgaaggacggcggcagatacaccttcgaggacgcccaggagcacatctacaagctgatgaagagcgacagctacgccagattcctgagaagcaacgcctaccaggacctgctgctggccaagaagaaggtgtggctgctgtag

SEQ ID NO: 332953 - DNA, 1398 bp, Artificial Sequence
  derived and/or modified sequence
atggcccagggcagcggcgaccagagagccgtgggcgtggccgaccccgaggagagcagccccaacatgatcgtgtactgcaagatcgaggacatcatcaccaagatgcaggacgacaagaccggcggcgtgcccatcagaaccgtgaagagcttcctgagcaagatccccagcgtggtgaccggcaccgacatcgtgcagtggctgatgaagaacctgagcatcgaggaccccgtggaggccatccacctgggcagcctgatcgccgcccagggctacatcttccccatcagcgaccacgtgctgaccatgaaggacgacggcaccttctacagattccaggccccctacttctggcccagcaactgctgggagcccgagaacaccgactacgccatctacctgtgcaagagaaccatgcagaacaaggccagactggagctggccgactacgaggccgagaacctggccagactgcagagagccttcgccagaaagtgggagttcatcttcatgcaggccgaggcccaggtgaagatcgacagaaagaaggacaagaccgagagaaagatcctggacagccaggagagagccttctgggacgtgcacagacccgtgcccggctgcgtgaacaccaccgagatggacatcagaaagtgcagaagactgaagaacccccagaaggtgaagaagagcgtgtacggcgtgaccgaggagagccaggcccagagccccgtgcacgtgctgagccagcccatcagaaagaccaccaaggaggacatcagaaagcagatcaccttcctgaacgcccagatcgacagacactgcctgaagatgagcaaggtggccgagagcctgatcgcctacaccgagcagtacgtggagtacgaccccctgatcacccccgccgagcccagcaacccctggatcagcgacgacgtggccctgtgggacatcgagatgagcaaggagcccagccagcagagagtgaagagatggggcttcagcttcgacgagatcctgaaggaccaggtgggcagagaccagttcctgagattcctggagagcgagttcagcagcgagaacctgagattctggctggccgtgcaggacctgaagaagcagcccctgcaggacgtggccaagagagtggaggagatctggcaggagttcctggcccccggcgcccccagcgccatcaacctggacagccacagctacgagatcaccagccagaacgtgaaggacggcggcagatacaccttcgaggacgcccaggagcacatctacaagctgatgaagagcgacagctacgccagattcctgagaagcaacgcctaccaggacctgctgctggccaagaagaagaaggtgagcaaggtggtggagctgccctag

SEQ ID NO: 332954 - protein, 846 aa, Artificial Sequence
  derived and/or modified sequence
MSSSHFASRHRKDISTEMIRTKIAHRKSLSQKENRHKEYERNRHFGLKDVNIPTLEGRILVELDETSQGLVPEKTNVKPRAMKTILGDQRKQMLQKYKEEKQLQKLKEQREKAKRGIFKVGRYRPDMPCFLLSNQNAVKAEPKKAIPSSVRITRSKAKDQMEQTKIDNESDVRAIRPGPRQTSEKKVSDKEKKVVQPVMPTSLRMTRSATQAAKQVPRTVSSTTARKPVTRAANENEPEGKVPSKGRPAKNVETKPDKGISCKVDSEENTLNSQTNATSGMNPDGVLSKMENLPEINTAKIKGKNSFAPKDFMFQPLDGLKTYQVTPMTPRSANAFLTPSYTWTPLKTEVDESQATKEILAQKCKTYSTKTIQQDSNKLPCPLGPLTVWHEEHVLNKNEATTKNLNGLPIKEVPSLERNEGRIAQPHHGVPYFRNILQSETEKLTSHCFEWDRKLELDIPDDAKDLIRTAVGQTRLLMKERFKQFEGLVDDCEYKRGIKETTCTDLDGFWDMVSFQIEDVIHKFNNLIKLEESGWQVNNNMNHNMNKNVFRKKVVSGIASKPKQDDAGRIAARNRLAAIKNAMRERIRQEECAETAVSVIPKEVDKIVFDAGFFRVESPVKLFSGLSVSSEGPSQRLGTPKSVNKAVSQSRNEMGIPQQTTSPENAGPQNTKSEHVKKTLFLSIPESRSSIEDAQCPGLPDLIEENHVVNKTDLKVDCLSSERMSLPLLAGGVADDINTNKKEGISDVVEGMELNSSITSQDVLMSSPEKNTASQNSILEEGETKISQSELFDNKSLTTECHLLDSPGLNCSNPFTQLERRHQEHARHISFGGNLITFSPLQPGEF

SEQ ID NO: 332955 - DNA, 2541 bp, Artificial Sequence
  derived and/or modified sequence
atgtccagctcccactttgcctccagacaccggaaggacatctcaacagagatgattagaactaaaatcgcacataggaaaagtctcagccagaaagaaaacaggcataaagaatacgagagaaaccgtcacttcggccttaaggacgtaaacatccccaccctcgagggccggatactggtcgagctcgacgagaccagccaggggttagttcccgagaaaaccaacgtgaaaccccgggccatgaaaacgatccttggtgatcagaggaaacagatgctgcagaaatacaaagaggaaaagcaattgcagaagctgaaggagcagagggagaaagcaaaacgaggcattttcaaggtcggacgatacagacccgacatgccctgcttcctgctgtccaatcagaacgctgtgaaggccgaacccaaaaaagccatcccctcaagcgtcaggataacgcgcagtaaggccaaagaccagatggaacaaacaaagatcgataatgaatctgatgtgagagctatccgaccggggcctcgccagacgtcagaaaagaaggtctccgacaaagaaaaaaaggtagttcagcccgtgatgcctaccagtctacggatgaccaggtcagccacgcaggccgctaagcaggttcctagaaccgtaagttcaactactgctcgtaagccagtgacacgagctgccaatgaaaatgagcccgagggaaaagtcccatcaaaggggcgtccagccaagaatgtggagaccaagcccgataaggggatttcatgtaaggtggatagcgaagagaatactctcaatagccagaccaatgctacaagcggcatgaatcctgacggagttcttagcaagatggagaacctaccggagatcaatacagccaagatcaaagggaagaacagcttcgccccaaaagatttcatgtttcagcccctggacggtctgaagacctaccaggtaacccccatgacaccgcgaagcgcaaacgcgtttctgacaccttcttatacatggacaccgctgaagacagaggtagatgagagccaggctacgaaggagattcttgcgcagaagtgtaagacctactctaccaagacgattcaacaagactctaacaaactgccgtgtccattaggaccactcacagtatggcacgaggaacatgttcttaacaagaatgaggccacgacaaaaaacttgaacggtttaccgatcaaggaagtgcctagtttggaacgcaatgagggtaggatagcccagccacaccatggcgtcccatactttcggaatatactgcagtccgagacagagaagcttacttcccactgttttgagtgggaccgcaaactggagctggatattcccgacgatgccaaggacctgatacggacagccgttggacagacaagacttctgatgaaggaaaggttcaagcaatttgaaggcctggttgatgattgtgagtacaaacgagggattaaggagaccacgtgcacagatctggatgggttctgggacatggtaagcttccaaatagaggatgtgattcacaaattcaacaaccttataaaactggaggagtccggttggcaggtgaataacaacatgaaccataatatgaataagaatgtctttcggaaaaaagttgtgtctggtatcgcttctaaaccaaagcaggatgatgccggccgtattgctgctcgcaacagactcgcggcgattaagaatgctatgagggaacgtatcaggcaagaagaatgtgccgagaccgccgtctccgttatccccaaagaggtcgacaaaatcgttttcgatgcaggctttttccgagtggagtcccctgtaaaactgttctccgggctgtcggtcagctctgaaggcccctcgcaacggctgggaaccccgaagtcagttaacaaagccgtctcacaatcccggaacgaaatgggcatacctcaacaaacaacaagcccggaaaatgcaggccctcaaaatacgaagagcgagcatgttaagaaaaccttgttcctatccatcccagagtcacgcagtagtattgaagacgctcagtgccccgggctacccgatctgatcgaggagaatcacgtcgtcaacaaaaccgacctaaaagtggactgtctttcctcagagcgcatgtcactcccactgttggcaggaggagtggccgacgacataaataccaataagaaggaaggcatctccgatgttgtggaagggatggagcttaattcctccatcacgagtcaggatgtgctgatgagtagccccgaaaagaatacagcaagtcagaattcgattctggaagagggtgagacaaaaatctcccagagtgagttgtttgacaataagtccttaacaacagaatgtcatctcttagacagtccaggactgaattgttcaaatccttttacccagctggagaggcgtcatcaagaacacgctcggcacattagctttggagggaatctgattacattttcccctctgcagccgggggagttctag

SEQ ID NO: 332956 - DNA, 2541 bp, Artificial Sequence
  derived and/or modified sequence
atgagcagcagccactttgccagccgccacaggaaggacatcagcacagagatgatccgcaccaagatcgcccacaggaagagcctgagccagaaggaaaatagacacaaggagtatgaaagaaacagacacttcggcctgaaggatgtgaacatccccaccctggagggccgcatcctggtggagctggatgagaccagccagggcctggtgcctgagaagaccaacgtgaagccccgggccatgaagaccatcctgggggaccagaggaagcagatgctgcagaagtacaaggaggagaagcagctgcagaagctgaaggagcagcgggagaaggccaagaggggcatcttcaaggtgggccgctacagaccagacatgccctgcttcctgctgagcaaccagaatgctgtgaaggccgagcccaagaaggccatccccagctctgtgcgcatcaccaggagcaaggccaaggaccagatggagcagaccaagattgacaatgaaagtgatgtgcgggccatccggcccggcccccggcagaccagcgagaagaaggtgtctgacaaggagaagaaggtggtgcagcctgtgatgcccaccagcctgaggatgaccaggtctgccacccaggccgccaagcaggtgcccaggacagtgagcagcaccacagccaggaagcctgtgacccgggccgccaatgaaaatgaacctgagggcaaggtgcccagcaagggccggcctgccaagaatgtggagaccaagccagacaagggcatcagctgcaaggtggacagcgaggagaacaccctgaacagccagaccaatgccaccagcggcatgaacccagatggagtgctgagcaagatggagaacctgcctgagatcaacacagccaagatcaagggcaagaacagctttgcccccaaggacttcatgttccagcccctggatggcctgaagacctaccaggtgacccccatgacccccaggtctgccaatgccttcctgacccccagctacacctggacccccctgaagacagaggtggatgagagccaggccaccaaggagatcctggcccagaagtgcaagacctacagcaccaagaccatccagcaggacagcaacaagctgccctgccccctgggccccctgactgtgtggcatgaggagcacgtgctgaacaagaatgaggccaccaccaagaacctgaatggcctgcccatcaaggaggtgcccagcctggagagaaatgaaggaagaattgcccagccccaccacggcgtgccctacttcaggaacatcctgcagagcgagacagagaagctgaccagccactgctttgagtgggacaggaagctggagctggacatcccagatgatgccaaggacctgatcagaacagctgtgggccagacccggctgctgatgaaggagcgcttcaagcagtttgagggcctggtggatgactgtgagtacaagaggggcatcaaggagaccacctgcacagacctggatggcttctgggacatggtgtccttccagattgaagatgtgatccacaagttcaacaacctgatcaagctggaggagagcggctggcaggtgaacaacaacatgaaccacaacatgaacaagaatgtgttcaggaagaaggtggtgtctggcatcgccagcaagcccaagcaggatgatgctggaagaattgctgccaggaaccggctggccgccatcaagaatgccatgagggagcgcatccggcaggaggagtgtgccgagacagctgtgtctgtcatccccaaggaggtggacaagatcgtgtttgatgctggcttcttccgggtggagagccctgtgaagctgttcagcggcctgtctgtgagcagcgagggccccagccagaggctgggcacccccaagtctgtgaacaaggctgtgtcccagagcagaaatgagatgggcatcccccagcagaccaccagcccagaaaatgccggcccccagaacaccaagtcagaacatgtgaagaagaccctcttcctgagcatccctgagagccgcagcagcattgaagatgcccagtgccccggcctgcctgacctgattgaagaaaatcatgtggtgaacaagacagacctgaaggtggactgcctgagcagcgagaggatgagcctgcccctgctggccggcggcgtggctgatgacatcaacaccaacaagaaggagggcatcagtgatgtggtggagggcatggagctgaacagcagcatcaccagccaggatgtgctgatgagcagccctgagaagaacacagccagccagaacagcatcctggaggagggggagaccaagatcagccagagcgagctgtttgacaacaagagcctgaccacagagtgccacctgctggacagccctggcctgaactgcagcaaccccttcacccagctggagcggcggcaccaggagcacgcccggcacatcagctttggaggcaacctgatcaccttcagccccctgcagcctggagagttctag

SEQ ID NO: 332957 - DNA, 2541 bp, Artificial Sequence
  derived and/or modified sequence
atgagcagcagccacttcgccagccggcaccggaaggacatcagcactgagatgattcggacgaaaatcgctcaccgtaaatcactttctcagaaagagaataggcacaaagagtatgaacggaataggcactttggtttgaaggatgtcaacatccctacgctggagggccggattttggtggagctcgacgagacttctcaggggcttgtgccggagaaaacaaacgtgaaacctcgtgctatgaagacaatcctgggggatcaacggaaacaaatgctgcagaagtataaggaagagaagcagctccagaagttgaaggagcaaagagaaaaagctaagaggggcatttttaaagttggccgttatcgtcctgacatgccctgtttcctactgagcaaccaaaacgctgttaaagcggaacctaaaaaggcgatcccatcctctgtacgcatcacccgcagcaaggctaaagaccagatggagcagactaaaattgacaatgaaagcgatgtgagggccatccgcccagggccacgtcagaccagcgaaaagaaggtgtccgacaaggagaagaaagtggtccagcccgtcatgcctacctccctcaggatgactcggtcggctacccaggctgccaaacaagttccccgaaccgtgtccagcacgacggctcgcaagccagtgacccgagcagccaatgaaaatgaacctgaaggcaaggtgccctcgaaggggcggcccgctaaaaacgtggagactaagcccgataagggcatctcctgtaaggttgactccgaagaaaataccctcaactcccagaccaacgcaacttcagggatgaaccccgatggagtgctgtcaaagatggagaatctgcccgagattaacacagctaagatcaagggaaaaaatagttttgccccaaaagatttcatgtttcagcctctggacgggctgaagacttatcaggttactcctatgaccccgcggtcagcgaatgcttttctaacacccagctacacatggactccattgaagaccgaagtggacgaaagtcaggctactaaggagatccttgcccagaaatgtaaaacctattccaccaaaacaattcagcaggatagcaataaacttccatgtcccctcggccccctaaccgtctggcatgaggagcacgttctgaacaagaatgaggctactacaaaaaatctgaatgggctgcctatcaaagaggtgcccagtctagagcggaatgagggccgtattgcccagccccatcatggcgttccctatttcagaaacatcctgcaatcagagacagagaagctcaccagtcattgtttcgagtgggatcggaagctcgaactggacattccagacgatgcaaaagacctcatcagaaccgctgtaggtcaaacccgtctgttaatgaaggaacgtttcaagcagtttgagggcctagtagacgactgcgagtataagcgtggcattaaggaaactacctgtacagacctagacggcttttgggacatggtttcattccagattgaggacgtgatccataaatttaacaaccttattaaattagaagagagcggctggcaagtgaacaacaacatgaatcataatatgaacaagaacgtgtttagaaagaaagttgtgagcggtatcgcctcgaaacctaaacaggatgatgccggtcgcatcgccgccagaaataggttagcagctataaagaacgccatgcgtgagaggatccgccaagaagagtgcgccgaaactgcagtttcagtgatacccaaagaggtggataaaattgtgtttgacgccggattctttcgggtggagagccccgtgaaattattttcagggctgagcgtctcatctgaggggccatcgcagagattggggacgcccaagtcagtgaataaagcagtctcacagtcaaggaatgagatgggcatccctcagcagacgacgagccctgagaatgcaggtccacaaaatacgaaaagcgaacatgtgaaaaaaacactgtttctatccatccccgagtcaagaagttcaatcgaggatgcccagtgtcctggcttgcctgacctgattgaagagaaccacgtggtgaacaaaacagacctgaaggtggattgtctgagcagcgagaggatgtccttaccattgttagctggaggcgtggccgatgatataaacactaataagaaggagggcatcagcgacgttgtggaaggtatggagctgaacagttctataacttcccaggatgtactgatgtcttctcccgagaagaataccgccagtcagaatagcatcctggaggagggggagaccaagatctctcaatctgagctgttcgacaataagagtctgactacggagtgtcacctcctggattcaccggggctaaactgctccaatccgttcacacagctggagagacggcaccaggagcatgcaaggcacatctcgtttggcggaaatctgatcacatttagcccccttcagccgggggagttttag

SEQ ID NO: 332958 - DNA, 2541 bp, Artificial Sequence
  derived and/or modified sequence
atgagctccagtcatttcgcgagccgccaccggaaggatatctcgaccgaaatgatacggaccaagatcgcccatagaaaaagcctctctcagaaagagaataggcacaaggagtacgagcgaaacagacatttcggcctcaaagacgttaatataccgacacttgaggggagaatcttggtggaactggatgaaacaagccagggcttagtgccagaaaagacgaacgtcaagcccagggctatgaagaccatactcggggaccagagaaagcaaatgctgcagaaatataaagaagaaaagcagcttcaaaagcttaaagagcagagagagaaggctaagcgcggtatctttaaggtcggccgatacagaccagacatgccttgtttcttactgagcaatcagaatgccgtgaaagccgaacccaagaaagccataccctctagcgtgcgcattactcgctctaaggcaaaggaccagatggagcagaccaagattgacaacgaatccgacgtccgggctatcagacccggaccaagacagacttcggaaaaaaaggtatcagataaagagaagaaggtggtgcaaccagtgatgccgacaagtctccggatgacgcggagtgccactcaggccgctaagcaagtcccaaggacggtgtcctctaccaccgcgcgaaaacccgtgacacgcgctgcaaacgagaatgagcccgaagggaaagtgccctccaaaggccgacctgccaaaaatgtggaaacaaagcctgacaagggtatctcctgcaaagtggactccgaggaaaatacactgaactctcagacaaacgccaccagcggtatgaatcccgatggagtcctttctaaaatggaaaacttgcccgaaataaatacagcgaaaatcaagggcaaaaatagttttgctccgaaggactttatgttccaacccttggacgggctgaagacataccaagtgacccctatgacacccagaagcgccaacgcgttcctcacgccatcatatacttggactccccttaagactgaggtcgacgagagccaggccactaaggaaatattggcccagaagtgtaagacctatagcactaaaacgatccaacaggactctaataagcttccatgcccgctgggaccactaaccgtatggcatgaggaacacgtcttgaacaagaatgaggcgaccacgaaaaacctgaatggtctgcctataaaagaggtgccctctctggagaggaacgagggcagaattgcacaacctcaccacggagtgccatactttagaaatattctacaaagcgagaccgagaaactgacatcgcattgcttcgagtgggataggaagctggagctggacatcccagacgacgctaaggatctgatacgcacagccgttggccaaacccgcctacttatgaaggaacgctttaagcagttcgaggggcttgtagacgactgcgaatacaagagaggcatcaaggagacaacctgtacggatctggacggattttgggatatggtatcatttcagattgaggacgtgatacacaaattcaacaatctgatcaagctggaagaaagcggttggcaggtcaacaacaacatgaatcacaatatgaacaaaaatgtctttcgtaagaaggtggtttctggaattgcaagtaaaccgaagcaggacgacgctggcagaatcgccgctagaaatcggctggcagcaatcaaaaatgctatgagggaaaggatacggcaagaagagtgtgccgaaacagctgtgtcagtcatacccaaggaggtggacaaaatcgtgtttgacgccggttttttccgggtagaatctcccgtaaagctgttcagtggcctgagcgtctcgtctgagggtcctagccaacggctcgggactccaaagtctgtgaataaggcagtcagccaatcacggaatgaaatgggtataccccagcaaacaacttctcctgaaaacgccggtccccagaacaccaagtctgagcatgtaaagaagactctttttctttcaatacccgagtcaagatctagtatcgaggatgcccagtgtcctggtttgcccgacctcatagaggagaatcacgtggtcaataaaaccgatctgaaggttgactgtttatcttcagagaggatgtccttgccccttctcgctggcggagtcgccgatgatataaatacgaacaagaaggagggcatctcagatgtagttgagggcatggagctcaactccagtattaccagccaggatgttttaatgtccagcccggaaaaaaacactgccagccagaattctatactggaagaaggagagactaaaatctctcaatccgaactgtttgacaacaaaagcctgaccaccgagtgccatttgctagactcaccgggattaaattgctccaacccgtttacccagctcgaacggagacaccaggagcacgcgagacatatcagctttggcggaaaccttattacatttagcccactccaacctggcgagttttag

SEQ ID NO: 332959 - DNA, 2973 bp, Artificial Sequence
  derived and/or modified sequence
agcaaaccaatcgcaagcctcgttgagtggaaggggtgggatcttccccggaagtgttggttaaagcccctccaatcagcggctcggtgcggcaagtttgaatttcgtggaggctcgggttgtgagggttcctgcttcggagtcggcggtggtcgtccagaccgagtgttctttactttttgtttggttgaggtttcacgctagaaggtggctcaggatgtcttcatcacattttgccagtcgacacaggaaggatataagtactgaaatgattagaactaaaattgctcataggaaatcactgtctcagaaagaaaatagacataaggaatacgaacgaaatagacactttggtttgaaagatgtaaacattccaaccttggaaggtagaattcttgttgaattagatgagacatctcaagggcttgttccagaaaagaccaatgttaagccaagggcaatgaaaactattctaggtgatcaacgaaaacagatgctccaaaaatacaaagaagaaaagcaacttcaaaaattgaaagagcagagagagaaagctaaacgaggaatatttaaagtgggtcgttatagacctgatatgccttgttttcttttatcaaaccagaatgctgtgaaagctgagccaaaaaaggctattccatcttctgtacggattacaaggtcaaaggccaaagaccaaatggagcagactaagattgataacgagagtgatgttcgagcaatccgacctggtccaagacaaacttctgaaaagaaagtgtcagacaaagagaaaaaagttgtgcagcctgtaatgcccacgtcgttgagaatgactcgatcagctactcaagcagcaaagcaggttcccagaacagtctcatctaccacagcaagaaagccagtcacaagagctgctaatgaaaacgaaccagaaggaaaggtgccaagtaaaggaagacctgccaaaaatgtagaaacaaaacccgacaagggtatttcttgtaaagtcgatagtgaagaaaatactttgaattcacaaactaatgcaacaagtggaatgaatccagatggagtcttatcaaaaatggaaaacttacctgagataaatactgcaaaaataaaagggaagaattcctttgcacctaaggattttatgtttcagccactggatggtctgaagacctatcaagtaacacctatgactcccagaagtgccaatgcttttttgacacccagttacacctggactcctttaaaaacagaagttgatgagtctcaagcaacaaaagaaattttggcacaaaaatgtaaaacttactctaccaagacaatacagcaagattcaaataaattgccatgtcctttgggtcctctaactgtttggcatgaagaacatgttttaaataaaaatgaagctactactaaaaatttaaatggccttccaataaaagaagtcccatcacttgaaagaaatgaaggtcgaattgctcagccccaccatggtgtgccatatttcagaaatatcctccagtcagaaactgagaaattaacttcacattgcttcgagtgggacaggaaacttgaattggacattccagatgatgctaaagatcttattcgcacagcagttggtcaaacaagactccttatgaaggaaaggtttaaacagtttgaaggactggttgatgattgtgaatataaacgaggtataaaggagactacctgtacagatctggatggattttgggatatggttagttttcagatagaagatgtaatccacaaattcaacaatctgatcaaacttgaggaatctgggtggcaagtcaataataatatgaatcataatatgaacaaaaatgtctttaggaaaaaagttgtctcaggtatagcaagtaaaccaaaacaggatgatgctggaagaattgcagcgagaaatcgcctagctgccataaaaaatgcaatgagagagagaattaggcaggaagaatgtgctgaaacagcagtttctgtgataccaaaggaagttgataaaatagtgttcgatgctggatttttcagagttgaaagtcctgttaaattattctcaggactttctgtctcttctgaaggcccttctcaaagacttggaacacctaagtctgtcaacaaagctgtatctcagagtagaaatgagatgggcattccacaacaaactacatcaccagaaaatgccggtcctcagaatacgaaaagtgaacatgtgaagaagactttgtttttgagtattcctgaaagcaggagcagcatagaagatgctcagtgtcctggattaccagatttaattgaagaaaatcatgttgtaaataagacagacttgaaggtggattgtttatccagtgagagaatgagtttgcctcttcttgctggtggagtagcagatgatattaatactaacaaaaaagaaggaatttcagatgttgtggaaggaatggaactgaattcttcaattacatcacaggatgttttgatgagtagccctgaaaaaaatacagcttcacaaaatagcatcttagaagaaggggaaactaaaatttctcagtcagaactatttgataataaaagtctcactactgaatgccaccttcttgattcaccaggtctaaactgcagtaatccatttactcagctggagaggagacatcaagaacatgccagacacatttcttttggtggtaacctgattactttttcacctctacaaccaggagaattttgaatttaaaaataaatccaaacattttccttcatattatcaatgcttatatattccttagactattgaaattttggagaaaatgtatttgtgttcacttctatagcatataatgttttaatattctgtgttcatcaaagtgtattttagatatactctttctcaagggaagtggggatattttgtacattttcaacacagaataaaaaatgtactgt

SEQ ID NO: 332960 - DNA, 2541 bp, Artificial Sequence
  derived and/or modified sequence
atgagcagcagccacttcgccagcagacacagaaaggacatcagcaccgagatgatcagaaccaagatcgcccacagaaagagcctgagccagaaggagaacagacacaaggagtacgagagaaacagacacttcggcctgaaggacgtgaacatccccaccctggagggcagaatcctggtggagctggacgagaccagccagggcctggtgcccgagaagaccaacgtgaagcccagagccatgaagaccatcctgggcgaccagagaaagcagatgctgcagaagtacaaggaggagaagcagctgcagaagctgaaggagcagagagagaaggccaagagaggcatcttcaaggtgggcagatacagacccgacatgccctgcttcctgctgagcaaccagaacgccgtgaaggccgagcccaagaaggccatccccagcagcgtgagaatcaccagaagcaaggccaaggaccagatggagcagaccaagatcgacaacgagagcgacgtgagagccatcagacccggccccagacagaccagcgagaagaaggtgagcgacaaggagaagaaggtggtgcagcccgtgatgcccaccagcctgagaatgaccagaagcgccacccaggccgccaagcaggtgcccagaaccgtgagcagcaccaccgccagaaagcccgtgaccagagccgccaacgagaacgagcccgagggcaaggtgcccagcaagggcagacccgccaagaacgtggagaccaagcccgacaagggcatcagctgcaaggtggacagcgaggagaacaccctgaacagccagaccaacgccaccagcggcatgaaccccgacggcgtgctgagcaagatggagaacctgcccgagatcaacaccgccaagatcaagggcaagaacagcttcgcccccaaggacttcatgttccagcccctggacggcctgaagacctaccaggtgacccccatgacccccagaagcgccaacgccttcctgacccccagctacacctggacccccctgaagaccgaggtggacgagagccaggccaccaaggagatcctggcccagaagtgcaagacctacagcaccaagaccatccagcaggacagcaacaagctgccctgccccctgggccccctgaccgtgtggcacgaggagcacgtgctgaacaagaacgaggccaccaccaagaacctgaacggcctgcccatcaaggaggtgcccagcctggagagaaacgagggcagaatcgcccagccccaccacggcgtgccctacttcagaaacatcctgcagagcgagaccgagaagctgaccagccactgcttcgagtgggacagaaagctggagctggacatccccgacgacgccaaggacctgatcagaaccgccgtgggccagaccagactgctgatgaaggagagattcaagcagttcgagggcctggtggacgactgcgagtacaagagaggcatcaaggagaccacctgcaccgacctggacggcttctgggacatggtgagcttccagatcgaggacgtgatccacaagttcaacaacctgatcaagctggaggagagcggctggcaggtgaacaacaacatgaaccacaacatgaacaagaacgtgttcagaaagaaggtggtgagcggcatcgccagcaagcccaagcaggacgacgccggcagaatcgccgccagaaacagactggccgccatcaagaacgccatgagagagagaatcagacaggaggagtgcgccgagaccgccgtgagcgtgatccccaaggaggtggacaagatcgtgttcgacgccggcttcttcagagtggagagccccgtgaagctgttcagcggcctgagcgtgagcagcgagggccccagccagagactgggcacccccaagagcgtgaacaaggccgtgagccagagcagaaacgagatgggcatcccccagcagaccaccagccccgagaacgccggcccccagaacaccaagagcgagcacgtgaagaagaccctgttcctgagcatccccgagagcagaagcagcatcgaggacgcccagtgccccggcctgcccgacctgatcgaggagaaccacgtggtgaacaagaccgacctgaaggtggactgcctgagcagcgagagaatgagcctgcccctgctggccggcggcgtggccgacgacatcaacaccaacaagaaggagggcatcagcgacgtggtggagggcatggagctgaacagcagcatcaccagccaggacgtgctgatgagcagccccgagaagaacaccgccagccagaacagcatcctggaggagggcgagaccaagatcagccagagcgagctgttcgacaacaagagcctgaccaccgagtgccacctgctggacagccccggcctgaactgcagcaaccccttcacccagctggagagaagacaccaggagcacgccagacacatcagcttcggcggcaacctgatcaccttcagccccctgcagcccggcgagttctag

SEQ ID NO: 332961 - protein, 691 aa, Artificial Sequence
  derived and/or modified sequence
MSWFVDLAGKAEDLLNRVDQGAATALSRKDNASNIYSKNTDYTELHQQNTDLIYQTGPKSTYISSAADNIRNQKATILAGTANVKVGSRTPVEASHPVENASVPRPSSHFVRRKKSEPDDELLFDFLNSSQKEPTGRVEIRKEKGKTPVFQSSQTSSVSSVNPSVTTIKTIEENSFGSQTHEAASNSDSSHEGQEESSKENVSSNAACPDHTPTPNDDGKSHELSNLRLENQLLRNEVQSLNQEMASLLQRSKETQEELNKARARVEKWNADHSKSDRMTRGLRAQVDDLTEAVAAKDSQLAVLKVRLQEADQLLSTRTEALEALQSEKSRIMQDQSEGNSLQNQALQTFQERLHEADATLKREQESYKQMQSEFAARLNKVEMERQNLAEAITLAERKYSDEKKRVDELQQQVKLYKLNLESSKQELIDYKQKATRILQSKEKLINSLKEGSGFEGLDSSTASSMELEELRHEKEMQREEIQKLMGQIHQLRSELQDMEAQQVNEAESAREQLQDLHDQIAGQKASKQELETELERLKQEFHYIEEDLYRTKNTLQSRIKDRDEEIQKLRNQLTNKTLSNSSQSELENRLHQLTETLIQKQTMLESLSTEKNSLVFQLERLEQQMNSASGSSSNGSSINMSGIDNGEGTRLRNVPVLFNDTETNLAGMYGKVRKAASSIDQFRLCFTSGS

SEQ ID NO: 332962 - DNA, 2295 bp, Artificial Sequence
  derived and/or modified sequence
tattttagttagcgaaaggacataatcatcaatgtttataatctggagtgcgttatcatggtttatagcaattagttcatttgcatttatgtttttatattcatcagcaaaattgcaatgggtatttggattgattggaattagtcagatacttttatggctactaatatggcgtttttcacgttcagacaagaacggtagcgattaaaatatttcggcagacatgtgcgtacatttatagcgtccgctttgttagcatgtattagacgttaacgaacgattcgcttacatcaaatttgaacgatacggttgctacatggtataattttgttagaagaattgtggtttggagtcttatcttcaatccagagcttgtcgtctgtcaacgatgagctttttttgtgcaaaaaaatagccccgtcctgtcaaacgaggcacttgtattagcgacgattgtcgaaatacttttgcaacaagattaatactaagccagcaaaaatctgccaaagtgtggcttggagctgttgcattagaaggattgcggtttgcatggagtctcacctcccttctgggcgtctaatctcaacgccacgagaaatagtataccatgactttaaaatggcttagaacgcaaataagagccgtttaagagtatttaagtttgcggtggtatcttcgtatcggtggcgcgaccaaagggaagcagacgacacacagcaggacactccaagtgtccagtgtgctggggtgccgttaagaaatgacgaccagtcattttaggcatctcgtccttgccgatatggagataccacctctaggcgaaatgaggagagctctgctcgacgattggagactttttgacgggaggcgatcagcgccagaaaaaaccggctgttactaacagccgaacagcccgctagaggtttcctttaggtaaccgcacaaccaaaaaagcagtcagaatgacaagccaaataactagtaattcgcccgtaaaatggaaacgtagaactcgtcatgacacttgtggtaaaataacattattcgccttgcaaaaaacgatgtactttgacaatttaagcacaaaaaaacacaacctcgacaatttagagttagagaggtcgtgttttgagattagtgagactatggatagttcattaagtattataacatactcaatgagtgtacatagtctccagaaaaatggagaacccatgaaacaagaaaaacagcagtttataaaaacggattggacgattgacatgataaatcgtcggcaatttgagaaatatgccattgatattctcacagctactaaggatattcatcgcggtggatgggtagaacgaattgataataaggcttggcagtatgtcagagtttatgaaaatggcgacattgaagttttaattacacttcagataataagattccacaaatattttgatacaccagtttggttacagtttaacccgaatcatcttttacccgcagattatgtgcaacttgatcatgtgatgaaatatgttgatcactcacatttaactcgcgccgatttagcaaatgatatttataacatcaacttgcaacgttacgattttggattgtttggagtaactagagatatctatcgtagtttatctggtgatttagaaacacggtattggggacgccgaaaaagtgagcgccaaattcgtctttatgacaaaatgcgcgagatgaaaaaacatggcaaagcagatgatattccagacggtattactgattggtggcgtttagaatttcaatttagaggtggcaaggttgagtcatggcaagaagaagtaatggacaaaatgcagtcgttccatgttcttgctgttgatgataatgatgatttaagtgaaatagataaagccattttagcacgtgttaatgccgataaatttgattttaaaagagtcggtaaacgttatgctgcaaaaattcggaaaatggtacgtgaaaacgttggttttgatacgaccgttgcagaattatctctcaaaacattcaacgaacaaaaagatgagttgcagagacaactagatagcatgcttgcaaaatataatatcggtgcacaaacagaagaaatgacagcatattttgaggaagagcttaaacaaacaggtaatcttgatttttctgttgttgagagtgaatctgcgttagagcgtaatgtgatacgaaatattgctaaaacttggcgtgaagaaaatagtttaacgcacagaactaatactaatagttgatgcgtattttttatttttctaatat

SEQ ID NO: 332963 - DNA, 2076 bp, Artificial Sequence
  derived and/or modified sequence
atgtcctggttcgtcgatctcgccggtaaggctgaggatctactaaacagagttgatcagggggctgccactgcattaagtaggaaggacaatgcaagcaacatctatagtaagaataccgactatacagaactccaccagcaaaatacggatctgatttatcagacaggcccaaaatccacctacatttcatctgctgccgataatatcagaaaccagaaggcaaccattctggccggtactgccaacgtgaaagtagggagtcggactccggtcgaggcttctcacccagtcgagaacgcaagcgttcctcgccccagctctcatttcgttagacggaaaaaaagcgagccagatgacgagctcttattcgactttctcaactcttcccaaaaggagccaacggggcgggtggaaatcagaaaggaaaaaggtaaaacaccagtgttccagtcctctcaaacctcatccgtgtcatctgtcaaccctagtgtgaccactatcaagactattgaggagaattcttttggctcccagacgcacgaggccgccagcaacagcgactcaagccatgaagggcaggaagagtcctctaaggagaacgttagctcgaatgcggcctgccctgaccacacccctactcctaatgatgatgggaagagccacgaattaagtaaccttagactggagaatcaactgctcaggaacgaagttcagtccctgaatcaagaaatggcctcactcctccaacgatcaaaggagacacaggaggaattgaataaagccagggctcgcgtcgaaaagtggaacgccgaccacagtaaaagtgatcggatgacccgaggactgagggcccaagtggacgacctcaccgaggccgtcgccgctaaagactctcagctagccgtgctcaaagtgcgactccaggaggcggaccaattgctttccacaaggacggaagccctggaggccctccaaagcgaaaaatcccggatcatgcaggatcagagcgagggaaactctctgcagaatcaggcccttcagacgtttcaggaacgcttgcacgaagctgacgcaactttaaagagggagcaggagagctacaagcaaatgcaaagcgaatttgccgccaggttaaacaaagtggaaatggaaaggcagaatctggccgaggccatcactttggccgagaggaaatacagcgacgaaaaaaagagggtggacgagctgcagcagcaggtgaaactttacaaattaaacctggagagttctaagcaggaacttatcgattacaagcagaaggctacacgcattctccagagcaaggaaaagctgataaactcactgaaagaggggtctggattcgaggggctcgactctagcactgcctcaagtatggagctggaagaactccggcacgaaaaggagatgcaaagagaagagatccagaagcttatgggacagatccaccagctcaggtccgagttgcaggacatggaagcccagcaggtcaacgaggccgagagcgctagagagcagttacaagatttgcatgaccagattgcaggccaaaaagccagtaaacaggaactcgagacagagctggaacgactgaagcaagagttccactacatcgaagaggatctgtaccggacaaaaaataccctgcaatccaggatcaaagatcgggatgaagagatccagaagctcagaaaccagttgacaaataagaccctgagtaactcaagtcagagtgagcttgaaaacagattgcaccagcttacagagaccttaatccaaaagcagacaatgctagagagtctcagtacagagaagaattctctcgtcttccagttagaacggcttgagcagcagatgaactccgctagcggaagttcatcgaatgggtccagcattaacatgtcaggtattgataatggagaaggcacaagactgcgtaacgttccagtcctgttcaacgatacagagacaaacctggctggcatgtatggtaaggtacggaaggccgccagttccattgaccaattccggttatgtttcaccagcggctcctag

SEQ ID NO: 332964 - DNA, 2827 bp, Artificial Sequence
  derived and/or modified sequence
gcttcccttccacgtctcccggaagcggtagcagggccccggcgggtcggggaggaggtttactcagcttgggccccctccgggccagccgccgagggggcgcggcccaggacggcggctaggccgtagtgcagcctctccggagtcctcaggtttgccaataggattatcctgctgccatcatgtcttggtttgttgatcttgctggaaaggcagaagatcttttaaaccgagttgatcaaggggctgcaacagctctcagtaggaaagacaatgccagcaacatatatagcaaaaatactgactatactgaacttcaccagcaaaatacagatttgatatatcagactggacctaaatctacgtatatttcatcagcagctgataacattcgaaatcaaaaagccaccatcttagctggcactgcaaatgtgaaagtaggatctcggacaccagtagaggcctctcatcctgttgaaaatgcatctgttcctaggccttcatcccattttgtgcgaagaaaaaagtcagaacctgatgatgagctgctgtttgattttcttaatagttcacagaaggagcctaccgggagggtggaaatcagaaaggaaaaaggcaagacacctgtctttcagagctctcagacatcaagtgtcagttctgtgaaccccagtgtaaccaccatcaaaaccattgaagaaaattcttttgggagccaaacccacgaagctgccagtaactcagattctagccatgaaggtcaagaggaatcttcaaaggaaaatgtgtcatcaaatgctgcctgccctgaccacaccccaacacctaatgatgatggcaaatcacatgaactgtctaaccttcgactggagaatcagctgctgaggaatgaagttcagtctttaaatcaagaaatggcctcgttactccaaagatccaaagagactcaagaagaattaaacaaagcaagagcaagagttgaaaagtggaatgctgaccattcaaagagtgatcgaatgactcgaggactccgagcccaagtagatgacctgactgaagctgtggctgcaaaggattcccagctggctgtactgaaagtgagactccaggaagctgaccagctactgagtactcgcacagaagcattagaagccttacagagtgaaaaatcacgaataatgcaggatcaaagtgaaggtaacagcctgcagaatcaagctctgcagacttttcaggagagactgcatgaagcggatgccactctgaagagagagcaggagagctataaacagatgcagagcgagtttgctgcacgccttaataaagtggaaatggaacgtcagaatttagcagaagcaattacactggccgaaagaaaatactcagatgagaagaagagggttgatgaactgcagcagcaagtcaagctgtataagttgaacttggagtcctctaagcaggaattaattgactacaagcaaaaagctactagaatactgcaatctaaggaaaaattgattaacagcttgaaagaaggctctggttttgaaggcctagatagcagcactgccagtagcatggagctggaagaacttcggcatgagaaagagatgcagagggaggaaatacagaagctgatgggccagatacatcagctcagatccgaattacaggatatggaggcacagcaagttaatgaagcagaatcagcaagagaacagttacaggatctgcatgaccaaatagctgggcagaaagcatccaaacaagaactagagacagaactggagcgactgaagcaggagttccactatatagaagaagatctttatcgaacaaagaacacattgcaaagcagaattaaagatcgagacgaagaaattcaaaaactcaggaatcagcttaccaataaaactttaagcaatagcagtcagtctgagttagaaaatcgactccatcagctaacagagactctcatccagaaacagaccatgctggagagtctcagcacagaaaagaactccctggtctttcaactggagcgcctcgaacagcagatgaactccgcctctggaagtagtagtaatgggtcttcgattaatatgtctggaattgacaatggtgaaggcactcgtctgcgaaatgttcctgttctttttaatgacacagaaactaatctggcaggaatgtacggaaaagttcgcaaagctgctagttcaattgatcagtttaggctttgcttcacctctgggtcatgattgttctgttgacttacacaccagaaatgcaccacgaccaaccatatggcaaatgaaccaagcccagttgttgcagtgattggttgtctttttctagacttgggatctgcaagaaggccaattgcctaaaatttctgagaacagtgcacaagattattttatcactacaagcttttaactttttaagttattgtacaagtattctacctaaatcttccaatttcctttaaatggtaagagtttctaaaacagacaataatttaacaagctcagctctgctttatctgagtttagtggtcctaatatatatgtagagaaagatggtggggttgttcacctctgtacagaccatctgtatgttaggtgacattgattatgggttataatcagggaaactaattgtatttagtgacaaaaataaaaagtttttttttataattcagtctgcttttggattttcatatatttaactttgcaaaaagatttactttgtacatgttacaggcttgattggtgtaaatctttttataaatacataaataaaagaaaaatatgcatttttcttttct

SEQ ID NO: 332965 - DNA, 2076 bp, Artificial Sequence
  derived and/or modified sequence
atgtcctggtttgtggacctggccggcaaggccgaggacctgctgaacagagtggaccagggcgccgccacagccctgagcaggaaggacaatgccagcaacatctacagcaagaacacagactacacagagctgcaccagcagaacacagacctgatctaccagacaggccccaagagcacctacatcagcagcgctgctgacaacatccggaaccagaaggccaccatcctggccggcacagccaacgtgaaggtgggcagcaggacccctgtggaggccagccaccctgtggagaatgcctctgtgccccggcccagcagccactttgtgcggaggaagaagtctgagccagatgatgagctgctgtttgacttcctgaacagcagccagaaggagcccaccggccgggtggagatcaggaaggagaagggcaagacccctgtgttccagagcagccagaccagctctgtgtcctctgtgaaccccagcgtgaccaccatcaagaccattgaagaaaattcctttggcagccagacccatgaagctgccagcaacagcgacagcagccatgagggccaggaggagagcagcaaagaaaatgtgagcagcaatgctgcctgcccagaccacacccccaccccaaatgatgatggcaagagccatgagctgagcaacctgcggctggagaaccagctgctgagaaatgaggtgcagagcctgaaccaggagatggccagcctgctgcagaggagcaaggagacccaggaggagctgaacaaggcccgggcccgggtggagaagtggaatgctgaccacagcaagagtgacaggatgacccggggcctgcgggcccaggtggatgacctgacagaagctgtggccgccaaggacagccagctggccgtgctgaaggtgcggctgcaggaggccgaccagctgctgagcaccaggacagaggccctggaggccctgcagagcgagaagagccgcatcatgcaggaccagagcgagggcaacagcctgcagaaccaggccctgcagaccttccaggagcggctgcatgaagcagatgccaccctgaagcgggagcaggagagctacaagcagatgcagagcgagtttgctgcccggctgaacaaggtggagatggagcggcagaacctggccgaggccatcaccctggccgagaggaagtacagtgatgagaagaagagggtggatgagctgcagcagcaggtgaagctgtacaagctgaacctggagagcagcaagcaggagctgattgactacaagcagaaggccacccgcatcctgcagagcaaggagaagctgatcaacagcctgaaggagggcagcggctttgagggcctggacagcagcacagccagctccatggagctggaggagctgcggcatgagaaggagatgcagcgggaggagatccagaagctgatgggccagatccaccagctgcggtctgagctgcaggacatggaggcccagcaggtgaatgaagctgagagcgcccgggagcagctgcaggacctgcatgaccagattgctggccagaaggccagcaagcaggagctggagacagagctggagcggctgaagcaggagttccactacattgaagaagatctctaccgcaccaagaacaccctgcagagccgcatcaaggacagagatgaggagatccagaagctgaggaaccagctgaccaacaagaccctgagcaacagcagccagagcgagctggagaaccggctgcaccagctgacagagaccctcatccagaagcagaccatgctggagagcctgagcacagagaagaacagcctggtgttccagctggagcggctggagcagcagatgaacagcgccagcggcagcagcagcaatggcagcagcatcaacatgagcggcatcgacaacggggagggcacccggctgagaaatgtgcctgtgctcttcaatgacacagagaccaacctggccggcatgtatggcaaggtgaggaaggccgccagcagcattgaccagttccggctgtgcttcaccagcggcagctag

SEQ ID NO: 332966 - DNA, 2076 bp, Artificial Sequence
  derived and/or modified sequence
atgagctggttcgtggacctggccggcaaggccgaggacctgctgaacagagttgaccagggagccgcaacagcgctgagccgcaaggataacgcttccaacatttattccaagaacaccgactatactgaactgcaccagcagaataccgacctgatttatcaaactgggccaaaaagtacctacatcagctctgccgccgacaacatcagaaatcagaaagcaacgattctagccggcaccgcaaatgtcaaagtggggagccgaacccccgtcgaagcaagtcatcctgtggaaaatgcctccgtgccacgccccagcagccacttcgtccggcggaaaaagagcgagccagacgatgaacttctatttgacttcctaaattccagtcaaaaagaaccaacgggcagggttgaaattcggaaggagaaaggcaagacacctgtgtttcagtcatcccagacctcttccgtatctagcgtgaacccaagcgtaaccaccatcaagaccatagaggaaaacagttttgggagccagacacatgaagcggcctccaactcagatagctctcatgaggggcaggaggagtcgtccaaagagaacgtgagctcgaatgctgcctgtccggatcatacaccaacacctaacgacgatgggaagtcacacgagctgtcaaatctccgcctggagaatcaactgctcagaaatgaagtccagagcctcaatcaggagatggcatctctgctgcagcggtcaaaagagacgcaggaagagctgaacaaggccagggccagggtggagaagtggaacgctgaccactcaaagtcagaccgtatgaccagaggacttcgagcacaagtcgatgatttgactgaggccgtcgctgccaaagactcgcagctggcagttctgaaggtgcgtctgcaagaggcagaccaactcctcagcacacggaccgaagcactggaagccctgcaaagcgagaagtccaggattatgcaagatcagtcagagggaaattcactccagaatcaggccctgcagacgttccaggagcggctccacgaagccgatgccaccctgaaacgggagcaggaatcttataaacagatgcagagtgagtttgccgcccgcctcaacaaggtcgaaatggaaagacaaaacctggctgaggctataaccctggcagagagaaagtactcggatgaaaaaaagcgcgtggacgaactgcagcagcaggtcaagctctataagctgaaccttgagtcatccaagcaggaactgatcgattacaagcagaaggctacccgcattcttcaaagcaaagagaagctgatcaacagcctgaaagaaggatccggcttcgaggggctggactcatcaacggccagcagcatggagctcgaggaactgagacatgaaaaggagatgcagagagaggagatccagaagctgatgggtcagattcatcagctccgatcggagctacaggatatggaagcccaacaggtgaatgaggctgaatccgcccgcgaacagttgcaagacttgcacgaccagatcgccggccagaaagccagcaagcaggagttagagactgagctcgagaggttgaaacaagaatttcattatatcgaagaagatctatatagaacgaagaacacgctccagagccgaatcaaagatcgagacgaagaaatccagaagctccgcaaccaacttaccaataagaccttaagtaactcgtcgcagagcgagttagaaaatagactccatcagttgacggagactctcattcagaaacaaaccatgctcgagtccctgtctacagagaagaactcccttgtttttcaactggagcggttggagcagcagatgaactctgcatctggaagcagtagcaacggcagtagcatcaatatgtcaggcatcgacaatggcgaggggacacggctgcgcaatgtgcctgtgcttttcaacgacaccgagactaatcttgcgggcatgtatgggaaggtaaggaaagccgcgagctcaatcgatcagtttagactgtgtttcacctccggctcttag

SEQ ID NO: 332967 - DNA, 2076 bp, Artificial Sequence
  derived and/or modified sequence
atgagctggttcgtcgatctagccggaaaagcggaggaccttttgaatcgcgtggatcagggggcagcaaccgccctgagcaggaaggacaatgcttctaacatctattctaaaaacacggattacactgaactgcaccagcagaataccgatcttatctaccagacgggccctaagtctacttacatatcctcagccgctgataatattaggaatcaaaaagctactatcctagcaggcaccgctaatgtgaaggtggggagcaggacacctgtggaggcaagtcaccctgttgagaatgccagcgtaccacgtcccagctctcatttcgtgcgcaggaagaagtctgaacccgatgacgaactgttgtttgacttcttaaatagctcacagaaggagcctactgggagagtggagatccgcaaagagaaggggaaaacccccgtttttcagtcaagccaaacctcctctgtttcttccgtgaatcctagtgtcacaactatcaaaaccatcgaggagaacagtttcggatcacagacccacgaggctgcttccaactctgatagctctcacgaagggcaggaggagtcctcaaaagagaacgtgtcgtcaaatgctgcctgtcccgaccatacaccgacacccaacgatgatggcaaaagccatgagttgtcaaatctaagactggagaaccagctcttaagaaatgaagtccaatccttgaaccaagaaatggcatctctgctgcagcgcagcaaagaaactcaggaagagcttaataaagcacgagcgcgagtggaaaagtggaacgcggaccactccaagagcgatcgtatgacacgagggttaagagcccaggtcgatgatctaacagaggccgtagccgctaaggatagtcaactggctgtcctgaaagtgcggctgcaagaggccgatcaactgctcagtacccggacagaagccctcgaggccctgcagtccgagaagagcaggatcatgcaagatcagtccgagggaaattcacttcaaaaccaggccttgcagacttttcaagaacggctccatgaggccgacgccacgctgaagcgagaacaggaaagctataagcagatgcagtccgaattcgccgctcgccttaacaaagtggagatggagcgccagaaccttgctgaagctatcaccttggccgaaagaaagtattcggatgagaagaagagggtggacgaactccagcagcaagtcaagttgtacaagctaaatctggagagtagcaagcaagagttgatcgactacaagcagaaggctactcgcatcctgcaatctaaggagaagctgattaacagtttgaaagagggatctggcttcgaaggactcgatagcagtaccgcgagctccatggaactcgaggaacttcgccacgagaaggagatgcagcgagaagagatacagaagctgatgggccaaattcaccagctccgtagcgaacttcaggacatggaagcacagcaggtgaacgaggctgagagcgctagagaacagctgcaggaccttcatgaccagattgcaggccagaaggcaagcaagcaggagctcgagaccgagcttgagcggctgaagcaggagtttcattacatcgaggaagacctgtataggacaaaaaacactttacagagtcgaattaaggacagggacgaggagatccagaagttaaggaaccagttaacaaacaagacccttagcaattcctcacaatctgagctggaaaatcgtctgcatcagctcaccgagacgcttatccagaagcagacaatgctcgagagcctctccacagagaaaaattcattagtgttccagttagaacgtttggaacagcagatgaacagcgctagcggctcaagctccaatgggagttcaatcaacatgtctggcatcgataatggagaaggcacaaggctccggaatgtacccgtactgtttaatgatactgaaactaatctggccggaatgtacgggaaggttcggaaggcagcaagttccatagaccagttcagactgtgctttacatcaggaagctag

SEQ ID NO: 332968 - DNA, 2076 bp, Artificial Sequence
  derived and/or modified sequence
atgagctggttcgtggacctggccggcaaggccgaggacctgctgaacagagtggaccagggcgccgccaccgccctgagcagaaaggacaacgccagcaacatctacagcaagaacaccgactacaccgagctgcaccagcagaacaccgacctgatctaccagaccggccccaagagcacctacatcagcagcgccgccgacaacatcagaaaccagaaggccaccatcctggccggcaccgccaacgtgaaggtgggcagcagaacccccgtggaggccagccaccccgtggagaacgccagcgtgcccagacccagcagccacttcgtgagaagaaagaagagcgagcccgacgacgagctgctgttcgacttcctgaacagcagccagaaggagcccaccggcagagtggagatcagaaaggagaagggcaagacccccgtgttccagagcagccagaccagcagcgtgagcagcgtgaaccccagcgtgaccaccatcaagaccatcgaggagaacagcttcggcagccagacccacgaggccgccagcaacagcgacagcagccacgagggccaggaggagagcagcaaggagaacgtgagcagcaacgccgcctgccccgaccacacccccacccccaacgacgacggcaagagccacgagctgagcaacctgagactggagaaccagctgctgagaaacgaggtgcagagcctgaaccaggagatggccagcctgctgcagagaagcaaggagacccaggaggagctgaacaaggccagagccagagtggagaagtggaacgccgaccacagcaagagcgacagaatgaccagaggcctgagagcccaggtggacgacctgaccgaggccgtggccgccaaggacagccagctggccgtgctgaaggtgagactgcaggaggccgaccagctgctgagcaccagaaccgaggccctggaggccctgcagagcgagaagagcagaatcatgcaggaccagagcgagggcaacagcctgcagaaccaggccctgcagaccttccaggagagactgcacgaggccgacgccaccctgaagagagagcaggagagctacaagcagatgcagagcgagttcgccgccagactgaacaaggtggagatggagagacagaacctggccgaggccatcaccctggccgagagaaagtacagcgacgagaagaagagagtggacgagctgcagcagcaggtgaagctgtacaagctgaacctggagagcagcaagcaggagctgatcgactacaagcagaaggccaccagaatcctgcagagcaaggagaagctgatcaacagcctgaaggagggcagcggcttcgagggcctggacagcagcaccgccagcagcatggagctggaggagctgagacacgagaaggagatgcagagagaggagatccagaagctgatgggccagatccaccagctgagaagcgagctgcaggacatggaggcccagcaggtgaacgaggccgagagcgccagagagcagctgcaggacctgcacgaccagatcgccggccagaaggccagcaagcaggagctggagaccgagctggagagactgaagcaggagttccactacatcgaggaggacctgtacagaaccaagaacaccctgcagagcagaatcaaggacagagacgaggagatccagaagctgagaaaccagctgaccaacaagaccctgagcaacagcagccagagcgagctggagaacagactgcaccagctgaccgagaccctgatccagaagcagaccatgctggagagcctgagcaccgagaagaacagcctggtgttccagctggagagactggagcagcagatgaacagcgccagcggcagcagcagcaacggcagcagcatcaacatgagcggcatcgacaacggcgagggcaccagactgagaaacgtgcccgtgctgttcaacgacaccgagaccaacctggccggcatgtacggcaaggtgagaaaggccgccagcagcatcgaccagttcagactgtgcttcaccagcggcagctag

SEQ ID NO: 332969 - DNA, 1563 bp, Artificial Sequence
  derived and/or modified sequence
atgatgaagtactacgacctggccaagttcaccatctaccagatcgccgagatggacaagggcctgagcgagctgagccccatgcagcaggccctgatctacagcttctgcgagaaccacgacaaggccatcgaggtgctggacggcatcagctggaacagagccgagatgaccatgtgcgccctgctggccaaggtgcagatgaaggccaagagaaccaaggaggccgtggaggtgctgaagaaggccctggacgccatcagccacagcgacaagggccccgacgccaccgccatcagcgccgactgcctgtacaacctgggcctgtgctacatggaggagggcaacctgcagatgacctacaagctggccatcaccgacctgaccaccgccatcagcatggacaagaacagctacaccgccttctacaacagagccctgtgctacaccaagatcagagagctgcagatggccctgaccgactacggcatcgtgctgctgctggacgccaccgagaccgtgaagctgaacaccttcctgaacagaggcctgatctacgtggagctgggccagtacggcttcgccctggaggacttcaagcaggccgccctgatcagcagaaccaacggcagcctgtgccacgccaccgccatgtgccaccacagaatcaacgagttcgaggaggccgtgaacttcttcacctgggccctgaagatcaacccctgcttcctggacgcctacgtgggcagaggcaacagctacatggagtacggccacgacgaggccaccaagcaggcccagaaggacttcctgaaggccctgcacatcaaccccgcctacatcaaggccagaatcagcttcggctacaacctgcaggcccagggcaagttccagaaggcctggaaccacttcaccatcgccatcgacaccgaccccaagaactacctggcctacgagggcagagccgtggtgtgcctgcagatgggcaacaacttcgccgccatgcaggacatcaacgccgccatgaagatcagcaccaccgccgagttcctgaccaacagaggcgtgatccacgagttcatgggccacaagcagaacgccatgaaggactaccaggacgccatcaccctgaaccccaagtacagcctggcctacttcaacgccggcaacatctacttccaccacagacagttcagccaggccagcgactacttcagcaaggccctgaagttcgaccccgagaacgagtacgtgctgatgaacagagccatcaccaacaccatcctgaagaagtacgaggaggccaaggaggacttcgccaacgtgatcgagagctgccccttctgggccgccgtgtacttcaacagagcccacttctactactgcctgaagcagtacgagctggccgaggaggacctgaacaaggccctgagcctgaagcccaacgacgccctggtgtacaacttcagagccaaggtgagaggcaagatcggcctgatcgaggaggccatggccgactacaaccaggccctggacctggaggactacgccagcgtgatctag

SEQ ID NO: 332970 - DNA, 1563 bp, Artificial Sequence
  derived and/or modified sequence
atgatgaagtactacgaccttgccaaatttacaatataccagatcgcagagatggacaaaggactatccgaactttcgcctatgcaacaggccttgatttactccttttgcgagaatcatgacaaagccatagaagtactggatggtatcagctggaacagagccgaaatgactatgtgtgcactgctagccaaggttcagatgaaagccaaacggaccaaggaggccgtcgaagtgctgaagaaagcacttgacgcaatttctcactcagataagggacccgacgctaccgccatatccgcagattgtctatataacctgggactgtgctacatggaagaaggcaatctgcagatgacttacaagcttgccatcacagacctcacaacggccatctcaatggataaaaattcatacactgccttctacaaccgggcactatgttatacaaagatcagagagcttcagatggccctgaccgactatgggatagttctgttacttgatgccaccgagacagttaagctaaatacattcttgaatcggggacttatttacgtagaattggggcaatacggcttcgccctcgaggacttcaaacaagcagccctcatcagccggactaacggctctctgtgccacgcaactgctatgtgccatcacagaatcaacgaattcgaagaagctgttaatttcttcacatgggcactgaaaattaatccatgtttcctggatgcctacgtcggccgggggaacagctatatggagtatggtcatgatgaggccacaaaacaggctcagaaagattttcttaaagcccttcacattaaccccgcctatataaaagcgcggatctctttcggctacaatctgcaggctcaaggtaagtttcagaaagcctggaatcatttcactatcgccatagacacggaccccaagaactacctggcttacgaagggcgagcagtggtgtgtctgcagatggggaacaattttgcggccatgcaggacatcaacgctgccatgaaaatcagtacaacagctgagtttctgacgaaccgcggagttatacacgaatttatgggacataagcagaacgcaatgaaggattaccaggacgctataactcttaatccaaagtacagcttggcttacttcaacgcagggaatatttattttcaccacagacagtttagtcaggcaagcgactatttctccaaagccctcaagttcgaccccgagaatgagtacgtgctgatgaacagggcaattacaaacacgatcttaaaaaagtacgaagaggccaaggaggactttgccaatgtaatagaatcatgcccgttttgggcggccgtgtacttcaatagagctcatttttactattgcttgaaacaatatgagctcgccgaagaagatctgaacaaggcactctcactgaaaccgaacgacgccctcgtgtacaacttcagagccaaggttagagggaaaattggactgatagaagaagcgatggccgattacaatcaggcgttagacctcgaagactatgccagcgtcatatag

SEQ ID NO: 332971 - DNA, 1563 bp, Artificial Sequence
  derived and/or modified sequence
atgatgaagtactatgatttggctaaattcacgatctaccagatcgccgagatggataagggcctttcagagctgtctccaatgcaacaggccctgatctattcattttgcgaaaatcatgataaggctatcgaagtcctggacgggattagctggaatcgtgccgagatgactatgtgcgccctcctcgctaaggtgcaaatgaaggcgaagcgaactaaggaggccgtcgaggtcctgaagaaggccctcgacgcaatatcgcattccgacaaaggaccggacgccacagccatatctgctgattgcctgtacaatctagggctatgctacatggaagaggggaaccttcagatgacatacaagctcgcaatcacggatctgacaaccgcaatcagcatggataagaattcatacaccgccttctacaatagagctctctgctacactaaaatacgtgagcttcagatggcattaacagactacggtattgtgctgctgctcgacgccactgaaactgtgaagctgaacacctttcttaatcgaggcctcatatatgtcgagctggggcaatacggattcgcgctggaagactttaaacaagctgctctgatttccagaactaatggctccctgtgccacgctaccgccatgtgtcaccatagaattaacgagttcgaagaagccgtcaatttcttcacctgggctttgaaaatcaatccttgcttcctggatgcctatgtaggccgcggcaatagttatatggaatacggccacgatgaggcaacaaagcaagcccagaaagatttcctaaaggctctgcatataaatccggcatatattaaggcgcgaatttcttttggctacaacttgcaagctcagggcaagtttcagaaggcctggaatcattttaccattgcaatcgataccgaccccaagaattacctcgcatatgagggtcgagctgtggtctgtcttcagatggggaataactttgctgccatgcaggacatcaacgctgccatgaaaatctctacgaccgctgaatttctaaccaacagaggcgtgatccacgaattcatggggcataaacagaatgcaatgaaggactaccaagacgcaattacactaaaccccaaatactcactcgcatactttaatgccgggaatatttacttccatcataggcagtttagtcaggcctctgactacttcagcaaggcgctcaagttcgatccagagaatgagtacgtcctaatgaacagagcaatcacaaacacaattctgaagaaatatgaggaggcgaaggaggactttgctaacgttatcgagtcctgccctttctgggccgccgtgtatttcaatcgggctcacttctactattgtctgaagcagtatgagctggccgaggaagacctgaacaaggcactttctttaaaaccgaacgatgctctggtctataattttcgcgctaaagtccggggaaaaataggcctgatcgaggaggcaatggccgattataatcaagccctggacctcgaagattatgcctccgtaatctag

SEQ ID NO: 332972 - DNA, 1563 bp, Artificial Sequence
  derived and/or modified sequence
atgatgaagtactatgacctggccaagttcaccatctaccagattgctgagatggacaagggcctgtctgagctgagccccatgcagcaggccctgatctacagcttctgtgagaaccacgacaaggccatcgaggtgctggatggcatctcctggaacagagctgagatgaccatgtgtgccctgctggccaaggtgcagatgaaggccaagaggaccaaggaggccgtggaggtgctgaagaaggccctggatgccatcagccacagcgacaagggcccagatgccacagccatctctgctgactgcctgtacaacctgggcctgtgctacatggaggagggcaacctgcagatgacctacaagctggccatcacagacctgaccacagccatctccatggacaagaacagctacacagccttctacaacagagccctgtgctacaccaagatccgggagctgcagatggccctgacagattatggcatcgtgctgctgctggatgccacagaaacagtgaagctgaacaccttcctgaacagaggcctcatctacgtggagctgggccagtatggctttgccctggaggacttcaagcaggccgccctgatcagcaggaccaacggcagcctgtgccacgccacagccatgtgccaccaccgcatcaatgaatttgaggaggccgtgaacttcttcacctgggccctgaagatcaacccctgcttcctggatgcctacgtgggccggggcaacagctacatggagtatggccatgatgaggccaccaagcaggcccagaaggacttcctgaaggccctgcacatcaacccagcctacatcaaggcccgcatcagctttggctacaacctgcaggcccagggcaagttccagaaggcctggaaccacttcaccatcgccatcgacacagaccccaagaactacctggcctatgagggccgggctgtggtgtgcctgcagatgggcaacaactttgctgccatgcaggacatcaatgctgccatgaagatcagcaccacagctgagttcctgaccaacagaggagtcatccacgagttcatgggccacaagcagaatgccatgaaggactaccaggatgccatcaccctgaaccccaagtacagcctggcctacttcaatgccggcaacatctacttccaccaccggcagttcagccaggccagtgactacttcagcaaggccctgaagtttgatcctgaaaatgaatatgtgctgatgaacagagccatcaccaacaccatcctgaagaagtatgaggaggccaaggaggactttgccaacgtgattgagagctgccccttctgggccgctgtgtacttcaacagagcccacttctactactgcctgaagcagtatgagctggccgaggaggacctgaacaaggccctgagcctgaagcccaatgatgccctggtgtacaacttccgggccaaggtgcggggcaagattggcctcatcgaggaggccatggctgactacaaccaggccctggacctggaggactatgccagcgtcatctag

SEQ ID NO: 332973 - DNA, 1563 bp, Artificial Sequence
  derived and/or modified sequence
atgatgaagtactacgacctggccaagttcaccatctaccagatcgcagaaatggataaaggtctgtccgagctatccccaatgcagcaagccctgatctatagcttttgcgaaaaccacgacaaggccatcgaggtgctagatgggatcagctggaatcgggcagaaatgaccatgtgcgcacttctggcaaaagtgcagatgaaggctaagaggacaaaagaggcagtggaggttctaaaaaaggcactggacgctatatcacactctgataaagggcccgatgcaactgcaatcagtgccgactgtctgtataacctgggcctgtgttatatggaagaaggcaatctgcagatgacatacaaactcgccattacagatctgaccacagctattagcatggacaagaacagctataccgctttttataatagagccctttgctacactaagatacgcgagctccaaatggcacttactgattacggcattgtgttgttgcttgacgccacagaaactgtgaagctgaatacattcctcaacagaggactaatatacgttgagcttgggcagtatggcttcgctctggaagattttaagcaagcagcactaatctcacgtacaaatggctccctctgccacgccaccgcaatgtgtcaccaccggatcaatgaatttgaggaagccgttaactttttcacatgggcattaaagatcaatccctgtttcctggacgcatatgttggtagaggcaattcgtatatggagtatggccacgacgaggcaactaaacaagcccagaaggattttttaaaagcgctgcacatcaaccctgcttacattaaggcccgcatcagtttcggctataaccttcaggctcaggggaaattccagaaggcatggaaccacttcactatcgctattgacactgatcccaaaaattacttggcctatgagggccgggccgtcgtgtgcttgcagatgggtaataatttcgccgcaatgcaagacatcaatgcagcaatgaagatctccaccacggctgagttcctcaccaataggggcgtgatccatgaattcatggggcataaacagaatgcaatgaaagattaccaagacgctatcactttaaatcccaagtactcgctggcttattttaacgcagggaacatttatttccaccacagacagtttagccaggcatcagactatttcagtaaagccctcaaattcgaccccgaaaacgagtatgtcctgatgaacagggctatcaccaataccattctaaagaagtacgaagaggccaaagaggacttcgctaatgtgatagaatcgtgcccattctgggcagccgtgtatttcaacagagcacatttctactattgtctgaaacagtatgagctggctgaggaggacctgaacaaggcactgagtctgaagcccaatgatgcactagtttataatttcagagccaaagttaggggaaagatcggtctgatagaggaggccatggctgattataatcaggccttggacctggaggactacgccagcgtcatatag

SEQ ID NO: 332974 - DNA, 1563 bp, Artificial Sequence
  derived and/or modified sequence
atgatgaagtactacgacctggccaagttcaccatctaccagatcgcggaaatggataaaggcctctccgagctatctcctatgcagcaagctctgatttacagcttttgcgagaatcatgataaagccattgaggtactggacgggatctcctggaatcgagcagagatgacgatgtgtgctctactggccaaagtgcagatgaaggccaagcggactaaggaggctgtggaggtgttaaaaaaagcccttgacgcaattagccactcagacaaaggaccagacgccactgcaatctcagccgattgcctgtacaacttgggactgtgttatatggaagagggtaatctgcagatgacatataagctggccataaccgatttaacaacggcgatcagtatggataagaactcttatactgcattttacaatcgggccctgtgctacactaagattcgcgaattacagatggccctcacggattacgggattgtactgttgttggacgccaccgaaaccgtgaaactgaatacctttctgaacagagggctcatctacgtcgagctgggacagtatggatttgcactcgaagacttcaaacaggccgctttgataagcagaacaaatggatccttgtgtcacgcaactgccatgtgccaccaccgtatcaacgagtttgaagaggccgtgaatttttttacatgggcactcaaaatcaatccctgttttctggacgcctatgtcggacgaggtaattcctatatggagtacgggcacgacgaggccacgaaacaagcccagaaggattttcttaaggcactgcatattaacccagcttatatcaaagcacggatctctttcgggtacaacctgcaagcccaaggtaagtttcagaaggcatggaaccacttcaccatcgctatcgacactgatcctaagaattacctggcctacgaagggcgcgcagttgtttgcctgcagatgggaaataatttcgcggccatgcaggacatcaacgctgcaatgaagattagcacaacagctgagtttctgaccaataggggcgtgatacacgaatttatggggcacaagcaaaacgcaatgaaggattatcaggacgccatcactttaaaccctaagtactccctcgcctatttcaatgccgggaacatttacttccaccatcggcagttctcacaagccagcgattacttctccaaggcgcttaagtttgaccccgagaacgaatatgtattgatgaaccgcgctatcacgaacaccatattgaagaagtacgaggaggccaaggaggacttcgcaaacgtcatcgagtcgtgtcccttctgggccgccgtgtacttcaaccgggcccacttttactattgtttgaaacagtacgaactcgcagaggaggatctgaataaagcgttgtccctgaagcccaatgatgctctagtgtataactttcgcgctaaggtgaggggcaagatcggacttatcgaggaagctatggccgattacaaccaggccctggatctggaggattacgcttcagtcatttag

SEQ ID NO: 332975 - DNA, 1563 bp, Artificial Sequence
  derived and/or modified sequence
atgatgaagtattacgacctggccaaattcaccatctaccagatcgctgagatggataagggcctgtccgagttgtcgccaatgcagcaagcactgatctattctttttgcgaaaaccacgataaagccattgaagtgcttgatggcatcagctggaaccgcgctgaaatgacaatgtgtgcccttctggccaaggtgcagatgaaggccaaacgcacgaaagaagcagtggaagtcctgaagaaggccttagacgctatctcccacagtgataaggggccagacgccacagccatatccgctgactgtctatataatctcggcctgtgctatatggaggaaggcaacttacaaatgacatacaaactggccattactgatcttaccaccgctatttccatggataaaaacagttacactgccttctacaatcgagcactctgttacacaaagattagggaactccagatggcgctgactgattacggtattgtgcttctgttggatgccacggaaaccgttaaactgaacacatttctaaacagaggtctgatttacgtcgagcttggacaatacggatttgcattggaggattttaagcaggccgctctcatctcaaggacgaatggtagcctgtgccacgccaccgctatgtgtcaccaccgcattaacgaatttgaggaagctgtcaatttcttcacgtgggctctcaaaattaatccatgtttcttggacgcctacgtgggcaggggaaattcttatatggagtacgggcacgatgaagcaaccaaacaagcccagaaagattttttgaaggcactacacattaacccagcctatattaaagcccgtatctcattcgggtacaacttgcaggcccagggaaaattccagaaagcatggaatcatttcactattgccatagacaccgacccaaaaaactatttggcatatgagggccgagctgttgtatgtctccagatgggcaataactttgcagcaatgcaggatatcaatgccgcaatgaagatttctaccacagcagagttcttgaccaacaggggtgttatccacgagtttatgggacacaaacagaacgccatgaaggactatcaggacgctattaccctgaacccgaaatattctttagcttattttaacgcaggaaatatttacttccatcatagacagttttcacaggcctcagactatttctccaaggccctcaagtttgaccctgagaacgagtacgtgcttatgaatcgagccataactaataccattctgaaaaagtacgaagaagcaaaggaggattttgcgaacgtgatcgaaagctgccctttttgggccgctgtatatttcaaccgcgcacacttttactactgcctcaaacagtatgaactggctgaggaagatttaaacaaggctctgtccctaaagccaaatgatgcactggtctacaattttagggctaaggtgcgcggtaagatcggcttaatcgaggaggcgatggccgattacaatcaggctctcgacctggaggattacgcctctgtgatctag

SEQ ID NO: 332976 - DNA, 1563 bp, Artificial Sequence
  derived and/or modified sequence
atgatgaaatactatgacctggccaaattcactatctaccagatcgccgagatggacaagggcctgagcgagctttccccaatgcaacaggcgctgatttactcattttgcgaaaatcacgataaggccatagaagtcctggatgggatctcttggaaccgggcagagatgaccatgtgtgccctcttagcaaaggtccagatgaaagctaaacggactaaggaggccgttgaagtgctgaagaaagccctggacgccatctcccattccgacaaaggccctgacgctaccgcgatctccgccgactgcctgtacaatctgggactgtgttatatggaggaaggaaacctccagatgacctacaagctggcgataactgatctgacaacagctatcagcatggacaaaaattcctacaccgccttctataatcgagccctctgttatacaaagattcgggagctgcagatggccctcactgattacgggatagtccttctcctagacgcgacagagacagtcaagcttaatacctttctgaaccggggactgatttacgtggaattgggccagtatggtttcgcacttgaggattttaaacaagctgctctgattagccggaccaatgggagtctttgccatgctactgccatgtgccatcacaggatcaatgagttcgaagaggcggtgaacttcttcacatgggctctgaagattaatccatgcttccttgacgcatacgttggtcgtggaaacagctacatggagtacgggcacgacgaggctacaaagcaggcccagaaggatttcctcaaggctttgcacattaatcccgcttatataaaagctaggatcagttttggctataacctgcaggcacagggcaaattccagaaagcctggaaccactttaccatcgctatcgatactgaccccaaaaactatcttgcctacgaaggcagagcggtggtgtgcttacagatggggaacaatttcgctgcaatgcaggatattaacgcggctatgaaaattagcacaacagcggagtttcttacaaatagaggagtcatccatgagttcatgggtcacaaacaaaacgctatgaaagattaccaggatgcaatcacactgaaccctaagtatagcctcgcctacttcaatgctggcaacatttattttcaccacagacaattctcacaagcctccgattatttttccaaagctctcaagtttgatcctgagaacgagtatgtgctcatgaaccgggctataaccaatacaatactgaagaagtatgaagaggcaaaggaggatttcgctaacgtgatcgaatcttgtccattttgggccgcagtctacttcaaccgggcacatttttactactgtttaaaacagtatgagctcgctgaagaggaccttaataaggctctttcgttgaaacctaatgatgcactggtctataatttcagggccaaggtgcggggaaagataggactgatagaagaggccatggccgattacaaccaggcgctggatcttgaagactatgcctcggtcatttag

SEQ ID NO: 332977 - DNA, 2113 bp, Artificial Sequence
  derived and/or modified sequence
tcagaaaggaagcaatcgatgttattaggagctaaatttctgtttctcactcaacagttgcataaattgaaaaaggcagtaaatgaattgtctcgtgctatccaccttcagccagatggaatccaattatacataagaagaggacaatatcttcttatgatgaaatattatgatcttgcaaagtttactatttatcaaatagcagaaatggacaaaggtctcagtgagttgagtcctatgcagcaagcccttatttattcattttgtgaaaaccatgacaaggccattgaggtcttggacggaatcagctggaatagagctgagatgaccatgtgtgctctattagcaaaagttcaaatgaaggccaagagaaccaaggaagctgtggaagtgcttaagaaggctttggatgccatttctcattctgataaaggaccagatgccacagcaatttcagcagactgtctgtataacttgggtctttgttacatggaggaaggcaatttacaaatgacttataagctagcaattacagatttaactacagctatcagcatggacaaaaatagttatacagcattttataacagagcattatgttacaccaagataagggaacttcaaatggcattaacagattatggaattgtgctgcttcttgatgctacagaaactgtaaaactaaataccttccttaatcgtggactcatctacgtagaactaggccagtatggctttgcactagaggattttaaacaagctgcactgataagccggactaacgggagcctttgtcacgccactgccatgtgccatcacagaattaatgagtttgaagaagctgtcaatttctttacttgggctcttaaaattaacccatgttttctggatgcttatgttggacggggaaattcttacatggaatacggtcatgatgaagccaccaagcaagcacagaaagactttctgaaagcactgcatattaatccagcatacataaaagccagaattagttttggctataatttgcaggcccaaggaaaattccagaaagcttggaaccactttaccattgccatagatactgatccaaagaactacctagcctatgaaggaagagctgtggtctgtcttcagatgggtaataattttgctgcaatgcaggatattaatgctgccatgaagatcagtactacagcagaattcttaacaaatcgtggggtgattcatgagtttatgggccacaaacagaatgcaatgaaagactaccaagatgcaattactctaaaccccaagtactcgctggcttactttaatgcaggaaatatctactttcaccacaggcagttttcccaggccagtgactacttctcaaaagctttaaaatttgatccagaaaatgaatatgttctcatgaatcgagctattacaaatacaatattaaagaaatatgaagaagcaaaagaagattttgcaaatgtaattgaaagctgtcccttttgggctgcagtatattttaatagagcacatttctactactgcttaaagcaatatgaactagctgaggaagaccttaataaagccctgtctttgaagcctaatgatgctctagtatataattttagagcaaaagttcgtggtaaaataggtctgattgaggaagctatggctgactataaccaagcacttgatcttgaagactatgcctcagttatatgattacatagactgtggttgctatagtagtttacacagctgttctctctgaaacggaaacatatttgttgtctaaaaggttctaccattttcattattgtattcgttatgcttagtcttccatataaccttctatgcattttaataaaatgtttgttatacattaattataaaacatatatcatttgctgcatatttggaataccttgagaactgaatttttccaaggttgcagaatctcaaggaaaatgtttcttaaggaattaaataggaatgtctcttaacatttaaaatattttctttaattctttttgaaataatactatacattgtagaaaaagtgtcactgaccttttcatcaatccttgctgacaatgtattaaacagtatacagatt

SEQ ID NO: 332978 - DNA, 2253 bp, Artificial Sequence
  derived and/or modified sequence
gtgggcgccccttccccagcctcgctgccgccttgcagtttgatctcagactgccgtgctagcaatcagggagactccgtgggcgtaggaccctccgagccacgtgtgggatataacctcgtagtgtgccgttttttaagcccgtcggaaaagtgcagtatgcaggtgggagcgaacggattttccagttgcataaattgaaaaaggcagtaaatgaattgtctcgtgctatccaccttcagccagatggaatccaattatacataagaagaggacaatatcttcttatgatgaaatattatgatcttgcaaagtttactatttatcaaatagcagaaatggacaaaggtctcagtgagttgagtcctatgcagcaagcccttatttattcattttgtgaaaaccatgacaaggccattgaggtcttggacggaatcagctggaatagagctgagatgaccatgtgtgctctattagcaaaagttcaaatgaaggccaagagaaccaaggaagctgtggaagtgcttaagaaggctttggatgccatttctcattctgataaaggaccagatgccacagcaatttcagcagactgtctgtataacttgggtctttgttacatggaggaaggcaatttacaaatgacttataagctagcaattacagatttaactacagctatcagcatggacaaaaatagttatacagcattttataacagagcattatgttacaccaagataagggaacttcaaatggcattaacagattatggaattgtgctgcttcttgatgctacagaaactgtaaaactaaataccttccttaatcgtggactcatctacgtagaactaggccagtatggctttgcactagaggattttaaacaagctgcactgataagccggactaacgggagcctttgtcacgccactgccatgtgccatcacagaattaatgagtttgaagaagctgtcaatttctttacttgggctcttaaaattaacccatgttttctggatgcttatgttggacggggaaattcttacatggaatacggtcatgatgaagccaccaagcaagcacagaaagactttctgaaagcactgcatattaatccagcatacataaaagccagaattagttttggctataatttgcaggcccaaggaaaattccagaaagcttggaaccactttaccattgccatagatactgatccaaagaactacctagcctatgaaggaagagctgtggtctgtcttcagatgggtaataattttgctgcaatgcaggatattaatgctgccatgaagatcagtactacagcagaattcttaacaaatcgtggggtgattcatgagtttatgggccacaaacagaatgcaatgaaagactaccaagatgcaattactctaaaccccaagtactcgctggcttactttaatgcaggaaatatctactttcaccacaggcagttttcccaggccagtgactacttctcaaaagctttaaaatttgatccagaaaatgaatatgttctcatgaatcgagctattacaaatacaatattaaagaaatatgaagaagcaaaagaagattttgcaaatgtaattgaaagctgtcccttttgggctgcagtatattttaatagagcacatttctactactgcttaaagcaatatgaactagctgaggaagaccttaataaagccctgtctttgaagcctaatgatgctctagtatataattttagagcaaaagttcgtggtaaaataggtctgattgaggaagctatggctgactataaccaagcacttgatcttgaagactatgcctcagttatatgattacatagactgtggttgctatagtagtttacacagctgttctctctgaaacggaaacatatttgttgtctaaaaggttctaccattttcattattgtattcgttatgcttagtcttccatataaccttctatgcattttaataaaatgtttgttatacattaattataaaacatatatcatttgctgcatatttggaataccttgagaactgaatttttccaaggttgcagaatctcaaggaaaatgtttcttaaggaattaaataggaatgtctcttaacatttaaaatattttctttaattctttttgaaataatactatacattgtagaaaaagtgtcactgaccttttcatcaatccttgctgacaatgtattaaacagtatacagattaaaaaataa

SEQ ID NO: 332979 - DNA, 102 bp, Artificial Sequence
  derived and/or modified sequence
taactactcacagaactcaacaaaacactatacatgcatttaccagtttattataaagatacaagtcaggaacagccaaatggaagaaatgtaaatggcaag

SEQ ID NO: 332980 - protein, 372 aa, Artificial Sequence
  derived and/or modified sequence
MSVIVKSATGEIYLFCKGADSSIFPRVIEGKVDQIRARVERNAVEGLRTLCVAYKRLIQEEYEGICKLLQAAKVALQDREKKLAEAYEQIEKDLTLLGATAVEDRLQEKAADTIEALQKAGIKVWVLTGDKMETAAATCYACKLFRRNTQLLELTTKRIEEQSLHDVLFELSKTVLRHSGSLTRDNLSGLSADMQDYGLIIDGAALSLIMKPREDGSSGNYRELFLEICRSCSAVLCCRMAPLQKAQIVKLIKFSKEHPITLAIGDGANDVSMILEAHVGIGVIGKEGRQAARNSDYAIPKFKHLKKMLLVHGHFYYIRISELVQYFFYKNVCFIFPQFLYQFFCGFSQQGRRQECPAALARVHLLDAPGTV

SEQ ID NO: 332981 - protein, 352 aa, Artificial Sequence
  derived and/or modified sequence
  misc_feature (1)..(1): Xaa can be any naturally occurring amino acid
XSIFPRVIEGKVDQIRARVERNAVEGLRTLCVAYKRLIQEEYEGICKLLQAAKVALQDREKKLAEAYEQIEKDLTLLGATAVEDRLQEKAADTIEALQKAGIKVWVLTGDKMETAAATCYACKLFRRNTQLLELTTKRIEEQSLHDVLFELSKTVLRHSGSLTRDNLSGLSADMQDYGLIIDGAALSLIMKPREDGSSGNYRELFLEICRSCSAVLCCRMAPLQKAQIVKLIKFSKEHPITLAIGDGANDVSMILEAHVGIGVIGKEGRQAARNSDYAIPKFKHLKKMLLVHGHFYYIRISELVQYFFYKNVCFIFPQFLYQFFCGFSQQGRRQECPAALARVHLLDAPGTV

SEQ ID NO: 332982 - DNA, 1119 bp, Artificial Sequence
  derived and/or modified sequence
atgtccgttattgtgaaatctgcaacaggggagatttacctgttctgcaaaggagcagacagctcgatcttcccccgtgtgatagaaggcaaggtggaccagattagggcgagggtcgaacgaaatgccgtggagggcctccggaccctttgtgtggcctacaaaaggctgattcaggaagaatacgaagggatatgtaaattactccaggcagctaaggtggcactgcaagatcgcgaaaagaaactggctgaagcatacgagcagatcgaaaaggacctgaccctgctaggcgcgaccgccgtggaggacagactgcaggaaaaagcagcagataccattgaagcattgcagaaggccggcattaaggtttgggttctgaccggggacaaaatggaaaccgcggctgccacatgctacgcctgcaaactttttagacgtaacacacaactcctggaactcacaaccaaaaggatcgaggaacagtcgttgcacgatgttctctttgagctgtctaaaaccgtgctacgtcattccggatcactgactcgcgacaacctgtctggcctgtcggcagacatgcaggactacgggttgataattgacggcgcagccctctcattgattatgaaaccaagggaggatggctcctccggtaactatcgagagctctttcttgaaatctgccggtcatgctcagctgtcctctgttgtcgcatggctccactgcagaaagcgcagattgtaaagcttatcaagttcagtaaggaacaccccatcaccctggcgattggagacggcgctaacgatgtatcaatgatcctggaagcccacgtaggaatcggcgtaataggcaaagagggcaggcaggcagctaggaacagtgattacgccatcccaaaatttaaacatctgaaaaagatgctactcgtccacggacacttctactacatccggatatcagaactcgtgcagtattttttctacaaaaacgtgtgctttatctttccccaatttttgtaccagttcttctgtggcttttctcagcaaggaaggcggcaggagtgtccagccgctttggccagggtccacttgctggatgcaccaggaaccgtgtag

SEQ ID NO: 332983 - DNA, 1059 bp, Artificial Sequence
  derived and/or modified sequence
taatcaatcttcccccgcgtcattgagggtaaggtagatcagattcgagcccgggtcgaaagaaacgccgtggagggactgaggactctttgtgtggcctataagcggcttatccaggaagagtatgaagggatctgcaaactcctgcaagcagccaaagtggcgctgcaagatagagagaaaaaacttgcggaagcttacgagcagatagagaaggaccttactctcctgggggctacagcggtcgaagaccgtttacaagaaaaggcggccgacaccatagaagcgctccagaaggctgggattaaagtatgggtactcaccggggataaaatggaaaccgcagccgctacctgttatgcctgcaagctgttccgtaggaacacgcagctgctggagcttacgacaaaacggatcgaggagcaatcactgcacgatgtcttgttcgagctgagcaaaacagtgcttcggcacagtgggagtctgaccagggacaacttatcagggctgtccgccgatatgcaggactatggtctcattattgatggcgctgctctctctctcattatgaagcctagagaggatggctcctcagggaactacagggagctcttcctggaaatctgccggagttgctctgcagtgctttgttgcagaatggcgccactacaaaaggcgcagatcgtaaagctgataaaattctcaaaagagcaccccattactctagccattggggatggcgctaacgatgtgtcaatgatattggaagcacacgtcggcataggagttattgggaaagagggacgccaagccgccaggaattccgattatgccatcccaaaattcaaacaccttaagaagatgttactggtgcacggacacttttactacatcaggatcagtgagctggtgcaatatttcttctacaaaaacgtctgtttcatattccctcaattcctataccagttcttctgtggattctctcagcagggtcggcgccaagaatgcccggcagctctggctcgagtgcatctcctggacgctcccgggactgtgtag

SEQ ID NO: 332984 - DNA, 1119 bp, Artificial Sequence
  derived and/or modified sequence
atgtctgtcatcgtgaagagcgccactggagagatctacctgttctgcaagggagctgacagcagcatcttccccagggtcatcgagggcaaggtggaccagatccgggcccgggtggagagaaatgctgtggagggcctgcggaccctgtgtgtggcctacaagaggctcatccaggaggagtatgagggcatctgcaagctgctgcaggccgccaaggtggccctgcaggaccgggagaagaagctggccgaggcctatgagcagatcgagaaggacctgaccctgctgggcgccacagctgtggaggaccggctgcaggagaaggctgctgacaccatcgaggccctgcagaaggccggcatcaaggtgtgggtgctgaccggggacaagatggagacagctgctgccacctgctacgcctgcaagctgttcagaagaaacacccagctgctggagctgaccaccaagagaattgaggagcagagcctgcatgatgtgctgtttgagctgagcaagacagtgctgcggcacagcggcagcctgacccgggacaacctgagcggcctgtctgctgacatgcaggactatggcctcatcattgatggagctgccctgagcctcatcatgaagccccgggaggatggcagcagcggcaactaccgggagctgttcctggagatctgccgcagctgcagcgctgtgctgtgctgcaggatggcccccctgcagaaggcccagatcgtgaagctgatcaagttcagcaaggagcaccccatcaccctggccatcggagatggagccaatgatgtgtccatgatcctggaggcccacgtgggcattggagtcatcggcaaggagggccggcaggccgccaggaacagcgactatgccatccccaagttcaagcacctgaagaagatgctgctggtgcacggccacttctactacatccgcatcagcgagctggtgcagtacttcttctacaagaatgtgtgcttcatcttcccccagttcctgtaccagttcttctgtggcttcagccagcagggccggcggcaggagtgcccagctgccctggcccgggtgcacctgctggatgcccctggcaccgtgtag

SEQ ID NO: 332985 - DNA, 1059 bp, Artificial Sequence
  derived and/or modified sequence
tgaagcatcttccccagggtcatcgagggcaaggtggaccagatccgggcccgggtggagagaaatgctgtggagggcctgcggaccctgtgtgtggcctacaagaggctcatccaggaggagtatgagggcatctgcaagctgctgcaggccgccaaggtggccctgcaggaccgggagaagaagctggccgaggcctatgagcagatcgagaaggacctgaccctgctgggcgccacagctgtggaggaccggctgcaggagaaggctgctgacaccatcgaggccctgcagaaggccggcatcaaggtgtgggtgctgaccggggacaagatggagacagctgctgccacctgctacgcctgcaagctgttcagaagaaacacccagctgctggagctgaccaccaagagaattgaggagcagagcctgcatgatgtgctgtttgagctgagcaagacagtgctgcggcacagcggcagcctgacccgggacaacctgagcggcctgtctgctgacatgcaggactatggcctcatcattgatggagctgccctgagcctcatcatgaagccccgggaggatggcagcagcggcaactaccgggagctgttcctggagatctgccgcagctgcagcgctgtgctgtgctgcaggatggcccccctgcagaaggcccagatcgtgaagctgatcaagttcagcaaggagcaccccatcaccctggccatcggagatggagccaatgatgtgtccatgatcctggaggcccacgtgggcattggagtcatcggcaaggagggccggcaggccgccaggaacagcgactatgccatccccaagttcaagcacctgaagaagatgctgctggtgcacggccacttctactacatccgcatcagcgagctggtgcagtacttcttctacaagaatgtgtgcttcatcttcccccagttcctgtaccagttcttctgtggcttcagccagcagggccggcggcaggagtgcccagctgccctggcccgggtgcacctgctggatgcccctggcaccgtgtag

SEQ ID NO: 332986 - DNA, 1119 bp, Artificial Sequence
  derived and/or modified sequence
atgagcgtgatcgtgaagagcgccaccggcgagatctacctgttctgcaaaggggcagacagttccatctttcccagggtaattgaagggaaggtagaccagattagggctcgcgtggagaggaatgccgtcgagggtttacgcacactctgtgtagcttacaagcgccttatccaagaagaatacgagggcatttgcaaactccttcaggccgccaaggtcgccctccaagaccgcgagaaaaaactggcagaagcgtatgaacagattgaaaaagatctcacactgctcggcgctactgcagtcgaggatcggttgcaggagaaggctgccgacacaatcgaagctctgcagaaggcagggatcaaagtgtgggttctgacaggggacaagatggagactgccgctgcaacatgttatgcatgtaaactgttccgacgcaatactcaattgttggagcttacaaccaagcgcatcgaagagcaaagtcttcatgacgtactctttgaactgtctaagacggtcctccggcactcaggatccttaactcgggacaacctgtcagggttgtccgctgacatgcaggactacgggcttatcatcgatggtgcggccctttcactgattatgaagcctcgagaggacggcagcagtggcaattaccgagaactctttctggaaatctgccggtcctgcagtgccgtcctttgctgtagaatggcaccactgcagaaagcgcagatagtcaagctgataaagttctcaaaggaacatccaataaccctcgctatcggggatggcgctaatgacgtgagcatgatcttggaggcccatgtaggtattggagttatcggcaaagaggggcgtcaggctgcgcgcaattctgactacgccatccccaagttcaaacatcttaagaaaatgttgctggtgcatggacacttctactacattagaatatccgaattggtccaatatttcttttacaaaaatgtgtgcttcatctttccacaattcctgtatcagtttttctgcggattctcgcagcagggacgccgccaggagtgtcctgctgctctggcgagggtccaccttctcgacgcacctggcaccgtttag

SEQ ID NO: 332987 - DNA, 1059 bp, Artificial Sequence
  derived and/or modified sequence
tgaagcatcttcccccgggtgatcgagggcaaggtggaccagatcagagccagggtggaaagaaatgctgttgaaggactcaggacattatgtgttgcatacaagaggttaattcaagaggaatacgagggaatttgcaagctgctccaggccgctaaagtggctctgcaggatcgcgaaaaaaaacttgcagaagcgtatgaacagattgagaaagatctcacactgctgggggccaccgccgtggaagatagactccaggaaaaagccgcggacacaattgaggccctgcagaaggcaggcataaaggtttgggtgctcacaggtgacaagatggaaaccgctgcagctacctgttacgcctgcaagttgtttaggagaaacacccagctgcttgagcttaccaccaagcgaattgaggaacagtcccttcacgacgttctttttgaactgtctaagactgtgctgcggcacagcggatccctgacccgcgacaatctgtctgggttgtcggccgatatgcaggactacggcctcatcatagacggcgccgccctgtcattaatcatgaagcccagagaagacgggtcatccggtaattacagggaactgttcctggaaatctgtaggagctgcagtgctgtactgtgctgtagaatggctccactacagaaggcacagattgtgaagctcattaaattctctaaggagcatccaatcactctcgctattggggacggcgcgaacgatgtgtctatgatcctggaagcccatgtgggtattggagttatcgggaaagagggaaggcaggctgccaggaactcagattatgcaatccccaaatttaaacatcttaagaagatgctgttggtccatggccatttttattacattagaatatctgagctggtgcagtattttttttacaaaaacgtgtgttttatctttcctcagtttctttaccagttcttctgtgggttctcacaacagggccggagacaggaatgcccagctgccctggccagggttcatctgctcgatgcccccggaacagtctag

SEQ ID NO: 332988 - DNA, 1119 bp, Artificial Sequence
  derived and/or modified sequence
atgtcagtgattgtgaaatccgcgaccggcgagatttacctattctgtaagggcgctgactccagcatttttccccgagtgatagaggggaaagtggatcagataagagccagggttgaacgcaatgccgtagagggcctaagaacactctgcgtggcttacaagagactcatccaggaagagtatgaagggatctgcaaactcctacaggccgctaaggtggccctgcaggatcgagaaaagaagctcgctgaagcgtacgagcagatagagaaggatctgaccctgcttggggcaacggctgtggaagatagactgcaggagaaggctgctgacaccatagaagccctccaaaaggccggtatcaaggtctgggttctgacaggcgacaaaatggaaacagctgcagctacctgctacgcttgtaagctattcagacggaatactcagttactggagctaacaaccaagcgaatcgaggagcagtcccttcatgacgtgctctttgaactgtccaaaacagtgctgcgccactccggcagcctgacccgggacaatttgagcggactaagcgcagacatgcaggattatggtttaattatcgacggcgctgcactgtccctgattatgaagccacgcgaagatggaagctccggcaattatcgagaactgtttctcgaaatctgcaggagttgctcagcagtgttatgttgtcggatggcacccttacagaaggcccagattgtgaaactgattaaatttagcaaggagcatcctataacgttagccatcggcgacggagctaacgacgtttcaatgattcttgaggcgcatgtggggatcggcgtcatcggaaaagagggcagacaagccgcacgcaatagcgactatgccattcctaagtttaagcacctcaagaagatgctgctggttcatggtcacttctattacatccggatcagtgagctcgtgcaatacttcttctacaagaacgtgtgcttcatctttcctcagttcctgtaccagtttttctgtggatttagccaacaggggaggaggcaagagtgccccgctgcactggctcgcgtgcatttactggatgcgcctgggactgtgtag

SEQ ID NO: 332989 - DNA, 1059 bp, Artificial Sequence
  derived and/or modified sequence
tgaagcatcttcccgcgagtcatcgagggcaaagtcgatcaaatcagggctcgcgtcgagcggaatgctgtggaagggttgagaactttgtgtgtcgcgtacaagagactcatccaggaggaatacgaaggtatttgtaaacttctgcaggccgcaaaagtcgctctgcaggaccgagagaagaagctggcagaggcgtatgaacagattgagaaggacctgactctcctaggagccaccgcagtagaggatcggctccaggagaaggcagcggatactatagaagcgctacagaaagcaggcatcaaggtctgggtgctcaccggcgataagatggagaccgccgcagctacctgctacgcatgtaaactgttccgtcgcaatactcaattacttgaactgactaccaaaaggatcgaagagcagtctctgcatgacgtcctttttgagctgagcaaaactgtgcttaggcacagcggctccctcacccgggacaacctgtcaggtctaagtgcggacatgcaggattacggcctgattattgatggcgctgcactctctctgatcatgaagcctagagaagacggctcaagtggcaactacagggaactgtttcttgaaatttgtagaagctgtagcgccgttctttgttgtcgcatggcccctctccagaaggcacagattgtgaagctgataaagttctcaaaggagcaccctattaccctggcaatcggggacggggcaaatgacgtgagcatgattctagaggcccacgtaggtattggagttatcggcaaggagggtaggcaggccgctagaaactccgattatgctataccaaagtttaaacacctgaagaagatgttgttagtgcacgggcatttctactacatacggatttcagagttggtgcagtactttttttataagaatgtctgcttcatcttcccacaattcctgtatcagttcttttgtggcttctcacagcaaggacggcgtcaggagtgccccgctgcactggctcgagttcatctactggacgctcccggtaccgtctag

SEQ ID NO: 332990 - DNA, 5786 bp, Artificial Sequence
  derived and/or modified sequence
cttcgatattcccccgagtgatagaaggcaaagttgaccagatccgagccagagtggagcgtaacgcagtggaggggctccgaactttgtgtgttgcttataaaaggctgatccaagaagaatatgaaggcatttgtaagctgctgcaggctgccaaagtggcccttcaagatcgagagaaaaagttagcagaagcctatgagcaaatagagaaagatcttactctgcttggtgctacagctgttgaggaccggctgcaggagaaagctgcagacaccatcgaggccctgcagaaggccgggatcaaagtctgggttctcacgggagacaagatggagacggccgcggccacgtgctacgcctgcaagctcttccgcaggaacacgcagctgctggagctgaccaccaagaggatcgaggagcagagcctgcacgacgtcctgttcgagctgagcaagacggtcctgcgccacagcgggagcctgaccagagacaacctgtccggactttcagcagatatgcaggactacggtttaattatcgacggagctgcactgtctctgataatgaagcctcgagaagacgggagttccggcaactacagggagctcttcctggaaatctgccggagctgcagcgcggtgctctgctgccgcatggcgcccttgcagaaggctcagattgttaaattaatcaaattttcaaaagagcacccaatcacgttagcaattggcgatggtgcaaatgatgtcagcatgattctggaagcgcacgtgggcataggtgtcatcggcaaggaaggccgccaggctgccaggaacagcgactatgcaatcccaaagtttaagcatttgaagaagatgctgcttgttcacgggcatttttattacattaggatctctgagctcgtgcagtacttcttctataagaacgtctgcttcatcttccctcagtttttataccagttcttctgtgggttttcacaacagggacgtcgccaagaatgccctgctgcgctggcgcgtgttcatctactggacgctcctgggactgtttgacgcactggtgttcttctttggtgcttatttcgtgtttgaaaatacaactgtgacaagcaacgggcagatatttggaaactggacgtttggaacgctggtattcaccgtgatggtgttcacagttacactaaagcttgcattggacacacactactggacttggatcaaccattttgtcatctgggggtcgctgctgttctacgttgtcttttcgcttctctggggaggagtgatctggccgttcctcaactaccagaggatgtactacgtgttcatccagatgctgtccagcgggcccgcctggctggccatcgtgctgctggtgaccatcagcctccttcccgacgtcctcaagaaagtcctgtgccggcagctgtggccaacagcaacagagagagtccagactaagagccagtgcctttctgtcgagcagtcaaccatctttatgctttctcagacttccagcagcctgagtttctgatggaacaagagcccaggctaccagagcacctgtccctcggccgcctggtacagctcccactctcagcaggtgacactcgcggcctggaaggagaaggtgtccacggagcccccacccatcctcggcggttcccatcaccactgcagttccatcccaagtcacagctgccctaggtcccgtgtgggaatgctcgtgtgatggatggtcctaagcctgtggagactgtgcacgtgcctcttcctggcccccagcaggcaaggaggggggtcacaggccttgccctcgagcatggcaccctggccgcctggacccagcactgtggttgttgagccacaccagtggcctctgggcattcggctcaacgcaggagggacattctgctggcccaccctgcgcgctgtcatgcagaggccattcccccaggcctgtgtcttcacccacctgccatcattggcctttgctgtcactgggagagaagagccgtccagggacccatggtggcccacatgtggatgccacatgctgctgtttcctgcttgcccggccaccacccatgccctccatagggtgaggtggagccatggtggtgcgtcctttactcaacaaccctccaatccggatgctgtgggaagggccgggtcactcggataccatcatccctgcggatgcaccgccgtaccctgctcatctgggagtggtttccctgcggttacgtccaagcccgcctgccctgtgtgttggggctggctgagtttcggtctccccatcaccggccgcctcgtggagaaggcagtgccacgtgggaggacaaggccacgccggcagcttccagccctgccgcagaagtgccaggatgtccatcagccactcgccagggcacggagccgtcagtccactgttacgggagaatgttgatttcgcgggtgcgagggccgggagacagatacttggctgtgatgagcagacatcctctgtccccgtggaggggtcaacaccaaggtggtgttcgtgcaccagaacctgtctcgggctgacgggggtggcacacaggacacgggtggatcccaacaggcagcaccgcacctctgcccgcctcccgcactgcagctccgcccgccgggctctgcgtccccacgtcccctcgtcccatccccacgtcccctcatcccgtcacctcgtccccacatccccttgccccgtcacctcgtcctcatgtccccttgtcctgtcacctcgtccccacgtcccctcgtctcctcatccccacgtcctctcgtccccttgtcccgtccccacataccctcgtccccatgtccccacgcagggctctccttcgtcttaggatctgtccagcgctgctctgggtgggttagcaaccccagggctgctgtgataggaagtccctgttgttctccgtactggcatttctatttctagaaataatatttgacatagccttaatggtccttaaagaagacatttcagtgtgagattcagacttcagacgctgaaactgctgcctttcaggaaagcaccaccaacgctggaggaggagccggccctcacgcccgccccgcgccacgctgtggaacggggctccggcaagtgaaacccagagggtgtttccgaggtgctcgacagtaggtatttttggaagctcagatttcaccatttgattgtataatcttttacctataaaatatttatttgaagtagagggtaaatcagcggtaagaacagtgaacacagtggttgggataaaataaggtgacaaacatcacaccaaagatgagggtagcgagcaactggcttgagcagacagaacggggaagactccactctgtcccgaggggccagccgcaggcgtccccagggccaccctgccctgaggtccttgtgtggccgccctggcttggcagccctgcccacgctgcccccgcaaacaatggtgtgtgcgtttttacagccctttttaggaacccaatatgggcataaatgtaacacctgtagcgggggcagattctctgtatgttcagttaacaaattatttgtaatgtatttttttagaaatcttaaaattgcctttgcactgaagtattttcatagctgtttatatctcttttattcatttatttaacatactgtctaattttaaaaataggtttttaaagctttcatttttaagtttatgaaattttggccactttacatttagattctggtgagagttttgactgaatgttccaatctctgatgaatgcgaattttcagatttgattttattctctacacacacctcttcttttcttggtatttctggtggcagtgattagttgaacagcacatttaaggcacgataatttgctacactttttctttacaatttgttgcaatttcatctgctttctatgtttcattgttaattgccatccttcagccttaaaaatagaagattctcacgtgaaggtttagtaagttgggtcccagctctgcctgtgtggagatagtcaccatgtacctctgacaacaagttttagtgtgaaagtcactaaacttttacacactcccaaacgtctttttaaaaattgcttgggaaattattaaatgaatgtgcctgatgatttgaaatagacaaggggcacgagataaaaaagaaaaggatgagaagatcctcagtgaatgacgttgcagggtcttcatgcaattttccacctcgcagtagttagtatttacttgccttaaactaactttgaagcaagtaatgtcaactttgagcactttgttgagttttgaaaaatcttatttgttgctgcacaggttaataaattatcaatttgtaattcagcatgttggtcagagacacggtcactgattcacacccagtccctgccacagaccgtctcagacacgcacagtgggcctgctgcatgattcacacccagtccctgccacagaccgtctcagacacgcacagtgggcctgctgcatgattcacacccagtccctgccacagaccgtctcagacacgcacagtgggcctgctgcatgcgtgttacctggcttttggctccacgctcactcatagccatgtccacatgggggcttgcacacaggatcactcacatatgtacatgtacccaccacaaacgtgcaagctcctgcacacatgcatgcacacaaacgtgtacacaagtgtgagctcctacacgcatacacacacacacgtgtacatgcaccaaagcatgtgtgacctacagacatgcagaacatgcacgtgtacacataccacagacacgcgtgtgcatgctcctacacaatacatatgcacatatcatgaacagcgtaagttcctacacacggacgtgtgatacacacatgcatgtacaggtaagcacacatgtacaagctcctacaggcttgctctcacacacgtgtatgcacagcagagagacgtatgagcttctactgcacacatgcacacacacacgcacacgtacattcactacaaacgtgcagcctcctgcacacgtgcacattcatgtgtacaccacaaatgagttcccagacgtgtaaacacacgtgcacacatcgtacacatgtgagctcccacacgtacacacagatgcacatggacacaccccaaacacgcacaggctcctacacacatgcacacacgtgtacaccacaaacgagctcccagacatgtaaacacacgtctcccacacgtgagctcccacacgtacacatgcacatgtacgcaccacaaacacatgcgcaggctcctgcaggcgtgaatacacacatgcacacacatatacacacatgtgccacaaacaagtgcacactgtcctggtgtcctgcactgcatcctgcctccttgctgaggggcccctgtgagaggcctctggatgggcatgggaagatgggctccctggcccccagcccatgcctccctgggatgaagagtccccctcctggcagaatgtctgggctttgcagagcaggccccgggggtgaagtcgcagcttcacttacaccagctgctctgtgagcaaggcttggtgccctggacaaggcccttcccctttagggaggtccagcctcgcaagctgaaacctcccctcggctcagccctataccaggcggccacagcaggactggccacacccacgccgcacctcatccgtgcacgcgtcggagcacggccagccttccgccacgagccagctgggaagggccgcggccgc

SEQ ID NO: 332991 - DNA, 1119 bp, Artificial Sequence
  derived and/or modified sequence
atgagcgtgatcgtgaagagcgccaccggcgagatctacctgttctgcaagggcgccgacagcagcatcttccccagagtgatcgagggcaaggtggaccagatcagagccagagtggagagaaacgccgtggagggcctgagaaccctgtgcgtggcctacaagagactgatccaggaggagtacgagggcatctgcaagctgctgcaggccgccaaggtggccctgcaggacagagagaagaagctggccgaggcctacgagcagatcgagaaggacctgaccctgctgggcgccaccgccgtggaggacagactgcaggagaaggccgccgacaccatcgaggccctgcagaaggccggcatcaaggtgtgggtgctgaccggcgacaagatggagaccgccgccgccacctgctacgcctgcaagctgttcagaagaaacacccagctgctggagctgaccaccaagagaatcgaggagcagagcctgcacgacgtgctgttcgagctgagcaagaccgtgctgagacacagcggcagcctgaccagagacaacctgagcggcctgagcgccgacatgcaggactacggcctgatcatcgacggcgccgccctgagcctgatcatgaagcccagagaggacggcagcagcggcaactacagagagctgttcctggagatctgcagaagctgcagcgccgtgctgtgctgcagaatggcccccctgcagaaggcccagatcgtgaagctgatcaagttcagcaaggagcaccccatcaccctggccatcggcgacggcgccaacgacgtgagcatgatcctggaggcccacgtgggcatcggcgtgatcggcaaggagggcagacaggccgccagaaacagcgactacgccatccccaagttcaagcacctgaagaagatgctgctggtgcacggccacttctactacatcagaatcagcgagctggtgcagtacttcttctacaagaacgtgtgcttcatcttcccccagttcctgtaccagttcttctgcggcttcagccagcagggcagaagacaggagtgccccgccgccctggccagagtgcacctgctggacgcccccggcaccgtgtag

SEQ ID NO: 332992 - DNA, 1059 bp, Artificial Sequence
  derived and/or modified sequence
tgaagcatcttccccagagtgatcgagggcaaggtggaccagatcagagccagagtggagagaaacgccgtggagggcctgagaaccctgtgcgtggcctacaagagactgatccaggaggagtacgagggcatctgcaagctgctgcaggccgccaaggtggccctgcaggacagagagaagaagctggccgaggcctacgagcagatcgagaaggacctgaccctgctgggcgccaccgccgtggaggacagactgcaggagaaggccgccgacaccatcgaggccctgcagaaggccggcatcaaggtgtgggtgctgaccggcgacaagatggagaccgccgccgccacctgctacgcctgcaagctgttcagaagaaacacccagctgctggagctgaccaccaagagaatcgaggagcagagcctgcacgacgtgctgttcgagctgagcaagaccgtgctgagacacagcggcagcctgaccagagacaacctgagcggcctgagcgccgacatgcaggactacggcctgatcatcgacggcgccgccctgagcctgatcatgaagcccagagaggacggcagcagcggcaactacagagagctgttcctggagatctgcagaagctgcagcgccgtgctgtgctgcagaatggcccccctgcagaaggcccagatcgtgaagctgatcaagttcagcaaggagcaccccatcaccctggccatcggcgacggcgccaacgacgtgagcatgatcctggaggcccacgtgggcatcggcgtgatcggcaaggagggcagacaggccgccagaaacagcgactacgccatccccaagttcaagcacctgaagaagatgctgctggtgcacggccacttctactacatcagaatcagcgagctggtgcagtacttcttctacaagaacgtgtgcttcatcttcccccagttcctgtaccagttcttctgcggcttcagccagcagggcagaagacaggagtgccccgccgccctggccagagtgcacctgctggacgcccccggcaccgtgtag

SEQ ID NO: 332993 - protein, 1129 aa, Artificial Sequence
  derived and/or modified sequence
MAEKGASRGTLRRLWSLPRRRRGTAGRSRPDEIMHQDIVPLCAADIQDQLKKRFAYLSGGRGQDGSPVITFPDYPAFSEIPDKEFQNVMTYLTSIPSLQDAGIGFILVIDRRRDKWTSVKASVLRIAASFPANLQLVLVLRPTGFFQRTLSDIAFKFNRDDFKMKVPVIMLSSVPDLHGYIDKSQLTEDLGGTLDYCHSRWLCQRTAIESFALMVKQTAQMLQSFGTELAETELPNDVQSTSSVLCAHTEKKDKAKEDLRLALKEGHSVLESLRELQAEGSEPSVNQDQLDNQATVQRLLAQLNETEAAFDEFWAKHQQKLEQCLQLRHFEQGFREVKAILDAASQKIATFTDIGNSLAHVEHLLRDLASFEEKSGVAVERARALSLDGEQLIGNKHYAVDSIRPKCQELRHLCDQFSAEIARRRGLLSKSLELHRRLETSMKWCDEGIYLLASQPVDKCQSQDGAEAALQEIEKFLETGAENKIQELNAIYKEYESILNQDLMEHVRKVFQKQASMEEVFHRRQASLKKLAARQTRPVQPVAPRPEALAKSPCPSPGIRRGSENSSSEGGALRRGPYRRAKSEMSESRQGRGSAGEEEESLAILRRHVMSELLDTERAYVEELLCVLEGYAAEMDNPLMAHLLSTGLHNKKDVLFGNMEEIYHFHNRIFLRELENYTDCPELVGRCFLERMEDFQIYEKYCQNKPRSESLWRQCSDCPFFQECQRKLDHKLSLDSYLLKPVQRITKYQLLLKEMLKYSRNCEGAEDLQEALSSILGILKAVNDSMHLIAITGYDGNLGDLGKLLMQGSFSVWTDHKRGHTKVKELARFKPMQRHLFLHEKAVLFCKKREENGEGYEKAPSYSYKQSLNMAAVGITENVKGDAKKFEIWYNAREEVYIVQAPTPEIKAAWVNEIRKVLTSQLQACREASQHRALEQSQSLPLPAPTSTSPSRGNSRNIKKLEERKTDPLSLEGYVSSAPLTKPPEKGKGWSKTSHSLEAPEDDGGWSSAEEQINSSDAEEDGGLGPKKLVPGKYTVVADHEKGGPDALRVRSGDVVELVQEGDEGLWYVRDPTTGKEGWVPASSLSVRLGPSGSAQCLSSSESSPGSAVLSNSSSCSEGGQAPFSDLQG

SEQ ID NO: 332994 - protein, 246 aa, Artificial Sequence
  derived and/or modified sequence
MRFWLRTEEMALEEMVQRLNAVSKHTDEIMHQDIVPLCAADIQDQLKKRFAYLSGGRGQDGSPVITFPDYPAFSEIPDKEFQNVMTYLTSIPSLQDAGIGFILVIDRRRDKWTSVKASVLRIAASFPANLQLVLVLRPTGFFQRTLSDIAFKFNRDDFKMKVPVIMLSSVPDLHGYIDKSQLTEDLGGTLDYCHSRWLCQRTAIESFALMVKQTAQMLQSFGTELAETELPNDVQSTSSVLCAHTE

SEQ ID NO: 332995 - protein, 1137 aa, Artificial Sequence
  derived and/or modified sequence
MFDCWRFILCKRPGSNSYSSPQRPNEAKKEETDHQIDVSDVIRLVQDTPEATAMATDEIMHQDIVPLCAADIQDQLKKRFAYLSGGRGQDGSPVITFPDYPAFSEIPDKEFQNVMTYLTSIPSLQDAGIGFILVIDRRRDKWTSVKASVLRIAASFPANLQLVLVLRPTGFFQRTLSDIAFKFNRDDFKMKVPVIMLSSVPDLHGYIDKSQLTEDLGGTLDYCHSRWLCQRTAIESFALMVKQTAQMLQSFGTELAETELPNDVQSTSSVLCAHTEKKDKAKEDLRLALKEGHSVLESLRELQAEGSEPSVNQDQLDNQATVQRLLAQLNETEAAFDEFWAKHQQKLEQCLQLRHFEQGFREVKAILDAASQKIATFTDIGNSLAHVEHLLRDLASFEEKSGVAVERARALSLDGEQLIGNKHYAVDSIRPKCQELRHLCDQFSAEIARRRGLLSKSLELHRRLETSMKWCDEGIYLLASQPVDKCQSQDGAEAALQEIEKFLETGAENKIQELNAIYKEYESILNQDLMEHVRKVFQKQASMEEVFHRRQASLKKLAARQTRPVQPVAPRPEALAKSPCPSPGIRRGSENSSSEGGALRRGPYRRAKSEMSESRQGRGSAGEEEESLAILRRHVMSELLDTERAYVEELLCVLEGYAAEMDNPLMAHLLSTGLHNKKDVLFGNMEEIYHFHNRIFLRELENYTDCPELVGRCFLERMEDFQIYEKYCQNKPRSESLWRQCSDCPFFQECQRKLDHKLSLDSYLLKPVQRITKYQLLLKEMLKYSRNCEGAEDLQEALSSILGILKAVNDSMHLIAITGYDGNLGDLGKLLMQGSFSVWTDHKRGHTKVKELARFKPMQRHLFLHEKAVLFCKKREENGEGYEKAPSYSYKQSLNMAAVGITENVKGDAKKFEIWYNAREEVYIVQAPTPEIKAAWVNEIRKVLTSQLQACREASQHRALEQSQSLPLPAPTSTSPSRGNSRNIKKLEERKTDPLSLEGYVSSAPLTKPPEKGKGWSKTSHSLEAPEDDGGWSSAEEQINSSDAEEDGGLGPKKLVPGKYTVVADHEKGGPDALRVRSGDVVELVQEGDEGLWYVRDPTTGKEGWVPASSLSVRLGPSGSAQCLSSSGKAHVPRAHP

SEQ ID NO: 332996 - DNA, 3414 bp, Artificial Sequence
  derived and/or modified sequence
atgtttgactgctggcgctttatcttatgtaagcgcccagggtctaactcatacagcagtcctcagcgtcccaacgaggcaaaaaaagaggaaaccgatcaccaaatcgacgtgagcgatgtcattcgcctcgtacaagacaccccggaggcaacagcaatggccactgatgaaatcatgcaccaggatatagttccgttgtgcgcagctgacatccaggatcagttaaaaaagaggttcgcttacttaagtgggggcagagggcaagatggctctcccgtcattacttttcctgattacccagccttcagtgaaatccccgataaagagttccagaacgtgatgacttacctaacttcaatcccctcacttcaagacgctgggataggattcattctggtaatagatcgtaggagggataagtggacctcagtcaaagcttccgtcctgcgtattgcagcctcatttccagccaatctccagttggtactggtgcttcggcccaccgggttctttcagaggacactgtctgacatcgcgttcaaattcaacagagatgattttaagatgaaggttcctgtgatcatgctaagttctgtgccggatctgcacggttacatcgataagagccagttaacagaagatctggggggtacgctcgactactgtcactcacgctggctgtgccagcggacagccattgaatcatttgcattgatggttaagcaaacggctcagatgcttcagtcctttggcacggagctggctgaaacagagctgcctaatgatgtccagtctacatcctccgtgctgtgtgcacatactgagaagaaggataaagccaaagaagacctgcgtctggccttaaaggaaggccattctgtgctggagagtctgagagagctgcaagccgagggttccgaaccgtctgtaaatcaagatcaactcgacaaccaggccaccgtgcaacgcctcctcgctcagctaaatgaaacagaagctgccttcgacgagttttgggctaaacaccagcagaaactggagcagtgcctccagctgcggcatttcgaacagggctttcgcgaagtgaaagccattctggacgctgccagccagaaaattgctaccttcactgacataggtaatagtctcgcccacgtggaacacttgctgagagacttggcatcgtttgaagagaaaagcggtgttgcagtagagcgagccagagcgttgtctcttgatggagagcagctgattgggaacaagcactatgccgtagattccattcgcccgaagtgccaggagctgaggcacctttgtgatcagttttccgccgaaatagctcgtaggcgtggcctgctgagcaagagtctggaactgcatcgtcggctggagacttccatgaagtggtgcgatgaaggtatttacctgctggcgtcacaacccgtggacaagtgccagtctcaggacggcgctgaagcagccctacaggaaatcgagaaatttctggaaacgggagccgagaacaagattcaggaactcaatgctatttacaaagaatatgaatctatattgaaccaggatttgatggagcatgttaggaaagttttccagaaacaggcatcgatggaggaagtgttccatcggaggcaggcctccctgaagaagttagccgcgcggcagacccggcccgtccaacctgttgcaccaaggcccgaagccttagctaagtcgccctgcccaagccctgggattcgccggggttcggagaacagctcatccgagggcggagcccttcggagggggccctaccgccgcgccaagtcggagatgagcgagtccagacaagggcgtggctccgccggcgaggaggaagaaagtctggccatcctgcgacgccacgtgatgtcagaactcctggacacggagcgggcatatgtcgaggagctgctgtgcgtcttggagggctacgctgcagagatggataatcctctcatggcacatcttctgtctactgggctgcataataagaaagacgtgttatttggtaatatggaagagatctatcacttccataaccgtatctttttgcgcgagctggagaattacactgattgcccagagttggtggggcgctgcttcctagagcggatggaagactttcagatttacgagaagtactgccagaacaaaccccgcagcgagtccctctggagacagtgctcggactgtcccttttttcaggaatgccaacgcaaactggaccataagctttccctggattcctacctattgaagccagtgcaacgtatcacaaagtatcaactcctgttgaaagagatgttaaagtactctcggaactgtgagggcgcggaagatttgcaggaggccctctcgtcaattctgggcatcttaaaagcagtgaacgacagcatgcacctgatcgcaataaccggatacgacggtaatctcggcgatttgggtaagctgctgatgcaggggtctttttccgtgtggaccgatcataaacggggacacaccaaagtgaaagagctggcccgtttcaaacccatgcagaggcacctttttctgcatgagaaggccgtgctgttctgcaaaaagcgcgaggagaacggcgaaggttacgagaaggctccgtcctattcatataagcaatcactgaatatggccgcagtgggaatcactgagaacgtcaaaggggatgcgaagaagttcgaaatttggtataatgcccgcgaagaggtgtacatcgtgcaagcacctacccccgagatcaaggctgcctgggtcaatgaaattaggaaagtgctgacaagccagttacaggcttgtcgagaagccagtcagcaccgcgccctggagcagagtcaaagtctacctctcccggccccaacttctacaagccctagcagaggaaattcccggaatattaaaaagcttgaagagcgaaagactgaccccctgagtctggaaggttatgtatcatcagcaccactgactaaaccccccgagaaaggtaaaggctggagcaagaccagccactcgctggaagctccagaagacgatggcggttggtccagcgcagaagagcagatcaatagttcggatgccgaggaggatggcggattaggccccaagaagctggtacctggaaagtatacggtggtggcagaccacgagaaaggcggaccagatgcactgcgcgtaaggtccggcgacgtcgttgaactggtacaagaaggcgacgaaggtctgtggtacgttagagatcccaccaccgggaaagagggctgggtgcctgctagcagtctgtcagtccgtctgggaccttctggatcggctcagtgcctctctagcagcggaaaagcccatgttccaagagctcatccatag

SEQ ID NO: 332997 - DNA, 3414 bp, Artificial Sequence
  derived and/or modified sequence
atgtttgactgctggagatttatactgtgcaagcggccagggagtaattcttactcatcaccccagcgtcccaatgaagcaaaaaaagaggaaaccgaccaccagatagacgtcagcgacgtgatccgactggttcaggatacccccgaggccacggctatggccacagacgagatcatgcatcaggatattgtgcctttatgcgcagctgacattcaggatcaacttaagaagagattcgcgtaccttagtgggggccgcggtcaagatgggtcacctgtgatcacattccccgactatcccgcgttctcggaaattcctgacaaagagttccagaatgtgatgacgtatttaacttccatacccagcctccaagatgctggcattggcttcattctagtcattgacagaagacgggataagtggactagcgtgaaagccagcgtcttgcgcatcgccgcttcattccccgcgaacctgcagctagttcttgtccttcgtccaaccggctttttccagcggactctgagcgatattgctttcaagttcaaccgggatgatttcaaaatgaaagtccccgttatcatgctgtcgagtgtgcccgaccttcatggctacatcgacaagtctcagctgactgaagatcttggtgggaccctggattactgccactctcggtggctgtgccagcggaccgccattgaatcatttgccctcatggtgaagcagactgcccagatgttacagagttttgggacagagctcgcggagacggagcttccaaatgacgttcagtccacatcgagcgttctttgtgcacacaccgaaaagaaggacaaagccaaagaagacctacgcttggccttgaaagaaggtcactcggttttagagagtctgcgcgagctacaggcagagggttctgagcctagcgtgaatcaagatcagcttgataaccaggcaactgtgcagcgcctgctggctcagctaaatgaaacagaagcagcgtttgatgagttttgggccaaacaccagcagaagctggaacagtgcctccaactcagacactttgagcaaggatttcgagaagtgaaggcaatcttggatgccgcttcccagaagatcgcaacatttactgacattggtaacagtttggcacacgtggagcatctactgcgggatctggctagctttgaggagaaaagtggggtggccgtagagagagcccgtgcgctgagtctggacggcgagcagctaattgggaacaagcactacgccgtggattccattaggcccaagtgtcaagaactgaggcatttgtgtgatcagttctccgccgaaatcgctcgcaggcgcggcctactgtccaaaagcttagaactgcacaggcggctagagacttccatgaaatggtgcgacgagggcatctatttgctggcctcccaacctgtggataaatgtcagagccaggacggggctgaggccgccctgcaagagatcgagaaattcctggaaaccggcgccgaaaacaaaatccaggagttgaacgccatttataaggaatacgagagtattctgaaccaggatctgatggagcacgtccgaaaggtctttcagaaacaggccagcatggaagaggtgtttcatcgcagacaggcttcactgaaaaagctggccgctcggcagacgcgtccagtgcagcccgtcgccccccgaccagaagccctcgcgaaaagtccatgcccctcccctggaattaggagggggtccgaaaatagcagcagcgaaggcggagctctgcgtcggggcccatatcgacgagccaaatctgagatgagcgagtctaggcagggccggggtagcgcaggtgaagaggaagagtctctggctatccttcgccgacatgttatgtctgaactgctggacaccgagagggcctatgtggaggaactgctgtgcgtgcttgaagggtatgccgctgaaatggacaatccactgatggctcacttgctcagtaccgggctccacaataagaaggacgtgctcttcgggaacatggaggaaatctatcatttccataatagaatattccttagagagctcgaaaactacaccgattgccccgagctagtaggtcgatgcttcctcgaacgtatggaagactttcagatctacgaaaagtattgtcagaataagcctcgatcagagtccctctggcgtcaatgttctgattgtcctttttttcaggaatgccaaaggaagcttgaccacaaattgagcctggactcctacctcctcaagccagtacaaaggatcaccaaataccagctgctgctgaaagagatgcttaagtattccagaaattgtgaaggagctgaagatctgcaggaagcactctcttccattctcggaatcctaaaggccgtgaatgatagcatgcacctaatcgcgatcactgggtatgatgggaacctgggagaccttggtaaacttctgatgcagggctccttcagcgtgtggacggatcacaagagaggccatacaaaggtcaaggaactggcacggtttaagccaatgcaacgccacctgttcttgcacgagaaggccgtgttattttgtaaaaagcgcgaggagaacggggaaggatatgaaaaggccccctcgtactcatacaagcaatcgctgaacatggctgctgttggcatcacagagaacgtgaaaggtgacgcaaagaaatttgaaatatggtacaacgccagagaggaggtttacatcgtacaggcaccaacccccgaaatcaaggctgcctgggtaaatgagatcagaaaagtgttaacctctcaacttcaggcctgtcgggaagcttcacagcatcgggcacttgaacagagccaaagtctgccactgccagcccccacttcaacctcaccaagtcggggcaatagccgtaatattaaaaaattggaggagcggaagacggatcccctgagcctggagggctatgtgtcctccgcccccctgacaaaacctcctgagaagggcaagggttggtccaagacctcacacagcttagaggccccagaggatgacggaggatggtcatctgcagaggagcaaattaacagcagcgatgctgaagaggatggcgggctgggaccaaagaagttggtcccaggcaaatacaccgtggttgccgaccacgaaaaaggcggcccggatgcactgcgagttcgcagcggggacgtcgtggagctggtccaagaaggagacgaaggcctatggtatgttagggatccaaccaccggtaaggagggatgggtacccgccagttcccttagcgttaggctgggcccctccggctcagcccagtgcctcagctcatcaggaaaggcacacgtaccgcgcgcacacccttag

SEQ ID NO: 332998 - DNA, 3414 bp, Artificial Sequence
  derived and/or modified sequence
atgtttgactgctggaggttcatcctgtgcaagaggcctggcagcaacagctacagcagcccccagaggcccaatgaggccaagaaggaggagacagaccaccagattgatgtgtctgatgtgatccggctggtgcaggacaccccagaggccacagccatggccacagatgagatcatgcaccaggacatcgtgcccctgtgtgccgctgacatccaggaccagctgaagaagagatttgcctacctgagcggcggccggggccaggacggcagccctgtgatcaccttcccagactacccagccttcagcgagatcccagacaaggagttccagaatgtgatgacctacctgaccagcatccccagcctgcaggatgctggcatcggcttcatcctggtgattgacagaagaagagacaagtggacctctgtgaaggcctctgtgctgagaattgctgccagcttccctgccaacctgcagctggtgctggtgctgcggcccaccggcttcttccagaggaccctgagtgacatcgccttcaagttcaacagagatgacttcaagatgaaggtgcctgtgatcatgctgagctctgtgcctgacctgcacggctacatcgacaagagccagctgacagaggacctgggcggcaccctggactactgccacagccgctggctgtgccagaggacagccatcgagagctttgccctgatggtgaagcagacagcccagatgctgcagagctttggaacagagctggccgagacagagctgcccaatgatgtgcagagcaccagctctgtgctgtgtgcccacacagagaagaaggacaaggccaaggaggacctgcggctggccctgaaggagggccacagcgtgctggagagcctgcgggagctgcaggccgagggcagcgagcccagcgtgaaccaggaccagctggacaaccaggccaccgtgcagaggctgctggcccagctgaatgaaacagaggccgcctttgatgagttctgggccaagcaccagcagaagctggagcagtgcctgcagctgcggcactttgagcagggcttccgggaggtgaaggccatcctggatgctgccagccagaagatcgccaccttcacagacatcggcaacagcctggcccacgtggagcacctgctgcgggacctggccagctttgaggagaagtctggagtggccgtggagcgggcccgggccctgagcctggatggagagcagctgattggcaacaagcactatgctgtggacagcatccggcccaagtgccaggagctgcggcacctgtgtgaccagttctctgctgagatcgcccggcggcggggcctgctgagcaagagcctggagctgcaccggcggctggagacctccatgaagtggtgtgatgagggcatctacctgctggccagccagcctgtggacaagtgccagagccaggatggagctgaggccgccctgcaggagattgagaagttcctggagactggagctgagaacaagatccaggagctgaatgccatctacaaggagtatgagagcatcctgaaccaggacctgatggagcacgtgaggaaggtgttccagaagcaggcctccatggaggaggtgttccaccggcggcaggccagcctgaagaagctggccgcccggcagaccaggcctgtgcagcctgtggcccccaggcctgaggccctggccaagagcccctgccccagccctggcatccggcggggcagcgagaacagcagcagcgagggcggggccctgcggcggggcccctacagaagagccaagtctgagatgtctgagagccggcagggccggggcagcgctggggaggaggaggagagcctggccatcctgcggcggcacgtgatgtctgagctgctggacacagagcgggcctacgtggaggagctgctgtgtgtgctggagggctacgccgctgagatggacaaccccctgatggcccacctgctgagcacaggcctgcacaacaagaaggatgtgctgtttggaaacatggaggagatctaccacttccacaaccgcatcttcctgcgggagctggagaactacacagactgcccagagctggtgggccgctgcttcctggagaggatggaggacttccagatctatgagaagtactgccagaacaagcccaggtctgagagcctgtggaggcagtgcagcgactgccccttcttccaggagtgccagaggaagctggaccacaagctgagcctggacagctacctgctgaagcctgtgcagaggatcaccaagtaccagctgctgctgaaggagatgctgaagtacagcaggaactgtgagggcgctgaggacctgcaggaggccctgagcagcatcctgggcatcctgaaggctgtgaatgacagcatgcacctgattgccatcaccggctatgatggcaacctgggggacctgggcaagctgctgatgcagggcagcttctctgtgtggacagaccacaagaggggccacaccaaggtgaaggagctggcccgcttcaagcccatgcagaggcacctgttcctgcacgagaaggctgtgctcttctgcaagaagcgggaggagaatggagagggctatgagaaggcccccagctacagctacaagcagagcctgaacatggctgctgtgggcatcacagaaaatgtgaagggagatgccaagaagtttgagatctggtacaatgcccgggaggaggtgtacatcgtgcaggcccccaccccagagatcaaggccgcctgggtgaatgagatcaggaaggtgctgaccagccagctgcaggcctgccgggaggccagccagcaccgggccctggagcagagccagagcctgcccctgcctgcccccaccagcaccagccccagccggggcaacagcaggaacatcaagaagctggaggagaggaagacagaccccctgagcctggagggctacgtgtcctctgcccccctgaccaagcccccagagaagggcaagggctggagcaagaccagccacagcctggaggccccagaagatgatggcggctggagcagcgctgaggagcagatcaacagcagtgatgctgaggaggatggcggcctgggccccaagaagctggtgcctgggaagtacacagtggtggccgaccacgagaagggcggcccagatgccctgcgggtgcgctctggagatgtggtggagctggtgcaggagggagatgagggcctgtggtacgtgcgggaccccaccaccgggaaggagggctgggtgcctgccagcagcctgtctgtgcggctgggccccagcggcagcgcccagtgcctgagcagcagcggcaaggcccacgtgccccgggcccacccctag

SEQ ID NO: 332999 - DNA, 3648 bp, Artificial Sequence
  derived and/or modified sequence
acctgcggggcgcggagctcggcggacgcgggagggcagcaccacgggcggcagcctcatgtttgactgttggagatttatcctgtgcaagagacctggaagcaacagttattcttccccacaacggcccaatgaggccaaaaaggaggaaacggatcaccaaattgatgtgtctgacgtcatcaggcttgttcaagacacaccggaggcgacggccatggccacagatgaaatcatgcaccaggacatcgtcccgctctgtgctgccgacatccaggaccagctaaagaagcgctttgcttacctgtccggtgggcgggggcaggacggaagcccggttatcaccttccctgactacccggccttcagcgagattccggacaaggagttccagaatgtcatgacctacctcaccagcatccccagcctgcaggacgctggcatcggattcatcctggtgatagaccggcgacgggacaaatggacctccgtgaaggcgtccgtcctgcgcatcgcagcatctttcccggcaaacctgcagctcgtcctcgtgcttcgcccgacgggttttttccaaaggactctctccgacatcgctttcaaattcaatagagatgactttaagatgaaggtgccggtcataatgctgagctccgtaccagacttacacggttacatcgataagtcgcagctgaccgaggacctgggtgggaccctggactactgccactcccggtggctgtgccagcgcacggccatcgaaagtttcgccctcatggtgaagcagacggctcagatgctgcagtccttcgggaccgagctggctgaaacagagctgcccaatgacgtccagtcgacaagctcagtgctgtgtgcgcacacagagaagaaggacaaggcgaaggaggatttgaggctggcactgaaagaggggcacagtgtcctggagagcctcagggagctgcaggctgagggctcagagcccagtgtgaaccaggaccagcttgacaaccaggccaccgtgcagaggctcctggcccagctgaacgaaaccgaggctgccttcgatgagttctgggcaaagcatcagcagaaactggagcagtgtctgcagctccggcactttgagcagggcttccgggaggtcaaagccatcttggacgcagcgtcccagaagatagcaaccttcacagacatcggcaacagcctggcgcatgtggagcacctgctgagggacctggccagcttcgaggagaaatcaggcgtggccgtggagagggcccgggccctgtctctggacggcgagcagctcattgggaacaagcactacgcggtagactccatccgcccaaagtgccaggagctccggcacctctgtgaccagttctctgcggagatcgcaaggaggagggggctgctcagcaagtccctggagctgcaccgccgcctggagacgtccatgaagtggtgtgatgaagggatttacctgctggcctcacaacctgtggacaagtgccagtcccaggacggcgcggaggctgccctccaggaaatcgagaagtttttggagaccggtgcggaaaataagatccaggagctcaacgcgatttacaaggaatacgaatccatcctcaaccaagatctcatggagcacgtgcgaaaggtcttccagaagcaggcaagcatggaggaggtgttccaccgcaggcaggccagcctgaagaagctggcggccaggcagacgcggcccgtgcagccggtggcccccagacccgaggcactggcaaagtcgccctgcccctccccaggcattcggcgaggctctgagaactccagctccgagggcggtgcgctccggagagggccctaccggagggccaagagtgagatgagtgagagccggcagggccgcggctcagcgggggaggaggaggaaagcctggccatcctgcgcaggcacgtgatgagcgagctcctggacacagaacgggcctacgtggaggagctgctgtgcgtcctggagggctacgccgcggagatggataacccactgatggctcacctcctgtcaacaggccttcacaacaagaaggatgttttgtttggaaacatggaggaaatctatcacttccacaacaggatattcctcagggagctggaaaactacactgactgcccagaactggttggaagatgctttctggagaggatggaagatttccagatctatgagaagtactgtcagaacaagccccgctctgagagcctgtggagacagtgctccgactgcccgtttttccaggaatgccagagaaagctggaccacaagctgagcctggactcctacctgctgaagccagtgcagaggatcaccaagtaccagctgctgctcaaggaaatgctgaaatacagcaggaactgcgagggggctgaggacctgcaggaggcgctgagctccatcctgggcatcctgaaggccgtgaacgactccatgcacctcatcgctatcaccggctatgacgggaatctcggcgacctgggcaagctgctgatgcagggctcgttcagcgtctggaccgaccacaagaggggccacaccaaggtgaaggagctggccaggttcaagcccatgcagcggcacctgttcctgcacgagaaggcagtgctcttctgcaagaagagggaggagaatggggaggggtatgagaaagctccctcctacagctacaagcagtccttaaacatggctgccgttggcattacggagaacgtgaagggagatgctaagaagttcgagatctggtacaacgcgcgcgaggaggtctacatcgtccaggcgccaactcctgagattaaagccgcgtgggtgaatgaaattcggaaagtgctgaccagccagctgcaggcttgtagagaagccagccagcaccgggcgctggagcagtcacagagcctgcccctgccggccccgaccagcaccagtccctcaagaggaaactcaaggaacatcaagaagctggaagaaaggaaaacagaccccctaagcctggagggatacgtcagctcagcgccactgacaaagccccccgaaaagggcaaaggttggagcaaaacgtcccactcactggaggcacctgaggacgacgggggctggtcaagtgcagaggagcagattaactcgtccgacgcagaggaggacggcgggttgggccccaagaagctggttccaggtaaatacacggtcgtggcggaccacgagaagggaggccccgatgcgctgcgcgtgaggagcggggacgtggtggagctggtgcaggagggcgacgagggcctctggtacgtcagggacccgaccactggcaaggagggctgggtgccggccagcagcctgtccgtccggctcggcccgtccggctcggcccagtgcctgagcagctcaggtaaggcccacgtgccccgagcccacccgtgacgctgccaagggcccgggcgaggaagctgccccgtgtgtgcccggcagagccgacgccgaagcccgtccccgcctgatctccccgcagagtcgagcccggggtcggccgtgctgagcaactcgtccagctgcagcgagggcggccaggcccccttctccgacctgcaggggtagcg

SEQ ID NO: 333000 - DNA, 3424 bp, Artificial Sequence
  derived and/or modified sequence
ctgcagcctcatgtttgactgttggagatttatcctgtgcaagagacctggaagcaacagttattcttccccacaacggcccaatgaggccaaaaaggaggaaacggatcaccaaattgatgtgtctgacgtcatcaggcttgttcaagacacaccggaggcgacggccatggccacagatgaaatcatgcaccaggacatcgtcccgctctgtgctgccgacatccaggaccagctaaagaagcgctttgcttacctgtccggtgggcgggggcaggacggaagcccggttatcaccttccctgactacccggccttcagcgagattccggacaaggagttccagaatgtcatgacctacctcaccagcatccccagcctgcaggacgctggcatcggattcatcctggtgatagaccggcgacgggacaaatggacctccgtgaaggcgtccgtcctgcgcatcgcagcatctttcccggcaaacctgcagctcgtcctcgtgcttcgcccgacgggttttttccaaaggactctctccgacatcgctttcaaattcaatagagatgactttaagatgaaggtgccggtcataatgctgagctccgtaccagacttacacggttacatcgataagtcgcagctgaccgaggacctgggtgggaccctggactactgccactcccggtggctgtgccagcgcacggccatcgaaagtttcgccctcatggtgaagcagacggctcagatgctgcagtccttcgggaccgagctggctgaaacagagctgcccaatgacgtccagtcgacaagctcagtgctgtgtgcgcacacagagaagaaggacaaggcgaaggaggatttgaggctggcactgaaagaggggcacagtgtcctggagagcctcagggagctgcaggctgagggctcagagcccagtgtgaaccaggaccagcttgacaaccaggccaccgtgcagaggctcctggcccagctgaacgaaaccgaggctgccttcgatgagttctgggcaaagcatcagcagaaactggagcagtgtctgcagctccggcactttgagcagggcttccgggaggtcaaagccatcttggacgcagcgtcccagaagatagcaaccttcacagacatcggcaacagcctggcgcatgtggagcacctgctgagggacctggccagcttcgaggagaaatcaggcgtggccgtggagagggcccgggccctgtctctggacggcgagcagctcattgggaacaagcactacgcggtagactccatccgcccaaagtgccaggagctccggcacctctgtgaccagttctctgcggagatcgcaaggaggagggggctgctcagcaagtccctggagctgcaccgccgcctggagacgtccatgaagtggtgtgatgaagggatttacctgctggcctcacaacctgtggacaagtgccagtcccaggacggcgcggaggctgccctccaggaaatcgagaagtttttggagaccggtgcggaaaataagatccaggagctcaacgcgatttacaaggaatacgaatccatcctcaaccaagatctcatggagcacgtgcgaaaggtcttccagaagcaggcaagcatggaggaggtgttccaccgcaggcaggccagcctgaagaagctggcggccaggcagacgcggcccgtgcagccggtggcccccagacccgaggcactggcaaagtcgccctgcccctccccaggcattcggcgaggctctgagaactccagctccgagggcggtgcgctccggagagggccctaccggagggccaagagtgagatgagtgagagccggcagggccgcggctcagcgggggaggaggaggaaagcctggccatcctgcgcaggcacgtgatgagcgagctcctggacacagaacgggcctacgtggaggagctgctgtgcgtcctggagggctacgccgcggagatggataacccactgatggctcacctcctgtcaacaggccttcacaacaagaaggatgttttgtttggaaacatggaggaaatctatcacttccacaacaggatattcctcagggagctggaaaactacactgactgcccagaactggttggaagatgctttctggagaggatggaagatttccagatctatgagaagtactgtcagaacaagccccgctctgagagcctgtggagacagtgctccgactgcccgtttttccaggaatgccagagaaagctggaccacaagctgagcctggactcctacctgctgaagccagtgcagaggatcaccaagtaccagctgctgctcaaggaaatgctgaaatacagcaggaactgcgagggggctgaggacctgcaggaggcgctgagctccatcctgggcatcctgaaggccgtgaacgactccatgcacctcatcgctatcaccggctatgacgggaatctcggcgacctgggcaagctgctgatgcagggctcgttcagcgtctggaccgaccacaagaggggccacaccaaggtgaaggagctggccaggttcaagcccatgcagcggcacctgttcctgcacgagaaggcagtgctcttctgcaagaagagggaggagaatggggaggggtatgagaaagctccctcctacagctacaagcagtccttaaacatggctgccgttggcattacggagaacgtgaagggagatgctaagaagttcgagatctggtacaacgcgcgcgaggaggtctacatcgtccaggcgccaactcctgagattaaagccgcgtgggtgaatgaaattcggaaagtgctgaccagccagctgcaggcttgtagagaagccagccagcaccgggcgctggagcagtcacagagcctgcccctgccggccccgaccagcaccagtccctcaagaggaaactcaaggaacatcaagaagctggaagaaaggaaaacagaccccctaagcctggagggatacgtcagctcagcgccactgacaaagccccccgaaaagggcaaaggttggagcaaaacgtcccactcactggaggcacctgaggacgacgggggctggtcaagtgcagaggagcagattaactcgtccgacgcagaggaggacggcgggttgggccccaagaagctggttccaggtaaatacacggtcgtggcggaccacgagaagggaggccccgatgcgctgcgcgtgaggagcggggacgtggtggagctggtgcaggagggcgacgagggcctctggtacgtcagggacccgaccactggcaaggagggctgggtgccggccagcagcctgtccgtccggctcggcccgtccggctcggcccagtgcctgagcagctcaggtaaggcccacgtgccccgagcccacccgtga

SEQ ID NO: 333001 - DNA, 3414 bp, Artificial Sequence
  derived and/or modified sequence
atgttcgactgctggcggttcatcctgtgcaagcggcccggcagcaattcgtactctagcccacaaaggcctaacgaagctaagaaagaagagactgatcatcagatcgacgtctccgacgtgatccgattagtccaagatacaccagaagcaaccgcaatggcgactgacgagatcatgcatcaggacatagtccccctgtgcgccgcggacattcaggaccagctgaagaagcggtttgcctacttgtcaggcgggcggggccaggatgggtccccagtcattacttttccggattacccagctttctctgaaatcccagacaaagagtttcagaatgtgatgacctatctcaccagcatcccaagcctgcaggacgccggtatcggttttattctggtgattgaccggaggcgggacaaatggacgtctgtcaaagcatcagtgcttaggatcgccgctagcttcccagctaatctgcagctagtcctcgtacttcgcccaacagggttctttcaacgaaccttatcggacattgcatttaaattcaatagggacgatttcaagatgaaagttcccgtgataatgctaagtagcgtccccgacttgcacggctatattgataaatcccagttaaccgaggacctgggcggaacgctggactattgccacagcagatggctttgccagcggacagctatagagtcttttgccttaatggtcaagcaaactgctcaaatgctacagtctttcgggaccgaattggccgaaactgagctgccgaatgatgtacagagtacctcaagtgtcctgtgtgcccacaccgagaaaaaggacaaagccaaggaggatctcaggctagccttgaaagagggacactcagtgttggagtccctccgggagctgcaggccgaaggatctgagcccagcgtgaaccaagaccagcttgacaaccaggccaccgtgcaaaggctgctcgcccaacttaacgaaactgaggccgctttcgacgagttttgggcgaaacaccaacagaagctggagcagtgtctgcaactgcgccactttgagcagggatttagagaagtgaaagccatactggatgccgccagtcagaagatcgcaacattcaccgacattggcaatagtctcgcacacgtggagcacctgttaagagatttagcctccttcgaggagaagagtggcgttgccgtggagcgggcaagggcactgtccctggatggggagcagttaataggaaacaaacattacgccgttgacagcatcagacccaagtgtcaggaactgaggcatctgtgcgatcaattttccgcagaaatagcccggaggcgggggttactttctaaatccctggaactacaccggagactcgagacctctatgaagtggtgcgacgagggaatttacctgcttgctagccagccagtggataagtgccagtcccaagacggcgccgaggcagcactgcaggagatcgagaagtttcttgagaccggcgctgagaacaaaatccaggaacttaatgccatctacaaagaatacgagagcatattgaaccaagatcttatggagcacgtgagaaaagtctttcaaaagcaagcatcaatggaagaagtctttcacagacgccaggcctcacttaaaaagctggccgcgcgccagacacgacccgtacagccggttgccccccgacctgaggcattggccaaatccccatgtccttccccaggtattcgtcgcggatcagaaaattcatcatcggagggaggcgcactccggagagggccatacagacgggccaagagcgagatgagcgagtcccgacagggtcgggggagtgcaggggaggaggaggagtccctcgccattctgaggagacacgtaatgagcgagctgctggacaccgagcgcgcatatgtggaggaacttctctgcgtcctggaaggctatgccgctgaaatggataacccactgatggcccacctgctgagcaccggtctccacaacaagaaagacgtgctcttcggaaatatggaggagatctaccattttcacaatcggattttcttgagggagctggagaactacaccgactgtcctgagctggtgggccgctgttttttggagcgaatggaagacttccagatctacgaaaagtactgtcagaataagcccagatccgagtctctgtggcgccaatgttcggactgtcctttcttccaagaatgtcagaggaagctagaccacaagttgtctttggacagctatctgttaaaacccgtgcagaggattaccaaatatcagcttctgcttaaagagatgctcaaatattccaggaactgtgagggtgctgaggatttgcaggaggcgctctcctccatcctggggattctaaaggccgttaacgacagcatgcacctgatagcaatcacgggatacgatggcaacctgggagacctaggaaaattgctgatgcaagggtccttttctgtgtggacggatcacaagcggggacacacaaaggttaaagagctggctcgcttcaagcccatgcagaggcacttgtttttgcatgagaaagctgtgctcttctgcaaaaagcgcgaagaaaacggagaaggctatgagaaagcaccaagctacagctataaacagtcactgaacatggctgccgtgggcataaccgagaacgtgaagggtgacgccaagaagttcgagatctggtacaatgccagggaagaagtgtacatcgtacaggcaccgacgcctgaaataaaggccgcatgggtgaacgagatcaggaaggtactgacgagccaactccaggcctgcagagaggcatctcaacaccgtgcgctggagcagtctcagtcattaccgctgccggcacccacatccactagtccatctaggggaaactctcggaacatcaagaagcttgaggagaggaagaccgaccctctgagtctggagggttacgtgtcgtccgcaccgctaacaaaacctcccgagaagggtaaggggtggtcgaagacatcacattccttggaggcacccgaagacgacggtggctggtcaagcgctgaggaacaaataaatagctccgacgccgaagaagacggaggtcttggcccgaagaaactggtccctgggaagtatacagtagtcgcagatcacgaaaaagggggcccggatgctctccgagtgaggtccggtgacgtagtagaattagtccaggaaggcgacgagggactttggtatgtcagagatcccaccactggcaaggagggctgggttcccgcttcttctttgtctgtgagactaggtcccagcgggtcagcccaatgcttgagcagctcaggaaaagcacatgtgcccagagctcatccctag

SEQ ID NO: 333002 - DNA, 3414 bp, Artificial Sequence
  derived and/or modified sequence
atgttcgactgctggcggttcatcctgtgcaagcggcccggcagcaattcttattctagtcctcagcggcccaacgaggcaaaaaaggaagagacagaccatcagatagatgtctcggacgtaattaggttggtccaggatacccccgaagctacagcgatggctacagacgagattatgcaccaggacatcgtgccactctgcgctgctgatatccaggatcaactcaaaaagaggtttgcctacctgagtggcggccgaggacaggacggcagcccggtaatcacatttccagactatcctgctttttcggagatccccgacaaagaattccaaaacgtgatgacctaccttacctcaattccctcactgcaggatgccggcattggatttattctggtgatcgacagacggcgcgataaatggacatcagtcaaggcttccgtcctccggatcgccgcttccttcccagctaatctgcagctggttctcgtgcttcggcccactggctttttccaacggacactctccgacatcgctttcaagtttaatagagacgacttcaagatgaaggtgccggtgataatgctcagttctgtgcccgaccttcatggctatattgacaagagtcagctgactgaggacctagggggaactctggattattgtcacagccggtggttatgccagaggacagctatcgaatccttcgcactgatggttaaacagaccgcccagatgctccagtcatttggaacggagcttgccgaaacggagttgcctaatgatgttcaatctacttcctccgtcctgtgcgcccacaccgaaaagaaagataaggctaaagaggatcttcgactagctctgaaagaaggccacagcgtgctggaaagtctgcgagaactccaggcggagggatccgagccgtccgtcaatcaagaccagctggacaaccaggctaccgtgcaacgcctgctcgcccagctcaacgagacagaggccgcatttgacgaattttgggcaaaacaccagcaaaagcttgagcaatgcctgcagctgagacacttcgagcagggcttccgcgaagtgaaggctatattagacgctgcttcccaaaagatcgcaacttttacggatatcggaaatagcctagctcatgtggaacacctgctcagagatctcgcatcttttgaggagaagtccggtgttgccgtggaacgggcgcgtgctctgtcactggatggagagcagctcatcggcaacaaacactacgcagtagacagcatccgcccgaagtgtcaggagctccgccacctttgcgatcagtttagtgctgaaattgccaggcgcagagggctgttgtcaaaatcccttgagttacacaggagactagagacatccatgaagtggtgcgatgaggggatctatttactggccagccagcccgtcgacaagtgccaatctcaggatggagcagaagccgcactccaggagatagaaaagttcctggagacgggcgctgaaaacaagatccaggagctaaacgccatctacaaagagtacgaaagcatcttaaatcaggacctcatggagcacgttagaaaagtattccagaagcaagccagtatggaagaggtctttcatcggcgccaagcctccctcaaaaagctggcagcccgacaaacacggcccgtccagcccgtagctccccgacccgaggctctggccaaaagtccatgtccctccccaggaattcgccggggatcagaaaatagctcaagtgagggaggcgccctccggcggggcccgtacagacgagccaagagcgagatgtcggaatcaagacagggaaggggaagtgccggtgaagaagaggagagccttgctatcctgcgacgacacgttatgtccgagctgctggacaccgagagggcatacgtggaagaactgctctgtgtcttggagggctacgccgccgagatggacaaccctctcatggctcaccttttatccacaggtttacacaacaaaaaagatgtcctgtttgggaatatggaggagatctaccattttcacaatcggatctttctccgcgagctcgagaattacacggactgcccagagctggtgggaagatgctttttggagaggatggaggactttcaaatttacgagaaatactgccaaaacaagccgcggagcgaatcgctgtggcgccaatgtagcgactgcccattctttcaggagtgtcagcgcaaactggaccataaactttccctggattcttacctcctgaagcccgtacagcgtattactaagtatcagcttctgctaaaagaaatgctgaagtactcaaggaactgcgagggggccgaagacctgcaagaggcattgtcttcaatcctgggaatcctgaaagccgtcaacgactcaatgcacttgatagcgatcacaggctatgatggaaacctcggggacctgggtaagcttttgatgcagggctctttttctgtgtggacagatcataagagagggcataccaaggttaaggagctcgcccgcttcaaacccatgcaacgccacttgttcttgcacgaaaaagccgtgttgttctgcaaaaagagagaagagaacggcgaaggttatgaaaaagctcctagttattcatacaagcagagcctgaacatggcagctgtaggcatcacagaaaatgttaagggcgatgccaagaagtttgagatttggtacaatgcccgcgaagaggtgtacatcgtgcaagcacctacgcctgaaattaaggcagcttgggtaaatgagattagaaaggtgctcacctctcagctgcaggcgtgcagagaggcctcacagcaccgcgctcttgagcagtcccaaagcttgcccctgcccgcccctacttctacctcacctagtaggggcaacagcaggaatatcaagaagctggaagagcggaaaaccgatccgttgtctcttgagggctacgtgagtagtgctccgctgacaaaaccccccgaaaagggaaagggatggtctaagacctcccactccttagaagcgccggaagatgatggaggatggtcttctgccgaggagcaaatcaattcttccgatgccgaagaggacgggggtttgggcccaaagaagctggtcccaggaaaatacactgtcgtcgccgatcacgaaaagggtggtccagatgctctgcgagtacgtagcggtgacgtcgttgaattggtgcaggaaggtgacgaaggcctctggtacgttagggacccgaccaccgggaaagagggttgggttcccgcttccagcctgagtgtgagactgggacctagtggctctgcccagtgcctctcatctagcggaaaagcccatgtgccccgcgcccatccctag

SEQ ID NO: 333003 - DNA, 3414 bp, Artificial Sequence
  derived and/or modified sequence
atgtttgactgctggcggttcatcctctgtaaacggcctgggtctaatagctactcgtcccctcagcggcctaatgaagctaaaaaggaagaaacggaccaccagatcgacgtcagtgacgtgatccggttagtacaggatacgcctgaagcaacggcgatggctacggacgagatcatgcaccaagacatagtcccactttgcgctgcggatatccaagatcagctaaaaaaacggtttgcgtatcttagcggcggaagaggtcaggatggatccccagttataacctttcccgattatcccgcattttcagagattccggataaagagtttcaaaacgtgatgacctacctgaccagcattccaagcctccaagacgccggaattggcttcatactcgtgatcgaccgccgacgagacaaatggacatcagtgaaggcctcagtccttcgcattgcagcgagtttcccagcaaatctccagctagtcctggtgcttcgaccaacgggctttttccagaggaccctaagcgacatcgcttttaagtttaatcgggacgattttaagatgaaggtgcctgtgattatgctaagttccgtgccagatctacatggttacatcgataagtctcagctcactgaagatctgggcggaaccctggactattgccattctcggtggttgtgccagcgcaccgccatcgagtctttcgccctcatggtgaaacagacagcccaaatgctccaatcttttgggaccgagctggcagagacagaactgcctaacgacgtgcagtcaacctcatctgtgttgtgcgcacacaccgagaaaaaagataaggctaaggaggacctgcgtcttgcactaaaagagggtcattctgtattagagagcttgcgcgaactccaggctgagggctcagagccatccgtgaatcaagaccaacttgataaccaggccactgtccaacgattgttggcacaactcaatgagacagaagctgcatttgatgagttctgggctaagcaccaacagaagttagaacaatgcctgcagttgagacactttgagcagggtttccgcgaggtgaaagcaattctcgatgctgccagccagaaaattgccaccttcactgatattggcaacagtctggctcatgtggagcaccttctgcgtgacctagcctctttcgaggaaaaatctggtgtggccgtggagagagccagggccctgagcctggatggggaacagctaataggtaacaagcactacgctgtcgacagtatccgtcccaagtgccaggagctgaggcatctttgtgatcaattctcagctgaaatagctcgaagacgcggtctcctgtccaagtccctggagctacaccggcgtctggaaaccagcatgaagtggtgcgacgagggaatctacctgctggcgagtcagccagtcgataaatgccagtctcaagacggcgcagaagctgctcttcaggaaattgaaaagtttctggaaaccggtgccgaaaataagattcaggaacttaacgcaatatacaaggagtatgaatcaattctcaaccaggacctaatggagcatgtcaggaaggtgtttcaaaagcaagcgtccatggaagaggtgttccacaggaggcaggctagcttgaagaaactggctgctaggcagacccgccctgtgcagcccgtggccccacggcctgaagcattagcaaaatcgccatgtccttctccaggtataagacggggttcagagaattcctcttcagaaggaggggctttgagacgaggcccttatcgccgagcgaaaagcgaaatgagcgaaagcaggcagggcagggggtccgcgggagaagaggaagagtcattggcgattctcaggcggcacgtcatgtccgaattacttgatacagagcgtgcctacgtggaagagctcctatgcgttctggagggctatgctgccgaaatggacaatccgttgatggcccacctgttatctactggactgcacaataagaaagatgtgctgttcggcaatatggaggagatttaccattttcacaatcgtatctttttacgcgagctggaaaactacacagactgcccagaactggtaggtaggtgtttcctggagaggatggaagatttccagatatatgaaaaatactgccagaacaagccacgaagcgagtcactgtggcgccagtgctctgactgtcctttctttcaggaatgccagagaaagctcgaccacaaactatcactggattcctacctcctcaagcccgtgcagaggatcactaagtaccaactgctcctgaaggagatgctgaagtactccagaaactgcgaaggagctgaggatctccaagaagccctgtcatccatactgggtatcctcaaagccgtcaatgactctatgcatcttatcgcaattacgggctacgatggaaatctgggggatctggggaagctgctgatgcaaggctccttttcagtctggacagaccataagaggggacacacaaaggtgaaagaactcgcccgatttaaaccaatgcaacgccatctgtttctgcacgagaaggccgtgctgttctgcaagaaaagggaggaaaatggcgagggatacgagaaagcaccatcgtactcatacaagcagagcctcaatatggccgctgtgggcattaccgagaacgtcaaaggggacgctaagaagtttgagatctggtataatgcaagagaggaagtctatattgtgcaggccccaaccccagagatcaaagccgcttgggtgaacgagattagaaaggtacttaccagtcagctacaggcttgtcgagaagcctcgcagcatcgcgctttagaacagtcacagtcactgcctcttcctgctcccacatctacatcaccatctcggggaaattcgcgaaacattaagaaattggaggaacgtaaaacagaccctttgtcattagagggatatgtcagttctgcgccattgaccaagccaccagaaaaaggaaagggctggtcaaaaacatctcactcgctggaggcccctgaggacgatggcggttggtcatccgcagaagagcagatcaactctagcgatgccgaagaagacggtgggctaggccctaagaagttggtccctggcaagtacacagtggttgccgatcatgagaaaggagggcctgatgctctgcgggtgcggtccggggacgtggtcgaactagtgcaggagggcgatgagggcctctggtatgtgcgggacccaacaactggcaaggagggctgggtcccagcttcttccctttcggttcgcctgggaccaagcggctctgctcagtgtttgtcctcctcaggaaaagcacacgtgccgcgagcccacccttag

SEQ ID NO: 333004 - DNA, 3414 bp, Artificial Sequence
  derived and/or modified sequence
atgttcgattgctggagatttatactctgcaagcgaccaggcagtaactcctatagctcccctcagcgcccaaacgaggcgaaaaaagaagagacggaccatcagatcgatgtaagcgacgtcattcgcctggtgcaggacacccctgaggccacagccatggctacggacgagataatgcaccaggatatcgtgcccctgtgcgctgcagatatccaggatcagctgaagaaacgcttcgcttatttatctggcggacgaggtcaggacggcagccccgtcatcacatttcccgattaccccgctttttcagaaatacctgataaggagttccagaatgtgatgacttaccttacttcaatcccttctctgcaagacgcgggaatcgggttcatcctggtaattgataggagacgtgataagtggacatcggtcaaagcatccgtcttgaggatcgctgcaagctttcctgctaatctccagttggtcttagtgcttagacctacagggttttttcagagaaccctgagtgatattgcattcaagtttaatagagacgatttcaagatgaaagtgcccgttattatgctgtcctctgtgcccgacttgcacgggtatatcgataaatcccagttgacagaggacttgggcggaaccctagattattgccattctcgatggctgtgtcaaaggaccgccatcgagagctttgcattgatggttaagcaaaccgctcaaatgcttcagagcttcggtactgaactcgccgagaccgaacttccaaacgatgtgcagtccacttcttctgttttatgtgcacacacagagaaaaaggacaaggcaaaagaggacctgagactcgccctgaaggaggggcattcggtcttagaatcgctgagagaattacaggcagaaggctccgaaccctccgttaaccaggaccagctggacaatcaggcaacagttcagcggctccttgctcagctcaacgagactgaggctgccttcgatgaattttgggccaagcatcagcagaagctggagcaatgtcttcagctgcgacactttgagcagggtttccgagaggtaaaagcgattctggacgcagcctcccagaagatcgccactttcactgacattgggaattccttggcacacgtcgagcacttgttaagagatctagcatcctttgaagaaaaatccggagtggctgtggaacgcgctcgcgctctgagcttggatggtgaacagctgattgggaataaacactacgccgttgactccattcgacccaagtgccaggaactgcgacacctctgcgatcaattcagtgcagagatcgcacgaaggcggggtctcctgagcaaatcactcgagctgcaccgcagactggagactagcatgaaatggtgtgacgaagggatctacctgttggcctcccagcccgtggacaagtgtcagtcacaggacggtgccgaagccgctttacaggagatcgaaaagtttctggaaacgggcgcagagaataagatccaggagctcaacgctatttataaagagtatgaaagcatcctgaatcaggacctcatggaacacgtcagaaaggtgttccagaaacaggcttcaatggaagaagtgtttcaccgtcgacaagcgagcctgaagaaactggccgcaaggcagacccgcccagtccagcccgtcgctcctcggccagaagcactggcaaaaagcccctgtccctctcccggaataaggcgcggaagtgagaactcctcctccgagggaggggcactgcggcgaggaccgtacaggcgggcaaagagcgagatgtctgagtctcggcaggggcgtgggtcagccggtgaagaagaggaaagtctggcaattctcaggcgccacgtcatgagcgaactgttggacacagagcgggcttatgtcgaggagcttctgtgcgttttggaaggctatgccgctgaaatggacaatccactgatggcccatttgctgagtaccgggctgcacaataaaaaggatgttctgttcggcaacatggaggagatttatcacttccataataggatctttctgcgcgaactggagaactacactgattgccctgaactggttggcaggtgttttctagagcggatggaagacttccagatctacgagaagtactgtcaaaacaagcctaggagcgagagtctttggcggcaatgttctgattgtccattcttccaagaatgtcagaggaagctcgatcataagctgagtttggatagttatctactgaaacccgtgcagcgtatcacgaagtaccagctcctgcttaaggaaatgttgaaatattcccgcaactgtgagggagctgaagacctgcaggaagcactgtccagcatactgggcatcctgaaggcagtgaacgatagcatgcatctcatcgccattacaggatatgatggaaatctgggggaccttggcaagttgctcatgcaaggttctttttctgtgtggacagatcacaagcgaggacacactaaagtaaaagaattggcccgatttaagcccatgcagaggcacctctttctgcacgagaaagctgtgttgttttgcaagaaaagagaggagaacggtgaggggtatgaaaaagcacctagttactcatacaaacagagcttgaacatggccgctgttggaattactgaaaatgtgaagggcgatgcaaaaaaatttgagatatggtataatgctcgggaggaagtgtacatcgtgcaggcccctacacccgagataaaagcagcatgggtcaatgagatcaggaaggtcctgacatcccagctgcaggcgtgccgggaggccagtcagcaccgagcgttggaacaatcccagtcactgccattgccggctccaactagcacttccccatctcgcggtaactccagaaatatcaagaaacttgaggagcggaaaacagatcccctttccctagagggttacgttagcagtgcccctttaacgaagccacctgaaaagggtaaggggtggagcaaaacaagccatagtctggaggctccagaggacgatggcggatggtctagcgccgaggagcagatcaattcttcggacgccgaggaggatgggggactgggccctaagaagcttgtcccaggtaagtacacagtagtcgccgatcacgagaaagggggaccagacgccctccgggttaggtcaggagatgtggtggagcttgttcaggagggggacgagggcctgtggtacgtgcgcgacccaacgacagggaaggaaggatgggttccagctagcagtctctcagtccgcctgggaccatcaggatccgctcagtgtctgtcatcatccggaaaggcacacgttcccagggctcacccctag

SEQ ID NO: 333005 - DNA, 3414 bp, Artificial Sequence
  derived and/or modified sequence
atgttcgactgctggagattcatcctgtgcaagagacccggcagcaacagctacagcagcccccagagacccaacgaggccaagaaggaggagaccgaccaccagatcgacgtgagcgacgtgatcagactggtgcaggacacccccgaggccaccgccatggccaccgacgagatcatgcaccaggacatcgtgcccctgtgcgccgccgacatccaggaccagctgaagaagagattcgcctacctgagcggcggcagaggccaggacggcagccccgtgatcaccttccccgactaccccgccttcagcgagatccccgacaaggagttccagaacgtgatgacctacctgaccagcatccccagcctgcaggacgccggcatcggcttcatcctggtgatcgacagaagaagagacaagtggaccagcgtgaaggccagcgtgctgagaatcgccgccagcttccccgccaacctgcagctggtgctggtgctgagacccaccggcttcttccagagaaccctgagcgacatcgccttcaagttcaacagagacgacttcaagatgaaggtgcccgtgatcatgctgagcagcgtgcccgacctgcacggctacatcgacaagagccagctgaccgaggacctgggcggcaccctggactactgccacagcagatggctgtgccagagaaccgccatcgagagcttcgccctgatggtgaagcagaccgcccagatgctgcagagcttcggcaccgagctggccgagaccgagctgcccaacgacgtgcagagcaccagcagcgtgctgtgcgcccacaccgagaagaaggacaaggccaaggaggacctgagactggccctgaaggagggccacagcgtgctggagagcctgagagagctgcaggccgagggcagcgagcccagcgtgaaccaggaccagctggacaaccaggccaccgtgcagagactgctggcccagctgaacgagaccgaggccgccttcgacgagttctgggccaagcaccagcagaagctggagcagtgcctgcagctgagacacttcgagcagggcttcagagaggtgaaggccatcctggacgccgccagccagaagatcgccaccttcaccgacatcggcaacagcctggcccacgtggagcacctgctgagagacctggccagcttcgaggagaagagcggcgtggccgtggagagagccagagccctgagcctggacggcgagcagctgatcggcaacaagcactacgccgtggacagcatcagacccaagtgccaggagctgagacacctgtgcgaccagttcagcgccgagatcgccagaagaagaggcctgctgagcaagagcctggagctgcacagaagactggagaccagcatgaagtggtgcgacgagggcatctacctgctggccagccagcccgtggacaagtgccagagccaggacggcgccgaggccgccctgcaggagatcgagaagttcctggagaccggcgccgagaacaagatccaggagctgaacgccatctacaaggagtacgagagcatcctgaaccaggacctgatggagcacgtgagaaaggtgttccagaagcaggccagcatggaggaggtgttccacagaagacaggccagcctgaagaagctggccgccagacagaccagacccgtgcagcccgtggcccccagacccgaggccctggccaagagcccctgccccagccccggcatcagaagaggcagcgagaacagcagcagcgagggcggcgccctgagaagaggcccctacagaagagccaagagcgagatgagcgagagcagacagggcagaggcagcgccggcgaggaggaggagagcctggccatcctgagaagacacgtgatgagcgagctgctggacaccgagagagcctacgtggaggagctgctgtgcgtgctggagggctacgccgccgagatggacaaccccctgatggcccacctgctgagcaccggcctgcacaacaagaaggacgtgctgttcggcaacatggaggagatctaccacttccacaacagaatcttcctgagagagctggagaactacaccgactgccccgagctggtgggcagatgcttcctggagagaatggaggacttccagatctacgagaagtactgccagaacaagcccagaagcgagagcctgtggagacagtgcagcgactgccccttcttccaggagtgccagagaaagctggaccacaagctgagcctggacagctacctgctgaagcccgtgcagagaatcaccaagtaccagctgctgctgaaggagatgctgaagtacagcagaaactgcgagggcgccgaggacctgcaggaggccctgagcagcatcctgggcatcctgaaggccgtgaacgacagcatgcacctgatcgccatcaccggctacgacggcaacctgggcgacctgggcaagctgctgatgcagggcagcttcagcgtgtggaccgaccacaagagaggccacaccaaggtgaaggagctggccagattcaagcccatgcagagacacctgttcctgcacgagaaggccgtgctgttctgcaagaagagagaggagaacggcgagggctacgagaaggcccccagctacagctacaagcagagcctgaacatggccgccgtgggcatcaccgagaacgtgaagggcgacgccaagaagttcgagatctggtacaacgccagagaggaggtgtacatcgtgcaggcccccacccccgagatcaaggccgcctgggtgaacgagatcagaaaggtgctgaccagccagctgcaggcctgcagagaggccagccagcacagagccctggagcagagccagagcctgcccctgcccgcccccaccagcaccagccccagcagaggcaacagcagaaacatcaagaagctggaggagagaaagaccgaccccctgagcctggagggctacgtgagcagcgcccccctgaccaagccccccgagaagggcaagggctggagcaagaccagccacagcctggaggcccccgaggacgacggcggctggagcagcgccgaggagcagatcaacagcagcgacgccgaggaggacggcggcctgggccccaagaagctggtgcccggcaagtacaccgtggtggccgaccacgagaagggcggccccgacgccctgagagtgagaagcggcgacgtggtggagctggtgcaggagggcgacgagggcctgtggtacgtgagagaccccaccaccggcaaggagggctgggtgcccgccagcagcctgagcgtgagactgggccccagcggcagcgcccagtgcctgagcagcagcggcaaggcccacgtgcccagagcccacccctag

SEQ ID NO: 333006 - protein, 1096 aa, Artificial Sequence
  derived and/or modified sequence
MPLRGGAGPSPASHGPTHGPSDPRTCLPGRGAGGMRPHGRGALGCCGLCSFYTCHGAAGDEIMHQDIVPLCAADIQDQLKKRFAYLSGGRGQDGSPVITFPDYPAFSEIPDKEFQNVMTYLTSIPSLQDAGIGFILVIDRRRDKWTSVKASVLRIAASFPANLQLVLVLRPTGFFQRTLSDIAFKFNRDDFKMKVPVIMLSSVPDLHGYIDKSQLTEDLGGTLDYCHSRWLCQRTAIESFALMVKQTAQMLQSFGTELAETELPNDVQSTSSVLCAHTEKKDKAKEDLRLALKEGHSVLESLRELQAEGSEPSVNQDQLDNQATVQRLLAQLNETEAAFDEFWAKHQQKLEQCLQLRHFEQGFREVKAILDAASQKIATFTDIGNSLAHVEHLLRDLASFEEKSGVAVERARALSLDGEQLIGNKHYAVDSIRPKCQELRHLCDQFSAEIARRRGLLSKSLELHRRLETSMKWCDEGIYLLASQPVDKCQSQDGAEAALQEIEKFLETGAENKIQELNAIYKEYESILNQDLMEHVRKVFQKQASMEEVFHRRQASLKKLAARQTRPVQPVAPRPEALAKSPCPSPGIRRGSENSSSEGGALRRGPYRRAKSEMSESRQGRGSAGEEEESLAILRRHVMSELLDTERAYVEELLCVLEGYAAEMDNPLMAHLLSTGLHNKKDVLFGNMEEIYHFHNRIFLRELENYTDCPELVGRCFLERMEDFQIYEKYCQNKPRSESLWRQCSDCPFFQECQRKLDHKLSLDSYLLKPVQRITKYQLLLKEMLKYSRNCEGAEDLQEALSSILGILKAVNDSMHLIAITGYDGNLGDLGKLLMQGSFSVWTDHKRGHTKVKELARFKPMQRHLFLHEKAVLFCKKREENGEGYEKAPSYSYKQSLNMAAVGITENVKGDAKKFEIWYNAREEVYIVQAPTPEIKAAWVNEIRKVLTSQLQACREASQHRALEQSQSLPLPAPTSTSPSRGNSRNIKKLEERKTDPLSLEGYVSSAPLTKPPEKGKGWSKTSHSLEAPEDDGGWSSAEEQINSSDAEEDGGLGPKKLVPGKYTVVADHEKGGPDALRVRSGDVVELVQEGDEGLW

SEQ ID NO: 333007 - protein, 136 aa, Artificial Sequence
  derived and/or modified sequence
MHQDIVPLCAADIQDQLKKRFAYLSGGRGQDGSPVITFPDYPAFSEIPDKEFQNVMTYLTSIPSLQDAGIGFILVIDRRRDKWTSVKASVLRIAASFPANLQLVLVLRPTGFFQRTLSDIAFKFNRDDFKMKVPVI

SEQ ID NO: 333008 - DNA, 3291 bp, Artificial Sequence
  derived and/or modified sequence
atgcctctccgagggggagctgggccatccccagcttctcatgggccgactcacggaccaagcgatccgcgcacctgcttgccaggccgcggggcaggaggaatgcggccccacggccgcggagcgctgggatgttgcggactctgcagcttttatacctgccacggtgctgctggtgacgaaattatgcatcaggacattgtgccactatgcgcagcagacatccaagaccagttgaagaagcgcttcgcttacctgagtggagggcggggccaagacggctccccggtcattaccttccccgattaccccgcattttccgaaatccccgataaggagttccagaacgtgatgacctatttaacatctattccttctctgcaggacgctggcattgggttcatccttgtgattgataggcgccgagacaagtggaccagtgtgaaggcctctgttcttcggattgctgccagctttcctgccaatctccaactcgtgctcgtcttaagacctacaggcttcttccagcgaacgctttccgacatcgcctttaaattcaatcgggatgactttaagatgaaagttcccgtgattatgctgagcagtgttccagatctgcatgggtatatcgataaaagtcagctgacagaggatttaggcggcacactggattactgccatagtcgctggctgtgtcaacgaacagcaatagagtccttcgctcttatggtgaagcagaccgcccagatgttgcagtccttcggcactgaactggctgaaactgaattgcccaacgacgtccagagcactagttcggtgttgtgtgctcatacagaaaaaaaggacaaagcaaaggaagatctgcgtttggcattgaaggagggccattcggtgctcgagagcttgcgcgagttgcaggccgagggcagtgagccctcggtcaaccaggatcagctggacaatcaagctactgtgcagcggttactggcccagcttaatgagaccgaggctgctttcgatgaattttgggccaagcatcagcagaagctggaacaatgtctacaacttcgccactttgagcagggattccgcgaagtcaaagcgattctggatgccgcaagccagaagatcgcaacgttcaccgacattggaaattctcttgcgcatgtggagcacctcttaagagacttagcatcctttgaggagaagtctggcgttgcggtggagagggccagggccctttcgcttgacggtgaacagctgattggcaataagcactacgctgttgattctattagacccaaatgccaagagctgcggcacttgtgcgaccagtttagcgcagaaatcgctagaagaagaggattgctctccaagagtctggaactgcacaggaggttggagacttccatgaaatggtgcgatgagggaatctacctgctggcttcccagccggtggacaaatgccagtcccaagacggtgctgaggcagctcttcaagaaatagagaagtttctcgaaacaggcgccgagaacaaaatccaggagctgaatgctatctataaagagtatgagtccattctgaaccaggatcttatggaacacgtgagaaaagtgttccagaaacaggcctctatggaagaggtgtttcacagaagacaggcctccctcaagaagctcgctgccagacagacacgccctgtgcagcctgtcgctccaaggcccgaggccctcgccaaaagtccatgccccagccctgggatccgcaggggtagcgagaatagtagctccgaagggggcgctctgcggcgggggccatatagaagggccaaatcggagatgtccgagtctcgccaggggcggggcagtgccggggaggaggaagaaagtctggccatcctacggcgtcatgtgatgtccgagctcttagatactgagcgcgcttacgtggaggaactgttgtgcgtcctggagggttacgccgccgaaatggataaccccctgatggcacatctcctgagcacggggctacacaacaagaaggacgtgctgtttggaaacatggaagaaatatatcacttccacaaccgaatcttcctgcgcgaactagaaaactatactgattgtccagagctggtgggaagatgcttcctggaacggatggaggattttcaaatctacgagaagtactgtcaaaacaagcccaggtccgagtctttatggcggcagtgcagcgattgccctttctttcaagaatgtcagaggaagctcgaccacaagctgagcttggacagttatctcttgaagcccgtgcagcgcattacaaaatatcagctcctgctgaaagagatgctcaaatactcaaggaactgtgagggcgccgaggatctccaagaagctttgtcgtcaattcttggcatcctgaaagccgtgaacgattccatgcatctgatcgcaatcaccggttatgacgggaacctcggcgacctgggcaaacttctgatgcagggcagcttttccgtgtggaccgatcacaagcgcggtcataccaaagtgaaagagctcgctcgattcaagccgatgcagcgccatctctttctgcacgaaaaagcagtcttgttctgtaagaaacgggaggagaacggagagggctacgagaaggccccctcctattcttacaaacaatcactgaatatggccgccgtagggattacggagaatgtcaagggtgatgcaaaaaaattcgaaatctggtacaacgcaagggaagaggtctatatcgtacaagcacccactccagaaattaaggctgcttgggtaaatgagatccgcaaagtccttacctctcagctacaggcatgtagagaagcttcccagcaccgggccttggagcagagccagtcgcttccactgccggccccaaccagtacgtctccgagtcgagggaactcccgcaacattaagaaactggaggaacgcaagaccgacccactgtccctagagggctacgtctcttccgcgcctctcacaaaaccgcctgagaaggggaaaggctggtcaaagacctctcattcactcgaagcccctgaggatgatggtggctggtcttccgcagaagagcagatcaactctagtgacgccgaggaagatgggggattgggtccaaagaagttagtgccaggaaagtatactgtggtggcagaccatgaaaaggggggccccgacgcccttagagtacgatcaggtgacgtcgtcgaactcgtgcaggaaggtgatgaagggctctggtag

SEQ ID NO: 333009 - DNA, 3291 bp, Artificial Sequence
  derived and/or modified sequence
atgcccctgcggggcggggccggccccagccctgccagccacggccccacccacggccccagcgaccccaggacctgcctgcccggccgcggggccggcggcatgaggccccacggccgcggggccctgggctgctgcggcctgtgcagcttctacacctgccacggggctgctggagatgagatcatgcaccaggacatcgtgcccctgtgtgccgctgacatccaggaccagctgaagaagagatttgcctacctgagcggcggccggggccaggacggcagccctgtgatcaccttcccagactacccagccttcagcgagatcccagacaaggagttccagaatgtgatgacctacctgaccagcatccccagcctgcaggatgctggcatcggcttcatcctggtgattgacagaagaagagacaagtggacctctgtgaaggcctctgtgctgagaattgctgccagcttccctgccaacctgcagctggtgctggtgctgcggcccaccggcttcttccagaggaccctgagtgacatcgccttcaagttcaacagagatgacttcaagatgaaggtgcctgtgatcatgctgagctctgtgcctgacctgcacggctacatcgacaagagccagctgacagaggacctgggcggcaccctggactactgccacagccgctggctgtgccagaggacagccatcgagagctttgccctgatggtgaagcagacagcccagatgctgcagagctttggaacagagctggccgagacagagctgcccaatgatgtgcagagcaccagctctgtgctgtgtgcccacacagagaagaaggacaaggccaaggaggacctgcggctggccctgaaggagggccacagcgtgctggagagcctgcgggagctgcaggccgagggcagcgagcccagcgtgaaccaggaccagctggacaaccaggccaccgtgcagaggctgctggcccagctgaatgaaacagaagctgcctttgatgagttctgggccaagcaccagcagaagctggagcagtgcctgcagctgcggcactttgagcagggcttccgggaggtgaaggccatcctggatgctgccagccagaagatcgccaccttcacagacatcggcaacagcctggcccacgtggagcacctgctgcgggacctggccagctttgaggagaagagcggcgtggccgtggagcgggcccgggccctgagcctggatggagagcagctgattggcaacaagcactatgctgtggacagcatccggcccaagtgccaggagctgcggcacctgtgtgaccagttctctgctgagatcgccaggagaagaggcctgctgagcaagagcctggagctgcaccggcggctggagacctccatgaagtggtgtgatgagggcatctacctgctggccagccagcctgtggacaagtgccagagccaggatggagctgaggccgccctgcaggagattgagaagttcctggagaccggggctgagaacaagatccaggagctgaatgccatctacaaggagtatgagagcatcctgaaccaggacctgatggagcacgtgaggaaggtgttccagaagcaggcctccatggaggaggtgttccaccggcggcaggccagcctgaagaagctggccgcccggcagaccaggcctgtgcagcctgtggcccccaggcctgaggccctggccaagagcccctgccccagccctggcatcagaagaggcagcgagaacagcagcagcgagggcggggccctgcggcggggcccctaccgccgggccaagtctgagatgtctgagagccggcagggccggggcagcgctggggaggaggaggagagcctggccatcctgcggagacatgtgatgtctgagctgctggacacagagcgggcctacgtggaggagctgctgtgtgtgctggagggctatgctgctgagatggacaaccccctgatggcccacctgctgagcacaggcctgcacaacaagaaggatgtgctgtttggaaacatggaggagatctaccacttccacaaccgcatcttcctgcgggagctggagaactacacagactgcccagagctggtgggccgctgcttcctggagaggatggaggacttccagatctatgagaagtactgccagaacaagcccaggtctgagagcctgtggaggcagtgcagcgactgccccttcttccaggagtgccagaggaagctggaccacaagctgagcctggacagctacctgctgaagcctgtgcagaggatcaccaagtaccagctgctgctgaaggagatgctgaagtacagcaggaactgtgagggcgctgaggacctgcaggaggccctgagcagcatcctgggcatcctgaaggctgtgaatgacagcatgcacctgattgccatcaccggctatgatggcaacctgggggacctgggcaagctgctgatgcagggcagcttctctgtgtggacagaccacaagaggggccacaccaaggtgaaggagctggcccgcttcaagcccatgcagaggcacctgttcctgcacgagaaggctgtgctcttctgcaagaagcgggaggagaatggagagggctatgagaaggcccccagctacagctacaagcagagcctgaacatggctgctgtgggcatcacagaaaatgtgaagggagatgccaagaagtttgagatctggtacaatgcccgggaggaggtgtacatcgtgcaggcccccaccccagagatcaaggccgcctgggtgaatgagatcaggaaggtgctgaccagccagctgcaggcctgccgggaggccagccagcaccgggccctggagcagagccagagcctgcccctgcctgcccccaccagcaccagccccagccggggcaacagcaggaacatcaagaagctggaggagaggaagacagaccccctgagcctggagggctacgtgagcagcgcccccctgaccaagcccccagagaagggcaagggctggagcaagaccagccacagcctggaggccccagaagatgatggcggctggagcagcgctgaggagcagatcaacagcagtgatgctgaagaagatggcggcctgggccccaagaagctggtgcctgggaagtacacagtggtggccgaccacgagaagggcggcccagatgccctgcgggtgcgctctggagatgtggtggagctggtgcaggagggagatgagggcctgtggtag

SEQ ID NO: 333010 - DNA, 3291 bp, Artificial Sequence
  derived and/or modified sequence
atgcccctgcggggcggcgccggccccagccccgccagccacggcccaacacacggacccagcgaccctaggacatgcttacctggccggggtgccggcggtatgcgcccccacgggcggggcgcacttggctgttgtggcctttgttctttttatacctgccatggtgctgcaggcgatgagatcatgcaccaggacatagttccactgtgtgccgcagatattcaggaccaactgaagaagaggttcgcttaccttagcggcggcagaggccaggatgggagcccagtcatcactttccccgattaccccgcattttccgagattcccgacaaagaatttcagaacgtgatgacctatcttacctccatccctagcctacaagacgcgggaatcgggttcatactggtcattgaccggcgccgcgacaaatggacttcggtaaaagcctcagtgttgcggatagctgctagctttcccgcaaacctccagcttgtccttgtgcttcggcccacaggattcttccagcggacgttgtcagacatagcattcaagttcaaccgcgacgactttaagatgaaggttcctgtgatcatgctgtccagcgttccagatcttcatggttatatcgataagtcacagctgaccgaagacctgggcggcacgctggactactgtcactcccggtggttgtgccagaggacagccatcgagagttttgctttgatggtaaaacagaccgctcagatgctccagtccttcggcactgagctcgctgagacagagctccctaacgatgtccagtcaacctcttcagtactatgcgcccacaccgaaaaaaaggacaaagccaaggaagatttacgactcgcactgaaagagggacactccgtactggaatccctccgggagctgcaagccgaggggagcgagcccagcgtcaaccaggaccagctggataaccaagccactgttcagcgattgttggcacaactgaatgaaactgaagcagcctttgacgagttctgggccaaacaccagcagaaactggagcagtgtcttcagcttcgtcacttcgagcagggtttcagggaggtcaaagcgatcctcgatgccgccagccagaagattgccacgttcactgatattgggaatagcctagcccatgttgagcatctgttgagggacctggcaagcttcgaggaaaaatcgggtgtagccgttgagagggccagggcactgtcgcttgatggggaacaactcatcggcaataaacattacgctgtggattccattcgacccaaatgtcaggagctgcgtcatctgtgcgaccagttttccgcggaaatcgctcgaagaagaggtctcctgtcaaagtctctcgagctgcaccggaggctggagacatccatgaagtggtgcgatgagggaatatacctccttgcaagccaaccggtggataaatgtcagtctcaggatggggccgaggcagccttgcaagagatcgagaaattcttggaaaccggagccgagaacaagatccaggagttgaatgcgatctacaaggagtacgagagtatcttgaatcaggatctgatggagcatgtgaggaaggtgttccagaaacaggcaagtatggaggaggtgttccacaggcgccaggcctcactaaagaagttggcggctcgccaaacaaggccggtccagcccgtggctcccaggccagaagccctggctaaatctccctgtcccagccccggtattagacgtgggagcgagaactcctcttctgaggggggagctcttaggcgtggcccctacagacgggctaagagcgagatgtcagaatctagacagggtagggggagcgccggcgaagaggaggagtcactggccatcctaaggcggcacgtcatgagcgagttattggacacggagcgcgcttatgtcgaagagctgctgtgcgttttggaaggctatgccgcggaaatggataatccactgatggctcacttactctcaacgggactgcataacaagaaggatgtgcttttcggtaatatggaggaaatctatcacttccacaatcgcattttcctgcgagaacttgagaattataccgactgccctgaattggttggtcgctgctttttggaaagaatggaagatttccagatttatgagaagtattgccaaaacaagcctagatccgaaagcctgtggcgtcagtgttctgactgtcccttttttcaggaatgccaaaggaagcttgaccataaactcagtctggattcctaccttcttaaaccagttcagcgtatcacgaaatatcaactgctgctgaaggagatgctcaaatactcccggaactgcgaaggagccgaagaccttcaagaagctctgtcaagtatcttgggcatcctgaaagctgtgaatgattcaatgcatctaatcgctattaccgggtatgatgggaaccttggcgatctgggcaagttactcatgcagggctctttctccgtgtggactgaccacaaacgaggccacacaaaggtgaaggaactggccagatttaagcctatgcaacggcatctgtttttgcatgagaaggccgtgctcttttgcaaaaagagggaggaaaatggtgagggatatgagaaggctcccagctacagttacaaacagagcctgaatatggcagccgttggtattaccgagaatgttaagggggatgccaaaaagttcgagatctggtataatgcccgcgaagaagtctacattgtgcaggctcccactcccgaaatcaaggccgcctgggtgaatgagatccggaaggttctgacttcccagttacaagcttgtcgtgaagcaagccagcacagagcactcgagcagagccagtcattgccactgcccgctcctacatcaacaagcccaagcaggggaaattccaggaatattaagaaactcgaggaacggaagacggaccctttgagcctggaggggtacgtgtctagcgcacccctgacaaagcccccagagaaaggtaagggatggtctaaaacttcccactcactcgaagcccctgaggatgatggtggctggtcctccgcagaggagcagatcaattcttcggacgcagaggaagacggagggctgggtcccaaaaagctggtgcccggaaagtatacagtggtggccgaccacgaaaaaggagggccagacgctttgcgcgttaggtcaggagatgtcgtggaacttgtgcaggaaggtgatgaaggtttgtggtag

SEQ ID NO: 333011 - DNA, 3291 bp, Artificial Sequence
  derived and/or modified sequence
atgccgcttcggggtggagctggacccagtcccgcatcccatggtcccactcatggaccaagtgacccaaggacatgtctgccagggagaggagcaggcggtatgcggccacacgggaggggggctctgggatgctgcggcctgtgctctttttatacctgccatggcgctgcaggagatgagattatgcatcaggacatcgtgccactctgcgctgccgacattcaggaccaactaaagaagcgttttgcttatttgagtgggggtagggggcaggatggttctcccgtgattacattccctgactatccagccttctctgagattcctgataaagagtttcagaatgtcatgacataccttacgtcaatcccatctctccaggacgctgggatcgggtttatcctcgtgattgaccgcaggagagacaaatggaccagcgtgaaggccagtgtgctgcgaatagcagcaagcttcccggctaacttgcagcttgtgctggttcttaggcccactgggttctttcagcgtaccctttccgacattgcgtttaagttcaaccgcgatgattttaaaatgaaggtgcctgtgatcatgctgtcaagcgtgcctgatctgcacggctacatagataagtcacaactgactgaggatctgggcggtaccttggactactgccactctcgatggctgtgccagaggaccgccatagagtccttcgccctaatggtaaagcagaccgcccaaatgctgcaatcatttgggaccgagctggctgagacagaactccccaatgatgtgcagtctacgtcttccgtactctgcgcccataccgaaaagaaagacaaagcgaaagaagacctgcggctcgccctgaaggagggtcatagtgttctcgagtctctcagagagctacaggcagaaggttctgagccaagcgtcaaccaggaccaacttgacaatcaggctactgtgcaacggctcctggctcaactgaatgaaacagaagctgcattcgatgagttttgggccaaacaccagcaaaaactggagcagtgcttgcagcttcgacactttgaacaggggttcagagaggtgaaagccatattagacgctgctagtcagaaaatcgccacctttacagacatcggcaactcactggcccacgtcgaacacttactgcgagaccttgcgagtttcgaggagaagagcggggtggctgtagaacgggcaagagcactcagcctggacggcgagcagctcattgggaataaacattacgcggtagattcaatccgtcctaaatgccaggagctacgccacctgtgtgaccaattcagcgccgaaatagcaagacgaagaggtctgctctctaaatctctcgagcttcatcggaggttggagacatctatgaagtggtgtgacgaagggatctacctgctagcctcccaacccgtcgacaaatgccagtctcaggacggcgcagaagccgctttacaagagatcgagaaattcctcgaaactggagcggagaacaaaatccaggaactgaatgccatctataaggagtacgagagcatcctcaaccaggacctgatggagcacgtacgaaaggtgttccagaagcaagcctcgatggaggaggttttccacagaaggcaggcatctctcaagaagctggcagccagacagacaagaccagttcagccagtggcaccaaggccagaggcactggccaaatctccatgcccctctccagggatccggaggggatcagagaattcatcatctgaggggggagctctgcggcgaggcccttataggcgcgcaaagagcgaaatgtctgaatctcgacaggggagaggctctgccggtgaggaagaagaatcattagcgattctcagaaggcacgttatgtcggaactcctcgacactgagagagcatacgtcgaggagcttctgtgcgtgctagagggctacgctgccgaaatggataatccactgatggcccacctgctatctactggtttgcacaataaaaaagatgtgctctttggcaatatggaggagatctatcacttccacaatcgcatattcctgcgtgagctcgagaattatacagattgccccgagttggtgggacgctgcttcctcgagcgcatggaagactttcagatctatgagaagtattgtcagaataagcccaggagcgagtccctctggaggcagtgcagtgattgtcccttttttcaggaatgccagagaaaactcgatcacaagctctccctcgattcctatttactgaaaccagtgcagagaattaccaaataccaactgctattgaaggagatgcttaaatacagtaggaactgtgaaggggctgaagatctccaggaggccctgtcgtctattcttggtatattgaaggccgtcaatgatagcatgcacctgatagcaattacggggtatgacggaaatctgggcgacctgggcaaactcctcatgcagggatccttttcagtgtggaccgatcataagaggggccacactaaggttaaggaactggcgagatttaaaccaatgcaaaggcatcttttcttgcatgaaaaggccgtccttttttgcaagaaacgcgaagaaaacggggaggggtacgagaaagctccaagctacagctataaacagtcactgaacatggctgccgtgggaattaccgaaaatgtcaaaggagacgcaaagaaattcgagatctggtacaatgcccgtgaagaggtgtacatcgtgcaggcccctacacccgagataaaggctgcctgggttaacgaaatccgcaaagtgttgaccagccagctgcaggcctgtcgcgaagcaagtcagcaccgtgccctggagcagagtcagagcctgcctctgccagctccaacatccacctccccctcccggggaaactcaaggaacataaaaaagttggaggagcggaaaaccgatccacttagcctcgaaggctatgtcagctccgctcctctcaccaagcccccagagaaagggaagggttggagcaaaacatcacatagcctggaggcacctgaggatgacgggggatggtcgagcgccgaagagcagataaattcttctgatgctgaggaggatgggggactggggcctaaaaagctcgtcccgggtaaatacacagtagtggcagaccatgagaagggagggccagacgccctgcgggtcaggtcaggggatgtggtggagcttgtccaggaaggcgatgagggcctctggtag

SEQ ID NO: 333012 - DNA, 3291 bp, Artificial Sequence
  derived and/or modified sequence
atgcccctgagaggcggcgccggccccagccccgccagccacggccccacccacggccccagcgaccccagaacctgcctgcccggcagaggcgccggcggcatgagaccccacggcagaggcgccctgggctgctgcggcctgtgcagcttctacacctgccacggcgccgccggcgacgagatcatgcaccaggacatcgtgcccctgtgcgccgccgacatccaggaccagctgaagaagagattcgcctacctgagcggcggcagaggccaggacggcagccccgtgatcaccttccccgactaccccgccttcagcgagatccccgacaaggagttccagaacgtgatgacctacctgaccagcatccccagcctgcaggacgccggcatcggcttcatcctggtgatcgacagaagaagagacaagtggaccagcgtgaaggccagcgtgctgagaatcgccgccagcttccccgccaacctgcagctggtgctggtgctgagacccaccggcttcttccagagaaccctgagcgacatcgccttcaagttcaacagagacgacttcaagatgaaggtgcccgtgatcatgctgagcagcgtgcccgacctgcacggctacatcgacaagagccagctgaccgaggacctgggcggcaccctggactactgccacagcagatggctgtgccagagaaccgccatcgagagcttcgccctgatggtgaagcagaccgcccagatgctgcagagcttcggcaccgagctggccgagaccgagctgcccaacgacgtgcagagcaccagcagcgtgctgtgcgcccacaccgagaagaaggacaaggccaaggaggacctgagactggccctgaaggagggccacagcgtgctggagagcctgagagagctgcaggccgagggcagcgagcccagcgtgaaccaggaccagctggacaaccaggccaccgtgcagagactgctggcccagctgaacgagaccgaggccgccttcgacgagttctgggccaagcaccagcagaagctggagcagtgcctgcagctgagacacttcgagcagggcttcagagaggtgaaggccatcctggacgccgccagccagaagatcgccaccttcaccgacatcggcaacagcctggcccacgtggagcacctgctgagagacctggccagcttcgaggagaagagcggcgtggccgtggagagagccagagccctgagcctggacggcgagcagctgatcggcaacaagcactacgccgtggacagcatcagacccaagtgccaggagctgagacacctgtgcgaccagttcagcgccgagatcgccagaagaagaggcctgctgagcaagagcctggagctgcacagaagactggagaccagcatgaagtggtgcgacgagggcatctacctgctggccagccagcccgtggacaagtgccagagccaggacggcgccgaggccgccctgcaggagatcgagaagttcctggagaccggcgccgagaacaagatccaggagctgaacgccatctacaaggagtacgagagcatcctgaaccaggacctgatggagcacgtgagaaaggtgttccagaagcaggccagcatggaggaggtgttccacagaagacaggccagcctgaagaagctggccgccagacagaccagacccgtgcagcccgtggcccccagacccgaggccctggccaagagcccctgccccagccccggcatcagaagaggcagcgagaacagcagcagcgagggcggcgccctgagaagaggcccctacagaagagccaagagcgagatgagcgagagcagacagggcagaggcagcgccggcgaggaggaggagagcctggccatcctgagaagacacgtgatgagcgagctgctggacaccgagagagcctacgtggaggagctgctgtgcgtgctggagggctacgccgccgagatggacaaccccctgatggcccacctgctgagcaccggcctgcacaacaagaaggacgtgctgttcggcaacatggaggagatctaccacttccacaacagaatcttcctgagagagctggagaactacaccgactgccccgagctggtgggcagatgcttcctggagagaatggaggacttccagatctacgagaagtactgccagaacaagcccagaagcgagagcctgtggagacagtgcagcgactgccccttcttccaggagtgccagagaaagctggaccacaagctgagcctggacagctacctgctgaagcccgtgcagagaatcaccaagtaccagctgctgctgaaggagatgctgaagtacagcagaaactgcgagggcgccgaggacctgcaggaggccctgagcagcatcctgggcatcctgaaggccgtgaacgacagcatgcacctgatcgccatcaccggctacgacggcaacctgggcgacctgggcaagctgctgatgcagggcagcttcagcgtgtggaccgaccacaagagaggccacaccaaggtgaaggagctggccagattcaagcccatgcagagacacctgttcctgcacgagaaggccgtgctgttctgcaagaagagagaggagaacggcgagggctacgagaaggcccccagctacagctacaagcagagcctgaacatggccgccgtgggcatcaccgagaacgtgaagggcgacgccaagaagttcgagatctggtacaacgccagagaggaggtgtacatcgtgcaggcccccacccccgagatcaaggccgcctgggtgaacgagatcagaaaggtgctgaccagccagctgcaggcctgcagagaggccagccagcacagagccctggagcagagccagagcctgcccctgcccgcccccaccagcaccagccccagcagaggcaacagcagaaacatcaagaagctggaggagagaaagaccgaccccctgagcctggagggctacgtgagcagcgcccccctgaccaagccccccgagaagggcaagggctggagcaagaccagccacagcctggaggcccccgaggacgacggcggctggagcagcgccgaggagcagatcaacagcagcgacgccgaggaggacggcggcctgggccccaagaagctggtgcccggcaagtacaccgtggtggccgaccacgagaagggcggccccgacgccctgagagtgagaagcggcgacgtggtggagctggtgcaggagggcgacgagggcctgtggtag

SEQ ID NO: 333013 - protein, 364 aa, Artificial Sequence
  derived and/or modified sequence
MAAPGSARRPLLLLLLLLLLGLMHCASAAMFMVKNGNGTACIMANFSAAFSVNYDTKSGPKNMTFDLPSDATVVLNRSSCGKENTSDPSLVIAFGRGHTLTLNFTRNATRYSVQLMSFVYNLSDTHLFPNASSKETRCEQDRPSPTTAPPAPPSPSPSPVPKSPSVDKYNVSGTNGTCLLASMGLQLNLTYERKDNTTVTRLLNINPNKTSASGSCGAHLVTLELHSEGTTVLLFQFGMNASSSRFFLQGIQLNTILPDARDPAFKAANGSLRALQATVGNSYKCNAEEHVRVTKAFSVNIFKVWVQAFKVEGGQFGSVEECLLDENSMLIPIAVGGALAGLVLIVLIAYLVGRKRSHAGYQTI

SEQ ID NO: 333014 - DNA, 1095 bp, Artificial Sequence
  derived and/or modified sequence
atggcagcccctggtagcgcccgcaggcccttgcttctccttctccttttgttattgctgggcctgatgcactgtgcaagcgccgccatgtttatggtcaaaaacggaaatggaaccgcttgcatcatggctaatttctctgctgccttctctgtgaattatgatacgaagtccggcccgaagaacatgacattcgatctccccagtgacgccactgtggtgttaaaccgaagttcatgtggaaaagagaatacgtcagatccctctctggtgatcgctttcggtcgtggccacactcttacccttaacttcacaaggaacgcgacacgctattcggtgcagttaatgtcatttgtatacaacctgtcggatacccatttgttccctaatgcaagtagtaaggaaactcgctgcgagcaggatcgacctagcccaacaaccgcccctccggccccaccatcaccctcacctagcccagtcccaaaaagcccttcagtggacaaatacaacgtttcaggaacaaatggtacgtgcctccttgccagtatgggtctccagctgaaccttacatacgaaaggaaggataacactactgtcacccggctgcttaatataaaccctaataagacaagtgcatctggcagctgcggggcccatctggtaacgcttgagctacactccgagggcaccactgttttgctcttccagttcggcatgaacgcgtcctcttcgcggttttttttgcagggaattcagttaaacactatcctgcccgacgcccgcgacccggccttcaaagccgccaatggatctttgcgagccctccaagccactgtgggtaacagttacaagtgtaatgccgaagagcacgtccgggtgacaaaagcattcagcgttaatatcttcaaggtttgggtacaggcatttaaggtagagggaggccagttcgggtctgttgaagaatgtctcctcgacgagaacagtatgcttataccaatcgctgtgggtggtgcactggccggcctggtactgatcgttctcatcgcctacttggtgggacgcaagaggagtcatgccggatatcagacaatctag

SEQ ID NO: 333015 - DNA, 1095 bp, Artificial Sequence
  derived and/or modified sequence
atggccgcccctggcagcgcccggcggcccctgctgctgctgctgctgctgctgctgctgggcctgatgcactgtgccagcgctgccatgttcatggtgaagaatggaaatggaacagcctgcatcatggccaacttctctgctgccttctctgtgaactatgacaccaagagcggccccaagaacatgacctttgacctgcccagtgatgccaccgtggtgctgaacagaagcagctgtgggaaggagaacaccagtgaccccagcctggtgattgccttcggccggggccacaccctgaccctgaacttcaccagaaatgccacccgctacagcgtgcagctgatgagctttgtgtacaacctgagtgacacccacctgttccccaatgccagcagcaaggagacccgctgtgagcaggaccggcccagccccaccacagcccccccagccccacccagccccagccccagccctgtgcccaagagccccagcgtggacaagtacaacgtgtctggcaccaacggcacctgcctgctggcctccatgggcctgcagctgaacctgacctatgaaaggaaggacaacaccaccgtgacccggctgctgaacatcaaccccaacaagaccagcgccagcggcagctgtggggcccacctggtgaccctggagctgcacagcgagggcaccaccgtgctgctcttccagtttggcatgaatgccagcagcagccgcttcttcctgcagggcatccagctgaacaccatcctgcctgatgcccgggaccctgccttcaaggccgccaacggcagcctgcgggccctgcaggccaccgtgggcaacagctacaagtgcaatgctgaggagcacgtgcgggtgaccaaggccttctctgtgaacatcttcaaggtgtgggtgcaggccttcaaggtggagggcggccagtttggatctgtggaggagtgcctgctggatgagaacagcatgctgatccccatcgctgtgggcggggccctggccggcctggtgctgattgtgctgattgcctacctggtgggcaggaagaggagccatgctggctaccagaccatctag

SEQ ID NO: 333016 - DNA, 1441 bp, Artificial Sequence
  derived and/or modified sequence
accgccgcccgcgcccccgctccccgcaccgtacccggccgcctcgcgccatggcggcccccggcagcgcccggcgacccctgctgctgctactgctgttgctgctgctcggcctcatgcattgtgcgtcagcagcaatgtttatggtgaaaaatggcaacgggaccgcgtgcataatggccaacttctctgctgccttctcagtgaactacgacaccaagagtggccctaagaacatgacctttgacctgccatcagatgccacagtggtgctcaaccgcagctcctgtggaaaagagaacacttctgaccccagtctcgtgattgcttttggaagaggacatacactcactctcaatttcacgagaaatgcaacacgttacagcgtccagctcatgagttttgtttataacttgtcagacacacaccttttccccaatgcgagctccaaagagacacgctgtgaacaagacaggccttccccaaccacagcgccccctgcgccacccagcccctcgccctcacccgtgcccaagagcccctctgtggacaagtacaacgtgagcggcaccaacgggacctgcctgctggccagcatggggctgcagctgaacctcacctatgagaggaaggacaacacgacggtgacaaggcttctcaacatcaaccccaacaagacctcggccagcgggagctgcggcgcccacctggtgactctggagctgcacagcgagggcaccaccgtcctgctcttccagttcgggatgaatgcaagttctagccggtttttcctacaaggaatccagttgaatacaattcttcctgacgccagagaccctgcctttaaagctgccaacggctccctgcgagcgctgcaggccacagtcggcaattcctacaagtgcaacgcggaggagcacgtccgtgtcacgaaggcgttttcagtcaatatattcaaagtgtgggtccaggctttcaaggtggaaggtggccagtttggctctgtggaggagtgtctgctggacgagaacagcatgctgatccccatcgctgtgggtggtgccctggcggggctggtcctcatcgtcctcatcgcctacctcgtcggcaggaagaggagtcacgcaggctaccagactatctagcctggtgcacgcaggcacagcagctgcaggggcctctgttcctttctctgggcttagggtcctgtcgaaggggaggcacactttctggcaaacgtttctcaaatctgcttcatccaatgtgaagttcatcttgcagcatttactatgcacaacagagtaactatcgaaatgacggtgttaattttgctaactgggttaaatattttgctaactggttaaacattaatatttaccaaagtaggattttgagggtgggggtgctctctctgagggggtgggggtgccgctgtctctga

SEQ ID NO: 333017 - DNA, 1095 bp, Artificial Sequence
  derived and/or modified sequence
atggccgcccccggcagcgcccggcggcccctgctgctgctgctgcttctccttctgttgggattgatgcactgcgcttctgccgctatgtttatggtgaaaaacgggaacggcaccgcctgtatcatggcaaacttttccgcggcattttctgtgaactacgacaccaagtcgggcccgaagaatatgacctttgacctgcccagcgacgctacagtggtcctgaaccgatcatcatgcggaaaggagaataccagtgacccaagcctcgtgatcgcgtttgggaggggccacacactcacactgaatttcactagaaacgcgacccgatacagcgtccagctcatgagtttcgtgtacaacctgtctgatactcatctattcccaaacgcctcgagcaaggaaacgaggtgtgaacaggaccgaccaagcccaaccactgctcctcctgcccctccttccccatcacccagccccgtcccaaagtccccttctgtcgacaaatataacgtgagtggtacgaatgggacatgtctgctggcctctatgggccttcagctgaatctgacctatgaaagaaaagataatacaaccgttactagacttttgaacatcaaccccaataaaacttctgcctcaggctcatgcggagcccatctcgtgacactcgagctccacagtgaaggaactactgtcctgctttttcagtttggaatgaatgccagtagttcacgattttttctgcaaggcattcaactcaataccatcctaccggacgcgcgggacccagccttcaaggctgctaatggtagtctgcgggcgttgcaggccactgtaggaaatagctacaagtgtaatgcggaagagcacgtgcgcgtgacgaaagcctttagcgtaaacatttttaaggtgtgggtgcaagccttcaaggtggaagggggccaattcgggtccgtggaggaatgtctcctggacgagaactctatgctgattccaatcgcagtggggggcgcacttgccgggctagtgctaatagtgttaattgcctatctcgtcggccgcaagcggtctcatgcgggatatcagacaatttag

SEQ ID NO: 333018 - DNA, 1095 bp, Artificial Sequence
  derived and/or modified sequence
atggcggcacccggaagtgcgcgacggcctctgctgctgctccttctgttgcttctactgggcctgatgcactgcgcttcagccgcaatgttcatggtgaaaaacgggaacggaacggcttgtataatggctaacttcagcgctgccttctcagtcaactatgacaccaaatccggtcctaagaacatgaccttcgatctccctagcgacgcaaccgtggtactcaaccgtagctcttgcggtaaggagaatacatcggaccctagcctagtcatcgctttcggcaggggccacacccttaccctaaactttacaaggaatgccacaagatattctgtccagctgatgagcttcgtctataacttgtctgacacccaccttttccctaatgcgtcctccaaggagacaagatgtgaacaggacaggccatcaccaactacagcgccacctgctccaccttccccctcacccagccctgtacccaaaagcccttccgtagacaagtacaatgtatctggaaccaatggcacctgcctgctcgccagcatggggctgcaacttaacctcacttatgaaagaaaggataacactactgtcaccagactgctcaatattaatcccaacaagacttctgcctccgggtcctgcggtgctcacttggtaaccctggaactgcacagcgaaggtacaacagtgctacttttccaatttggcatgaatgcttcctctagccggttcttcctgcaaggaatccagctgaataccattctccccgacgcacgcgatcctgcattcaaggccgcaaacggcagtcttcgcgcactgcaagctactgtaggcaacagttataaatgcaacgctgaagaacacgttagagtgaccaaggccttttccgtcaacattttcaaggtttgggttcaggccttcaaagtcgagggcggacagttcgggtccgttgaggaatgccttttagatgagaactccatgttaatcccaattgcagtgggaggcgctctcgcagggctagtgttgatcgtcctgatcgcatacttagtaggacgtaagcggtcacacgcaggctatcagaccatctag

SEQ ID NO: 333019 - DNA, 1095 bp, Artificial Sequence
  derived and/or modified sequence
atggccgcccccggcagcgccagaagacccctgctgctgctgctgctgctgctgctgctgggcctgatgcactgcgccagcgccgccatgttcatggtgaagaacggcaacggcaccgcctgcatcatggccaacttcagcgccgccttcagcgtgaactacgacaccaagagcggccccaagaacatgaccttcgacctgcccagcgacgccaccgtggtgctgaacagaagcagctgcggcaaggagaacaccagcgaccccagcctggtgatcgccttcggcagaggccacaccctgaccctgaacttcaccagaaacgccaccagatacagcgtgcagctgatgagcttcgtgtacaacctgagcgacacccacctgttccccaacgccagcagcaaggagaccagatgcgagcaggacagacccagccccaccaccgccccccccgccccccccagccccagccccagccccgtgcccaagagccccagcgtggacaagtacaacgtgagcggcaccaacggcacctgcctgctggccagcatgggcctgcagctgaacctgacctacgagagaaaggacaacaccaccgtgaccagactgctgaacatcaaccccaacaagaccagcgccagcggcagctgcggcgcccacctggtgaccctggagctgcacagcgagggcaccaccgtgctgctgttccagttcggcatgaacgccagcagcagcagattcttcctgcagggcatccagctgaacaccatcctgcccgacgccagagaccccgccttcaaggccgccaacggcagcctgagagccctgcaggccaccgtgggcaacagctacaagtgcaacgccgaggagcacgtgagagtgaccaaggccttcagcgtgaacatcttcaaggtgtgggtgcaggccttcaaggtggagggcggccagttcggcagcgtggaggagtgcctgctggacgagaacagcatgctgatccccatcgccgtgggcggcgccctggccggcctggtgctgatcgtgctgatcgcctacctggtgggcagaaagagaagccacgccggctaccagaccatctag

SEQ ID NO: 333020 - protein, 381 aa, Artificial Sequence
  derived and/or modified sequence
MSTLPSKWKRNRKGEKNGKGLRHFSMKVCEKVQRKGTTSYNEVADELVAEFSAADNHILPNESAYDQKNIRRRVYDALNVLMAMNIISKEKKEIKWIGLPTNSAQECQNLEVERQRRLERIKQKQSQLQELILQQIAFKNLVQRNRHAEQQASRPPPPNSVIHLPFIIVNTSKKTVIDCSISNDKFEYLFNFDNTFEIHDDIEVLKRMGMACGLESGSCSAEDLKMARSLVPKALEPYVTEKTGLCDCTAGCPAPWRSVENTGQAKDIRKLLQPSVLWNCASFCWLPVRLVLFLFHDHSLIFFPFSEMAQGTVGGVFITTAGSTSNGTRFSASDLTNGADGMLATSSNGSQYSGSRVETPVSYVGEDDEEDDDFNENDEDD

SEQ ID NO: 333021 - DNA, 1146 bp, Artificial Sequence
  derived and/or modified sequence
atgagcaccctgcccagcaagtggaagagaaacagaaagggcgagaagaacggcaagggcctgagacacttcagcatgaaggtgtgcgagaaggtgcagagaaagggcaccaccagctacaacgaggtggccgacgagctggtggccgagttcagcgccgccgacaaccacatcctgcccaacgagagcgcctacgaccagaagaacatcagaagaagagtgtacgacgccctgaacgtgctgatggccatgaacatcatcagcaaggagaagaaggagatcaagtggatcggcctgcccaccaacagcgcccaggagtgccagaacctggaggtggagagacagagaagactggagagaatcaagcagaagcagagccagctgcaggagctgatcctgcagcagatcgccttcaagaacctggtgcagagaaacagacacgccgagcagcaggccagcagaccccccccccccaacagcgtgatccacctgcccttcatcatcgtgaacaccagcaagaagaccgtgatcgactgcagcatcagcaacgacaagttcgagtacctgttcaacttcgacaacaccttcgagatccacgacgacatcgaggtgctgaagagaatgggcatggcctgcggcctggagagcggcagctgcagcgccgaggacctgaagatggccagaagcctggtgcccaaggccctggagccctacgtgaccgagaagaccggcctgtgcgactgcaccgccggctgccccgccccctggagaagcgtggagaacaccggccaggccaaggacatcagaaagctgctgcagcccagcgtgctgtggaactgcgccagcttctgctggctgcccgtgagactggtgctgttcctgttccacgaccacagcctgatcttcttccccttcagcgagatggcccagggcaccgtgggcggcgtgttcatcaccaccgccggcagcaccagcaacggcaccagattcagcgccagcgacctgaccaacggcgccgacggcatgctggccaccagcagcaacggcagccagtacagcggcagcagagtggagacccccgtgagctacgtgggcgaggacgacgaggaggacgacgacttcaacgagaacgacgaggacgactag

SEQ ID NO: 333022 - DNA, 1146 bp, Artificial Sequence
  derived and/or modified sequence
atgagcactctgccgagtaagtggaagcggaacaggaaaggtgagaaaaatggtaaaggcctccggcatttctcgatgaaggtctgcgagaaggtccagaggaagggaaccacctcctataatgaagtcgcggatgaactagtggcagagttcagcgcagcggataatcatattctgccaaacgaatctgcatatgaccaaaagaatattcgtagacgggtttacgacgcgctgaatgtgctgatggccatgaatataattagtaaggaaaagaaggaaatcaagtggattggcctcccaacaaacagcgcccaagaatgccagaaccttgaagttgagcgccagagaaggttagaaagaataaagcagaagcagtctcagctccaggagctcatcctgcagcagatcgccttcaaaaatcttgttcaacgaaacaggcacgcagagcaacaggccagccgccctcccccacctaatagtgtcatccatctcccatttatcattgtgaacacctccaagaaaaccgtaatagactgcagcatatctaacgataagttcgagtacttgtttaacttcgataacacctttgagattcacgacgatatagaagtgcttaagcgtatggggatggcctgcggtttggaatccggatcttgttctgcagaagaccttaagatggcccgaagcttggtgcccaaggcccttgaaccctacgtgacagagaagacaggtctgtgtgattgtaccgccgggtgtcctgctccgtggaggtctgtggaaaacaccggccaagctaaggatatcaggaagctgcttcagccatcggtcctgtggaactgcgcaagcttttgctggttaccagttagactggtcctgtttctcttccacgaccattccttaatcttctttcccttcagtgagatggctcaaggtactgtggggggcgtctttattacaactgccgggtcaacaagtaatggcacaaggttttctgccagcgacctgactaatggcgccgatggaatgcttgcgacaagcagcaatggttctcaatattctggctctagggtcgagacgcccgtgagttacgtcggcgaggacgacgaggaagacgatgatttcaatgagaacgacgaagatgattag

SEQ ID NO: 333023 - DNA, 1146 bp, Artificial Sequence
  derived and/or modified sequence
atgagcaccctgcccagcaagtggaagaggaacagaaaaggagagaagaatggcaagggcctgcggcacttctccatgaaggtgtgtgagaaggtgcagaggaagggcaccaccagctacaatgaggtggctgatgagctggtggccgagttctctgctgctgacaaccacatcctgcccaatgaaagtgcctatgaccagaagaacatcagaagaagagtgtatgatgccctgaatgtgctgatggccatgaacatcatcagcaaggagaagaaggagatcaagtggattggcctgcccaccaacagcgcccaggagtgccagaacctggaggtggagcggcagaggcggctggagcgcatcaagcagaagcagagccagctgcaggagctgatcctgcagcagatcgccttcaagaacctggtgcagaggaacagacatgctgagcagcaggccagcaggcctcctccacccaacagcgtcatccacctgcccttcatcatcgtgaacaccagcaagaagacagtgattgactgcagcatcagcaatgacaagtttgagtacctgttcaactttgacaacacctttgagatccatgatgacatcgaggtgctgaagaggatgggcatggcctgtggcctggagagcggcagctgcagcgctgaggacctgaagatggcccggagcctggtgcccaaggccctggagccctacgtgacagagaagacaggcctgtgtgactgcacagctggctgcccagccccctggaggtctgtggagaacacaggccaggccaaggacatcaggaagctgctgcagcccagcgtgctgtggaactgtgccagcttctgctggctgcctgtgcggctggtgctcttcctgttccatgaccacagcctcatcttcttccccttcagcgagatggcccagggcaccgtgggcggcgtcttcatcaccacagctggcagcaccagcaatggcacccgcttcagcgccagtgacctgaccaatggagcagatggcatgctggccaccagcagcaatggcagccagtacagcggcagccgggtggagacccctgtgtcctatgtgggggaggatgatgaggaggatgatgacttcaatgaaaatgatgaagatgactag

SEQ ID NO: 333024 - DNA, 1146 bp, Artificial Sequence
  derived and/or modified sequence
atgagcaccctgcccagcaagtggaagcggaaccggaagggcgagaaaaatggcaagggattgcgacacttcagcatgaaggtgtgcgagaaggtgcagcggaagggcacgaccagctacaacgaggtggccgacgagctggttgccgaattcagcgccgcagataatcatatcctcccaaacgaaagcgcttacgatcagaagaacatccgtcgccgggtctacgatgctctcaatgtgctgatggctatgaacataatttccaaagagaaaaaggaaatcaagtggattgggctaccgactaatagcgcccaggagtgccagaatcttgaggtcgagcggcagcgcaggctggagcgaatcaaacagaagcaatcccaactccaagaactgatcctacagcagattgcttttaagaacctggttcagcggaaccggcatgctgagcagcaggcatcacgaccccctcctcccaactcagttattcacttgccattcatcatcgtgaacactagtaaaaaaaccgtgatcgactgcagcataagcaatgacaagttcgagtacttgtttaattttgacaatacttttgagatccacgatgatatcgaagtcctgaaaagaatgggaatggcctgtggtctggagtcaggcagctgctctgccgaggacctgaaaatggctagaagtcttgtcccaaaggccttggaaccttatgtcactgagaagactggattgtgcgactgtaccgctggctgtcctgctccctggaggtcagtcgaaaacactgggcaagcaaaagatatccgaaaactgcttcaaccctccgtgctgtggaactgcgctagtttttgctggctcccggtccggttggtcctatttctgtttcatgatcattctctgattttctttccattctcagagatggcacagggcacagtggggggagtatttatcaccacagcaggctctacatcaaacgggacacggttcagcgcctcggatctgaccaacggagccgacgggatgcttgccacatcttctaacggcagtcagtatagtggcagcagagtggaaacacctgttagctatgtcggcgaagacgatgaagaagatgacgatttcaacgaaaacgacgaagatgattag

SEQ ID NO: 333025 - DNA, 1146 bp, Artificial Sequence
  derived and/or modified sequence
atgagtactttgcctagcaaatggaagagaaatcggaaaggcgaaaagaatggtaagggactccggcacttcagcatgaaagtgtgtgaaaaagttcagcggaaaggtacaacaagttataacgaggttgccgatgagcttgttgccgaattcagtgcggcagacaatcacatcctgcctaacgaatcagcctacgatcagaaaaacatacgtcggagggtgtacgacgccttgaacgtgctaatggctatgaacataatcagcaaggaaaaaaaagaaataaaatggattggtctcccgaccaatagcgcccaggagtgtcagaacttggaggtggaaaggcagaggagacttgagcgtattaaacagaagcagagccagctgcaggaattgatcctccagcagatcgcatttaaaaatttggtgcagagaaatcgccatgctgagcaacaggcttctcgtcctcccccaccaaactccgttatacacctccccttcatcatcgtgaatacatccaaaaagaccgtgatagactgttcaatttctaacgataagtttgagtacctgttcaatttcgacaatacattcgagatacacgacgatatagaggtgttgaaaaggatgggcatggcctgtggcttggagagcgggtcatgttccgcagaagacctgaagatggctcggtctctcgtgcctaaagcattggagccctacgtcaccgagaaaaccgggctctgtgactgtacagccggttgccctgccccatggcgcagtgtcgaaaataccgggcaggctaaagacataaggaaactgctgcaaccttccgtgctctggaactgcgccagcttctgctggctgcctgtccgtttggtgttattcctctttcacgaccactccttgatcttttttcccttttctgaaatggcacaggggacggtgggaggcgttttcattactactgcgggatcgacctcaaatggtacgcgtttttccgctagcgatctgaccaacggggctgacggcatgctagccacttcaagtaatggaagccagtactcagggtcacgagttgaaacgccagtgtcatatgtgggcgaggatgatgaagaggacgatgacttcaacgagaacgatgaagacgactag

SEQ ID NO: 333026 - DNA, 1571 bp, Artificial Sequence
  derived and/or modified sequence
gtgcggaggcggcccgaggcctagtgacaggcgcgcggcgcggaccccggaagcccacctgtcagagttaccggtcagccgggcgggcgccgccggggtctggggtggacgccgcgagcctgcacgttgcgccgggaccccggggctgtgcccagaaaaatcatttttcttctctgggaaggtgaacatttgtagcattgatttcccggatctggtaacatggcaaaagatgccggtctaattgaagccaacggagaactcaaggtcttcatagaccagaaccttagtcccgggaaaggcgtggtgtccctcgtggccgttcacccctccaccgtcaacccgctcgggaagcagctcttgccaaaaacctttggacagtccaatgtcaacattgcccagcaagtggaagcgcaacaggaaaggagagaagaatggcaagggcctacggcatttctccatgaaggtctgcgagaaggtgcagaggaaagggaccacttcctacaacgaagtggcagacgagctggttgcggagttcagtgctgccgacaaccacatcttaccaaacgagtcagcttatgaccagaaaaacataagacggcgcgtctacgatgccttaaacgtgctaatggccatgaacatcatctccaaggagaagaaggagatcaagtggattggtctgcccaccaactcggctcaggaatgtcagaacttagaggtggaaagacagaggagacttgaaagaataaaacagaaacagtctcaacttcaagaacttattctacagcaaattgccttcaagaacctggtgcagagaaaccggcatgcggagcagcaggccagccggccaccgccacccaactcagtcatccacctgcccttcatcatcgtcaacaccagcaagaagacggtcatcgactgcagcatctccaatgacaaatttgagtatctgtttaattttgacaacacatttgaaatccacgatgacatagaagtgctgaagcggatgggcatggcttgcgggctggagtcggggagctgctctgccgaagaccttaaaatggccagaagtctggtccccaaggctctggagccatacgtgacagagaagacaggcttatgtgactgcacagcgggatgtcctgctccgtggcgcagtgtggaaaatactggacaagcgaaggatatccggaagcttctacagccgtctgtcctgtggaactgcgcgtcattttgttggttgcctgtgcgtcttgtgttgtttctgtttcatgaccattcgcttattttctttcccttttcagaaatggctcagggaactgttggaggcgtgttcatcacgacggcaggttccacgtctaacggcacaaggttctctgccagtgacctgaccaacggtgcagatgggatgctggccacaagctccaatgggtctcagtacagcggctccagggtggagactccggtgtcctacgtcggggaggacgacgaggaggacgatgacttcaacgagaatgacgaggacgactgacgtcctccccacttcagattcggcttcaggaaaacgtttagcg

SEQ ID NO: 333027 - DNA, 1980 bp, Artificial Sequence
  derived and/or modified sequence
atgctatacaagcagttacggcaggcttgtgaagaccacgtccaagctcagatactgcccttccgcgaagactctttagatagcgtgctcttcttgaaaaagatcaacacttgctggcaggatcactgccggcagatgatcatgatccgctctatattcctctttttggaccggacctacgtcttacaaaactctaccctcccaagtatctgggatatgggtctcgagttatttagaacacacattatcagcgataaaatggtgcagtctaaaaccatcgacgggatcctgctcctgatagagagggagcgaagcggcgaagctgttgataggtcattgcttagatccctcctcggaatgttaagcgatctccaagtgtacaaggatagcttcgaactcaagtttctggaagagaccaactgcttgtatgcagcagagggccagaggttgatgcaggagcgggaggtgccagaatatctgaaccacgtctcaaagcggctggaggaagagggcgaccgggttatcacctatctcgaccattctacgcagaaacctctgattgcctgtgtggaaaagcagctgttgggtgaacatctgactgccattctgcagaagggcctggaccacctgttggatgagaatcgcgtccctgatctcgcgcagatgtatcaactctttagtagagtacgggggggtcagcaggccttactgcaacactggagtgaatatattaaaacattcggaacagctatagtcattaaccctgagaaagacaaagacatggtgcaagacctactggatttcaaggacaaggtcgaccacgtaatcgaagtatgttttcagaagaacgagcgattcgtgaatctaatgaaagagagctttgaaacatttataaacaagcgaccaaacaaacctgcagagctcatagcaaagcatgtagattcaaaactgcgcgctggtaataaggaagccacagacgaggagctcgaacgcacgctggataagataatgatcttattcaggttcatacatggcaaagatgtctttgaggcattctacaaaaaagacctggccaaacgacttcttgttggcaagtcagcgtctgttgacgctgaaaagtcaatgctgagcaagttaaagcacgaatgtggcgccgcgttcacatctaaactggaggggatgtttaaagatatggagctaagtaaggacatcatggttcactttaaacaacatatgcagaaccagtctgattccgggcccatcgatcttaccgtgaacatcctgacgatggggtactggcctacttacacccccatggaagtgcacctcacccccgaaatgatcaaactacaagaagtattcaaagctttctacctcggtaagcactccggacgaaaactgcaatggcaaactactctcggccacgctgtgctaaaggcggagttcaaggagggcaagaaggaattccaggtctctctcttccaaaccttggtcctgctgatgtttaacgaaggggacggcttcagctttgaagagatcaagatggccactggtattgaagatagcgaattaaggcggaccctgcagagtctggcttgtggtaaagcaagggtgctgattaagtctcccaagggcaaggaagttgaagatggcgataagttcatattcaacggcgaattcaaacacaagttgttccggataaagataaatcagatacagatgaaagagacagtcgaagagcaagtaagtacaacggaaagggtctttcaggacagacaatatcaaatcgacgctgcaatcgttaggataatgaagatgcgtaagacactgggtcataaccttcttgtcagcgagctgtataatcagctaaaattccccgttaagcctggagaccttaaaaaacgaatcgagtccctaatcgacagagattatatggaaagagataaagataatcctaaccaatatcattacgtggcatag

SEQ ID NO: 333028 - DNA, 1980 bp, Artificial Sequence
  derived and/or modified sequence
atgctgtacaaacaactgagacaagcttgcgaagaccatgtgcaggcccagatacttccttttagggaggatagtttggacagcgtcttgtttctgaagaagatcaacacatgctggcaggatcattgccggcagatgatcatgatcagatccatattcttattcctggacagaacgtatgtgctgcaaaatagcacgctgccatcaatctgggacatgggcctggagttatttagaactcacattattagcgataagatggttcagtctaaaaccatcgatggcatccttcttttaatcgagagggagcgctctggagaagcggtcgatcgcagtctgctgcggagccttctaggtatgctctcggacttgcaggtatataaggattccttcgagctcaagttcttagaggagacaaattgtctgtacgcagcagaagggcaacgcctgatgcaggaaagggaagtacctgagtatttaaaccatgtgtccaaacgcctggaagaagagggcgaccgggtgattacatatcttgatcactccacccagaagcctcttattgcctgcgtcgagaaacaactgctgggggaacatctgactgccatactgcagaaagggctcgaccacctgctcgacgaaaacagggtccctgaccttgcacagatgtaccagcttttttcacgcgtgcgcggaggacagcaggcactactgcagcattggagcgagtacatcaagacttttggtaccgccatcgtaatcaatccagagaaagacaaggacatggtacaagatctccttgacttcaaagacaaggtcgaccacgttatcgaagtgtgcttccaaaagaatgaaaggttcgtgaacttaatgaaagaaagcttcgaaacctttatcaataagcgtcctaataagcccgctgagttgatcgccaaacacgtagatagcaagctgcgggcggggaacaaggaggctactgatgaagaattagaacgtaccctcgacaagataatgattctgttccggttcatacacggcaaggacgtgtttgaagctttttataaaaaagatctggctaagcgcctgctggtggggaagtccgcaagcgtggacgctgagaagagtatgttaagcaagctgaaacatgagtgcggggcggcctttaccagtaaacttgaggggatgttcaaggatatggagttgagcaaagacatcatggtgcacttcaagcagcacatgcaaaaccagtccgacagcggacccattgatctgactgttaatatattgacaatgggctactggccgacctatactccaatggaagtgcatctcacaccagaaatgattaagctccaggaggtgtttaaagcattttatctgggcaaacattcaggtagaaagcttcagtggcagaccacgcttggccatgccgtgcttaaggctgagtttaaagaggggaaaaaagagtttcaggtgagcctctttcaaaccttggtgctcctgatgttcaacgaaggagatggcttttctttcgaggaaatcaaaatggctaccggaatagaggactctgagttacgacgcaccctgcagtccttggcatgcggaaaggctcgggtcctgatcaaatcacccaaagggaaggaggttgaggacggagataagttcattttcaatggagaatttaaacacaaactgtttaggattaagattaatcaaattcagatgaaagaaactgtggaagagcaagtgtcaactacagaacgagtgttccaggataggcagtatcagatcgatgctgcaatcgtccgcataatgaaaatgcggaaaactctgggacataatttactcgtgtcagaattgtataaccagctgaagtttcctgtgaagcctggcgacctgaaaaagaggattgagtctctgatagaccgggactacatggagagagacaaggataatccaaatcagtaccattacgtcgcctag

SEQ ID NO: 333029 - DNA, 1980 bp, Artificial Sequence
  derived and/or modified sequence
atgctttataagcaactccgtcaggcctgcgaggaccatgttcaggcgcagatcttgccattcagggaagattctcttgattctgtgttgttcctgaaaaagattaatacctgctggcaggaccactgccgtcagatgataatgattcgtagcatttttcttttcttggatagaacatacgtgctccagaacagcactctgccaagcatatgggatatgggactggagctctttagaacccatataatatctgacaaaatggtccagtcgaaaacgatcgacggcatccttcttctgattgagagagaacgctctggcgaggcagttgacagaagcttgctaaggtcccttctgggtatgctctccgatctgcaggtctacaaggactcttttgaattgaaatttctggaggagacaaattgcctgtatgctgcagagggtcagcgacttatgcaagaacgagaggtaccagaatacctcaatcacgtgagtaagcgcttggaagaggagggcgacagggttatcacctacttagatcattccacacagaaaccgttgatcgcatgcgtggagaagcagctgttgggagaacaccttaccgctatactgcagaaaggtctggaccatctcttggacgaaaaccgggtgcccgatctggcccagatgtatcaactgttttctcgggtgagagggggtcaacaggcgctcctgcagcattggagcgagtatattaagacttttggaactgcaatcgtcatcaacccagagaaggacaaggacatggtccaggacctgctggatttcaaagacaaggtcgaccacgtcattgaggtgtgcttccagaagaatgaacggttcgtcaacctcatgaaagagagctttgaaacattcattaacaaaaggcccaacaaacctgccgaacttattgcaaaacatgtggacagtaagctgcgggccggcaataaggaagccacagacgaggagctcgagagaacactcgataagatcatgatactgtttcgcttcatccatgggaaagatgtttttgaagctttttataagaaggacctcgcaaaacggctgctggtggggaaatccgctagcgtcgacgccgagaagtcaatgctgagcaaacttaaacacgagtgcggtgctgccttcacatcaaaactcgaaggaatgttcaaagacatggagctgtccaaagatataatggtgcactttaaacagcacatgcagaatcagtcagattctggaccaattgatctgactgtgaatatcttgacaatgggctactggcccacgtacacccccatggaagtgcaccttactcctgaaatgataaagctacaggaggtgttcaaagccttttatttagggaaacatagtggccgcaagctccagtggcagacaacactgggccatgccgtcctgaaagccgagtttaaggagggcaagaaagagtttcaggtctccctcttccagactctggtacttcttatgtttaacgaaggtgatggattctcctttgaagaaataaagatggccacgggaatagaggatagcgagctgcggaggactctgcagagtctggcgtgcggtaaagcccgggtgttaataaagagtcctaaaggcaaggaggttgaggacggcgacaagttcatctttaacggtgagttcaagcataagttgtttcgtattaaaattaatcagattcagatgaaggaaaccgtggaagagcaggtgtccacgaccgaacgtgtattccaagataggcagtaccagatagacgcggccatagtgcgtatcatgaaaatgaggaagaccctgggacataatctgctggttagcgagttgtataatcagttgaagtttcctgttaagccaggggacctgaagaagagaatcgaaagtctgatcgatcgagactacatggaaagggataaggacaatcctaatcaatatcattatgtggcatag

SEQ ID NO: 333030 - DNA, 1980 bp, Artificial Sequence
  derived and/or modified sequence
atgctgtacaagcagctgcggcaggcctgtgaagatcatgtgcaggcccagatcctgcccttccgggaggacagcctggacagcgtgctcttcctgaagaagatcaacacctgctggcaggaccactgccggcagatgatcatgatccgcagcatcttcctgttcctggacaggacctacgtgctgcagaacagcaccctgcccagcatctgggacatgggcctggagctgttccgcacccacatcatcagtgacaagatggtgcagagcaagaccattgatggcatcctgctgctgattgaaagagagaggtctggagaggccgtggacaggagcctgctgcggagcctgctgggcatgctgagtgacctgcaggtgtacaaggacagctttgagctgaagttcctggaggagaccaactgcctgtatgctgctgagggccagaggctgatgcaggagcgggaggtgcctgagtacctgaaccacgtgtccaagaggctggaggaggagggggacagagtcatcacctacctggaccacagcacccagaagcccctgattgcctgtgtggagaagcagctgctgggggagcacctgacagccatcctgcagaagggcctggaccacctgctggatgaaaatagagtgcctgacctggcccagatgtaccagctgttcagccgggtgcggggcggccagcaggccctgctgcagcactggagcgagtacatcaagacctttggaacagccatcgtcatcaaccctgagaaggacaaggacatggtgcaggacctgctggacttcaaggacaaggtggaccacgtgattgaggtgtgcttccagaagaatgaaagatttgtgaacctgatgaaggagagctttgagaccttcatcaacaagaggcccaacaagccagctgagctgattgccaagcacgtggacagcaagctgcgggccggcaacaaggaggccacagatgaggagctggagaggaccctggacaagatcatgatcctcttccgcttcatccacggcaaggatgtgtttgaggccttctacaagaaggacctggccaagaggctgctggtgggcaagagcgcctctgtggatgctgagaagtccatgctgagcaagctgaagcatgaatgtggggccgccttcaccagcaagctggagggcatgttcaaggacatggagctgagcaaggacatcatggtgcacttcaagcagcacatgcagaaccagagcgacagcggccccatcgacctgactgtgaacatcctgaccatgggctactggcccacctacacccccatggaggtgcacctgaccccagagatgatcaagctgcaggaggtgttcaaggccttctacctgggcaagcacagcggcaggaagctgcagtggcagaccaccctgggccatgctgtgctgaaggccgagttcaaggagggcaagaaggagttccaggtgtccctcttccagaccctggtgctgctgatgtttaatgaaggagatggcttctcctttgaggagatcaagatggccactggaattgaggacagcgagctgcggaggaccctgcagagcctggcctgtgggaaggcccgggtgctgatcaagagccccaagggcaaggaggtggaggatggagacaagttcatcttcaatggagagttcaagcacaagctgttccgcatcaagatcaaccagatccagatgaaggagaccgtggaggagcaggtgtccaccacagagagggtcttccaggaccggcagtaccagattgatgctgccatcgtgcgcatcatgaagatgaggaagaccctgggccacaacctgctggtgtctgagctgtacaaccagctgaagtttcctgtgaagccaggggacctgaagaagagaattgagagcctgattgaccgggactacatggagcgggacaaggacaaccccaaccagtaccactacgtggcctag

SEQ ID NO: 333031 - DNA, 1980 bp, Artificial Sequence
  derived and/or modified sequence
atgctgtacaagcagctgcggcaggcctgcgaggaccacgtgcaggcacagatcctgccttttcgggaggactcccttgactctgttctgtttcttaaaaagattaatacatgctggcaggatcactgccgacagatgatcatgatccgtagtatctttctatttctcgatagaacctatgtccttcagaatagcactctgccgagtatttgggacatggggcttgaattgtttcgtacccatattatcagtgataaaatggtgcagtccaaaaccatcgacggtatcctgctgctcatcgagcgggaaagatcgggcgaagccgtggacaggagtctccttcggtcacttctgggcatgttgagcgatctacaagtgtacaaggattcttttgaactgaagtttctcgaggagacaaactgcctttacgccgccgagggtcagcggctgatgcaggaacgtgaagttcccgaatatctgaatcacgtgtctaagagactggaagaagagggggacagagtgattacgtacctagaccattcaacgcaaaagccgctgattgcctgcgtggaaaaacagctgttaggggagcatctcaccgcaatactgcaaaaaggactggaccacctccttgatgagaatagggtgccagacctggcgcagatgtatcagctcttcagcagagttcggggtggacagcaggctttacttcagcactggtccgagtacataaagacttttggtaccgcgatcgtgatcaatccagaaaaggataaggacatggtgcaggacctgctcgatttcaaagataaggtcgatcatgtcatagaagtctgctttcaaaaaaacgaacgattcgtaaatttgatgaaagagagcttcgaaactttcattaacaaaaggcccaacaaacccgccgaactcatcgccaagcacgtggactccaagctgcgcgctggtaacaaagaggctaccgacgaggagctcgagcggactctggataagattatgatcctctttcgcttcatccacggtaaggatgtattcgaggccttttacaagaaggacttggccaaacgactgctcgtgggcaaaagtgctagcgttgatgccgagaaaagtatgctgtccaaactaaagcatgagtgtggcgcagccttcacgtcaaagttggaagggatgttcaaagacatggagctctccaaagacattatggtgcacttcaaacagcatatgcagaaccagagtgatagtgggcccatcgacctaaccgttaatatcctgaccatgggctattggccaacatacacccccatggaggtgcacctgacccctgaaatgattaaactgcaggaggtttttaaagcgttttatctgggcaagcactcgggcagaaaactgcagtggcagaccacccttggtcacgctgttctgaaagccgaatttaaggaaggtaagaaggaattccaggtttccctctttcagacacttgtcctgttgatgttcaacgagggggacggattctcttttgaggagatcaagatggctacagggatcgaggattccgaactgaggcgtaccctgcagtcccttgcttgtgggaaggcgagggtacttatcaagtccccaaaaggcaaggaggtagaggacggggacaaatttatttttaatggtgaatttaaacataaactctttcgcatcaagatcaatcaaatccaaatgaaagagactgtggaggagcaggtgtccacaaccgaacgcgtgttccaagaccggcagtaccagatcgatgccgcgattgtgaggataatgaagatgcgcaagaccctcggccacaatttgctggtatctgaactgtataatcaacttaagtttccagtgaagccaggcgatctcaagaaacgcattgagtctttaattgacagggactatatggaacgtgacaaagacaatcccaatcagtaccactacgtggcttag

SEQ ID NO: 333032 - DNA, 1980 bp, Artificial Sequence
  derived and/or modified sequence
atgctgtacaagcagctgcggcaggcctgcgaggaccacgtgcaggctcagattctgccattccgcgaggattctctagattcagtactgttcctgaagaagatcaacacctgctggcaggatcattgtaggcaaatgattatgatccgatccatctttctattcttggatcgtacgtacgtgcttcaaaattctaccctgccctcaatttgggacatgggcctggagctgttccgcacacacatcatctccgataagatggtgcaaagcaagacaatcgacggtatactgctgctgattgagagggagcgctccggcgaagccgtggaccgctccctcctaaggagcttgttgggcatgctcagcgatctgcaggtttacaaggactcttttgaactgaaatttttggaagagacaaattgcctatatgccgccgagggccaacgactcatgcaggaaagagaggttcctgaataccttaaccacgtatctaaaagactcgaagaagagggagacagggtgattacatacctggaccattccacgcagaagccgctgattgcatgcgtggaaaaacagctgctcggcgaacacctgacggcaatactacagaagggattggaccatctgctcgacgaaaatcgtgtacctgacctggctcaaatgtatcaactattcagccgcgtaagaggcggccaacaggctctgttgcagcactggtccgaatatatcaaaacatttggaacagccatagttatcaatccggaaaaggataaagatatggtgcaggatctcctggatttcaaggacaaggttgatcacgttatagaagtctgctttcagaagaatgaaaggttcgtcaacctcatgaaggaatccttcgagacctttatcaacaaaagaccgaacaaacccgcggaactcattgcaaaacacgtcgatagtaagttacgtgcaggcaataaggaagcgactgatgaagaattggaacgaacgttggacaagatcatgatcttattccgcttcatccacggcaaagatgtttttgaggctttctataagaaggacttagccaaacggctcctggtaggaaagtccgcctccgtggatgcagaaaagtcgatgctatccaagctgaagcatgaatgtggcgccgcatttacttccaagctcgagggaatgttcaaagacatggagctgagcaaagacatcatggtgcatttcaaacaacatatgcagaaccaatctgactctggtcccatagatctgactgttaacatacttactatgggatattggccaacatacactcctatggaggtccacctgacccccgaaatgatcaaactccaggaggtctttaaggccttttatctgggcaagcatagcggccgcaagctgcagtggcaaacaacgttgggccacgccgttctcaaggcagaatttaaagagggaaaaaaagagttccaggtctctcttttccagaccctagtgctgctaatgtttaatgaaggcgacggcttttccttcgaggagataaagatggcgacggggatcgaagatagtgagctgcgccggaccctgcagtcactagcgtgcgggaaggcccgtgtactcatcaagagccctaaagggaaggaggtcgaagatggtgataaatttattttcaatggagagttcaagcacaagctgtttagaattaagatcaatcagatccaaatgaaggagacagttgaggagcaggtcagtactacagaacgcgtgtttcaggatcgacagtatcagatagacgccgctatcgtgaggatcatgaagatgaggaagacgctgggacataacctgctcgtctcagagctttacaaccaactaaaatttccagtgaaacccggcgatctcaagaagcgaatcgagtcgttaatcgatcgagactacatggaacgagacaaggataaccccaaccagtaccactacgtggcatag

SEQ ID NO: 333033 - DNA, 1980 bp, Artificial Sequence
  derived and/or modified sequence
atgctgtacaagcagctgcggcaggcctgcgaggaccacgtgcaggcgcaaatcctccccttcagagaagattccctggactctgttttgtttctcaaaaagatcaatacttgctggcaagaccattgccgacagatgatcatgatccggtccatctttttattcctggacagaacttatgtcttacagaactcaaccctcccatccatctgggacatggggctggagctttttagaacccatatcatttctgataagatggttcagtccaaaacaatcgatggaattttgttgttgatcgagagagaaaggagcggcgaggctgttgataggtctctattacgcagtctgctgggaatgctgagcgatttacaggtgtacaaggactcattcgagctgaaattcttagaggaaacgaactgtctgtacgccgctgaagggcaacgtcttatgcaggaaagggaagtgcctgagtaccttaatcacgtgagcaagaggctggaggaggaaggagaccgagttattacatacctggaccatagcacacaaaagccactaatcgcctgcgtggaaaaacagctcctgggagaacacctgactgcaatcctacagaaaggactcgatcacctgctggatgagaatcgggtccccgatctggcccaaatgtatcagctctttagtagagttcgcggagggcagcaggccttgctgcaacactggagcgaatacatcaaaactttcggcaccgctattgttattaatcctgagaaagacaaagacatggtgcaggaccttcttgacttcaaagataaagtcgaccatgtgatcgaggtgtgtttccagaagaacgagcgattcgtgaatctaatgaaagagtccttcgagacctttatcaacaagcgacccaataaacccgctgaactcatcgccaagcatgtcgactcaaagctcagggctggaaacaaagaggcaacagatgaggagctggaacgaacactggacaaaataatgatcttatttcgttttatccacgggaaggacgtgttcgaagccttctataaaaaagatctcgcaaaacgactcctggtgggtaaatccgcctcggtggatgctgagaaaagtatgctatccaagctcaagcatgaatgtggtgctgccttcacttccaagttggaaggcatgttcaaagacatggaactgagtaaggacataatggtacattttaagcagcatatgcagaaccagtctgactccggcccgatcgatcttacagtaaacatcctgacaatgggctattggccaacttacacccccatggaggttcacttaactcctgaaatgatcaagctgcaagaggtgtttaaggccttttaccttggaaaacacagcggaagaaagttgcagtggcaaacaacactcggccacgctgtccttaaggccgaatttaaagaagggaagaaggagtttcaagtctctcttttccaaactctggttctattaatgttcaatgagggtgacggcttttcattcgaagagattaaaatggcgactggaatcgaagacagcgaacttcgcaggacactgcagtccttagcctgcggaaaagcacgcgtgttaataaaaagcccgaaggggaaggaggtcgaggacggcgataagtttatcttcaatggtgagttcaaacataagttattccggataaagattaaccaaatccaaatgaaagagaccgtcgaggagcaagtctcgactacagaacgggtattccaagatcgacagtaccagatagatgccgcaatcgttaggataatgaagatgcgtaagactctcgggcataacttgctggtttccgagctttacaaccagctgaaattccccgttaaacccggagatctcaaaaaacggatcgagagcctgattgatcgcgactatatggagagagacaaggataatcccaaccaataccactacgtcgcctag

SEQ ID NO: 333034 - DNA, 1980 bp, Artificial Sequence
  derived and/or modified sequence
atgctctacaagcagctgcggcaggcatgcgaagaccacgtgcaggctcagatccttcctttccgggaggactcgctggacagcgtactattcctgaaaaaaattaacacatgttggcaggatcattgccggcagatgattatgatccgcagcatattcctattcctggatagaacgtacgtgctgcagaacagtacactccctagcatctgggatatgggtctggagctgtttcgtactcatatcatcagcgataaaatggtgcagagcaagacaatcgatgggatcctcctattaattgaaagggaacggagcggggaggctgtggacagatcgcttcttcgcagcctcctgggcatgctttctgatcttcaggtttacaaggattcattcgagctcaaattcctcgaggaaaccaattgtctatacgcggcagaaggtcagcgacttatgcaggagcgggaggtgcctgagtatctgaaccatgtgtccaaacgacttgaggaggagggagacagggtcattacttatctggaccactcgactcagaaaccgttgattgcttgcgtcgaaaaacaattgctgggcgaacacctgacagcaatcctgcagaagggactggatcacttgctggacgaaaatcgggtccctgacttggcgcagatgtatcaactgttcagccgagtgcgcggtgggcagcaagcgctgctgcagcattggtccgagtatattaaaactttcggtaccgcaatagtgatcaacccagaaaaggataaggacatggttcaagatctgctggatttcaaagataaagtggaccacgtcattgaagtttgtttccaaaaaaatgaaagattcgtcaatcttatgaaagaatcatttgagacctttataaacaaacgaccaaataaaccggcagaactaatcgcaaagcatgtggatagcaagctccgcgctgggaacaaagaagcaaccgacgaagagctggagaggacacttgataagataatgatcttatttagattcattcatggaaaagacgtgtttgaggccttttacaaaaaggacctggccaagagactgttggtcggaaagtccgcttccgtggatgccgagaagtcaatgctgtcaaagctcaagcatgaatgcggcgctgcgttcacctcgaagttggagggcatgtttaaggacatggagctgagcaaggacatcatggtacattttaaacagcatatgcagaatcagagcgatagcgggccaatcgacctaactgtaaatatcctgaccatgggttactggcccacctacacccccatggaagtgcacttgacacccgagatgatcaagcttcaggaagtcttcaaggccttctatctcgggaaacatagtggtcgcaaattgcaatggcagacgacgctgggccatgctgtcctcaaggcggagtttaaggagggtaaaaaggaattccaagtatcattatttcaaactctggttcttctgatgttcaatgagggcgatggctttagcttcgaggagataaagatggcgacaggaatcgaagactctgagctgaggaggaccctccaaagccttgcctgcggcaaagctcgagtgcttattaagtctcctaagggaaaagaggtcgaggatggggataagtttattttcaatggtgaatttaagcataagctctttagaatcaagattaatcagatacaaatgaaagagactgttgaggaacaggtttccacaacagaacgggtctttcaagacagacagtaccagattgacgccgcaatcgttagaattatgaagatgcggaagactctggggcataacctattggtcagcgaactgtacaaccagttaaaattccccgtcaagcccggtgacctgaagaagcggatcgagtcccttatcgacagagactacatggagcgagataaggataacccgaatcaatatcactacgtcgcatag

SEQ ID NO: 333035 - DNA, 1980 bp, Artificial Sequence
  derived and/or modified sequence
atgttgtacaagcagcttcgtcaggcgtgcgaggatcatgtgcaagcccagatcctacctttccgcgaggacagcctggacagcgtcctattcttaaaaaaaatcaatacatgttggcaagaccactgtcggcagatgattatgatccgaagtattttcttgtttcttgatcggacgtacgtccttcagaacagtactcttccatcaatatgggatatggggctcgagttgtttaggactcacatcatttctgataagatggttcagtccaagacgatcgatgggatcctgttgcttatcgagcgcgaacggtccggggaagccgtcgatagatcacttcttcggtcgctcctgggcatgctctcggatttgcaggtgtacaaggattctttcgaactaaaattcttggaggagacaaattgcctgtatgccgcagagggacagcgccttatgcaggaaagagaggtgccagagtacttgaatcacgtgtctaaaaggctggaggaagaaggagaccgagtcatcacatatctggaccactccactcagaagcctctgatcgcttgcgtcgaaaagcagctgctgggcgagcaccttacagcaatactgcagaagggtctcgaccatctgctagatgagaatagggtgccagatctagcccagatgtaccagttgttctctcgtgtacgcggagggcagcaggcactcttgcagcattggagcgagtacatcaagacttttggcaccgcgatcgttatcaacccagagaaggataaagatatggttcaggatctgctcgactttaaggacaaggtagaccatgtgatagaagtttgtttccagaagaatgaaaggttcgtaaatctgatgaaggaaagctttgaaacatttattaacaaaagacctaataagcccgcagagttgatcgccaagcacgtcgactctaagctgcgggcaggcaacaaagaagccaccgacgaagagcttgagcgcactctggacaaaatcatgatcctgttcagatttatccatgggaaagacgtattcgaggccttctataagaaagatctggcgaagcgccttctcgtggggaaatccgcttcagtggatgctgagaagagtatgctgtccaaactcaagcacgagtgtggagccgcattcacctcaaaactcgaaggcatgtttaaggacatggaactctctaaggacatcatggtgcacttcaagcagcacatgcagaatcaatcagacagcggacccattgatctcacagtgaatatcctcactatgggctattggcctacctacacacccatggaggtgcacctgacgcccgagatgattaagctccaggaggtatttaaggccttttacttggggaaacattccggtaggaagttgcaatggcagacaaccttgggccacgccgtgctgaaggcagagttcaaagagggcaagaaggagttccaggtgtcgctgttccagaccttggtcttgctcatgttcaacgagggagacggcttcagctttgaagagatcaagatggctacgggcatcgaggattctgaactgcgtaggacactgcagagtctggcttgcgggaaagcccgagtgctcatcaagtcccctaagggaaaagaggtagaagacggggataaatttatctttaacggcgagttcaagcataaactgtttcgcatcaaaatcaaccaaatccaaatgaaggaaaccgtcgaagaacaagtgtcgaccacagaacgagtttttcaagatagacagtaccaaatcgatgccgcaatcgtgcggatcatgaaaatgaggaaaacactcggccataacctgctggtctcagagctgtacaaccagctaaagttccccgtgaagcccggagatttaaagaagcggatagagagcttaattgatcgggactacatggagagagacaaggataatccaaaccaataccactacgtagcttag

SEQ ID NO: 333036 - DNA, 1980 bp, Artificial Sequence
  derived and/or modified sequence
atgctgtataagcaattgcgtcaagcgtgtgaggaccatgtccaggctcaaattctgccctttagagaagattctctcgactccgtcctgttcctgaaaaagatcaacacttgctggcaggaccattgtaggcagatgatcatgatccgatcaatcttccttttcctggatcggacatacgtattgcagaatagcacattacctagcatctgggacatgggcttagagctctttagaactcatatcatcagcgacaagatggtccaaagtaaaacgatcgatgggattctgctactcatcgagagggaaagatccggagaggctgtggatcgcagcctgctgagatccctgcttggaatgcttagcgacctgcaagtctataaggattcctttgaactgaagttcctggaggaaaccaattgcctatacgctgcggagggacaacgtctaatgcaggagcgcgaggtgcccgagtatctcaaccacgtttccaaacgccttgaggaggagggcgaccgagtgatcacctatttggatcacagtacccagaagcccctgattgcatgcgtggaaaagcagcttttgggggaacacctgaccgccatcctccaaaaaggcctcgaccacctactggacgaaaatcgggtccctgacctggctcagatgtatcagctgttttcacgagtacgtggcggacagcaggcccttttgcagcattggagtgaatacatcaagacatttggaacggctattgtcattaaccctgagaaagacaaggatatggtgcaggatctactagattttaaggataaggtcgatcacgttattgaagtgtgtttccaaaaaaacgagcgttttgtgaatcttatgaaagaatcttttgagactttcattaataaacgccctaataagcccgcagagctgatagctaagcatgtagactctaagctccgagccggaaacaaagaagcgactgacgaagagctggaaagaacattggataagattatgatcttatttcggtttatccatggtaaagatgtgttcgaggccttttataagaaagacctggccaaacggctgctggtgggcaagagcgccagcgtcgatgctgagaagagtatgctgtctaaactgaaacatgaatgtggcgcagcattcacatcaaagcttgagggcatgtttaaagacatggagctctcgaaagatatcatggtgcactttaagcagcatatgcaaaaccaatcggacagcggccctatagatctgacggtgaatatcctcactatgggttattggcctacatacactccaatggaggtgcatctgactcctgagatgattaaactgcaagaggtgtttaaagctttttatctggggaaacacagtggccgtaaacttcagtggcaaaccaccttgggacacgcagtccttaaggccgagtttaaagaagggaagaaagagtttcaagttagcctgtttcagaccctggtgctcttgatgttcaacgaaggggatggattcagcttcgaggaaattaagatggccacaggaatcgaggacagtgaactaaggagaaccttacaaagcctcgcatgtggcaaggcacgcgtcttgatcaaaagtcccaagggtaaagaagtggaggacggagacaaatttatcttcaatggggaatttaaacacaaactctttcgaattaaaattaatcaaatacaaatgaaggaaacggtggaggagcaggttagcactaccgagcgggtcttccaagatcggcagtatcaaattgatgccgctatcgtacggattatgaaaatgcgaaagaccctgggacataatcttcttgtgtcggaactgtacaaccagttgaaatttcctgtgaagccaggagatctgaagaaacgcatcgaaagtctaatcgaccgagattacatggagcgtgacaaggataaccccaaccagtaccactacgtcgcttag

SEQ ID NO: 333037 - DNA, 1980 bp, Artificial Sequence
  derived and/or modified sequence
atgctgtacaagcagctgagacaggcctgcgaggaccacgtgcaggcccagatcctgcccttcagagaggacagcctggacagcgtgctgttcctgaagaagatcaacacctgctggcaggaccactgcagacagatgatcatgatcagaagcatcttcctgttcctggacagaacctacgtgctgcagaacagcaccctgcccagcatctgggacatgggcctggagctgttcagaacccacatcatcagcgacaagatggtgcagagcaagaccatcgacggcatcctgctgctgatcgagagagagagaagcggcgaggccgtggacagaagcctgctgagaagcctgctgggcatgctgagcgacctgcaggtgtacaaggacagcttcgagctgaagttcctggaggagaccaactgcctgtacgccgccgagggccagagactgatgcaggagagagaggtgcccgagtacctgaaccacgtgagcaagagactggaggaggagggcgacagagtgatcacctacctggaccacagcacccagaagcccctgatcgcctgcgtggagaagcagctgctgggcgagcacctgaccgccatcctgcagaagggcctggaccacctgctggacgagaacagagtgcccgacctggcccagatgtaccagctgttcagcagagtgagaggcggccagcaggccctgctgcagcactggagcgagtacatcaagaccttcggcaccgccatcgtgatcaaccccgagaaggacaaggacatggtgcaggacctgctggacttcaaggacaaggtggaccacgtgatcgaggtgtgcttccagaagaacgagagattcgtgaacctgatgaaggagagcttcgagaccttcatcaacaagagacccaacaagcccgccgagctgatcgccaagcacgtggacagcaagctgagagccggcaacaaggaggccaccgacgaggagctggagagaaccctggacaagatcatgatcctgttcagattcatccacggcaaggacgtgttcgaggccttctacaagaaggacctggccaagagactgctggtgggcaagagcgccagcgtggacgccgagaagagcatgctgagcaagctgaagcacgagtgcggcgccgccttcaccagcaagctggagggcatgttcaaggacatggagctgagcaaggacatcatggtgcacttcaagcagcacatgcagaaccagagcgacagcggccccatcgacctgaccgtgaacatcctgaccatgggctactggcccacctacacccccatggaggtgcacctgacccccgagatgatcaagctgcaggaggtgttcaaggccttctacctgggcaagcacagcggcagaaagctgcagtggcagaccaccctgggccacgccgtgctgaaggccgagttcaaggagggcaagaaggagttccaggtgagcctgttccagaccctggtgctgctgatgttcaacgagggcgacggcttcagcttcgaggagatcaagatggccaccggcatcgaggacagcgagctgagaagaaccctgcagagcctggcctgcggcaaggccagagtgctgatcaagagccccaagggcaaggaggtggaggacggcgacaagttcatcttcaacggcgagttcaagcacaagctgttcagaatcaagatcaaccagatccagatgaaggagaccgtggaggagcaggtgagcaccaccgagagagtgttccaggacagacagtaccagatcgacgccgccatcgtgagaatcatgaagatgagaaagaccctgggccacaacctgctggtgagcgagctgtacaaccagctgaagttccccgtgaagcccggcgacctgaagaagagaatcgagagcctgatcgacagagactacatggagagagacaaggacaaccccaaccagtaccactacgtggcctag

SEQ ID NO: 333038 - protein, 422 aa, Artificial Sequence
  derived and/or modified sequence
MAGCVPLLQGLVLVLALHRVEPSATSLKERHGLHSDSACTGVQESLFLPASKANDVLVRWKRAGSYLLEELFEGNLEKECYEEICVYEEAREVFENEVVTDEFWRRYKGGSPCISQPCLHNGSCQDSIWGYTCTCSPGYEGSNCELAKNECHPERTDGCQHFCLPGQESYTCSCAQGYRLGEDHKQCVPHDQCACGVLTSEKRAPDLQDLPWQVKLTNSEGKDFCGGVIIRENFVLTTAKCSLLHRNITVKTYFNRTSQDPLMIKITHVHVHMRYDADAGENDLSLLELEWPIQCPGAGLPVCTPEKDFAEHLLIPRTRGLLSGWARNGTDLGNSLTTRPVTLVEGEECGQVLNVTVTTRTYCERSSVAAMHWMDGSVVTREHRGSWFLTGVLGSQPVGGQAHMVLVTKVSRYSLWFKQIMN

SEQ ID NO: 333039 - DNA, 1551 bp, Artificial Sequence
  derived and/or modified sequence
ggtgggaatggcaggctgcgtcccactgctccagggcctggtcctggtcctcgccctccatcgtgtggagccctcagccacttcactgaaggaacgacatggactccattctgactctgcctgcacaggcgtccaggaaagcttatttctcccggcctccaaagcaaacgacgttctggtgaggtggaagcgtgcgggctcctatcttctggaagaactcttcgagggaaacttggaaaaagaatgttatgaagaaatctgtgtctatgaagaagcaagagaagtgtttgaaaatgaagtagtcactgatgaattctggagacgatataagggcggctccccgtgcatctcccagccctgcctccacaacggctcttgccaggacagcatctggggctacacctgcacctgctcccccggctatgagggcagcaactgcgagctggctaaaaatgaatgtcacccagagcggactgatgggtgtcaacacttctgcctcccaggacaggaatcctacacatgcagctgtgctcagggctacaggcttggtgaggaccacaaacagtgtgtgccccacgaccagtgtgcctgcggggtgctgacctctgagaagcgtgcaccggatctacaggacctcccgtggcaggtaaagttaacaaattccgaaggaaaagacttctgtggtggtgttataatacgggaaaattttgtactgacaacagcaaaatgttcactgttacacaggaatattactgtaaaaacatattttaacagaacgagccaagacccgctgatgatcaagataacgcacgtccatgtgcacatgcggtatgacgcggacgcgggggagaatgacctgtcactgctggagctggagtggcccatccagtgcccaggtgcggggctccccgtgtgcacccctgagaaagacttcgctgagcacctcctcatcccacgcaccaggggcctcctcagcggctgggcacgcaatggcactgacctgggcaactcgctgaccacgcggcctgtcacacttgtggagggggaggagtgcgggcaggtcctgaatgtgactgtcaccaccaggacctactgtgagagaagcagcgtggcggccatgcactggatggatggaagtgtggtcaccagagaacacagaggctcctggtttctcacgggggtcctgggctcgcagccagtaggagggcaggctcacatggtccttgtcaccaaggtctccaggtactcactctggtttaaacagatcatgaactaactgaaactcagctagccagaatgaacaacacaaccggaagcgggattccaagctggcactgccactgtggagggcgctgaaacttcatcacacactgagaggccgtcacagccccagaccacccgcttggcccacgcagcagcagagccgccgtttgctgggttgtttaccgagcactgtgacctttctttccctggaactctttatctcaatagagaccttaaaagaaaacatgagatacgttaaataataaaataagataatctgtcagtcat

SEQ ID NO: 333040 - protein, 363 aa, Artificial Sequence
  derived and/or modified sequence
MKGNSTLATTSKNITSGLHFGLVNISGNNESTLNCSQKPSDKHLDAIPILYYIIFVIGFLVNIVVVTLFCCQKGPKKVSSIYIFNLAVADLLLLATLPLWATYYSYRYDWLFGPVMCKVFGSFLTLNMFASIFFITCMSVDRYQSVIYPFLSQRRNPWQASYIVPLVWCMACLSSLPTFYFRDVRTIEYLGVNACIMAFPPEKYAQWSAGIALMKNILGFIIPLIFIATCYFGIRKHLLKTNSYGKNRITRDQVLKMAAAVVLAFIICWLPFHVLTFLDALAWMGVINSCEVIAVIDLALPFAILLGFTNSCVNPFLYCFVGNRFQQKLRSVFRVPITWLQGKRESMSCRKSSSLREMETFVS

SEQ ID NO: 333041 - DNA, 1092 bp, Artificial Sequence
  derived and/or modified sequence
atgaaagggaacagcacgctggcaaccacgagcaagaacatcacgagcggccttcattttgggctggttaatatatccggcaacaatgaatctacactcaattgcagccaaaagccttccgacaagcacctggacgcaattccaattctttactacattatctttgtgattggctttctggtgaacatagtcgtggttactctgttttgttgtcagaaaggtccaaaaaaggtgagcagtatttacatcttcaaccttgctgtcgctgacttgttactgctggccactctgcctctatgggctacctactactcctaccgatatgactggctcttcggaccagtcatgtgtaaggtgttcggctccttcttaactttgaacatgttcgctagtattttctttatcacctgcatgagtgtggatcgataccagtccgtgatctatccctttctttcgcagagaaggaatccatggcaagcctcttacatagtccctctcgtatggtgcatggcttgtctgtctagcttgcccactttctacttccgcgatgttcggactatagagtatctcggagtgaatgcatgtattatggcctttccccctgagaaatatgcccagtggagcgcaggcattgcattgatgaagaacatcttgggctttattatcccacttatcttcatagcaacctgttattttgggatcagaaaacatctgctgaagaccaatagttacggaaagaaccgcatcaccagagatcaggtgctaaaaatggctgcagcagtagtacttgctttcattatttgttggctgcctttccacgtcttaacattccttgacgcacttgcatggatgggagtgataaactcctgcgaggtgatagctgtgatcgacctggccctgcccttcgccatattgctaggattcacgaacagttgtgtgaacccttttctctattgcttcgttggcaaccggttccaacaaaagctccgttccgtcttcagggtgcccattacctggttacaggggaaaagggagtccatgagctgccgcaaaagctcatctttgagagaaatggaaacctttgtttcatag

SEQ ID NO: 333042 - DNA, 1092 bp, Artificial Sequence
  derived and/or modified sequence
atgaagggcaacagcaccctggccaccaccagcaagaacatcaccagcggcctgcacttcggcctggtgaacatcagcggcaacaatgaaagcaccctgaactgcagccagaagcccagcgacaagcacctggatgccatccccatcctgtactacatcatctttgtgattggcttcctggtgaacatcgtggtggtgaccctcttctgctgccagaagggccccaagaaggtgagcagcatctacatcttcaacctggccgtggccgacctgctgctgctggccaccctgcccctgtgggccacctactacagctaccgctatgactggctgtttggacctgtgatgtgcaaggtgtttggcagcttcctgaccctgaacatgtttgccagcatcttcttcatcacctgcatgtctgtggaccgctaccagagcgtcatctaccccttcctgagccagaggaggaacccctggcaggccagctacatcgtgcccctggtgtggtgcatggcctgcctgagcagcctgcccaccttctacttcagagatgtgaggaccatcgagtacctgggcgtgaatgcctgcatcatggccttccccccagagaagtatgcccagtggagcgctggcatcgccctgatgaagaacatcctgggcttcatcatccccctcatcttcatcgccacctgctacttcggcatcaggaagcacctgctgaagaccaacagctatggcaagaaccgcatcacccgggaccaggtgctgaagatggctgctgctgtggtgctggccttcatcatctgctggctgcccttccacgtgctgaccttcctggatgccctggcctggatgggcgtcatcaacagctgtgaggtgattgctgtgattgacctggccctgccctttgccatcctgctgggcttcaccaacagctgtgtgaaccccttcctgtactgctttgtgggcaaccgcttccagcagaagctgcggtctgtgttccgggtgcccatcacctggctgcagggcaagcgggagagcatgagctgcaggaagagcagcagcctgcgggagatggagacctttgtgtcctag

SEQ ID NO: 333043 - DNA, 1092 bp, Artificial Sequence
  derived and/or modified sequence
atgaagggcaacagcaccctggccaccaccagcaagaacatcaccagcgggctgcacttcgggctggtgaatatcagtggaaataacgagtccaccctgaactgctcccaaaagccaagcgacaagcatctggacgcgatccccattttgtactatattattttcgtgattggttttctcgtgaacattgtggttgtgacattgttttgttgtcagaaggggccaaagaaggtcagctctatctacattttcaacttggcagtggccgacttgcttctgctagcaactctcccactctgggcaacgtactattcgtacagatacgactggctgttcggaccagtgatgtgcaaggtctttggatccttcttaacacttaacatgtttgctagcatcttcttcataacatgtatgagcgtggacaggtatcagagtgtcatctacccttttctgagtcagaggcgaaacccctggcaggcaagttacatcgtcccactggtttggtgtatggcttgcctgtcttccctcccaactttttactttcgtgacgtgcggacaatcgaatacctgggcgttaacgcctgcatcatggcctttccaccagagaagtacgcccaatggtccgccggaattgcgctgatgaaaaacattctgggcttcatcatacctctgatatttatcgccacttgctattttggcatcagaaagcacctcctgaagacaaacagctacggtaaaaaccgtattacccgggatcaagtcctgaagatggcagctgcggtcgttctggcgtttatcatctgctggctaccgttccatgttctgacgttcttagatgccctggcctggatgggcgtcataaacagctgtgaggtgattgctgtgattgatctcgcacttcccttcgccattctgctcgggttcactaactcctgcgtgaaccctttcctctattgctttgtcggcaaccgtttccagcagaaactccgaagcgtctttagagtgcctataacctggctccagggaaaaagagagtcaatgagctgcagaaaatcctcatctctaagagagatggagacgttcgtctcctag

SEQ ID NO: 333044 - DNA, 2882 bp, Artificial Sequence
  derived and/or modified sequence
agaaggaaaccagagatctggtgctattacgtcccagcgtctgagagaacgagtaagcacagaattcaaagcattctgcagcctgaattttgaaggagtgtgtttaggcactaagcaagctgatttatgataactgctttaaacttcaacaaccaaaggcataagaactaggagctgctgacatttcaatatgaagggcaactccacccttgccactactagcaaaaacattaccagcggtcttcacttcgggcttgtgaacatctctggcaacaatgagtctaccttgaactgttcacagaaaccatcagataagcatttagatgcaattcctattctttactacattatatttgtaattggatttctggtcaatattgtcgtggttacactgttttgttgtcaaaagggtcctaaaaaggtttctagcatatacatcttcaacctcgctgtggctgatttactccttttggctactcttcctctatgggcaacctattattcttatagatatgactggctctttggacctgtgatgtgcaaagtttttggttcttttcttaccctgaacatgtttgcaagcattttttttatcacctgcatgagtgttgataggtaccaatctgtcatctacccctttctgtctcaaagaagaaatccctggcaagcatcttatatagttccccttgtttggtgtatggcctgtttgtcctcattgccaacattttattttcgagacgtcagaaccattgaatacttaggagtgaatgcttgcattatggctttcccacctgagaaatatgcccaatggtcagctgggattgccttaatgaaaaatatccttggttttattatccctttaatattcatagcaacatgctattttggaattagaaaacacttactgaagacgaatagctatgggaagaacaggataacccgtgaccaagtcctgaagatggcagctgctgttgttctggccttcatcatttgctggcttcccttccatgttctgaccttcctggatgctctggcctggatgggtgtcattaatagctgcgaagttatagcagtcattgacctggcacttccttttgccatcctcttgggattcaccaacagctgcgttaatccgtttctgtattgttttgttggaaaccggttccaacagaagctccgcagtgtgtttagggttccaattacttggctccaagggaaaagagagagtatgtcttgccggaaaagcagttctcttagagaaatggagacctttgtgtcttaaacgtgagagcaaaatgcatgtaatcaacatggctacttgctttgaggctcaccagaattatttttaagtggttttaataaaataataaaatttcccctaatcttttctgaatcttctgaaaccaaatgtaactatgttttatcgtccagtgactttcaggaattgcccattgtttttctgatatgtttgtacaagattgtcattagtgagacatatttacaacctagaagtaactggtgatatatctcaaattgtaattaataatagattgtgaataatgatttggggattcagatttctctttgaaacatgcttgtgtttcttagtggggttttatatccatttttatcaggatttcctcttgaaccagaaccagtctttcaactcattgcatcatttacaagacaacattgtaagagagatgagcacttctaagttgagtatattataatagattagtactggattattcaggctttaggcatatgcttctttaaaaaagctataaattatattcctcttgcatttcacttgagtggaggtttatagttaatctataactacatattgaatagggctaggaatatagattaaatcatactcctatgctttagcttatttttacagttatagaaagcaagatgtactataacatagaattgcaatctataatatttgtgtgttcactaaactctgaataagcactttttaaaaaactttctactcattttaatgattgtttaaaggtttctattttctctgatacttttttgaaatcagtaaacactgtgtattgttgtaaaatgtaaaggtcacttttcacatccttgactttttagatgtgctgctttgatatataggacattgatttgatttttattattaatgctttggttctgggttgtttcctaaaatatctgggtggcttaaaaaaaactctttaacttgtaataaacccttaactggcataggaaatggtatccagaatggaattttgctacatggggtctgggtgggggcaaagagacccagtcaattacatgtttggtaccaagaaaggaacctgtcagggcagtacaatgtgactttgaaaatatataccgtgggggtagttttaccctatatctataaacactgtttgttccagaatctgtatgattctatggagctattttaaaccaattgcaggtctagatacctccttctcagcactattaaagctcctaagttagaggagtgcctaaaactgagttacctaaagtttacttacattaaagtatgaatattaattttagaaatttgagactttattctgtaccagccctgtataataacaggttatctaggaccttcctctgaggtaggtctaaatactgatctctgaggcggaactaacgttttggggactcagcatctctgccaggttccaggattatagacagaagagtcctgtcataccactttctggaaaagtcctaatttcatgtaatccttttattttcaataaaaacaaatagctaaatgtataaccaactatgatgttatgttttcaataattttgtaaaacagctcatataaataaaatttttaattggaagaa

SEQ ID NO: 333045 - DNA, 1092 bp, Artificial Sequence
  derived and/or modified sequence
atgaagggaaactccacactcgctactacatccaagaatataacaagcggcctgcattttgggctagtgaacatcagcgggaataatgaaagtaccctgaactgttctcagaaaccgtctgacaagcacctagatgctatccctattctgtactacatcatcttcgtcatcggctttctggtgaacattgtggtggtcacattgttttgttgccagaaaggccctaagaaagtgagttccatatacatctttaacctcgctgtggctgatttactcctgcttgcaacactccccctctgggccacctactactcgtatagatatgattggttatttgggcctgtgatgtgtaaagttttcggctcattcttaacactgaatatgttcgcctctattttctttattacctgtatgtccgttgacaggtaccagtccgtgatttatccctttctttcccagcgaaggaatccatggcaggcatcatatatagtgccactggtttggtgcatggcatgcctgagctccttgccaactttctatttccgggatgtccgcaccatcgaatacctgggtgtgaatgcttgcattatggcctttccccctgaaaaatacgcacaatggagtgccggaattgcactgatgaagaatatcctgggctttataattccactgattttcatagccacctgttattttggaatccgcaaacacttattgaagacgaattcctacggtaaaaaccgaatcactcgggaccaggtcctgaaaatggccgctgccgtcgttctggccttcatcatttgttggttaccctttcatgtgctgactttcctagatgccctggcctggatgggagttatcaactcctgcgaggtcatcgcggtaatagacctggctttgccgtttgcgatccttctggggtttacaaactcttgtgtcaaccctttcctttactgttttgttggcaatagatttcagcagaagttgcggagcgtattccgggtccctatcacctggctgcagggtaaaagagaatccatgagctgcagaaagtcttcgtcccttcgcgaaatggaaactttcgtgagttag

SEQ ID NO: 333046 - DNA, 1092 bp, Artificial Sequence
  derived and/or modified sequence
atgaagggcaacagcaccctggccaccaccagcaagaacatcaccagcggcctgcacttcggcctggtgaacatcagcggcaacaacgagagcaccctgaactgcagccagaagcccagcgacaagcacctggacgccatccccatcctgtactacatcatcttcgtgatcggcttcctggtgaacatcgtggtggtgaccctgttctgctgccagaagggccccaagaaggtgagcagcatctacatcttcaacctggccgtggccgacctgctgctgctggccaccctgcccctgtgggccacctactacagctacagatacgactggctgttcggccccgtgatgtgcaaggtgttcggcagcttcctgaccctgaacatgttcgccagcatcttcttcatcacctgcatgagcgtggacagataccagagcgtgatctaccccttcctgagccagagaagaaacccctggcaggccagctacatcgtgcccctggtgtggtgcatggcctgcctgagcagcctgcccaccttctacttcagagacgtgagaaccatcgagtacctgggcgtgaacgcctgcatcatggccttcccccccgagaagtacgcccagtggagcgccggcatcgccctgatgaagaacatcctgggcttcatcatccccctgatcttcatcgccacctgctacttcggcatcagaaagcacctgctgaagaccaacagctacggcaagaacagaatcaccagagaccaggtgctgaagatggccgccgccgtggtgctggccttcatcatctgctggctgcccttccacgtgctgaccttcctggacgccctggcctggatgggcgtgatcaacagctgcgaggtgatcgccgtgatcgacctggccctgcccttcgccatcctgctgggcttcaccaacagctgcgtgaaccccttcctgtactgcttcgtgggcaacagattccagcagaagctgagaagcgtgttcagagtgcccatcacctggctgcagggcaagagagagagcatgagctgcagaaagagcagcagcctgagagagatggagaccttcgtgagctag

SEQ ID NO: 333047 - protein, 630 aa, Artificial Sequence
  derived and/or modified sequence
MDEMATTQISKDELDELKEAFAKVDLNSNGFICDYELHELFKEANMPLPGYKVREIIQKLMLDGDRNKDGKISFDEFVYIFQEVKSSDIAKTFRKAINRKEGICALGGTSELSSEGTQHSYSEEEKYAFVNWINKALENDPDCRHVIPMNPNTDDLFKAVGDGIVLCKMINLSVPDTIDERAINKKKLTPFIIQENLNLALNSASAIGCHVVNIGAEDLRAGKPHLVLGLLWQIIKIGLFADIELSRNEALAALLRDGETLEELMKLSPEELLLRWANFHLENSGWQKINNFSADIKDSKAYFHLLNQIAPKGQKEGEPRIDINMSGFNETDDLKRAESMLQQADKLGCRQFVTPADVVSGNPKLNLAFVANLFNKYPALTKPENQDIDWTLLEGETREERTFRNWMNSLGVNPHVNHLYADLQDALVILQLYERIKVPVDWSKVNKPPYPKLGANMKKLENCNYAVELGKHPAKFSLVGIGGQDLNDGNQTLTLALVWQLMRRYTLNVLEDLGDGQKANDDIIVNWVNRTLSEAGKSTSIQSFKDKTISSSLAVVDLIDAIQPGCINYDLVKSGNLTEDDKHNNAKYAVSMARRIGARVYALPEDLVEVKPKMVMTVFACLMGRGMKRV

SEQ ID NO: 333048 - protein, 585 aa, Artificial Sequence
  derived and/or modified sequence
MPLPGYKVREIIQKLMLDGDRNKDGKISFDEFVYIFQEVKSSDIAKTFRKAINRKEGICALGGTSELSSEGTQHSYSEEEKYAFVNWINKALENDPDCRHVIPMNPNTDDLFKAVGDGIVLCKMINLSVPDTIDERAINKKKLTPFIIQENLNLALNSASAIGCHVVNIGAEDLRAGKPHLVLGLLWQIIKIGLFADIELSRNEALAALLRDGETLEELMKLSPEELLLRWANFHLENSGWQKINNFSADIKDSKAYFHLLNQIAPKGQKEGEPRIDINMSGFNETDDLKRAESMLQQADKLGCRQFVTPADVVSGNPKLNLAFVANLFNKYPALTKPENQDIDWTLLEGETREERTFRNWMNSLGVNPHVNHLYADLQDALVILQLYERIKVPVDWSKVNKPPYPKLGANMKKLENCNYAVELGKHPAKFSLVGIGGQDLNDGNQTLTLALVWQLMRRYTLNVLEDLGDGQKANDDIIVNWVNRTLSEAGKSTSIQSFKDKTISSSLAVVDLIDAIQPGCINYDLVKSGNLTEDDKHNNAKYAVSMARRIGARVYALPEDLVEVKPKMVMTVFACLMGRGMKRV

SEQ ID NO: 333049 - protein, 224 aa, Artificial Sequence
  derived and/or modified sequence
MNSLGVNPHVNHLYADLQDALVILQLYERIKVPVDWSKVNKPPYPKLGANMKKLENCNYAVELGKHPAKFSLVGIGGQDLNDGNQTLTLALVWQLMRRYTLNVLEDLGDGQKANDDIIVNWVNRTLSEAGKSTSIQSFKDKTISSSLAVVDLIDAIQPGCINYDLVKSGNLTEDDKHNNAKYAVSMARRIGARVYALPEDLVEVKPKMVMTVFACLMGRGMKRV

SEQ ID NO: 333050 - DNA, 1893 bp, Artificial Sequence
  derived and/or modified sequence
atggacgagatggccaccacccagatcagcaaggacgagctggacgagctgaaggaggccttcgccaaggtggacctgaacagcaacggcttcatctgcgactacgagctgcacgagctgttcaaggaggccaacatgcccctgcccggctacaaggtgagagagatcatccagaagctgatgctggacggcgacagaaacaaggacggcaagatcagcttcgacgagttcgtgtacatcttccaggaggtgaagagcagcgacatcgccaagaccttcagaaaggccatcaacagaaaggagggcatctgcgccctgggcggcaccagcgagctgagcagcgagggcacccagcacagctacagcgaggaggagaagtacgccttcgtgaactggatcaacaaggccctggagaacgaccccgactgcagacacgtgatccccatgaaccccaacaccgacgacctgttcaaggccgtgggcgacggcatcgtgctgtgcaagatgatcaacctgagcgtgcccgacaccatcgacgagagagccatcaacaagaagaagctgacccccttcatcatccaggagaacctgaacctggccctgaacagcgccagcgccatcggctgccacgtggtgaacatcggcgccgaggacctgagagccggcaagccccacctggtgctgggcctgctgtggcagatcatcaagatcggcctgttcgccgacatcgagctgagcagaaacgaggccctggccgccctgctgagagacggcgagaccctggaggagctgatgaagctgagccccgaggagctgctgctgagatgggccaacttccacctggagaacagcggctggcagaagatcaacaacttcagcgccgacatcaaggacagcaaggcctacttccacctgctgaaccagatcgcccccaagggccagaaggagggcgagcccagaatcgacatcaacatgagcggcttcaacgagaccgacgacctgaagagagccgagagcatgctgcagcaggccgacaagctgggctgcagacagttcgtgacccccgccgacgtggtgagcggcaaccccaagctgaacctggccttcgtggccaacctgttcaacaagtaccccgccctgaccaagcccgagaaccaggacatcgactggaccctgctggagggcgagaccagagaggagagaaccttcagaaactggatgaacagcctgggcgtgaacccccacgtgaaccacctgtacgccgacctgcaggacgccctggtgatcctgcagctgtacgagagaatcaaggtgcccgtggactggagcaaggtgaacaagcccccctaccccaagctgggcgccaacatgaagaagctggagaactgcaactacgccgtggagctgggcaagcaccccgccaagttcagcctggtgggcatcggcggccaggacctgaacgacggcaaccagaccctgaccctggccctggtgtggcagctgatgagaagatacaccctgaacgtgctggaggacctgggcgacggccagaaggccaacgacgacatcatcgtgaactgggtgaacagaaccctgagcgaggccggcaagagcaccagcatccagagcttcaaggacaagaccatcagcagcagcctggccgtggtggacctgatcgacgccatccagcccggctgcatcaactacgacctggtgaagagcggcaacctgaccgaggacgacaagcacaacaacgccaagtacgccgtgagcatggccagaagaatcggcgccagagtgtacgccctgcccgaggacctggtggaggtgaagcccaagatggtgatgaccgtgttcgcctgcctgatgggcagaggcatgaagagagtgtag

SEQ ID NO: 333051 - DNA, 1893 bp, Artificial Sequence
  derived and/or modified sequence
atggatgaaatggctacgacacagatctccaaggacgagttggacgagcttaaggaagcctttgccaaggtcgacctgaattctaatggcttcatctgtgattacgagctgcacgagctgtttaaggaagcaaatatgccactccctggatataaagtgcgggaaatcatacagaagctcatgctggacggagatcgcaataaagacggcaagattagctttgacgaattcgtctatattttccaggaagttaaatctagcgatatagccaagacattccgcaaggcaattaatagaaaggagggaatttgcgcattagggggaacatccgaactgtcctccgagggcacacaacattcttattccgaagaggagaagtatgccttcgtcaattggataaacaaggctctggaaaacgaccccgactgtcgtcacgtgattcccatgaaccctaatacagacgacctgtttaaggccgtaggagacggaatagtgctttgcaagatgatcaatctgtccgtgccggatacaatcgatgaaagagccattaataaaaagaagcttacaccatttatcatccaggagaatcttaacctggcattgaatagcgcctccgccattggttgtcacgtggtaaacatcggggctgaggacttacgcgccggcaagcctcacctcgtgcttgggctgctctggcagatcataaagatcggcctattcgccgacattgagttgtcaaggaacgaggcgttagcagctttgttaagagatggcgaaacacttgaggaattgatgaagcttagccctgaagagctcctccttaggtgggcaaattttcacctggagaatagtggatggcagaaaatcaataacttttccgctgacatcaaggacagcaaggcttacttccatctactgaaccagattgctcctaagggtcagaaggaaggcgagccacggattgatattaatatgtcagggttcaacgagacagacgacttgaagcgagcagagagtatgctgcaacaagcagacaagctgggctgtaggcaatttgtaacgccagcggacgtggtttctggaaatcctaaactgaatcttgcattcgtagctaatctgttcaataagtacccagctctcaccaaaccagaaaatcaagatattgattggaccctactcgaaggggagactagagaagagcggacctttagaaactggatgaatagcctgggagtcaacccacatgtgaaccatctatacgctgatctgcaagatgccctggtcattctacaactgtatgagcgcattaaagtgcccgtcgattggtctaaggtcaacaagcctccatacccgaaacttggcgctaacatgaaaaagctagaaaattgtaactacgcggtggaacttggaaagcatcctgctaagttttccctggtaggcattgggggacaagacctcaatgatgggaaccagactctgaccctcgctcttgtatggcagttgatgaggaggtacactctgaacgttcttgaagatctgggtgacggacagaaagcgaatgatgatatcatcgtgaattgggtgaacagaactctgagcgaagctgggaaatcaaccagtatacagtcctttaaggacaaaaccattagctcctccctcgccgtggtggaccttatcgatgctatccagccaggatgcataaattacgacctcgttaagtcaggtaacctgactgaggatgacaaacataacaatgctaagtacgccgtttcaatggccaggagaatcggcgcgagagtctacgccctgcctgaagatctggttgaggtaaagcctaagatggtaatgacagtgttcgcgtgcctgatggggcgagggatgaagcgggtgtag

SEQ ID NO: 333052 - DNA, 1893 bp, Artificial Sequence
  derived and/or modified sequence
atggatgagatggccaccacccagatcagcaaggatgagctggatgagctgaaggaggcctttgccaaggtggacctgaacagcaatggcttcatctgtgactatgagctgcacgagctgttcaaggaggccaacatgcccctgcccggctacaaggtgcgggagatcatccagaagctgatgctggatggagacaggaacaaggatggcaagatcagctttgatgaatttgtgtacatcttccaggaggtgaagagcagtgacatcgccaagaccttcaggaaggccatcaacaggaaggagggcatctgtgccctgggcggcaccagcgagctgagcagcgagggcacccagcacagctacagcgaggaggagaagtatgcctttgtgaactggatcaacaaggccctggagaatgaccctgactgcagacatgtgatccccatgaaccccaacacagatgacctcttcaaggctgtgggagatggcatcgtgctgtgcaagatgatcaacctgtctgtgcctgacaccattgatgagcgggccatcaacaagaagaagctgacccccttcatcatccaggagaacctgaacctggccctgaacagcgccagcgccatcggctgccacgtggtgaacatcggggctgaggacctgcgggccggcaagccccacctggtgctgggcctgctgtggcagatcatcaagattggcctgtttgctgacatcgagctgagcagaaatgaggccctggccgccctgctgagagatggagagaccctggaggagctgatgaagctgagccctgaggagctgctgctgcgctgggccaacttccacctggagaacagcggctggcagaagatcaacaacttctctgctgacatcaaggacagcaaggcctacttccacctgctgaaccagatcgcccccaagggccagaaggagggggagcccagaattgacatcaacatgagcggcttcaatgaaacagatgacctgaagagagctgagagcatgctgcagcaggccgacaagctgggctgccggcagtttgtgaccccagcagatgtggtgtctggcaaccccaagctgaacctggcctttgtggccaacctcttcaacaagtacccagccctgaccaagccagagaaccaggacatcgactggaccctgctggagggggagacccgggaggagaggaccttcaggaactggatgaacagcctgggcgtgaacccccacgtgaaccacctgtatgctgacctgcaggatgccctggtgatcctgcagctgtatgagcgcatcaaggtgcctgtggactggagcaaggtgaacaagccaccctaccccaagctgggcgccaacatgaagaagctggagaactgcaactatgctgtggagctgggcaagcacccagccaagttcagcctggtgggcattggaggccaggacctgaatgatggcaaccagaccctgaccctggccctggtgtggcagctgatgaggcgctacaccctgaatgtgctggaggacctgggagatggccagaaggccaatgatgacatcatcgtgaactgggtgaacagaaccctgtctgaggccggcaagagcaccagcatccagagcttcaaggacaagaccatcagcagcagcctggccgtggtggacctgattgatgccatccagcccggctgcatcaactatgacctggtgaagagcggcaacctgacagaagatgacaagcacaacaatgccaagtatgctgtgtccatggcccggcgcatcggggcccgggtgtatgccctgcctgaggacctggtggaggtgaagcccaagatggtgatgacagtgtttgcctgcctgatgggccggggcatgaagagggtgtag

SEQ ID NO: 333053 - DNA, 1893 bp, Artificial Sequence
  derived and/or modified sequence
atggacgagatggccaccacccagatcagcaaggacgagctggacgaacttaaggaggccttcgctaaggtggacctgaacagcaatggatttatttgtgattatgaacttcatgaactgttcaaagaggcgaacatgcctcttcccggatacaaggtcagagagattattcagaagctaatgctggacggcgatcgcaataaggatggcaagatatcattcgacgagtttgtttatatcttccaggaggtgaagagcagcgatatcgcaaaaacattccgtaaagcaattaatagaaaagaagggatatgtgctctgggaggaacttccgagttgagcagcgaaggcacacagcattcctattctgaggaggagaagtacgcctttgtgaactggattaataaggctctcgaaaacgaccccgactgcagacacgtgatccccatgaatcccaacactgacgatctcttcaaagcggtgggcgatggcatagtcctgtgcaagatgataaatttgagcgtgcctgacacaattgacgaaagggccattaacaaaaagaagttgacaccctttatcatccaggaaaacctgaacttggctctgaattccgcatctgcaattgggtgtcacgttgttaatataggcgccgaggatctgcgggcaggaaagcctcatctcgtcttagggttactgtggcagattatcaaaatcgggctgttcgccgatattgaactctcccgcaatgaggccctcgcagcacttctgagggacggagagacactggaagagttaatgaaattaagccctgaagagctactgttgcgctgggcaaactttcacctcgaaaactctggttggcaaaaaattaataatttcagtgccgacataaaagatagcaaggcatattttcaccttctgaatcagatcgctccgaaagggcagaaggagggtgagcccagaattgacatcaacatgagcggctttaatgaaactgatgacctcaagcgtgctgaatctatgctacagcaggccgataaactgggatgtagacagtttgtgactcccgctgatgtggtctccggcaatcccaaattgaatctggccttcgttgctaacttgtttaacaagtacccagcccttaccaaacctgaaaatcaggacatagactggacattattagagggagaaacccgtgaggagcggacatttcggaattggatgaactcgttaggggtcaaccctcacgtcaaccatctgtacgctgacttgcaagatgctctcgtgatcctgcagctgtatgagaggatcaaggtgccagtcgactggagcaaggttaacaagccaccttacccgaagctgggagctaacatgaaaaaactggagaactgtaactatgccgtcgaactgggaaagcaccctgccaagttttctctcgtcggcataggtggtcaagacctgaacgatgggaatcagactttgactcttgcattggtgtggcagctcatgagaaggtacaccctcaacgtcctggaggatttaggggacggccagaaggccaacgacgacatcatagtgaattgggtgaatcggactctatccgaggccggtaagagtacatctatccagtctttcaaggacaagactatctcttctagtctcgcagtggtggacctaattgatgcaatccaacccggctgtatcaattacgacctggtcaaaagtggcaacctaactgaagacgacaaacacaataatgcaaaatatgctgtgagtatggcaaggagaattggggctagagtttacgccctgccggaggatttggtggaggtgaagccgaaaatggtaatgacggtgttcgcgtgtttaatgggaaggggaatgaaacgggtctag

SEQ ID NO: 333054 - DNA, 3327 bp, Artificial Sequence
  derived and/or modified sequence
gacttgctctctaaagttgcaattgtaagaagaatgttgggtttccagattgctcttctgggcgtgggagaaggttctgtctatcagtgctgcgagaaaggaaagaaacaagtttgctctcagcggatctttaaatggatgagatggctaccactcagatttccaaagatgagcttgatgaactcaaagaggcctttgcaaaagttgatctcaacagcaacggattcatttgtgactatgaacttcatgagctcttcaaggaagctaatatgccattaccaggatataaagtgagagaaattattcagaaactcatgctggatggtgacaggaataaagatgggaaaataagttttgacgaatttgtttatatttttcaagaggtaaaaagtagtgatattgccaagaccttccgcaaagcaatcaacaggaaagaaggtatttgtgctctgggtggaacttcagagttgtccagcgaaggaacacagcattcttactcagaggaagaaaaatatgcttttgttaactggataaacaaagctttggaaaatgatcctgattgtagacatgttataccaatgaaccctaacaccgatgacctgttcaaagctgttggtgatggaattgtgctttgtaaaatgattaacctttcagttcctgataccattgatgaaagagcaatcaacaagaagaaacttacacccttcatcattcaggaaaacttgaacttggcactgaactctgcttctgccattgggtgtcatgttgtgaacattggtgcagaagatttgagggctgggaaacctcatctggttttgggactgctttggcagatcattaagatcggtttgttcgctgacattgaattaagcaggaatgaagccttggctgctttactccgagatggtgagactttggaggaacttatgaaattgtctccagaagagcttctgcttagatgggcaaactttcatttggaaaactcgggctggcaaaaaattaacaactttagtgctgacatcaaggattccaaagcctatttccatcttctcaatcaaatcgcaccaaaaggacaaaaggaaggtgaaccacggatagatattaacatgtcaggtttcaatgaaacagatgatttgaagagagctgagagtatgcttcaacaagcagataaattaggttgcagacagtttgttacccctgctgatgttgtcagtggaaaccccaaactcaacttagctttcgtggctaacctgtttaataaatacccagcactaactaagccagagaaccaggatattgactggactctattagaaggagaaactcgtgaagaaagaaccttccgtaactggatgaactctcttggtgtcaatcctcacgtaaaccatctctatgctgacctgcaagatgccctggtaatcttacagttatatgaacgaattaaagttcctgttgactggagtaaggttaataaacctccatacccgaaactgggagccaacatgaaaaagctagaaaactgcaactatgctgttgaattagggaagcatcctgctaaattctccctggttggcattggagggcaagacctgaatgatgggaaccaaaccctgactttagctttagtctggcagctgatgagaagatataccctcaatgtcctggaagatcttggagatggtcagaaagccaatgacgacatcattgtgaactgggtgaacagaacgttgagtgaagctggaaaatcaacttccattcagagttttaaggacaagacgatcagctccagtttggcagttgtggatttaattgatgccatccagccaggctgtataaactatgaccttgtgaagagtggcaatctaacagaagatgacaagcacaataatgccaagtatgcagtgtcaatggctagaagaatcggagccagagtgtatgctctccctgaagaccttgtggaagtaaagcccaagatggtcatgactgtgtttgcatgtttgatgggcaggggaatgaagagagtgtaaaataaccaatctgaataaaacagccatgctcccaggtgcatgattcgcaggtcagctatttccaggtgaagtgcttatggcttaaggaactcttggccattcaaaggacttttcattttgattaacaggactagcttatcatgagagccctcaggggaaagggtttaagaaaaacaactcctctttcccatagtcagagttgaatttgtcaggcacgcctgaaatgtgctcatagccaaaacattttactctctcctcctagaatgctgcccttgacatttcccattgctgtatgttatttcttgctctgttatcttttgccctcttagaatgtccctctcttgggacttgcttagatgatgggatatgaatattattagacagtaattttgctttccatccagtatgctagttcttattcgagaactatggtcagagcgtatttggatatgagtatcctttgcttatctttgtagtactgaaaatttgccgaagtaactggctgtgcagaatgtaatagaagcttttcttattcttttattcttaagatcagtatctttttacagtattctttctacatgatccttttttgtacatttaagaatattttgattatattaaacaagactgctgattttgctactttttttaaggggtcttcaagtaagtaaaacatacatcgtagctagaagaaaaatgtaccttaaatttgcatcttccctctcatacccaagctgtaaacaattgaaatattttgtcttaaatcacttggttcaatacatgcttatttgttttaaaacctgtatcatcaaactctctctctaaatttaaaatgctgttgaatatgatacttttgaggagagagtgtgctcagaacttagacgggatttggtaggccaagtatgctaagtgtacaatatattttttaattttacacctgaaacaaagaaatgtggtcactaaaaataaaagtatatatgtaggaattaatgtactcttgctttgtcaagctgtttgctatagtttccaaggtattatgttactctaactctgaaaagtgatgtaatctggtagcaatgtagtagttcaaataaaggcatttacataataattagtctgttcttcatgcttttgtctcttaggaagtatgccaatgtttgtcaggatttttttctttttgtttttctgatgtattctgtaaaatggtgtttgttaaatttgagttttgggagctgaattagaggtactgaattaaggacagtacaaatgaagtaaaaaggttttctccaatttaccaaaa

SEQ ID NO: 333055 - DNA, 1893 bp, Artificial Sequence
  derived and/or modified sequence
atggatgagatggccacaactcagattagtaaagacgaactggacgaattaaaggaggccttcgcgaaagtcgacctcaacagcaatggatttatatgcgattacgagctccatgagttatttaaagaagccaacatgccacttcctgggtacaaagttagggagattattcagaagctcatgttggatggagatcgcaataaggatggcaaaattagttttgacgagtttgtctatatttttcaggaggttaaaagtagcgatatagctaagacatttaggaaggcaatcaataggaaggagggaatctgtgccctgggcggaactagtgagctgagcagcgaaggtactcagcattcgtactcagaggaggagaagtatgctttcgtgaattggattaacaaggccctcgagaatgacccggactgccgtcatgtaatccccatgaaccctaacaccgatgaccttttcaaggccgttggggacggaatcgttctctgtaaaatgatcaacctgtctgtgcccgatactatcgacgaacgagcgattaacaaaaagaaactgactccgtttatcattcaggagaacctgaatcttgctctgaatagcgcctctgccatcgggtgtcacgtcgtaaacatcggtgccgaagatctccgcgctggcaaaccacacttggtccttggattgttatggcaaattatcaaaatcggactgtttgcagatatcgagctgagccgcaatgaggccctggccgcactgctccgcgacggcgaaacgctggaagaactgatgaaacttagtcccgaggagctcctcctgcggtgggctaacttccacttggagaattctggttggcagaaaatcaacaatttttccgctgacatcaaagatagcaaagcatacttccacctgctgaaccaaatcgcccctaagggccaaaaggagggcgaacctaggattgacataaacatgagcggctttaatgaaaccgatgatttgaaacgcgctgaaagtatgctccagcaggccgacaagctcggatgcaggcagttcgtgacccctgccgatgtagttagtggcaaccccaaactgaacctggcttttgtggctaatctatttaacaagtaccctgctctcacaaaacccgaaaatcaagacatcgactggacactactggaaggggagacgcgagaggaaaggacctttagaaactggatgaactccctaggtgtgaacccacatgtaaaccacctgtacgccgacctgcaggatgcactggtgatcctgcaattgtatgagaggattaaggtgccagtagattggagtaaggtgaacaagccgccatatccgaagctgggcgcaaacatgaaaaagctcgagaattgtaattatgctgtggagctcggtaaacaccctgccaagtttagtctggttggaattggcggacaggacctcaacgacggcaatcagaccctcacactagcactggtgtggcagttgatgagacgctatactttaaatgtgttggaggatttaggagatggccaaaaggccaacgacgatattattgtcaattgggttaataggaccttgtccgaagctggaaagtcaactagcatccagagttttaaggataagaccattagctcctccctggcagtggtggacctgatcgacgcaatccaacccggttgcattaactacgaccttgtgaaaagtggcaatctgacagaggacgataaacataataatgctaagtacgctgtttccatggctcgcaggatcggcgcacgggtgtatgccctgcctgaagacctggttgaagtgaagcccaaaatggtcatgacagtgtttgcctgtctcatggggagagggatgaagagggtttag

SEQ ID NO: 333056 - DNA, 1893 bp, Artificial Sequence
  derived and/or modified sequence
atggatgaaatggccactactcagatttctaaagacgaactggacgagctcaaagaagcattcgccaaggtggatctgaattcgaatggttttatctgcgattacgaacttcatgagctgttcaaagaagccaatatgcctctgccaggctacaaggtccgggagatcatccagaaactaatgctggatggcgaccggaataaggatggcaagatcagttttgacgagtttgtttatatttttcaagaagtcaagagttcggatatagcaaagaccttcaggaaagctatcaaccgtaaggaaggcatttgtgctctcggtgggacatccgaactgtcttctgaagggacccaacacagctattccgaagaagagaagtatgcctttgtgaactggatcaacaaggcactagaaaatgaccctgattgcagacacgttataccgatgaaccccaacaccgacgatttgttcaaggctgtgggagatgggatcgttctctgcaagatgataaaccttagtgtccctgacacgatcgacgagcgggctattaataaaaagaaattgacaccattcatcattcaggagaacctcaacctagcgctgaattctgcctctgcaatcggatgtcatgtggttaatatcggagccgaggatctccgagccggtaagcctcaccttgttctgggccttttatggcagattattaagattgggctcttcgccgatatcgaattgagtcgtaacgaggcattggcagccttactgagagacggggagacgctagaggagctgatgaagctctcacctgaagagctgctcctgagatgggccaactttcatctcgaaaacagcgggtggcagaaaatcaacaactttagtgctgacataaaggattcaaaggcgtattttcatttgctgaaccagatcgctccaaagggccagaaagagggagagcctcgcatcgacattaacatgtctggttttaacgagaccgacgatctgaagagagcagaatcgatgctccaacaggccgacaaactgggctgtagacagttcgtcacccccgcagatgttgtcagtgggaacccaaagctcaacctggccttcgtggcaaatctgtttaataagtatcctgccctgacgaaacctgagaaccaggatattgactggactttactggaaggcgagacacgggaggagcggacatttagaaactggatgaacagtctgggagtgaatccacacgtcaaccatttgtatgcagatctgcaagatgccttagttatcttacagttatacgagagaatcaaggtccccgtggactggtccaaagtaaataagccaccatacccgaagctgggagctaacatgaagaagctggaaaattgcaactacgcggtcgagctgggcaaacatccagcaaagtttagcctggtcggcataggtggccaagacctgaatgatgggaaccagacgcttacactcgcgttagtttggcagttgatgcggagatataccctgaatgttcttgaggacctcggagacggacagaaggcaaacgatgacataatagtcaattgggtgaatcgcaccctcagtgaagcaggtaaatccaccagcatccagtctttcaaggataagacgatatcaagctcattggcagtggttgacctcattgacgctatccagccaggctgtatcaattatgacctcgtcaagtccggtaatttgactgaggatgacaagcacaacaacgctaaatatgcagtaagtatggcaagacgcatcggggctcgtgtttacgcactacctgaagatctggttgaggttaagcctaaaatggtgatgaccgtgttcgcctgtctcatgggacgcggaatgaagcgagtatag

SEQ ID NO: 333057 - DNA, 1893 bp, Artificial Sequence
  derived and/or modified sequence
atggatgagatggctacaacacagatcagtaaggatgagctggatgaactgaaggaagcatttgcgaaagttgatctgaattcgaacggcttcatatgcgactatgagctgcatgagttgttcaaggaggctaatatgcccctccccggctacaaagtccgagaaatcatccagaagctgatgttggatggagacagaaataaagacggaaagatctcgttcgatgagttcgtgtatatctttcaagaggtaaagtcaagcgatattgccaaaacctttcgtaaagccattaatagaaaggagggtatttgtgcccttggtggcacgtcagaactgagctcagagggcacccagcacagctactcagaggaagagaagtacgctttcgttaactggattaataaagcactggagaatgatccggattgccgacacgtgattccaatgaaccccaacacagatgatttattcaaggcggtcggtgacgggatcgtactgtgtaaaatgattaatctgagtgtgcctgacacaatcgatgagagagctattaataagaaaaagctcacacccttcatcattcaggagaatctaaacctagcactgaatagcgcttctgcaataggctgccatgtcgtcaacattggcgccgaggatctgagggccggcaagccacatctggttctgggccttctgtggcagattatcaaaataggattgttcgctgatatcgagctgtcgaggaatgaggctctggctgccctgctgagggatggtgaaactctggaggaattgatgaagttgagccctgaggagcttctgctgagatgggctaactttcacctcgagaactccggctggcagaagatcaataatttctctgctgatatcaaagactccaaagcctactttcacttactgaaccagattgcccctaagggccagaaggagggagagccacgcattgatatcaatatgtccggtttcaacgagactgatgatttgaaacgggcggagagcatgctccagcaagccgataaattagggtgcagacagtttgtgacaccagctgacgtcgtatcggggaacccaaagctaaacctggcattcgttgctaatctcttcaataagtacccggccctgactaagcccgagaatcaggacattgattggaccctgctggaaggcgagacaagagaagaaagaaccttcagaaattggatgaatagtcttggcgtaaacccacacgtgaaccatctatatgcagacctgcaggacgcactggtgatcctccaactatacgagcgaatcaaagttcccgtggactggtcaaaggtgaataaaccgccttacccaaaactgggggccaatatgaagaaactggaaaactgtaactacgctgtggaactgggaaaacaccctgcaaaattttcacttgttggtatcggtggacaggatctgaacgacgggaaccaaacactcaccctggcactcgtatggcagctaatgagaagatataccctaaacgttttagaagatctcggagacggtcagaaggccaacgatgatattatagttaactgggtgaatcggacgcttagtgaagcaggcaaatccacctccatccagtcctttaaggacaagactatctccagcagcctggccgtcgtggatctgatcgacgcaatccagcccgggtgtataaattacgacttggtgaaaagcgggaatcttaccgaggatgacaagcacaataatgccaaatacgcagttagcatggcgcggagaatcggtgcaagagtttatgcattgcccgaagacctcgtcgaggtaaagcctaaaatggtgatgacagtgtttgcttgcttaatgggccggggtatgaaaagggtttag

SEQ ID NO: 333058 - DNA, 1893 bp, Artificial Sequence
  derived and/or modified sequence
atggacgagatggccaccacccagatcagcaaggacgagctggacgaacttaaagaagcctttgctaaggtagatctgaactccaatggctttatatgcgattacgagctgcatgagctgttcaaggaagccaacatgcccctccccggatataaggtgcgcgagatcattcaaaagttgatgctggatggggacaggaataaggatggaaaaatcagttttgatgagtttgtctacatctttcaggaagtgaagtcttcagacatcgcaaaaacattccggaaagctatcaaccggaaggaaggaatctgcgctctgggtggcaccagcgaactgtcctccgagggtactcaacacagctacagtgaggaggaaaaatacgccttcgtgaactggattaacaaggctctggagaacgaccctgattgtcgccacgttatccccatgaaccccaacactgacgatctgttcaaagctgtcggggatggaattgtgctgtgcaagatgattaacctgagcgtgcctgacaccatcgacgagcgcgcaatcaacaagaagaaacttaccccctttatcattcaagagaatctgaacctggccctgaattctgcctctgccattggctgccacgttgttaacatcggcgctgaagatctgcgggccgggaagccacacctcgtgctgggccttttatggcagatcattaagatcggactctttgccgatatcgagcttagtcgcaacgaagcacttgccgctctccttcgcgatggagaaaccctcgaagagctgatgaagctttctcccgaggagctgttgctcagatgggctaattttcatctcgagaactctgggtggcagaagatcaataacttttccgcagacattaaggacagtaaagcttacttccacctgctgaatcagatagcacctaagggacagaaagaaggggagccacgcattgatataaacatgtccgggtttaacgagaccgacgatctgaaacgggccgaatctatgctgcagcaggccgacaaactcgggtgccgacagtttgtcacccccgcggacgtggtgtctggcaatccaaaactgaatctcgcctttgtggccaatttgtttaacaagtatcctgcgcttactaagcctgagaaccaggatattgattggaccttgctagaaggcgaaacgcgtgaagagcgtacctttaggaattggatgaatagcctaggagtaaatccacacgtgaaccatctgtatgctgacctgcaagacgcactggttatcctccagctgtacgaacggatcaaggtgccggtcgactggtccaaggtcaacaagcctccgtatcctaagctgggggccaacatgaagaaactggaaaactgcaactatgccgttgaactgggtaagcatccagctaaattttcattagtgggcatcggcggacaggatctgaacgatggaaatcagaccctgaccttggcgctcgtctggcagttgatgaggaggtataccttaaatgtgctggaggacctgggtgacggacagaaggccaatgacgatattattgtcaactgggtgaatcgtaccctgagcgaggccggaaaatctactagcatccaaagcttcaaggacaaaacgattagcagctcactggcagtggtcgatttgatcgacgcgattcagcctggttgcattaattacgaccttgtcaaatccggaaacctgactgaggacgataaacacaacaatgcaaagtacgctgtctcaatggccagacgcatcggcgctcgagtctatgccctgcctgaagatctggttgaggtaaaacctaaaatggtcatgactgtctttgcatgtcttatgggcagagggatgaaacgggtctag

SEQ ID NO: 333059 - DNA, 1893 bp, Artificial Sequence
  derived and/or modified sequence
atggacgagatggccaccacccagatcagcaaggacgagctggacgagttaaaggaggcattcgccaaagtcgatctgaacagcaatggatttatctgcgactacgaactccacgagttgttcaaggaagctaacatgcccttaccagggtacaaggtgcgcgagataatccagaaactcatgcttgacggagacaggaataaggacgggaagatcagttttgatgagttcgtgtatattttccaggaagtgaaatcttctgacatcgctaagacctttcgtaaggcaattaatcggaaggagggaatctgcgcactaggcggcaccagcgaattaagctccgaggggacacagcatagctacagcgaggaagaaaaatacgctttcgtgaactggattaataaagccttggaaaacgatcctgactgccgacatgtgataccaatgaatccgaacacagatgatttgtttaaggccgtgggagatgggatcgtcctgtgtaagatgatcaacctgagcgttcccgatactattgacgagagagctattaacaagaagaagctcaccccttttattattcaagaaaatctcaatttggcactgaattctgcatcggctatcggctgtcacgtcgtaaatattggggccgaggatcttcgtgctggcaagcctcacctagtgcttggactgctatggcagatcatcaagatcgggcttttcgccgacatcgaactgtcccggaatgaagccttggccgccctattaagggatggcgagacactcgaagaacttatgaagttatctcccgaggagctgctcctgaggtgggcaaactttcacctggagaacagtggctggcagaaaataaacaacttctccgccgacattaaggacagcaaggcttactttcacttactgaatcagattgcacctaagggacagaaggagggcgaaccacggatcgatatcaacatgtcaggttttaacgaaacagacgatctgaagcgtgccgagtctatgctgcagcaagccgacaaactcgggtgtagacagtttgtcacgccagccgatgtggtgagcgggaaccccaagcttaatctggcatttgttgcgaacctatttaacaaataccctgcactgacaaagcctgaaaatcaagacatcgactggactctgctggagggtgagacccgagaagagcgcaccttccgcaattggatgaactctttaggtgtgaatcctcacgttaatcacctctatgcagacctgcaggacgctttggttattctacagctgtatgagaggattaaagtgcccgtggattggtcaaaggtgaataagccgccctaccctaagttaggagcgaatatgaaaaagctcgagaattgtaattatgccgtcgagctggggaagcacccagcaaagttctcactggtgggaatcggaggacaggatttgaatgatggcaatcagaccctgactctggccttggtgtggcagctaatgcgtaggtacactctgaacgtcctggaagacctgggcgacggtcaaaaagcaaacgacgacataatcgtgaattgggtgaataggactctatctgaggcggggaagtctacctccattcaatcttttaaggataagactatcagctcgtcccttgccgtggtggatctgatagacgctattcagcctggatgcattaactatgacctcgtgaaaagcggcaacctcactgaggacgacaagcacaataatgcaaagtacgccgtgagtatggcccgaagaataggagcacgtgtttacgccttgccagaggatctcgtagaagtgaaaccaaagatggtgatgacagtgtttgcgtgtcttatgggtagaggaatgaagagagtgtag

SEQ ID NO: 333060 - DNA, 3276 bp, Artificial Sequence
  derived and/or modified sequence
aaagattccgaggtgcagaagttgtctgagtgcgttggtcggcggcagtcgggccagacccaggactctgcgactttacatctttaaatggatgagatggctaccactcagatttccaaagatgagcttgatgaactcaaagaggcctttgcaaaagttgatctcaacagcaacggattcatttgtgactatgaacttcatgagctcttcaaggaagctaatatgccattaccaggatataaagtgagagaaattattcagaaactcatgctggatggtgacaggaataaagatgggaaaataagttttgacgaatttgtttatatttttcaagaggtaaaaagtagtgatattgccaagaccttccgcaaagcaatcaacaggaaagaaggtatttgtgctctgggtggaacttcagagttgtccagcgaaggaacacagcattcttactcagaggaagaaaaatatgcttttgttaactggataaacaaagctttggaaaatgatcctgattgtagacatgttataccaatgaaccctaacaccgatgacctgttcaaagctgttggtgatggaattgtgctttgtaaaatgattaacctttcagttcctgataccattgatgaaagagcaatcaacaagaagaaacttacacccttcatcattcaggaaaacttgaacttggcactgaactctgcttctgccattgggtgtcatgttgtgaacattggtgcagaagatttgagggctgggaaacctcatctggttttgggactgctttggcagatcattaagatcggtttgttcgctgacattgaattaagcaggaatgaagccttggctgctttactccgagatggtgagactttggaggaacttatgaaattgtctccagaagagcttctgcttagatgggcaaactttcatttggaaaactcgggctggcaaaaaattaacaactttagtgctgacatcaaggattccaaagcctatttccatcttctcaatcaaatcgcaccaaaaggacaaaaggaaggtgaaccacggatagatattaacatgtcaggtttcaatgaaacagatgatttgaagagagctgagagtatgcttcaacaagcagataaattaggttgcagacagtttgttacccctgctgatgttgtcagtggaaaccccaaactcaacttagctttcgtggctaacctgtttaataaatacccagcactaactaagccagagaaccaggatattgactggactctattagaaggagaaactcgtgaagaaagaaccttccgtaactggatgaactctcttggtgtcaatcctcacgtaaaccatctctatgctgacctgcaagatgccctggtaatcttacagttatatgaacgaattaaagttcctgttgactggagtaaggttaataaacctccatacccgaaactgggagccaacatgaaaaagctagaaaactgcaactatgctgttgaattagggaagcatcctgctaaattctccctggttggcattggagggcaagacctgaatgatgggaaccaaaccctgactttagctttagtctggcagctgatgagaagatataccctcaatgtcctggaagatcttggagatggtcagaaagccaatgacgacatcattgtgaactgggtgaacagaacgttgagtgaagctggaaaatcaacttccattcagagttttaaggacaagacgatcagctccagtttggcagttgtggatttaattgatgccatccagccaggctgtataaactatgaccttgtgaagagtggcaatctaacagaagatgacaagcacaataatgccaagtatgcagtgtcaatggctagaagaatcggagccagagtgtatgctctccctgaagaccttgtggaagtaaagcccaagatggtcatgactgtgtttgcatgtttgatgggcaggggaatgaagagagtgtaaaataaccaatctgaataaaacagccatgctcccaggtgcatgattcgcaggtcagctatttccaggtgaagtgcttatggcttaaggaactcttggccattcaaaggacttttcattttgattaacaggactagcttatcatgagagccctcaggggaaagggtttaagaaaaacaactcctctttcccatagtcagagttgaatttgtcaggcacgcctgaaatgtgctcatagccaaaacattttactctctcctcctagaatgctgcccttgacatttcccattgctgtatgttatttcttgctctgttatcttttgccctcttagaatgtccctctcttgggacttgcttagatgatgggatatgaatattattagacagtaattttgctttccatccagtatgctagttcttattcgagaactatggtcagagcgtatttggatatgagtatcctttgcttatctttgtagtactgaaaatttgccgaagtaactggctgtgcagaatgtaatagaagcttttcttattcttttattcttaagatcagtatctttttacagtattctttctacatgatccttttttgtacatttaagaatattttgattatattaaacaagactgctgattttgctactttttttaaggggtcttcaagtaagtaaaacatacatcgtagctagaagaaaaatgtaccttaaatttgcatcttccctctcatacccaagctgtaaacaattgaaatattttgtcttaaatcacttggttcaatacatgcttatttgttttaaaacctgtatcatcaaactctctctctaaatttaaaatgctgttgaatatgatacttttgaggagagagtgtgctcagaacttagacgggatttggtaggccaagtatgctaagtgtacaatatattttttaattttacacctgaaacaaagaaatgtggtcactaaaaataaaagtatatatgtaggaattaatgtactcttgctttgtcaagctgtttgctatagtttccaaggtattatgttactctaactctgaaaagtgatgtaatctggtagcaatgtagtagttcaaataaaggcatttacataataattagtctgttcttcatgcttttgtctcttaggaagtatgccaatgtttgtcaggatttttttctttttgtttttctgatgtattctgtaaaatggtgtttgttaaatttgagttttgggagctgaattagaggtactgaattaaggacagtacaaatgaagtaaaaaggttttctccaatttacc

SEQ ID NO: 333061 - DNA, 2858 bp, Artificial Sequence
  derived and/or modified sequence
agattgctcttctgggcgtgggagaaggttctgtctatcagtgctgcgagaaaggaaagaaacaagtttgctctcagcggatctttaaatggatgagatggctaccactcagatttccaaagatgagcttgatgaactcaaagaggcctttgcaaaagttgtggagacggagtttcaccgtgttagccaggatggtctcgatctcctgacctcgtgatccgcccgtctcggcctcccaaagtgctgggattacagacgtgagccaccgcgcctggcctacacacatgtatttttaaaacgagagttgcagcaggggaaaaatgatggccaaactgctggaaattttgagtcagaaaaggactgataaacatttttgattgcctggtctcaccctctaaacttgtccagccttctgctgtacttgacctccatctttggaaatccactagtacagtgaattctaaagcagcaacctccagtctacccttagctggaactcattaaactgcctcttatatttgctgcagtgagctacctcaaaagatctcaacagcaacggattcatttgtgactatgaacttcatgagctcttcaaggaagctaatatgccattaccaggatataaagtgagagaaattattcagaaactcatgctggatggtgacaggaataaagatgggaaaataagttttgacgaatttgtttatatttttcaagaggtaaaaagtagtgatattgccaagaccttccgcaaagcaatcaacaggaaagaaggtatttgtgctctgggtggaacttcagagttgtccagcgaaggaacacagcattcttactcagaggaagaaaaatatgcttttgttaactggataaacaaagctttggaaaatgatcctgattgtagacatgttataccaatgaaccctaacaccgatgacctgttcaaagctgttggtgatggaattgtgctttgtaaaatgattaacctttcagttcctgataccattgatgaaagagcaatcaacaagaagaaacttacacccttcatcattcaggaaaacttgaacttggcactgaactctgcttctgccattgggtgtcatgttgtgaacattggtgcagaagatttgagggctgggaaacctcatctggttttgggactgctttggcagatcattaagatcggtttgttcgctgacattgaattaagcaggaatgaagccttggctgctttactccgagatggtgagactttggaggaacttatgaaattgtctccagaagagcttctgcttagatgggcaaactttcatttggaaaactcgggctggcaaaaaattaacaactttagtgctgacatcaaggattccaaagcctatttccatcttctcaatcaaatcgcaccaaaaggacaaaaggaaggtgaaccacggatagatattaacatgtcaggtttcaatgaaacagatgatttgaagagagctgagagtatgcttcaacaagcagataaattaggttgcagacagtttgttacccctgctgatgttgtcagtggaaaccccaaactcaacttagctttcgtggctaacctgtttaataaatacccagcactaactaagccagagaaccaggatattgactggactctattagaaggagaaactcgtgaagaaagaaccttccgtaactggatgaactctcttggtgtcaatcctcacgtaaaccatctctatgctgacctgcaagatgccctggtaatcttacagttatatgaacgaattaaagttcctgttgactggagtaaggttaataaacctccatacccgaaactgggagccaacatgaaaaagctagaaaactgcaactatgctgttgaattagggaagcatcctgctaaattctccctggttggcattggagggcaagacctgaatgatgggaaccaaaccctgactttagctttagtctggcagctgatgagaagatataccctcaatgtcctggaagatcttggagatggtcagaaagccaatgacgacatcattgtgaactgggtgaacagaacgttgagtgaagctggaaaatcaacttccattcagagttttaaggacaagacgatcagctccagtttggcagttgtggatttaattgatgccatccagccaggctgtataaactatgaccttgtgaagagtggcaatctaacagaagatgacaagcacaataatgccaagtatgcagtgtcaatggctagaagaatcggagccagagtgtatgctctccctgaagaccttgtggaagtaaagcccaagatggtcatgactgtgtttgcatgtttgatgggcaggggaatgaagagagtgtaaaataaccaatctgaataaaacagccatgctcccaggtgcatgattcgcaggtcagctatttccaggtgaagtgcttatggcttaaggaactcttggccattcaaaggacttttcattttgattaacaggactagcttatcatgagagccctcaggggaaagggtttaagaaaaacaactcctctttcccatagtcagagttgaatttgtcaggcacgcctgaaatgtgctcatagccaaaacattttactctctcctcctagaatgctgcccttgacatttcccattgctgtatgttatttcttgctctgttatcttttgccctcttagaatgtccctctcttgggacttgcttagatgatgggatatgaatattattagacagtaattttgctttccatccagtatgctagttcttattcgagaactatggtcagagcgtatttggatatgagtatcctttgcttatctttgtagtactgaaaatttgccgaag

SEQ ID NO: 333062 - DNA, 1893 bp, Artificial Sequence
  derived and/or modified sequence
atggacgagatggctacaacccagatttcaaaggacgaactggatgagctgaaagaagcctttgccaaggtcgatctgaactctaatgggttcatctgtgattacgagcttcatgagttgttcaaggaagccaacatgccactgccgggatataaggtgagggagatcatacagaagctgatgttagacggcgaccgaaataaggatggaaaaatttcctttgacgagttcgtgtatatattccaagaagtgaagtccagcgatattgctaaaacgtttcggaaggccatcaaccgaaaggagggaatttgcgccctgggcggtaccagtgaattatccagcgagggcacccagcatagctactcagaggaagaaaaatacgccttcgtaaactggattaacaaggctcttgagaacgatcctgactgccgccacgtgataccaatgaatccaaatacagatgatttgtttaaagcagtgggagatggaatcgttttatgcaaaatgatcaatctgtccgttccagataccattgacgagcgtgctatcaataaaaaaaagttaaccccatttattatccaggagaatttgaacctggctctgaatagcgccagtgccatcggatgtcacgtagtgaatattggcgcagaggatcttcgagctggcaaacctcatctcgtgttgggcttgctctggcagattattaagatcggtttgtttgccgacatcgagctaagccggaatgaggccctggctgccttactgagggatggggagaccctggaggagttgatgaaactcagcccagaagaacttctcctgcggtgggccaacttccacctggaaaactcaggctggcagaagataaacaacttcagcgccgatataaaggacagcaaggcctattttcacttactgaatcagatagcacctaagggacagaaggaaggcgagccaagaatcgacataaacatgtcaggttttaatgaaacagatgatctgaagcgtgccgagtctatgttgcagcaagccgataaacttggttgcaggcagttcgtgacgcccgcagacgtggtgtccggcaaccctaagcttaacctagcttttgtcgccaatcttttcaataagtacccagctttgaccaaacctgagaatcaagacattgattggactctccttgaaggggagacccgcgaagagcgcacttttaggaattggatgaactctctgggcgtcaacccccatgtcaatcatctgtatgccgatctccaggacgcgctcgtaattctgcagttgtacgagagaatcaaagttcctgtagattggtcgaaggtgaacaaaccaccatatccaaagctcggcgcaaatatgaagaagctcgagaattgcaattatgccgtagaactcgggaaacatccagctaagttttccctcgtgggaatcggtgggcaggacctgaacgacggcaaccaaacgctgaccctcgctcttgtgtggcagctgatgagacggtataccctgaacgttctggaggacctgggtgacggccaaaaggccaatgacgacattattgtgaactgggtgaataggactctatcagaggcaggaaagtccacttccatccaatctttcaaagataagacgatcagctcttcccttgccgttgttgacctcatagacgccatccagcctggatgtatcaattacgatcttgtgaagagcggcaacctgacagaggacgacaagcataacaatgccaagtacgccgtgtcgatggctagacgcatcggagccagggtttacgcactgccagaggatctggtcgaggtcaagcccaagatggttatgactgtctttgcttgcctgatgggacgcggaatgaagcgcgtgtag

SEQ ID NO: 333063 - DNA, 1893 bp, Artificial Sequence
  derived and/or modified sequence
atggacgaaatggccacaactcagatctctaaagacgagttagacgaactgaaagaggcgttcgcaaaggtggatcttaactccaacggctttatctgtgattacgagctccacgaactgtttaaggaggccaacatgccactccctggttacaaggtaagagaaatcatccagaaactcatgttagacggtgatagaaataaagacgggaagatttcgttcgatgaattcgtgtacatcttccaggaagttaagagttcagacattgctaagactttcagaaaggcaatcaatcggaaggagggcatctgcgctctaggcggaacaagcgaactgtcctcagaagggacccagcactcatattcagaagaggagaaatacgcatttgttaattggatcaacaaagccttggagaacgatcccgattgtagacacgtgatccccatgaaccccaacacggatgacctgttcaaggctgtcggggatggaattgttctctgcaagatgatcaatttgtccgtcccggacacaattgacgaacgagccatcaataaaaagaagttgacaccttttattatccaggagaatcttaatcttgcgctcaactctgcctctgctattgggtgtcatgtggtaaacattggggctgaggacctccgggcaggcaagccacatttggtgctgggactcctgtggcagattatcaagattggcctgttcgctgacattgaactttccagaaatgaggcattggccgctctactccgagacggagagaccctcgaagaattgatgaagctgtcccccgaggagttgctgctgaggtgggcgaatttccacctggaaaactctggctggcaaaaaattaacaacttttcggccgacatcaaagactctaaggcctacttccacctcctaaatcagattgccccaaagggccaaaaagagggggaacctaggattgacattaatatgagtggatttaatgaaacggatgatctgaagcgagccgagtcaatgctgcagcaggcagacaagctcgggtgccggcagtttgtgactcccgctgacgtggtttcagggaaccctaaattgaatctggccttcgtcgccaacctttttaacaaataccctgccctgactaagcccgaaaaccaggacatcgattggactttactagagggcgagacccgggaagaaagaactttcagaaactggatgaactctctcggagtcaatccacacgttaaccatctttacgctgacctacaagatgcattggtgatcctgcagctctacgagcgcataaaggtaccggtggactggagtaaagtgaacaagccaccatatcctaagctgggcgcaaacatgaaaaagctcgaaaattgcaattatgccgtggagctgggtaagcaccccgcaaagttcagcctggtcggcatcgggggtcaggatctgaatgacggaaaccaaacactcaccctggccctggtctggcaactgatgaggcggtacacactgaacgtcctggaggacttgggtgatggccagaaagcaaacgacgatattatagttaactgggtaaaccgaacactaagcgaggccggaaagtctacttcaatacagagttttaaggataagactatatcgagttccctggccgttgttgacctaatagacgccatccagccaggttgcattaactacgatctggtaaaatcaggaaacctgaccgaggatgataaacacaacaacgcgaagtacgctgtatcaatggcaagacggatcggggctcgggtatatgcgctcccagaggatctcgtcgaggtcaagcccaagatggtcatgaccgttttcgcctgtctcatgggcaggggaatgaaacgggtttag

SEQ ID NO: 333064 - protein, 289 aa, Artificial Sequence
  derived and/or modified sequence
MKLIILEHYSQASEWAAKYIRNRIIQFNPGPEKYFTLGLPTGSTPLGCYKKLIEYYKNGDLSFKYVKTFNMDEYVGLPRDHPESYHSFMWNNFFKHIDIHPENTHILDGNAVDLQAECDAFEEKIKAAGGIELFVGGIGPDGHIAFNEPGSSLVSRTRVKTLAMDTILANARFFDGELTKVPTMALTVGVGTVMDAREVMILITGAHKAFALYKAIEEGVNHMWTVSAFQQHPRTVFVCDEDATLELKVKTVKYFKGLMLVHNKLVDPLYSIKEKETEKSQSSKKPYSD

SEQ ID NO: 333065 - protein, 255 aa, Artificial Sequence
  derived and/or modified sequence
MKLIILEHYSQASEWAAKYIRNRIIQFNPGPEKYFTLGLPTGLPRDHPESYHSFMWNNFFKHIDIHPENTHILDGNAVDLQAECDAFEEKIKAAGGIELFVGGIGPDGHIAFNEPGSSLVSRTRVKTLAMDTILANARFFDGELTKVPTMALTVGVGTVMDAREVMILITGAHKAFALYKAIEEGVNHMWTVSAFQQHPRTVFVCDEDATLELKVKTVKYFKGLMLVHNKLVDPLYSIKEKETEKSQSSKKPYSD

SEQ ID NO: 333066 - protein, 138 aa, Artificial Sequence
  derived and/or modified sequence
MKLIILEHYSQASEWAAKYIRNRIIQFNPGPEKYFTLGLPTGSTPLGCYKKLIEYYKNGDLSFKYVKTFNMDEYVGLPRDHPESYHSFMWNNFFKHIDIHPENTHILDGNAVDLQAECDAFEEKIKAAGGIELFVGGI

SEQ ID NO: 333067 - protein, 29 aa, Artificial Sequence
  derived and/or modified sequence
MKLIILEHYSQASEWAAKYIRNRIIQFNP

SEQ ID NO: 333068 - protein, 161 aa, Artificial Sequence
  derived and/or modified sequence
MKLIILEHYSQASEWAAKYIRNRIIQFNPGPEKYFTLGLPTGSTPLGCYKKLIEYYKNGDLSFKYVKTFNMDEYVGLPRDHPESYHSFMWNNFFKHIDIHPENTHILDGNAVDLQAECDAFEEKIKAAGGIELFVGGIGPDGHIAFNEPGSSLVSRTRVKT

SEQ ID NO: 333069 - protein, 212 aa, Artificial Sequence
  derived and/or modified sequence
MKLIILEHYSQASEWAAKYIRNRIIQFNPGPEKYFTLGLPTGSTPLGCYKKLIEYYKNGDLSFKYVKTFNEPGSSLVSRTRVKTLAMDTILANARFFDGELTKVPTMALTVGVGTVMDAREVMILITGAHKAFALYKAIEEGVNHMWTVSAFQQHPRTVFVCDEDATLELKVKTVKYFKGLMLVHNKLVDPLYSIKEKETEKSQSSKKPYSD

SEQ ID NO: 333070 - DNA, 870 bp, Artificial Sequence
  derived and/or modified sequence
atgaaactaatcatactcgaacattatagccaggcttcggaatgggctgcgaagtatatcaggaacaggatcattcagtttaaccctggccccgaaaagtactttaccctgggcctacctaccggctccacccctctggggtgctacaagaagctcatcgaatattacaaaaacggcgatctctcctttaagtacgttaagaccttcaatatggatgagtacgtcggacttccgcgtgaccatcctgagagctatcacagttttatgtggaacaatttctttaagcacattgatatccaccccgagaacacccatatattggacgggaatgccgtagaccttcaggccgagtgcgacgcattcgaggaaaaaatcaaagccgccggtggcattgaactgttcgtaggaggtataggaccagacggccacatagcattcaatgaacctgggtctagtctggtgtctcggactagagtgaagacactggccatggatacaattctggccaacgcgcgcttcttcgatggtgaactgacaaaggtgccgacgatggctctgacagttggagtgggtactgtcatggatgctcgggaggtcatgattctgatcaccggagctcacaaggctttcgctctgtacaaggcgatcgaggaaggcgtgaaccacatgtggacggtcagcgcctttcagcagcaccctcgaacagtgttcgtatgcgatgaagacgccacattggagctgaaagtaaagaccgtgaagtactttaagggcctcatgctcgtgcataacaaactggtggacccgctctactcaatcaaggagaaggagacagaaaagagccagtccagtaaaaaaccatacagcgattag

SEQ ID NO: 333071 - DNA, 768 bp, Artificial Sequence
  derived and/or modified sequence
atgaagcttattatcctggaacactattctcaggccagcgaatgggccgctaaatacatcaggaatagaatcattcagttcaaccctggtccagaaaagtatttcaccctgggcctgcctaccggtctgccacgagaccacccagagtcttaccactccttcatgtggaataacttcttcaaacacatagatattcatcctgagaacacacacattttggacggtaatgcagtagatctgcaagcagagtgcgatgcttttgaagagaaaataaaggccgctggaggcatagagctgttcgtcggcgggatcggtcccgacggtcacattgcatttaatgagcccggatcgtctttggtgtctcggacgagggtgaagacccttgcgatggacaccattttagccaatgcccggttttttgatggggagttaacaaaagtcccaaccatggctttgaccgtcggagttggcacagtcatggatgctagggaagttatgatactgattaccggagcgcacaaggccttcgcgttatataaggcaattgaggaaggtgttaaccatatgtggacagtctctgcattccaacagcacccccggactgtcttcgtgtgtgacgaggacgcgacgctggagctcaaagtaaagacggttaagtactttaagggtctcatgttagtgcataacaagctggttgacccactctattcgattaaggagaaggaaaccgaaaaatcccaaagtagcaagaaaccatactcagactag

SEQ ID NO: 333072 - DNA, 870 bp, Artificial Sequence
  derived and/or modified sequence
atgaaactgataatccttgaacattattcccaggcctctgagtgggcagccaagtacatacggaatcgaattattcagttcaatcctggaccggagaagtactttactctaggactgcctacaggaagcacacctctcgggtgctataagaaactgatcgaatattacaagaacggcgacctctcattcaagtatgtaaaaacgttcaacatggacgaatacgtcggcctgccgcgcgatcatcccgagtcgtaccattcctttatgtggaataactttttcaaacatatcgacatccaccctgagaatacacacattctcgacggcaacgcagtcgaccttcaagcagagtgcgacgctttcgaggagaaaatcaaggctgccggaggtattgaactgttcgtagggggtatcggacctgacggtcacattgccttcaatgagccaggatcctccctggtgtccaggaccagggtaaagacccttgccatggacacaattctggctaacgcccgcttttttgatggtgagttgacgaaagtgcctactatggctctgaccgtgggagtggggacagtcatggacgcccgcgaggtaatgatattgatcactggagcccacaaggcttttgccttatacaaagcgatcgaagaaggggtaaaccatatgtggaccgtttctgccttccaacagcatccccgcacagtgtttgtctgcgatgaagacgccacgttagagcttaaggtgaaaacagtgaagtacttcaaaggtctaatgctggtgcacaataaactcgtggaccctttatactcaatcaaagagaaagagaccgaaaaaagtcaatctagcaaaaagccctattccgactag

SEQ ID NO: 333073 - DNA, 417 bp, Artificial Sequence
  derived and/or modified sequence
atgaaactgataatcttggagcactacagccaagcatcagaatgggccgccaaatatattcgcaaccgtatcatccagtttaatcctggccccgagaagtacttcaccctgggtctgccaaccggatctacccctctggggtgctacaaaaagctgatcgagtattataaaaatggagacttgtcgtttaagtacgtaaaaacattcaacatggatgaatacgtcggattaccccgagatcatcccgaaagttaccatagcttcatgtggaataatttttttaagcatatcgacatccaccccgaaaatactcacatactagacgggaacgctgtcgacttgcaggccgagtgtgacgctttcgaggaaaagattaaagccgctggaggaattgagttgtttgtgggagggatatag

SEQ ID NO: 333074 - DNA, 870 bp, Artificial Sequence
  derived and/or modified sequence
atgaaattgattattttggaacattactcccaggcgtccgagtgggcagccaaatacatccgcaatcggattatccaatttaacccaggccctgagaaatattttactttgggactgcccactgggagcactcctcttggctgttacaaaaaactcatagagtactacaagaacggagatctttcattcaaatatgtcaaaactttcaatatggacgaatacgtgggcctgcctagagaccacccggagagttatcactctttcatgtggaataacttctttaagcacatcgacattcacccagagaacacacacatccttgatggcaatgctgtggatttacaggctgaatgcgatgcgtttgaggagaaaattaaagctgcaggtggcatcgaattgttcgtgggagggattggccctgacggtcacattgcctttaatgagccgggtagttcactggtgagcagaacccgagtaaaaaccctggcaatggacactatcctggccaacgccaggttctttgatggcgagctgactaaagtgcccactatggccctcaccgtcggagtgggcacagtgatggatgccagagaagtgatgatcttgatcactggagcccacaaagcgttcgccctctacaaggcaattgaggagggggtgaaccatatgtggacagtatctgcctttcaacagcatccccggacggtattcgtttgtgacgaggacgcaacattagagctgaaggtgaagactgtaaaatactttaagggcctcatgctggtgcataataagcttgtagatcccttgtacagcatcaaagagaaggagacagagaaatcccagtcttcgaagaagccttacagcgactag

SEQ ID NO: 333075 - DNA, 90 bp, Artificial Sequence
  derived and/or modified sequence
atgaagctgataattttagagcactactcccaagccagtgagtgggccgctaaatacattcgcaatcgaattatccagttcaatccctag

SEQ ID NO: 333076 - DNA, 870 bp, Artificial Sequence
  derived and/or modified sequence
atgaaactgataattctagaacattacagccaggcgagcgagtgggccgcgaaatacatccgaaaccggatcattcaattcaacccaggccctgagaagtacttcactctcgggctcccaacaggttcgactccattaggatgctataagaagctcattgaatattataaaaacggggacttaagcttcaagtatgtgaaaacctttaatatggatgagtacgtgggcttaccccgagaccaccccgaatcgtatcactccttcatgtggaataacttctttaagcacatcgatattcaccccgagaatacacacatactggacgggaacgctgttgacctgcaggctgaatgtgatgctttcgaggaaaaaatcaaagctgccgggggaatcgagttgttcgtcggcggcatcgggcccgatggtcacatcgcttttaatgagccgggttcatccctcgtgagcagaactagagttaagacgttggcaatggatacgatcctggctaatgcaagattttttgatggcgaactgaccaaggtccccactatggccctaaccgtcggggtgggtacagtgatggacgctagagaggttatgattttgattaccggagcacataaagcctttgctctatacaaagctatcgaggagggcgttaaccacatgtggaccgtgagcgccttccagcagcacccccggacagttttcgtgtgtgacgaggacgcgaccctggagctgaaggtaaagacggttaagtattttaagggcttaatgttggtgcataataagcttgtggatcctctttattctatcaaggagaaggagacagaaaagtcccagagtagcaaaaagccttacagcgactag

SEQ ID NO: 333077 - DNA, 486 bp, Artificial Sequence
  derived and/or modified sequence
atgaaactgatcatccttgaacactatagccaggccagtgaatgggcagctaagtatatccggaatagaatcattcaatttaaccctggcccagagaaatattttacgttaggcctgccaacaggcagcacccctctaggctgctataaaaagctgatcgaatactacaagaacggcgatctctcctttaaatacgtcaaaacatttaatatggacgaatacgtcgggctgccccgcgaccatccagagagttatcactcttttatgtggaataatttttttaagcacattgacattcatcccgagaatacccacattctggatggaaacgccgtggacctccaggccgagtgtgatgccttcgaagaaaaaattaaagccgctggcggcattgaattatttgtgggcggtattggcccggatggccacattgcgtttaacgagcctgggagctctttagtttcacgtacgcgagtgaaaacatag

SEQ ID NO: 333078 - DNA, 870 bp, Artificial Sequence
  derived and/or modified sequence
atgaagctgatcatcctggagcactacagccaggccagcgagtgggccgccaagtacatccggaaccgcatcatccagttcaaccctggccctgagaagtacttcaccctgggcctgcccaccggcagcacccccctgggctgctacaagaagctgattgagtactacaagaatggagacctgtccttcaagtatgtgaagaccttcaacatggatgaatatgtgggcctgccccgggaccaccctgagagctaccacagcttcatgtggaacaacttcttcaagcacatcgacatccaccctgagaacacccacatcctggatggaaatgctgtggacctgcaggctgaatgtgatgcctttgaggagaagatcaaggccgccggcggcatcgagctgtttgtgggcggcatcggcccagatggccacatcgccttcaatgaacctggcagcagcctggtgtccaggaccagggtgaagaccctggccatggacaccatcctggccaatgcccgcttctttgatggagagctgaccaaggtgcccaccatggccctgactgtgggcgtgggcaccgtgatggatgcccgggaggtgatgatcctgatcaccggggcccacaaggcctttgccctgtacaaggccatcgaggagggcgtgaaccacatgtggacagtgtctgccttccagcagcaccccaggacagtgtttgtgtgtgatgaagatgccaccctggagctgaaggtgaagacagtgaagtacttcaagggcctgatgctggtgcacaacaagctggtggaccccctgtacagcatcaaggagaaggagacagagaagagccagagcagcaagaagccctacagcgactag

SEQ ID NO: 333079 - DNA, 768 bp, Artificial Sequence
  derived and/or modified sequence
atgaagctgatcatcctggagcactacagccaggccagcgagtgggccgccaagtacatccggaaccgcatcatccagttcaaccctggccctgagaagtacttcaccctgggcctgcccaccggcctgccccgggaccaccctgagagctaccacagcttcatgtggaacaacttcttcaagcacatcgacatccaccctgagaacacccacatcctggatggaaatgctgtggacctgcaggctgaatgtgatgcctttgaggagaagatcaaggccgccggcggcatcgagctgtttgtgggcggcatcggcccagatggccacatcgccttcaatgaacctggcagcagcctggtgtccaggaccagggtgaagaccctggccatggacaccatcctggccaatgcccgcttctttgatggagagctgaccaaggtgcccaccatggccctgactgtgggcgtgggcaccgtgatggatgcccgggaggtgatgatcctgatcaccggggcccacaaggcctttgccctgtacaaggccatcgaggagggcgtgaaccacatgtggacagtgtctgccttccagcagcaccccaggacagtgtttgtgtgtgatgaagatgccaccctggagctgaaggtgaagacagtgaagtacttcaagggcctgatgctggtgcacaacaagctggtggaccccctgtacagcatcaaggagaaggagacagagaagagccagagcagcaagaagccctacagcgactag

SEQ ID NO: 333080 - DNA, 417 bp, Artificial Sequence
  derived and/or modified sequence
atgaagctgatcatcctggagcactacagccaggccagcgagtgggccgccaagtacatccggaaccgcatcatccagttcaaccctggccctgagaagtacttcaccctgggcctgcccaccggcagcacccccctgggctgctacaagaagctgattgagtactacaagaatggagacctgtccttcaagtatgtgaagaccttcaacatggatgaatatgtgggcctgccccgggaccaccctgagagctaccacagcttcatgtggaacaacttcttcaagcacatcgacatccaccctgagaacacccacatcctggatggaaatgctgtggacctgcaggctgaatgtgatgcctttgaggagaagatcaaggccgccggcggcatcgagctgtttgtgggcggcatctag

SEQ ID NO: 333081 - DNA, 90 bp, Artificial Sequence
  derived and/or modified sequence
atgaagctgatcatcctggagcactacagccaggccagcgagtgggccgccaagtacatccggaaccgcatcatccagttcaacccctag

SEQ ID NO: 333082 - DNA, 486 bp, Artificial Sequence
  derived and/or modified sequence
atgaagctgatcatcctggagcactacagccaggccagcgagtgggccgccaagtacatccggaaccgcatcatccagttcaaccctggccctgagaagtacttcaccctgggcctgcccaccggcagcacccccctgggctgctacaagaagctgattgagtactacaagaatggagacctgtccttcaagtatgtgaagaccttcaacatggatgaatatgtgggcctgccccgggaccaccctgagagctaccacagcttcatgtggaacaacttcttcaagcacatcgacatccaccctgagaacacccacatcctggatggaaatgctgtggacctgcaggctgaatgtgatgcctttgaggagaagatcaaggccgccggcggcatcgagctgtttgtgggcggcatcggcccagatggccacatcgccttcaatgaacctggcagcagcctggtgtccaggaccagggtgaagacctag

SEQ ID NO: 333083 - DNA, 870 bp, Artificial Sequence
  derived and/or modified sequence
atgaagctgatcatcctggagcactacagccaggccagcgagtgggcagcaaagtacattaggaatcgaatcatccaattcaatcccggcccagaaaagtatttcaccctgggacttccgacagggagcacccctctgggatgttacaaaaaactcatcgagtactataaaaatggagacctgtcgtttaaatacgtgaaaacttttaatatggacgagtatgtgggtctcccccgggaccacccagaatcatatcattccttcatgtggaataacttctttaagcacattgatatccacccggaaaacacgcacatcctcgatgggaatgctgtggatctccaggccgaatgcgatgcttttgaagaaaaaatcaaggccgcaggaggtatcgaactgtttgtgggtggcattggtcctgacggccacattgcctttaacgaaccaggtagctcccttgtcagccggacacgagttaaaactctggcaatggatacgatcttggccaacgcacgcttctttgacggagaacttacgaaagtcccaacgatggcactgacggtaggagtagggacggtcatggatgctcgcgaggtcatgatcttgattactggggctcacaaggcattcgcactctataaagccatcgaggaaggtgtgaatcatatgtggacggtgagcgcattccaacagcatcctcggaccgtcttcgtctgcgacgaagacgccactttggagctcaaggtgaaaactgttaagtattttaaagggctcatgctggtgcataataagctagtggatcccctctacagcatcaaggaaaaagaaaccgagaagtctcaaagttctaagaaaccttactcagattag

SEQ ID NO: 333084 - DNA, 768 bp, Artificial Sequence
  derived and/or modified sequence
atgaagctgatcatcctggagcactacagccaggccagcgagtgggcggctaagtacataagaaacaggataatccagttcaacccgggcccagagaagtatttcacacttgggctgccgactggacttccccgagatcaccctgagtcttaccactccttcatgtggaacaattttttcaagcacattgatatacatcctgaaaatactcacatactggacggcaacgctgtcgatctccaggcggaatgtgatgcgttcgaagagaaaattaaggctgcaggcggcatcgagcttttcgtaggagggattggcccagatgggcacatcgcgttcaatgagccagggtcctctcttgttagccgtaccagggtgaaaaccttggccatggataccatcctggcaaatgcacggttcttcgacggagaactaactaaagtgcccaccatggctctaacagtcggagttggtacagtgatggatgcacgtgaagtcatgatccttataaccggcgcccacaaggcctttgccctgtacaaggctattgaggagggtgttaaccatatgtggactgtgtcagcattccagcagcatccccggactgtgttcgtgtgcgacgaggatgctactctggagttgaaagttaagacagtgaaatatttcaagggattaatgctggtgcataacaagttggtggatcccctgtactctatcaaggaaaaggaaaccgagaaatcgcagtccagtaaaaaaccctactccgattag

SEQ ID NO: 333085 - DNA, 870 bp, Artificial Sequence
  derived and/or modified sequence
atgaagctgatcatcctggagcactacagccaggccagcgagtgggccgccaagtacatcaggaacagaatcattcagttcaaccctgggcccgaaaaatactttaccctgggcctgcctaccggctccactccacttggatgttacaaaaagctcatcgagtactacaagaacggggacctcagctttaagtatgtgaagacattcaacatggatgagtatgtgggtctgcctcgcgaccacccagaatcataccattcattcatgtggaacaactttttcaagcacatcgatatacaccccgagaatactcacatattagacgggaatgccgtggatctgcaggctgagtgcgatgccttcgaagaaaagatcaaagccgcggggggcattgagctcttcgtgggcgggattgggccggatgggcacatcgcatttaatgagcctggatctagcctcgtgtcccgcactcgcgtgaagaccctagccatggataccatcttggctaatgccagattttttgacggagagttgaccaaagtgccaaccatggctctcaccgtgggagtgggaactgtgatggacgctcgggaggtcatgatcctgatcactggagcccataaagcctttgctctatacaaagcaatagaagagggagtgaatcacatgtggacagtgtcggccttccaacagcaccctcgcaccgtcttcgtttgtgacgaggacgccactcttgaacttaaagtcaagactgtgaagtactttaaaggcctgatgctagtccacaacaagttagttgatcccttgtattctataaaggagaaggaaaccgagaagtctcagagcagtaagaagccctatagtgactag

SEQ ID NO: 333086 - DNA, 417 bp, Artificial Sequence
  derived and/or modified sequence
atgaagctgatcatcctggagcactacagccaggccagcgagtgggctgctaaatacatcaggaatcgtataatccagtttaaccctggccctgagaagtactttacactcgggctccctactggcagtactccgctggggtgttataagaaactgattgagtattataagaatggcgacctcagcttcaaatacgtcaagactttcaatatggacgagtatgtaggcctgccacgcgaccacccagagtcgtatcactcattcatgtggaataatttcttcaaacatatcgacatccatcccgaaaatacacatatcttagacggaaatgccgtggatttgcaggccgaatgtgacgcttttgaggaaaagatcaaagccgccggaggtatcgaactcttcgttggcgggatctag

SEQ ID NO: 333087 - DNA, 870 bp, Artificial Sequence
  derived and/or modified sequence
atgaagctgatcatcctggagcactacagccaggccagcgagtgggcagccaaatatattaggaatcggatcattcagttcaatcccggacccgagaagtactttaccctgggcttaccaaccggaagcactccactcggatgctacaagaaactgatcgaatactacaaaaacggagacctttcctttaaatatgtgaagacttttaacatggacgaatacgtcgggctgccgcgggatcatccagaatcttaccactcattcatgtggaacaattttttcaagcatatcgatatccaccccgagaacacccacatacttgatggaaacgcagtcgacttacaggctgagtgcgacgcttttgaagaaaaaattaaggctgcggggggaattgaactgttcgtgggagggataggtcctgacgggcatatagcattcaatgagcctggatctagtctggtctcacgcacccgcgtaaagactctggccatggacacaatcctggctaacgccagattctttgatggggaactgaccaaggtccctaccatggctctgactgtcggagtcgggacggtgatggatgctcgcgaggtgatgattttaatcaccggcgcccacaaagctttcgccctgtataaggcaattgaggaaggcgttaatcacatgtggacagtctccgctttccagcagcatccgcggacagttttcgtgtgcgatgaagatgccacgctggagctgaaggtgaagaccgtcaagtactttaaggggttaatgctggttcacaataagctcgtggaccccctgtattccattaaggagaaggaaacagagaaaagtcagagctcaaaaaaaccctattccgactag

SEQ ID NO: 333088 - DNA, 90 bp, Artificial Sequence
  derived and/or modified sequence
atgaagctgatcatcctggagcactacagccaggccagcgagtgggcagctaagtacattcgcaatcggatcattcagtttaatccttag

SEQ ID NO: 333089 - DNA, 870 bp, Artificial Sequence
  derived and/or modified sequence
atgaagctgatcatcctggagcactacagccaggccagcgagtgggcagcgaagtatattagaaaccggattatccagtttaatcccggcccagagaaatacttcacgctcgggctcccgaccggcagcacaccgttagggtgctataagaagttgatagagtattataaaaatggggatctgtctttcaagtatgtaaagacttttaacatggacgaatatgtgggactgccacgcgaccacccagagagctatcattcctttatgtggaacaactttttcaagcatatcgacatacatcccgagaacacacacatcttagacggcaacgctgtcgacctgcaggcggagtgcgatgccttcgaagagaagatcaaagccgcaggcgggatcgagctatttgtggggggcatcggtccagatggccatattgccttcaacgagcctgggagcagtcttgtgtcccggacacgggttaaaactctggctatggacacaatccttgccaatgcacggtttttcgatggggagctgacaaaagttcccactatggcattgaccgtgggcgtgggaaccgtgatggatgcacgagaggtgatgatcctcatcacgggggcgcacaaggctttcgcactttacaaagccatcgaggaaggtgttaaccacatgtggaccgtcagcgccttccagcagcacccacgcacagtgtttgtgtgtgatgaagacgccaccttggagctaaaggtcaagaccgtaaagtattttaaaggactgatgcttgtccacaataaactggtcgacccactgtactctatcaaggagaaagagacagaaaagagccagtcctccaaaaaaccatatagcgattag

SEQ ID NO: 333090 - DNA, 486 bp, Artificial Sequence
  derived and/or modified sequence
atgaagctgatcatcctggagcactacagccaggccagcgagtgggctgcaaagtatattcgaaatcgcatcatacagtttaatcccggcccagaaaagtatttcacacttgggctgcccacagggtccacccccctgggctgttataagaagctgattgagtactacaagaacggagacttgtcatttaaatatgtgaaaacattcaacatggatgagtacgtggggctgcctcgggaccatccagagagctaccactcctttatgtggaacaacttcttcaaacatattgacattcacccggaaaacactcatattcttgatgggaacgccgtggatctgcaagcagagtgcgacgcattcgaagaaaaaataaaagctgccggaggaattgaactgttcgtgggcggcatcggaccggacggtcatatcgcttttaatgagcctgggagttccctagtctctcggacccgggtaaagacctag

SEQ ID NO: 333091 - DNA, 870 bp, Artificial Sequence
  derived and/or modified sequence
atgaagctgataattcttgagcattactcccaggccagtgaatgggcggcaaagtacatccggaacaggattatccagttcaaccctggccctgaaaaatattttacgctcgggctgcccactggctctacgccacttggctgttacaaaaagctgatcgagtactacaagaatggcgacttaagtttcaagtatgtgaagacatttaacatggacgaatacgttggtctccccagggaccaccccgagagctatcactctttcatgtggaacaactttttcaagcatatcgacatacacccggaaaacacccatatactggacggcaacgcggtcgacttgcaagctgagtgtgatgcattcgaggagaagattaaagcggcaggcggaatcgaactcttcgttgggggtatcggcccagatggccacattgccttcaacgagccaggctcttcactggtgtcgaggacccgagttaaaaccctggccatggacactattctcgccaatgcgaggttcttcgacggagagctcacgaaagttccaacaatggcattgacagtgggcgttggcaccgtgatggacgccagggaggtaatgattctgattactggcgcacataaagcttttgccctgtacaaggcaatcgaggagggagtgaaccatatgtggaccgtctcagcctttcagcagcatcctaggactgtgttcgtttgcgacgaggatgccactttagagttgaaggttaagactgttaaatattttaaaggattgatgctggtgcacaacaaactagtggatccactgtactcgatcaaagaaaaagagacagagaaaagccagtctagcaaaaaaccttattccgactag

SEQ ID NO: 333092 - DNA, 768 bp, Artificial Sequence
  derived and/or modified sequence
atgaaacttattatcctggaacattacagtcaggcgtccgaatgggctgcaaagtatattcgcaaccggatcattcagttcaacccaggtccagaaaaatattttaccctgggcttgcctacaggtctgccgagggaccaccctgagtcctaccatagcttcatgtggaacaactttttcaagcacattgacatccaccccgaaaatacccacattttggatgggaacgccgtagacctgcaagcggaatgtgacgccttcgaagaaaagatcaaagccgcagggggaatcgagttgtttgtgggaggtatcggccctgacggccatattgcctttaacgagccaggttcttcacttgtgagcaggactagggtcaagacattggccatggatacaatccttgccaatgccagattctttgatggggaattgaccaaggtaccaacaatggctctgacagtgggcgtgggcaccgtcatggacgctcgcgaggttatgattctaatcaccggagctcacaaagcgttcgccctgtataaagccattgaggagggagtgaaccacatgtggaccgtctctgctttccagcagcatccaagaactgtctttgtgtgtgatgaagacgcaactctcgagctgaaagtcaagacagttaagtactttaagggtctgatgctggtgcacaataagcttgttgatccactgtactccatcaaagagaaagaaacggagaagtcacaatctagcaagaaaccgtattccgactag

SEQ ID NO: 333093 - DNA, 870 bp, Artificial Sequence
  derived and/or modified sequence
atgaagctcatcattctcgaacactattcacaggcttcagagtgggccgcaaagtacatcagaaataggataattcagtttaatcctggccctgagaaatatttcactctcggtctgccgactggatctacccctctgggttgctacaagaaactgatagagtactataagaatggagatctttctttcaagtatgtgaaaaccttcaatatggatgaatatgttggactcccacgagaccatcccgagtcctatcactcatttatgtggaataattttttcaagcacattgatattcatcccgagaatacccacatactcgacgggaatgcggtagacctacaagcggagtgtgatgcgtttgaagaaaaaattaaggcagcgggagggatcgaactctttgttggaggaatcggtcctgacggccatatcgcctttaatgaacctgggtccagtcttgtgtctcggactcgggtgaaaacacttgccatggacaccatcctggccaacgcgaggttcttcgacggagagctaaccaaagtgcctactatggccctgaccgtcggtgttggtaccgtgatggacgctagagaagtgatgatactgatcacgggcgcacacaaggccttcgctctttacaaagccatcgaggagggcgtcaatcacatgtggaccgtatcagcattccagcagcacccacgcacagtgtttgtatgcgatgaggacgcaacacttgagctcaaggttaagaccgttaagtatttcaagggcctaatgctggtgcacaacaaattagtggatccgctctacagcattaaggaaaaggaaacggagaaatctcagagtagcaagaaaccatactcagattag

SEQ ID NO: 333094 - DNA, 417 bp, Artificial Sequence
  derived and/or modified sequence
atgaaattaattatcttggagcactactctcaagcaagtgaatgggctgcaaagtatattcgcaatcgtattatccagttcaaccccggacccgaaaagtacttcactctgggcttgcctactggctccactcctctgggatgctacaaaaagctgattgaatactacaaaaatggcgacctgagcttcaagtacgtcaaaaccttcaatatggatgaatacgtgggcctgcccagggaccatcccgagtcctaccattcattcatgtggaataactttttcaaacacatcgacattcaccctgagaacacacatatcctggatgggaacgctgtggatctgcaagccgagtgtgacgccttcgaggagaagattaaagccgctggagggattgaactcttcgtgggtgggatctag

SEQ ID NO: 333095 - DNA, 870 bp, Artificial Sequence
  derived and/or modified sequence
atgaagctcattatcttggagcattactcccaagccagcgagtgggccgctaagtacattagaaaccgcattattcaattcaatcctggcccagagaaatacttcactttgggactccccacgggctctacccctctgggctgctataaaaaactgatcgagtactataagaatggagatctctccttcaagtacgtcaaaaccttcaatatggatgaatatgtggggctccctagagatcacccagagtcctaccatagtttcatgtggaataatttctttaaacacattgacatccatcccgagaatacccatatcctggatggtaacgcagtggatctgcaggctgagtgtgacgccttcgaggaaaaaataaaggctgcaggcggaatcgagctgtttgttggcggaattggacctgatggccatatagcctttaacgagcccggttcttctcttgtatccagaacacgggtcaagaccctcgctatggataccatcctcgcgaacgccaggtttttcgatggcgaattaactaaggtccctacgatggccttgactgtgggtgtgggcactgttatggatgctagagaggtgatgatcctcataacaggcgcacataaagccttcgcactgtataaggcaatagaggaaggtgtcaatcatatgtggactgtgtccgcatttcagcagcacccccgtactgtgtttgtgtgcgacgaggacgccaccttagaactgaaggtcaaaacggtcaaatatttcaagggcctgatgttggttcacaacaagctcgtggaccctctgtattccatcaaagaaaaagagactgaaaagtcacagtcaagcaagaagccttacagcgactag

SEQ ID NO: 333096 - DNA, 90 bp, Artificial Sequence
  derived and/or modified sequence
atgaagctaatcatcctcgagcattatagtcaggccagcgagtgggctgccaaatatatccggaatcgcataatccagttcaacccatag

SEQ ID NO: 333097 - DNA, 870 bp, Artificial Sequence
  derived and/or modified sequence
atgaagttgatcatcctggagcactattcccaggcctccgagtgggctgcaaaatacatcaggaatcgaattattcaattcaatccagggccagagaagtacttcaccctagggctgcccacaggaagcacacctctcggctgttacaaaaaattgatcgagtactataaaaacggtgatctctccttcaaatatgttaaaaccttcaatatggacgagtatgtcggcctacccagggatcaccctgagtcttatcactccttcatgtggaataatttctttaagcatattgacatccatccagaaaacacgcacatattagacgggaacgcggtcgacctgcaggccgagtgcgacgcctttgaggaaaaaataaaggcagctggtggcatcgaacttttcgtggggggtattggaccagatggccatatcgccttcaatgaaccaggttcttcgctggtctcaagaaccagggtcaaaactctcgctatggacaccatcctggccaacgccaggttcttcgacggagagctgacgaaagtccctactatggcactcactgtaggagtggggacagtgatggatgcacgagaggtgatgattctgatcaccggagcgcataaggccttcgctctctacaaggctattgaggaaggggtgaatcacatgtggaccgtcagtgcgttccagcaacacccacgcaccgtatttgtttgcgacgaagacgccacactggagctcaaggtaaagacggttaagtacttcaaaggcttgatgttggttcacaacaagttagttgaccctctttatagcatcaaagagaaggaaaccgagaagtcccagtcctccaagaagccatacagtgactag

SEQ ID NO: 333098 - DNA, 486 bp, Artificial Sequence
  derived and/or modified sequence
atgaagctgattatcctggagcactactctcaagctagcgagtgggctgccaaatatattcgaaataggataatccagtttaatcccggtccagagaaatatttcacactcgggttacccaccggctccacgcccctgggctgctataaaaagcttattgaatattataaaaacggcgatctgtccttcaagtatgtcaaaacctttaatatggacgaatacgtaggtcttcccagagatcatccagagagctaccacagctttatgtggaataacttcttcaaacatatcgacattcatcctgagaatacccacatcctcgacggcaatgccgtggatctgcaggcagaatgcgacgctttcgaggaaaagatcaaggccgcaggaggtattgagctgttcgtgggaggaattggtcccgatgggcacatcgcatttaatgagcctggtagcagccttgtgtcccgcaccagggtcaagacctag

SEQ ID NO: 333099 - DNA, 870 bp, Artificial Sequence
  derived and/or modified sequence
atgaagctgatcatcctggagcactacagccaggccagcgagtgggccgccaagtacatcagaaacagaatcatccagttcaaccccggccccgagaagtacttcaccctgggcctgcccaccggcagcacccccctgggctgctacaagaagctgatcgagtactacaagaacggcgacctgagcttcaagtacgtgaagaccttcaacatggacgagtacgtgggcctgcccagagaccaccccgagagctaccacagcttcatgtggaacaacttcttcaagcacatcgacatccaccccgagaacacccacatcctggacggcaacgccgtggacctgcaggccgagtgcgacgccttcgaggagaagatcaaggccgccggcggcatcgagctgttcgtgggcggcatcggccccgacggccacatcgccttcaacgagcccggcagcagcctggtgagcagaaccagagtgaagaccctggccatggacaccatcctggccaacgccagattcttcgacggcgagctgaccaaggtgcccaccatggccctgaccgtgggcgtgggcaccgtgatggacgccagagaggtgatgatcctgatcaccggcgcccacaaggccttcgccctgtacaaggccatcgaggagggcgtgaaccacatgtggaccgtgagcgccttccagcagcaccccagaaccgtgttcgtgtgcgacgaggacgccaccctggagctgaaggtgaagaccgtgaagtacttcaagggcctgatgctggtgcacaacaagctggtggaccccctgtacagcatcaaggagaaggagaccgagaagagccagagcagcaagaagccctacagcgactag

SEQ ID NO: 333100 - DNA, 768 bp, Artificial Sequence
  derived and/or modified sequence
atgaagctgatcatcctggagcactacagccaggccagcgagtgggccgccaagtacatcagaaacagaatcatccagttcaaccccggccccgagaagtacttcaccctgggcctgcccaccggcctgcccagagaccaccccgagagctaccacagcttcatgtggaacaacttcttcaagcacatcgacatccaccccgagaacacccacatcctggacggcaacgccgtggacctgcaggccgagtgcgacgccttcgaggagaagatcaaggccgccggcggcatcgagctgttcgtgggcggcatcggccccgacggccacatcgccttcaacgagcccggcagcagcctggtgagcagaaccagagtgaagaccctggccatggacaccatcctggccaacgccagattcttcgacggcgagctgaccaaggtgcccaccatggccctgaccgtgggcgtgggcaccgtgatggacgccagagaggtgatgatcctgatcaccggcgcccacaaggccttcgccctgtacaaggccatcgaggagggcgtgaaccacatgtggaccgtgagcgccttccagcagcaccccagaaccgtgttcgtgtgcgacgaggacgccaccctggagctgaaggtgaagaccgtgaagtacttcaagggcctgatgctggtgcacaacaagctggtggaccccctgtacagcatcaaggagaaggagaccgagaagagccagagcagcaagaagccctacagcgactag

SEQ ID NO: 333101 - DNA, 417 bp, Artificial Sequence
  derived and/or modified sequence
atgaagctgatcatcctggagcactacagccaggccagcgagtgggccgccaagtacatcagaaacagaatcatccagttcaaccccggccccgagaagtacttcaccctgggcctgcccaccggcagcacccccctgggctgctacaagaagctgatcgagtactacaagaacggcgacctgagcttcaagtacgtgaagaccttcaacatggacgagtacgtgggcctgcccagagaccaccccgagagctaccacagcttcatgtggaacaacttcttcaagcacatcgacatccaccccgagaacacccacatcctggacggcaacgccgtggacctgcaggccgagtgcgacgccttcgaggagaagatcaaggccgccggcggcatcgagctgttcgtgggcggcatctag

SEQ ID NO: 333102 - DNA, 90 bp, Artificial Sequence
  derived and/or modified sequence
atgaagctgatcatcctggagcactacagccaggccagcgagtgggccgccaagtacatcagaaacagaatcatccagttcaacccctag

SEQ ID NO: 333103 - DNA, 486 bp, Artificial Sequence
  derived and/or modified sequence
atgaagctgatcatcctggagcactacagccaggccagcgagtgggccgccaagtacatcagaaacagaatcatccagttcaaccccggccccgagaagtacttcaccctgggcctgcccaccggcagcacccccctgggctgctacaagaagctgatcgagtactacaagaacggcgacctgagcttcaagtacgtgaagaccttcaacatggacgagtacgtgggcctgcccagagaccaccccgagagctaccacagcttcatgtggaacaacttcttcaagcacatcgacatccaccccgagaacacccacatcctggacggcaacgccgtggacctgcaggccgagtgcgacgccttcgaggagaagatcaaggccgccggcggcatcgagctgttcgtgggcggcatcggccccgacggccacatcgccttcaacgagcccggcagcagcctggtgagcagaaccagagtgaagacctag

SEQ ID NO: 333104 - protein, 636 aa, Artificial Sequence
  derived and/or modified sequence
MEGRGPYRIYDPGGSVPSGEASAAFERLVKENSRLKEKMQGIKMLGELLEESQMEATRLRQKAEELVKDNELLPPPSPSLGSFDPLAELTGKDSNVTASPTAPACPSDKPAPVQKPPSSGTSSEFEVVTPEEQNSPESSSHANAMALGPLPREDGNLMLHLQRLETTLSVCAEEPDHGQLFTHLGRMALEFNRLASKVHKNEQRTSILQTLCEQLRKENEALKAKLDKGLEQRDQAAERLREENLELKKLLMSNGNKEGASGRPGSPKMEGTGKKAVAGQQQASVTAGKVPEVVALGAAEKKVKMLEQQRSELLEVNKQWDQHFRSMKQQYEQKITELRQKLADLQKQVTDLEAEREQKQRDFDRKLLLAKSKIEMEETDKEQLTAEAKELRQKVKYLQDQLSPLTRQREYQEKEIQRLNKALEEALSIQTPPSSPPTAFGSPEGAGALLRKQELVTQNELLKQQVKIFEEDFQRERSDRERMNEEKEELKKQVEKLQAQVTLSNAQLKAFKDEEKAREALRQQKRKAKASGERYHVEPHPEHLCGAYPYAYPPMPAMVPHHGFEDWSQIRYPPPPMAMEHPPPLPNSRLFHLPEYTWRLPCGGVRNPNQSSQVMDPPTARPTEPESPKNDREGPQ

SEQ ID NO: 333105 - protein, 583 aa, Artificial Sequence
  derived and/or modified sequence
MEATRLRQKAEELVKDNELLPPPSPSLGSFDPLAELTGKDSNVTASPTAPACPSDKPAPVQKPPSSGTSSEFEVVTPEEQNSPESSSHANAMALGPLPREDGNLMLHLQRLETTLSVCAEEPDHGQLFTHLGRMALEFNRLASKVHKNEQRTSILQTLCEQLRKENEALKAKLDKGLEQRDQAAERLREENLELKKLLMSNGNKEGASGRPGSPKMEGTGKKAVAGQQQASVTAGKVPEVVALGAAEKKVKMLEQQRSELLEVNKQWDQHFRSMKQQYEQKITELRQKLADLQKQVTDLEAEREQKQRDFDRKLLLAKSKIEMEETDKEQLTAEAKELRQKVKYLQDQLSPLTRQREYQEKEIQRLNKALEEALSIQTPPSSPPTAFGSPEGAGALLRKQELVTQNELLKQQVKIFEEDFQRERSDRERMNEEKEELKKQVEKLQAQVTLSNAQLKAFKDEEKAREALRQQKRKAKASGERYHVEPHPEHLCGAYPYAYPPMPAMVPHHGFEDWSQIRYPPPPMAMEHPPPLPNSRLFHLPEYTWRLPCGGVRNPNQSSQVMDPPTARPTEPESPKNDREGPQ

SEQ ID NO: 333106 - protein, 598 aa, Artificial Sequence
  derived and/or modified sequence
MQGIKMLGELLEESQMEATRLRQKAEELVKDNELLPPPSPSLGSFDPLAELTGKDSNVTASPTAPACPSDKPAPVQKPPSSGTSSEFEVVTPEEQNSPESSSHANAMALGPLPREDGNLMLHLQRLETTLSVCAEEPDHGQLFTHLGRMALEFNRLASKVHKNEQRTSILQTLCEQLRKENEALKAKLDKGLEQRDQAAERLREENLELKKLLMSNGNKEGASGRPGSPKMEGTGKKAVAGQQQASVTAGKVPEVVALGAAEKKVKMLEQQRSELLEVNKQWDQHFRSMKQQYEQKITELRQKLADLQKQVTDLEAEREQKQRDFDRKLLLAKSKIEMEETDKEQLTAEAKELRQKVKYLQDQLSPLTRQREYQEKEIQRLNKALEEALSIQTPPSSPPTAFGSPEGAGALLRKQELVTQNELLKQQVKIFEEDFQRERSDRERMNEEKEELKKQVEKLQAQVTLSNAQLKAFKDEEKAREALRQQKRKAKASGERYHVEPHPEHLCGAYPYAYPPMPAMVPHHGFEDWSQIRYPPPPMAMEHPPPLPNSRLFHLPEYTWRLPCGGVRNPNQSSQVMDPPTARPTEPESPKNDREGPQ

SEQ ID NO: 333107 - DNA, 1911 bp, Artificial Sequence
  derived and/or modified sequence
atggagggcagaggcccctacagaatctacgaccccggcggcagcgtgcccagcggcgaggccagcgccgccttcgagagactggtgaaggagaacagcagactgaaggagaagatgcagggcatcaagatgctgggcgagctgctggaggagagccagatggaggccaccagactgagacagaaggccgaggagctggtgaaggacaacgagctgctgcccccccccagccccagcctgggcagcttcgaccccctggccgagctgaccggcaaggacagcaacgtgaccgccagccccaccgcccccgcctgccccagcgacaagcccgcccccgtgcagaagccccccagcagcggcaccagcagcgagttcgaggtggtgacccccgaggagcagaacagccccgagagcagcagccacgccaacgccatggccctgggccccctgcccagagaggacggcaacctgatgctgcacctgcagagactggagaccaccctgagcgtgtgcgccgaggagcccgaccacggccagctgttcacccacctgggcagaatggccctggagttcaacagactggccagcaaggtgcacaagaacgagcagagaaccagcatcctgcagaccctgtgcgagcagctgagaaaggagaacgaggccctgaaggccaagctggacaagggcctggagcagagagaccaggccgccgagagactgagagaggagaacctggagctgaagaagctgctgatgagcaacggcaacaaggagggcgccagcggcagacccggcagccccaagatggagggcaccggcaagaaggccgtggccggccagcagcaggccagcgtgaccgccggcaaggtgcccgaggtggtggccctgggcgccgccgagaagaaggtgaagatgctggagcagcagagaagcgagctgctggaggtgaacaagcagtgggaccagcacttcagaagcatgaagcagcagtacgagcagaagatcaccgagctgagacagaagctggccgacctgcagaagcaggtgaccgacctggaggccgagagagagcagaagcagagagacttcgacagaaagctgctgctggccaagagcaagatcgagatggaggagaccgacaaggagcagctgaccgccgaggccaaggagctgagacagaaggtgaagtacctgcaggaccagctgagccccctgaccagacagagagagtaccaggagaaggagatccagagactgaacaaggccctggaggaggccctgagcatccagaccccccccagcagcccccccaccgccttcggcagccccgagggcgccggcgccctgctgagaaagcaggagctggtgacccagaacgagctgctgaagcagcaggtgaagatcttcgaggaggacttccagagagagagaagcgacagagagagaatgaacgaggagaaggaggagctgaagaagcaggtggagaagctgcaggcccaggtgaccctgagcaacgcccagctgaaggccttcaaggacgaggagaaggccagagaggccctgagacagcagaagagaaaggccaaggccagcggcgagagataccacgtggagccccaccccgagcacctgtgcggcgcctacccctacgcctacccccccatgcccgccatggtgccccaccacggcttcgaggactggagccagatcagatacccccccccccccatggccatggagcaccccccccccctgcccaacagcagactgttccacctgcccgagtacacctggagactgccctgcggcggcgtgagaaaccccaaccagagcagccaggtgatggacccccccaccgccagacccaccgagcccgagagccccaagaacgacagagagggcccccagtag

SEQ ID NO: 333108 - DNA, 1752 bp, Artificial Sequence
  derived and/or modified sequence
atggaggccaccagactgagacagaaggccgaggagctggtgaaggacaacgagctgctgcccccccccagccccagcctgggcagcttcgaccccctggccgagctgaccggcaaggacagcaacgtgaccgccagccccaccgcccccgcctgccccagcgacaagcccgcccccgtgcagaagccccccagcagcggcaccagcagcgagttcgaggtggtgacccccgaggagcagaacagccccgagagcagcagccacgccaacgccatggccctgggccccctgcccagagaggacggcaacctgatgctgcacctgcagagactggagaccaccctgagcgtgtgcgccgaggagcccgaccacggccagctgttcacccacctgggcagaatggccctggagttcaacagactggccagcaaggtgcacaagaacgagcagagaaccagcatcctgcagaccctgtgcgagcagctgagaaaggagaacgaggccctgaaggccaagctggacaagggcctggagcagagagaccaggccgccgagagactgagagaggagaacctggagctgaagaagctgctgatgagcaacggcaacaaggagggcgccagcggcagacccggcagccccaagatggagggcaccggcaagaaggccgtggccggccagcagcaggccagcgtgaccgccggcaaggtgcccgaggtggtggccctgggcgccgccgagaagaaggtgaagatgctggagcagcagagaagcgagctgctggaggtgaacaagcagtgggaccagcacttcagaagcatgaagcagcagtacgagcagaagatcaccgagctgagacagaagctggccgacctgcagaagcaggtgaccgacctggaggccgagagagagcagaagcagagagacttcgacagaaagctgctgctggccaagagcaagatcgagatggaggagaccgacaaggagcagctgaccgccgaggccaaggagctgagacagaaggtgaagtacctgcaggaccagctgagccccctgaccagacagagagagtaccaggagaaggagatccagagactgaacaaggccctggaggaggccctgagcatccagaccccccccagcagcccccccaccgccttcggcagccccgagggcgccggcgccctgctgagaaagcaggagctggtgacccagaacgagctgctgaagcagcaggtgaagatcttcgaggaggacttccagagagagagaagcgacagagagagaatgaacgaggagaaggaggagctgaagaagcaggtggagaagctgcaggcccaggtgaccctgagcaacgcccagctgaaggccttcaaggacgaggagaaggccagagaggccctgagacagcagaagagaaaggccaaggccagcggcgagagataccacgtggagccccaccccgagcacctgtgcggcgcctacccctacgcctacccccccatgcccgccatggtgccccaccacggcttcgaggactggagccagatcagatacccccccccccccatggccatggagcaccccccccccctgcccaacagcagactgttccacctgcccgagtacacctggagactgccctgcggcggcgtgagaaaccccaaccagagcagccaggtgatggacccccccaccgccagacccaccgagcccgagagccccaagaacgacagagagggcccccagtag

SEQ ID NO: 333109 - DNA, 1797 bp, Artificial Sequence
  derived and/or modified sequence
atgcagggcatcaagatgctgggcgagctgctggaggagagccagatggaggccaccagactgagacagaaggccgaggagctggtgaaggacaacgagctgctgcccccccccagccccagcctgggcagcttcgaccccctggccgagctgaccggcaaggacagcaacgtgaccgccagccccaccgcccccgcctgccccagcgacaagcccgcccccgtgcagaagccccccagcagcggcaccagcagcgagttcgaggtggtgacccccgaggagcagaacagccccgagagcagcagccacgccaacgccatggccctgggccccctgcccagagaggacggcaacctgatgctgcacctgcagagactggagaccaccctgagcgtgtgcgccgaggagcccgaccacggccagctgttcacccacctgggcagaatggccctggagttcaacagactggccagcaaggtgcacaagaacgagcagagaaccagcatcctgcagaccctgtgcgagcagctgagaaaggagaacgaggccctgaaggccaagctggacaagggcctggagcagagagaccaggccgccgagagactgagagaggagaacctggagctgaagaagctgctgatgagcaacggcaacaaggagggcgccagcggcagacccggcagccccaagatggagggcaccggcaagaaggccgtggccggccagcagcaggccagcgtgaccgccggcaaggtgcccgaggtggtggccctgggcgccgccgagaagaaggtgaagatgctggagcagcagagaagcgagctgctggaggtgaacaagcagtgggaccagcacttcagaagcatgaagcagcagtacgagcagaagatcaccgagctgagacagaagctggccgacctgcagaagcaggtgaccgacctggaggccgagagagagcagaagcagagagacttcgacagaaagctgctgctggccaagagcaagatcgagatggaggagaccgacaaggagcagctgaccgccgaggccaaggagctgagacagaaggtgaagtacctgcaggaccagctgagccccctgaccagacagagagagtaccaggagaaggagatccagagactgaacaaggccctggaggaggccctgagcatccagaccccccccagcagcccccccaccgccttcggcagccccgagggcgccggcgccctgctgagaaagcaggagctggtgacccagaacgagctgctgaagcagcaggtgaagatcttcgaggaggacttccagagagagagaagcgacagagagagaatgaacgaggagaaggaggagctgaagaagcaggtggagaagctgcaggcccaggtgaccctgagcaacgcccagctgaaggccttcaaggacgaggagaaggccagagaggccctgagacagcagaagagaaaggccaaggccagcggcgagagataccacgtggagccccaccccgagcacctgtgcggcgcctacccctacgcctacccccccatgcccgccatggtgccccaccacggcttcgaggactggagccagatcagatacccccccccccccatggccatggagcaccccccccccctgcccaacagcagactgttccacctgcccgagtacacctggagactgccctgcggcggcgtgagaaaccccaaccagagcagccaggtgatggacccccccaccgccagacccaccgagcccgagagccccaagaacgacagagagggcccccagtag

SEQ ID NO: 333110 - DNA, 1911 bp, Artificial Sequence
  derived and/or modified sequence
atggagggacgaggcccctaccgaatctacgacccaggaggaagtgttccctctggagaggcgtcagccgcattcgagcgattggtgaaagaaaacagtaggctgaaagagaagatgcagggaatcaaaatgcttggggagttgctggaggagtctcagatggaggccacacggctcagacagaaggccgaagagctggtcaaagataacgaattgctcccgcccccctctccatccctggggagctttgatcccctcgccgagcttactgggaaggactctaatgtgactgcctcacccaccgcccccgcttgccccagtgataagcccgccccagtccagaagccaccctcctccggcactagctccgagtttgaggtggtgactcctgaggaacagaactccccagaatcctcttcccacgcaaacgctatggcactcggaccactgcctagagaagacggcaaccttatgctgcacctccagagactggaaaccaccttgagcgtgtgcgccgaagagccagaccacggccagctgttcacccacctgggtcgtatggcactggaatttaatagattggcttctaaagtacacaaaaatgaacaaaggacttccatactgcagacactctgtgagcaactgaggaaggagaatgaagctttaaaggccaagctggataaggggttagaacagagggatcaggccgcggagcggctccgagaagagaacctggagttaaaaaagctattaatgtctaatgggaataaggagggtgccagtggccgccctggatccccaaagatggaaggaacaggtaagaaggccgttgcaggacaacagcaagccagcgtgacagcaggcaaagtgcccgaagtcgtggcacttggtgccgcggagaaaaaagtcaaaatgttagagcagcagcgttcagaactccttgaggttaacaaacaatgggatcagcacttccgcagcatgaagcagcagtatgaacagaagatcaccgagctccggcagaaactggcagatcttcagaagcaggtgacagacttagaggccgaacgagagcagaagcagagagatttcgatcggaagttattgctggcgaagtctaaaatcgagatggaagagactgataaagagcagctgactgcagaagccaaggaactgcgtcagaaggttaaatatctgcaagatcagctgtcccctttgaccaggcagcgagagtaccaagaaaaggagattcaaaggctgaataaagctttggaggaagcactgtccatccagacaccgccttcatcaccccccactgcatttgggtctcctgaaggggccggcgctttgcttcgcaagcaagaacttgtgacccaaaacgagctcttaaagcaacaggttaagatcttcgaagaggatttccaaagggaacgcagcgatcgggagaggatgaacgaagaaaaggaagaactaaagaagcaggtcgaaaagctgcaagcccaggtcacattatctaacgcacagctgaaagcttttaaggacgaagagaaggcaagagaagccctccgccaacagaaacgcaaagcaaaagcgtccggcgagcgctaccatgtcgaaccccacccagaacatctctgcggcgcctatccttatgcctacccacccatgcccgcgatggtgccccaccacgggtttgaggactggtcccaaatacggtacccccccccgcccatggccatggaacatcctcctcctcttcccaatagtcgtctgttccacctcccggagtacacatggagactgccgtgcggcggagtgagaaatccaaatcagagcagtcaagtcatggatccacctaccgctagaccaacagagcccgaatctcccaagaacgatagggagggacctcaatag

SEQ ID NO: 333111 - DNA, 1911 bp, Artificial Sequence
  derived and/or modified sequence
atggaggggcggggtccgtatcggatttatgatccaggaggttcagtgccttctggggaagcaagtgccgcattcgagagactggtgaaggagaacagccgattgaaggagaaaatgcagggcattaagatgctgggggaactcctggaggaatcccagatggaagccaccagactgagacaaaaggccgaggaattagtgaaagataatgaacttctgcccccaccctcgccaagtttgggcagtttcgaccctctggcggagctgaccggaaaggattccaatgtgactgcaagccccaccgccccagcatgcccatcagataagcccgcccccgttcagaagccccccagctctggtacaagctctgaatttgaagtggtgaccccggaggagcagaattctccagagtcctcctctcacgccaatgctatggcactgggacccctgccgcgcgaggacggcaatctgatgctgcacctacaacgtctggagaccacgctctccgtctgtgcggaggagccagaccatggtcaactgtttacccacttagggcgcatggcccttgagtttaatcgcctcgctagcaaggtgcacaagaacgagcagcgtacaagcatcttacagacactttgcgaacagcttaggaaggagaatgaggcgctgaaagccaaactggacaaaggtctagaacagagagaccaagcagccgagagactgagggaggaaaatctggaactgaaaaaactcttaatgagtaacggcaacaaagagggagctagtggcaggccgggcagccctaaaatggagggaaccggaaaaaaggccgtcgctggacaacagcaagcatccgtgaccgcagggaaagtacccgaggtagtggctctgggagctgcagaaaagaaggtcaagatgcttgaacagcagcggagcgaactactggaagttaacaagcagtgggaccagcactttcgatccatgaaacaacagtacgagcagaagataactgaactcaggcagaaactggctgacctccagaaacaggttacagatctggaggcagagcgagagcagaaacaacgggatttcgaccggaaattactgctggccaagagcaaaattgagatggaggagaccgacaaggagcaacttacggcagaggccaaggaactgcgtcagaaagtcaagtatctccaggatcagctgtcacctctcactagacagcgagaatatcaggaaaaggaaattcagcgcttgaataaggcactagaggaagccctatcaatccagacccctccatcctctcctcccactgccttcggaagcccagagggtgccggagcactgttgcgtaagcaggagctcgtcacgcagaatgagcttctgaagcagcaggtgaagattttcgaagaggatttccagagagaaaggagcgatagagagaggatgaatgaggagaaagaagagctaaagaagcaagttgaaaagttacaggcccaagtgaccctttctaacgcccagctgaaagcttttaaagatgaggagaaggcccgggaagcgttgcggcagcagaaacgcaaagcgaaggctagcggcgaaaggtaccatgtggagcctcaccctgagcatttgtgtggcgcatatccatacgcatatcctccaatgccagcgatggtacctcatcacggcttcgaagactggtcccaaatccggtacccacctccgcccatggccatggagcacccgccccctctgcccaacagccggctgtttcacttgccggaatacacatggcggctaccctgcggaggcgtgcggaacccaaaccaaagctcccaagttatggacccccccaccgcgagacctacggagcccgagagccccaagaacgatagggagggaccccagtag

SEQ ID NO: 333112 - DNA, 1752 bp, Artificial Sequence
  derived and/or modified sequence
atggaggccaccagactgcgtcagaaggccgaagaactggttaaagataacgaacttctgccgccgccgagcccgagtctgggttcttttgacccattagctgagctgactggcaaagactcaaatgtaaccgctagcccaaccgctcccgcttgcccttccgacaaaccagcccccgtgcagaagccccccagttcaggaacgtcaagcgaattcgaggtggtcaccccagaggagcagaattctccagaatctagcagtcacgcaaatgccatggcgctgggacccctgcccagagaagatggcaatctaatgctccatctgcagaggctcgagaccacattgtctgtgtgtgctgaggaaccggaccatggccaactattcactcatctggggcgtatggcattagagtttaatagactcgcatccaaagtgcataaaaacgagcaaaggacctcaatcctgcagaccctctgtgagcagctgcgcaaggagaacgaggcactaaaggctaagctcgataaaggactggagcagcgagatcaggccgcagaaagactgcgggaagaaaatttagagctcaagaaactcctcatgagtaatgggaacaaggagggagcttctggccgacccgggtcccctaagatggaggggaccggcaaaaaggctgttgccgggcaacaacaggcttccgtcaccgctgggaaggttccggaagttgtagcgctgggggcagcggaaaagaaagtgaagatgttggagcagcagagatccgaactactggaagttaataagcagtgggatcaacactttagatcaatgaagcagcaatatgagcagaagattaccgagctgcgccagaaattagccgatcttcagaagcaggttactgatctcgaagctgagcgggaacagaagcagagagattttgaccgaaaacttctcctggccaagtctaaaattgaaatggaagagaccgataaggagcagttaacagcagaggccaaggagctcaggcagaaagtgaaatacctccaagaccagctgtcccccctgacgagacagagggagtaccaggagaaagaaattcagcgcctgaataaagccttagaggaagctctgagcattcagaccccaccatcatcaccgcctacagcctttggcagccctgaaggagctggcgcactcctgcgcaagcaggagcttgtgactcagaatgaactgctgaagcagcaggtgaagatattcgaagaagacttccagcgggagaggagtgaccgggagagaatgaacgaggaaaaagaggagcttaaaaagcaggtggagaagctgcaggcccaggtgacactgtccaacgcgcaactgaaagctttcaaagatgaggagaaagcacgggaagccctgaggcagcagaagaggaaggctaaggcatccggtgagaggtatcacgtcgaacctcaccctgaacacttgtgcggtgcatatccttacgcttacccccctatgcccgctatggtgccgcaccacgggttcgaggattggtctcagattaggtaccctcccccccctatggctatggaacatccgccaccacttccgaattctagactcttccacctccctgagtacacttggcgcctcccgtgtggaggagtgagaaacccaaaccagtctagccaggtgatggatcctccaaccgcccggcccacagagccagaatcacccaagaatgatcgagagggtcctcagtag

SEQ ID NO: 333113 - DNA, 1911 bp, Artificial Sequence
  derived and/or modified sequence
atggaaggccgcggtccatatcgcatctatgatccaggaggctctgtgccctcgggcgaggccagcgctgcctttgagcgtttggtgaaggaaaatagtcgcctgaaggaaaaaatgcagggaataaaaatgttgggcgagctgctggaagagtctcagatggaggcgacaaggctccggcaaaaagcagaggagctggttaaggacaacgaattgctgcctccgccctcaccttccctgggcagttttgaccctttggccgagttgacaggcaaagactcaaatgtcacagcatcacctacggcacctgcctgtcccagcgataagccagccccagtgcagaagcctcctagtagcgggacttcttcagagttcgaggtagtcacccccgaggagcagaactcccccgagagctcatcacacgccaacgccatggcactggggcctctgcctcgcgaagatggcaatctgatgcttcaccttcaacgtttggagactacactgtccgtttgtgcagaggaacccgatcatggacagctgtttactcaccttggacggatggcccttgagttcaatagactggcctccaaggtacataagaacgagcagcgaacctccattctgcagactctctgcgagcagctgaggaaggaaaacgaagccttgaaggctaaactggataaaggtctggagcaacgggaccaggccgcggaacggctaagagaagagaaccttgagctcaaaaaactgctcatgagtaacggaaacaaagagggagcctccggacgaccagggtcccccaagatggagggcaccggtaaaaaggccgttgcgggccagcagcaggcatcagtaacagcaggtaaggtgcctgaagtagttgcactgggagccgcagaaaagaaggtcaaaatgctcgaacagcagagatcagagctgcttgaggtcaacaagcagtgggaccagcactttcggtcgatgaaacagcagtacgagcagaagatcacagaactgagacagaaattggcagatctacagaagcaggtgaccgatttggaagctgaacgagaacagaagcagcgggacttcgaccggaagctgttgctcgccaaaagtaaaattgagatggaagaaactgataaagagcaactgaccgcagaagcaaaagaactgcgccagaaggtgaaatacttgcaagatcagttgtccccgttgacccgccagcgagagtaccaagagaaagagatccagaggctgaataaagcactggaagaggctctgtcaattcagactccacctagcagtccccctacagcattcgggagccccgaaggcgccggggctttactccgcaaacaagaactggtgacacagaatgagcttctgaaacagcaggttaaaatctttgaggaggacttccagagagaaaggagcgatcgggaacggatgaacgaagaaaaggaggagttgaagaagcaggttgagaagttacaggctcaggttaccctttcaaacgctcagctgaaagcatttaaagacgaggagaaggcgcgggaagcactgcgacaacagaagagaaaggctaaggctagcggcgaaaggtatcacgtggagccacaccctgagcatttatgcggagcctacccctacgcctacccccctatgccggccatggtccctcaccatggcttcgaagattggtcgcaaattaggtatccacctccaccaatggccatggagcaccctcctcccctgcctaacagtcgtctgtttcacctacctgaatatacatggagactgccctgtggtggggtaagaaacccaaatcagagttcccaggtcatggatcctccaacagcccggccaacagaacccgagtcacccaagaacgatcgggaggggccgcaatag

SEQ ID NO: 333114 - DNA, 1911 bp, Artificial Sequence
  derived and/or modified sequence
atggaaggccgcggaccgtaccggatatatgatcccggaggtagcgttccaagcggagaagctagtgccgcatttgagaggcttgttaaggaaaactccaggttgaaagagaagatgcagggcattaagatgttaggagagcttctcgaggagtcgcagatggaggctactagacttcgccagaaggccgaagagttggtgaaagacaatgagctgctcccgcctccatccccatcactggggtcctttgaccctctggctgagctgactgggaaggatagcaatgttaccgctagtccaactgccccggcctgcccatcagataaaccggcccccgtgcagaagcctcccagctcaggcacctcttcggagttcgaggtcgtgaccccagaggagcaaaacagtccagagtctagttcccacgccaacgctatggccctcgggcccctgccccgggaggatggaaatctcatgcttcacctccaacgcttggaaacaaccctcagtgtgtgtgctgaagagccagaccacggacagctgtttacgcacctcggccgcatggctttagaatttaataggctggccagcaaagtgcacaaaaatgaacaacggacatccatcctgcaaacgctctgtgaacaactccgtaaagagaatgaggccctgaaggctaagctagacaaaggacttgagcaacgggaccaggctgcagagagactcagagaagagaacctggagctcaagaaactgctgatgtcaaacggcaacaaagagggcgcctctgggcggccgggctcccctaagatggagggaacaggaaaaaaagccgtggccgggcaacagcaggcatctgttacagctggcaaggttcccgaagttgtggcactgggagcggccgagaaaaaggtgaaaatgctggaacagcagcgaagcgagttgttagaagtcaacaagcaatgggaccagcacttcagaagcatgaaacaacagtatgagcagaagatcacagagctccgccagaagcttgcggatctgcagaaacaggtgaccgatctcgaagccgaacgagagcagaaacagcgtgattttgatcgcaaactgctcctggccaagtccaagatcgagatggaggagactgacaaagagcagctaacagctgaggccaaagagttacggcaaaaagtcaagtacttgcaagatcagttatctccactcacaaggcagagagaataccaggaaaaagaaatccagaggctgaataaagcgttggaggaggccctgtccattcagacacccccctcttcgccgccaactgcgttcggaagtcctgagggagcaggagcgctgctgaggaagcaagagctcgtaacccagaacgagctcctgaaacagcaggtgaagatattcgaggaagactttcagcgtgagaggtcggatagagaacgtatgaacgaggagaaggaagagctgaaaaagcaagtggaaaagctgcaggcccaagtgaccttgagtaacgcacaactcaaagcatttaaggatgaggagaaggctcgcgaggccctgaggcagcaaaagagaaaagccaaagctagtggggaacggtatcacgtggaacctcatccagaacacctctgtggagcatatccatacgcctatcctccaatgcctgcgatggtgcctcaccacggattcgaagactggtcccagatccgctatcccccccctcctatggctatggagcaccccccgccactgcctaatagccggctttttcaccttccagagtacacctggaggttaccatgtggcggagtcagaaatcccaaccagtcctcacaggtgatggacccccccacagcccgccccacggaaccagagagccctaagaacgaccgcgagggaccacagtag

SEQ ID NO: 333115 - DNA, 1797 bp, Artificial Sequence
  derived and/or modified sequence
atgcaagggattaagatgttgggcgaactgttggaggagtctcaaatggaggctaccaggctccgccagaaagccgaagagctggtgaaagacaatgaactgctgcccccaccctccccaagcctgggttcttttgatcccctggctgagttgaccgggaaggactctaatgtgaccgcgagtcctacagcgccggcctgcccgtccgacaaacctgcacccgtgcaaaagcctcccagtagcgggacaagtagcgaattcgaggtggttaccccagaagaacagaattcacctgagtcctcaagccacgccaacgcaatggctcttggtccgttgcctagggaggacggaaatcttatgctgcacctacagcggctggaaaccactcttagtgtgtgcgcggaggagcctgatcatgggcaattgtttacccatctgggcaggatggcgctagagtttaatcgcctggcgagcaaagtccataaaaacgagcagagaacttcgatactccagaccctgtgtgagcaactcagaaaagagaatgaagctttaaaagcaaagctggacaaagggctagagcagagagatcaagccgcagaacgcctaagggaggagaatttggagttgaaaaaactgctcatgagcaacggcaataaagaaggggcaagtggcagacccggatcccccaaaatggaaggcactggcaaaaaggcggttgctggtcagcagcaagcatccgtgaccgccggcaaggtcccagaggttgtggcattaggcgccgccgaaaagaaggttaagatgctcgagcagcagagaagcgagctgctcgaggtcaacaagcaatgggaccaacatttccggtccatgaaacagcagtacgagcagaagattaccgagttgagacaaaagctcgctgacctgcagaagcaggtcacggatctggaggccgagagagagcaaaaacaaagggatttcgaccggaagctgctgctggccaagagcaagatcgaaatggaggaaaccgataaggagcaactgacagctgaggcgaaagagttacggcagaaggtcaagtacctccaggatcagttgtcccccctgacacgtcaaagggaatatcaagagaaagagatacagcggctcaacaaagctctagaggaagcgttatccatccagacacctcctagctcccctccgacagcttttggatctcctgaaggagcaggagctctacttaggaaacaggaactcgtcacccaaaatgagcttctgaagcagcaggtgaaaatctttgaggaggacttccagcgtgagcgctctgacagagagaggatgaatgaagaaaaggaagagcttaagaagcaagtcgagaagctccaggctcaggttaccctgtctaatgcccaacttaaggccttcaaggacgaggagaaggcccgcgaggcgctgcggcagcaaaagagaaaggccaaagccagcggcgagaggtatcatgttgagccacacccagaacatctgtgtggcgcctatccctacgcgtatccacctatgcccgccatggtgccccaccatggattcgaggattggagccaaataaggtatccacccccaccaatggccatggagcaccctcctcctctccccaacagtcgactgttccacttacccgagtacacctggagactcccatgtgggggggtccgcaaccctaatcaatccagtcaagtcatggacccccctacggctcgtccaacagaaccggagagccctaagaacgatcgcgagggcccccaatag

SEQ ID NO: 333116 - DNA, 1911 bp, Artificial Sequence
  derived and/or modified sequence
atggagggccggggcccctaccgcatctatgaccccggcggctctgtgcccagcggggaggccagcgctgcctttgagcggctggtgaaggagaacagccggctgaaggagaagatgcagggcatcaagatgctgggggagctgctggaggagagccagatggaggccacccggctgcggcagaaggccgaggagctggtgaaggacaatgagctgctgcccccacccagccccagcctgggcagctttgaccccctggccgagctgaccgggaaggacagcaatgtgacagccagccccacagccccagcctgccccagcgacaagccagcccctgtgcagaagccacccagcagcggcaccagcagcgagtttgaggtggtgaccccagaggagcagaacagccctgagagcagcagccacgccaatgccatggccctgggccccctgcccagagaagatggcaacctgatgctgcacctgcagaggctggagaccaccctgtctgtgtgtgccgaggagccagaccacggccagctgttcacccacctgggccgcatggccctggagttcaaccggctggccagcaaggtgcacaagaatgagcagaggaccagcatcctgcagaccctgtgtgagcagctgaggaaagaaaatgaggccctgaaggccaagctggacaagggcctggagcagagggaccaggccgctgagcggctgcgggaggagaacctggagctgaagaagctgctgatgagcaatggaaacaaggagggcgccagcggccggcccggcagccccaagatggagggcaccgggaagaaggctgtggccggccagcagcaggcctctgtgacagctgggaaggtgcctgaggtggtggccctgggcgctgctgagaagaaggtgaagatgctggagcagcagaggtctgagctgctggaggtgaacaagcagtgggaccagcacttccgctccatgaagcagcagtatgagcagaagatcacagagctgcggcagaagctggccgacctgcagaagcaggtgacagacctggaggccgagcgggagcagaagcagagggactttgacaggaagctgctgctggccaagagcaagattgagatggaggagacagacaaggagcagctgacagctgaggccaaggagctgcggcagaaggtgaagtacctgcaggaccagctgagccccctgacccggcagcgggagtaccaggagaaggagatccagaggctgaacaaggccctggaggaggccctgagcatccagaccccacccagcagccccccaacagccttcggcagccctgagggcgctggggccctgctgaggaagcaggagctggtgacccagaatgagctgctgaagcagcaggtgaagatctttgaggaggacttccagcgggagaggagtgaccgggagaggatgaatgaggagaaggaggagctgaagaagcaggtggagaagctgcaggcccaggtgaccctgagcaatgcccagctgaaggccttcaaggatgaggagaaggcccgggaggccctgcggcagcagaagaggaaggccaaggccagcggggagcgctaccacgtggagccccaccctgagcacctgtgtggggcctacccctatgcctacccacccatgcctgccatggtgccccaccacggctttgaggactggagccagatccgctacccacctccacccatggccatggagcaccccccacccctgcccaacagccgcctcttccacctgcctgagtacacctggaggctgccctgtggcggcgtgaggaaccccaaccagagcagccaggtgatggaccccccaacagcccggcccacagagcctgagagccccaagaatgaccgggagggcccccagtag

SEQ ID NO: 333117 - DNA, 1752 bp, Artificial Sequence
  derived and/or modified sequence
atggaggccacccggctgcggcagaaggccgaggagctggtgaaggacaatgagctgctgcccccacccagccccagcctgggcagctttgaccccctggccgagctgaccgggaaggacagcaatgtgacagccagccccacagccccagcctgccccagcgacaagccagcccctgtgcagaagccacccagcagcggcaccagcagcgagtttgaggtggtgaccccagaggagcagaacagccctgagagcagcagccacgccaatgccatggccctgggccccctgccccgggaggatggcaacctgatgctgcacctgcagaggctggagaccaccctgtctgtgtgtgccgaggagccagaccacggccagctgttcacccacctgggccgcatggccctggagttcaaccggctggccagcaaggtgcacaagaatgagcagaggaccagcatcctgcagaccctgtgtgagcagctgaggaaagaaaatgaggccctgaaggccaagctggacaagggcctggagcagagggaccaggccgctgagcggctgcgggaggagaacctggagctgaagaagctgctgatgagcaatggaaacaaggagggcgccagcggccggcccggcagccccaagatggagggcaccgggaagaaggctgtggccggccagcagcaggcctctgtgacagctgggaaggtgcctgaggtggtggccctgggcgctgctgagaagaaggtgaagatgctggagcagcagaggtctgagctgctggaggtgaacaagcagtgggaccagcacttccgctccatgaagcagcagtatgagcagaagatcacagagctgcggcagaagctggccgacctgcagaagcaggtgacagacctggaggccgagcgggagcagaagcagagggactttgacaggaagctgctgctggccaagagcaagattgagatggaggagacagacaaggagcagctgacagctgaggccaaggagctgcggcagaaggtgaagtacctgcaggaccagctgagccccctgacccggcagcgggagtaccaggagaaggagatccagaggctgaacaaggccctggaggaggccctgagcatccagaccccacccagcagccccccaacagccttcggcagccctgagggcgctggggccctgctgaggaagcaggagctggtgacccagaatgagctgctgaagcagcaggtgaagatctttgaggaggacttccagcgggagaggagtgaccgggagaggatgaatgaggagaaggaggagctgaagaagcaggtggagaagctgcaggcccaggtgaccctgagcaatgcccagctgaaggccttcaaggatgaggagaaggcccgggaggccctgcggcagcagaagaggaaggccaaggccagcggggagcgctaccacgtggagccccaccctgagcacctgtgtggggcctacccctatgcctacccacccatgcctgccatggtgccccaccacggctttgaggactggagccagatccgctacccacctccacccatggccatggagcaccccccacccctgcccaacagccgcctcttccacctgcctgagtacacctggaggctgccctgtggcggcgtgaggaaccccaaccagagcagccaggtgatggaccccccaacagcccggcccacagagcctgagagccccaagaatgaccgggagggcccccagtag

SEQ ID NO: 333118 - DNA, 1797 bp, Artificial Sequence
  derived and/or modified sequence
atgcagggcatcaagatgctgggggagctgctggaggagagccagatggaggccacccggctgcggcagaaggccgaggagctggtgaaggacaatgagctgctgcccccacccagccccagcctgggcagctttgaccccctggccgagctgaccgggaaggacagcaatgtgacagccagccccacagccccagcctgccccagcgacaagccagcccctgtgcagaagccacccagcagcggcaccagcagcgagtttgaggtggtgaccccagaggagcagaacagccctgagagcagcagccacgccaatgccatggccctgggccccctgcccagagaagatggcaacctgatgctgcacctgcagaggctggagaccaccctgtctgtgtgtgccgaggagccagaccacggccagctgttcacccacctgggccgcatggccctggagttcaaccggctggccagcaaggtgcacaagaatgagcagaggaccagcatcctgcagaccctgtgtgagcagctgaggaaagaaaatgaggccctgaaggccaagctggacaagggcctggagcagagggaccaggccgctgagcggctgcgggaggagaacctggagctgaagaagctgctgatgagcaatggaaacaaggagggcgccagcggccggcccggcagccccaagatggagggcaccgggaagaaggctgtggccggccagcagcaggcctctgtgacagctgggaaggtgcctgaggtggtggccctgggcgctgctgagaagaaggtgaagatgctggagcagcagaggtctgagctgctggaggtgaacaagcagtgggaccagcacttccgctccatgaagcagcagtatgagcagaagatcacagagctgcggcagaagctggccgacctgcagaagcaggtgacagacctggaggccgagcgggagcagaagcagagggactttgacaggaagctgctgctggccaagagcaagattgagatggaggagacagacaaggagcagctgacagctgaggccaaggagctgcggcagaaggtgaagtacctgcaggaccagctgagccccctgacccggcagcgggagtaccaggagaaggagatccagaggctgaacaaggccctggaggaggccctgagcatccagaccccacccagcagccccccaacagccttcggcagccctgagggcgctggggccctgctgaggaagcaggagctggtgacccagaatgagctgctgaagcagcaggtgaagatctttgaggaggacttccagcgggagaggagtgaccgggagaggatgaatgaggagaaggaggagctgaagaagcaggtggagaagctgcaggcccaggtgaccctgagcaatgcccagctgaaggccttcaaggatgaggagaaggcccgggaggccctgcggcagcagaagaggaaggccaaggccagcggggagcgctaccacgtggagccccaccctgagcacctgtgtggggcctacccctatgcctacccacccatgcctgccatggtgccccaccacggctttgaggactggagccagatccgctacccacctccacccatggccatggagcaccccccacccctgcccaacagccgcctcttccacctgcctgagtacacctggaggctgccctgtggcggcgtgaggaaccccaaccagagcagccaggtgatggaccccccaacagcccggcccacagagcctgagagccccaagaatgaccgggagggcccccagtag

SEQ ID NO: 333119 - DNA, 1911 bp, Artificial Sequence
  derived and/or modified sequence
atggagggccggggcccctaccggatctacgaccccggcggcagcgtgccctctggagaagcgtcagccgcttttgagaggttagtgaaggagaattcccggctgaaagagaaaatgcagggcattaaaatgcttggcgagttgctcgaggagtctcaaatggaagccacacgcctgcggcagaaagccgaggaattagtgaaagataatgaactgctgcctcctcccagtccctccctggggtcatttgatcccctcgccgaactcactggcaaggattccaatgtgactgcctcccctacagctcccgcgtgtcctagtgataagccagccccggtgcagaaaccaccctcttctggaactagcagtgaattcgaggtggtgactccagaggagcagaactccccagaatcttcctcacatgccaatgccatggcactcggcccactcccacgggaagatggcaatctgatgctacaccttcagagactcgagaccacattgtccgtttgtgccgaagagcctgaccatggacagttgttcacacaccttgggcgtatggcccttgaatttaataggctggcctctaaggtccataagaacgaacagcggacgagcatccttcagaccctgtgcgaacagctcagaaaagaaaatgaggctctgaaggccaagttggacaagggattagagcaacgggatcaagctgcagaaagactgcgtgaggagaatctggagttgaagaagcttttgatgagtaatggaaataaagagggtgcatctgggcggccgggctcgcctaaaatggagggtacaggcaaaaaggctgttgccggtcagcagcaagctagcgtcaccgccgggaaagtgcctgaggttgtggcactcggagccgccgagaagaaagtgaaaatgctggaacaacagcgatccgaacttctggaggttaacaagcagtgggaccagcattttcggagcatgaaacagcaatacgaacaaaaaatcactgaacttcggcagaagctcgcagatcttcagaaacaggtgacggacctggaggccgagagggaacaaaagcagcgtgattttgatagaaagctactgcttgctaagagcaagatcgaaatggaggaaacggataaggagcaattaacagctgaggcgaaggagttgagacaaaaggtcaaatatctgcaggaccagctaagtcccctaacacggcagagggagtatcaggagaaagaaatccagagactcaacaaggcattggaagaggcacttagtatacagactccaccctcctccccacctaccgcatttgggagtccggagggagcaggagcgctgctgcgtaagcaggaattggtcacccagaatgagctgctgaaacagcaggtcaaaatttttgaggaagacttccagcgggagcgctctgaccgggagcgtatgaacgaggagaaagaagaactgaagaagcaagtggaaaagctccaagcccaagttaccctctccaacgcacagctgaaagcattcaaagacgaggaaaaagctcgcgaggctctgcggcaacagaaaagaaaagcgaaggccagtggcgagcgctaccacgttgagccccatcccgagcacttatgtggcgcatacccctatgcctatccccccatgcctgctatggtcccccatcacggattcgaggactggtctcaaatccgatatccacccccaccaatggctatggagcacccccctccgttgccaaactctcggctctttcacctccccgagtatacgtggaggttgccctgcggcggcgttcgaaacccgaatcagtcatctcaggtcatggatccccctaccgcccggccaacagagcctgagagcccaaagaatgaccgagaaggaccacagtag

SEQ ID NO: 333120 - DNA, 1911 bp, Artificial Sequence
  derived and/or modified sequence
atggagggccggggcccctaccggatctacgaccccggcggcagcgtgccctcgggagaggcgtcagctgcatttgagcgtctcgttaaggaaaattccagactcaaggaaaagatgcagggcatcaagatgttgggagagctgctcgaggaaagccagatggaggctacacgtctccgccagaaggcggaagagctggttaaggacaatgaactactgcccccaccctctccaagtctcgggtcttttgaccctctggccgaactgactggcaaggattccaacgtgacagctagccccactgcccctgcctgccccagcgataagccagctcctgtgcaaaagccaccatcatctgggacatcctccgagtttgaggttgtaacacctgaggaacagaactcccccgagtcctcaagccacgctaacgccatggccctgggacctctcccgcgggaagatggcaatctgatgcttcatctacagagactcgaaaccacactgagcgtgtgcgcggaggaaccggatcatggacagttgttcacccacttgggaagaatggccttggaattcaatcgactcgccagtaaggtgcacaagaacgagcagaggacctcaattctgcagacgctgtgtgaacagctgcgcaaggagaatgaagctttaaaggcgaagctcgataagggcctggaacagcgtgatcaggctgcagaacgcctgcgcgaagaaaacctggagcttaagaagctgttgatgtccaatggcaacaaagaaggtgcctccggacgaccaggctcacctaaaatggagggtacagggaagaaagccgtcgctggccaacagcaggctagcgtgactgccgggaaagtgccggaagtggtcgcccttggagcggcggagaagaaggtgaagatgctggagcagcagcggtccgagctactggaggtgaataagcagtgggaccaacatttcaggtccatgaagcaacaatatgagcagaagattacagagctgcgacagaagctcgccgacctccaaaagcaagttacggacctagaggccgaacgcgagcagaagcaacgggatttcgatcggaaactgctgcttgcaaaaagtaagatcgagatggaggaaactgataaggagcagctcaccgccgaggccaaggaactgcgccagaaagtaaagtatctccaagaccaactcagcccactcactcggcagagggagtatcaagaaaaggagatccagcggttgaacaaagccctagaggaggccctctcaatacaaacccctccctcatcacctccgacagccttcggatccccagagggcgccggtgcgctgctgcgcaagcaggaattagtcacccagaacgaactgctcaagcagcaggtaaaaattttcgaagaagatttccagcgggagcggtctgaccgtgagaggatgaacgaggaaaaagaggagctcaagaagcaagtcgagaagctacaggcccaggtgacccttagcaacgctcaactcaaagcgtttaaagacgaagagaaggctcgggaggccctcagacaacaaaagcggaaggccaaggctagtggagaaaggtatcatgttgaaccccacccggagcacctgtgcggggcttacccatacgcctaccctccaatgccagcaatggttcctcatcatggcttcgaggattggtcgcaaatccggtacccccctccgcccatggccatggagcaccccccacccttgcccaattctcggttgtttcacttgcccgaatatacttggaggcttccgtgtggaggcgtgcgcaacccaaatcagtcctcgcaggtgatggatcctcccacagcacgacccactgagccagagtctccaaagaatgaccgggagggtccccaatag

SEQ ID NO: 333121 - DNA, 1752 bp, Artificial Sequence
  derived and/or modified sequence
atggaggccacccggctgcggcagaaggccgaggagctggtgaaggacaacgaactgctcccacccccatcgccttctctgggttctttcgatcctctggccgaattaacaggaaaagactccaatgtgacggccagcccgactgctcccgcatgcccatctgacaaaccagcacccgtacagaaacctcctagctccggaactagctccgagtttgaggtcgtgactcctgaagaacaaaactcacctgagtcttcctcacatgctaatgccatggccctgggcccactaccacgggaagatgggaacctgatgttgcatttacagcggctagagaccactcttagtgtatgtgccgaggagcccgatcacggacagcttttcacgcatctgggccggatggccctcgagtttaaccggttagcttctaaagtccacaagaacgagcaaaggacttctattttgcagacgctgtgtgaacagctgcggaaagagaatgaagccctgaaggccaagctcgacaaaggactggagcagagagatcaggctgccgaacggctgcgtgaggagaacctggagctcaaaaaactgcttatgagtaatggcaacaaggagggagccagtggacgtcctgggagtccaaaaatggagggcactggcaagaaagcggttgctggacagcaacaggcctctgtgacagcgggaaaggtgcctgaggtggtggcactgggagccgccgagaaaaaggtcaaaatgttagagcaacagcgctccgagctgcttgaggttaacaaacagtgggaccagcactttagatccatgaagcagcagtatgaacagaaaattactgagcttcggcaaaagctggccgacctccagaaacaggttacggacctcgaggcggaaagggagcaaaaacagcgagattttgaccgcaagctgttgttggccaagagtaaaatcgagatggaagagaccgataaggagcagctgactgccgaggcaaaggaattacgtcagaaggttaagtacctccaagatcaattatctcctttgaccaggcagcgggagtaccaggaaaaggaaatccagcggttgaataaagcactggaagaggccctgagtatccagactccccctagctccccacccaccgcattcggtagtccagaaggcgcgggagcattgttgcgcaagcaggagctcgtgacccaaaacgaacttctgaaacaacaagtcaagatattcgaagaggacttccagcgggaaagaagcgaccgcgaacgaatgaacgaggaaaaagaggaattaaagaagcaggtggagaagctccaggcgcaggtcacgctgtctaacgcccagctgaaagcattcaaggacgaggagaaggcaagggaggccttgcgccagcaaaagcgaaaagctaaagcctcgggagaacgataccacgtggaaccgcacccggagcacctgtgcggcgcctacccatacgcctaccctccaatgccagctatggttccccaccacggatttgaagactggtctcaaatcagataccctcctccccccatggcaatggagcaccctccgccactgcctaacagccgtttgttccacctcccagaatatacttggagactgccctgcggaggggtccgaaacccaaatcagagttcgcaagtgatggatccgcccaccgccaggcccactgagccggaatcaccaaagaatgacagggaaggccctcaatag

SEQ ID NO: 333122 - DNA, 1911 bp, Artificial Sequence
  derived and/or modified sequence
atggagggccggggcccctaccggatctacgaccccggcggcagcgtcccctcaggggaagctagtgctgcctttgagagactggttaaggaaaattccagacttaaagaaaaaatgcagggaattaaaatgctaggcgagctgctcgaggagagccagatggaagcaactcgcctccggcagaaggcggaggagttggtgaaagacaacgaattgcttcctccgccctcaccatccctgggatcatttgacccactggcggaactaaccggaaaagactccaatgtcacagcctcccccacagcacctgcttgtcccagtgataagccagcacccgttcagaagcccccatccagcggcacttcctccgaattcgaagtggttactcccgaagaacaaaactcacccgagtccagtagccatgcgaatgctatggcgttaggccctctgcccagagaggatggaaatctgatgctccacctgcaacggctagagactaccctctccgtgtgtgccgaggagccagatcatggtcagttgttcacccatctggggcggatggctctggagttcaaccggttagcctccaaagtacacaaaaacgaacagaggacaagcatcctgcagacgctttgtgagcagcttcgcaaggaaaatgaagcccttaaggctaagctggataagggcttggagcaacgggaccaggcagcagaaaggctgcgagaagagaacctcgagcttaaaaaactcttaatgtcaaatggaaataaagagggggcgtcgggaagacctggatctcctaagatggagggcacgggcaagaaagccgtggctggacagcagcaggcaagcgtgactgcagggaaggtgcccgaggtcgttgcgctgggggctgctgagaagaaggtgaagatgctggaacaacaacgctccgaacttttagaggtgaacaagcagtgggaccaacactttcgttccatgaaacagcagtatgagcagaaaataaccgaactccggcagaaactcgccgatctacagaaacaagtcacggatctggaggccgagagggagcaaaagcagagagattttgatcggaagctactcttggcaaagtccaagatcgagatggaggaaacggataaggagcaactgaccgcagaagctaaagaactgaggcagaaagttaaatacctgcaggaccagctgagtccgttaactagacagcgggagtatcaagagaaggaaatccaaagactcaacaaagccctcgaagaagccctgtccatacaaactcccccttcatcacctccgaccgccttcggaagtcccgagggcgcaggggcattgttgagaaagcaggagctggttacgcagaacgagcttctaaaacaacaggtaaagatttttgaggaggattttcagcgcgagcgctcggacagggagagaatgaatgaggagaaagaagagctgaagaagcaggtggagaaactgcaagctcaggtgaccctgtccaacgcacagctgaaggcctttaaggacgaagagaaggcaagagaggcgcttaggcagcagaagagaaaggccaaggcatcaggcgagaggtaccacgtcgaaccacatcccgagcatctgtgtggcgcttacccgtacgcgtatccacccatgcccgccatggtccctcaccatgggttcgaagactggtcacagatacggtacccccctccccctatggccatggaacaccccccccctctgccgaacagccgcctgtttcacctccccgagtatacatggcggctcccctgtggcggggtaaggaatcccaatcagtcatcacaggtcatggaccctccaactgcccgcccgactgaacctgagtcacccaagaatgaccgggaaggtccccagtag

SEQ ID NO: 333123 - DNA, 1911 bp, Artificial Sequence
  derived and/or modified sequence
atggagggccggggcccctaccggatctacgaccccggcggcagcgtaccctccggtgaggcatcggcggccttcgaacgtctggtcaaagagaacagtaggctgaaggaaaaaatgcaagggatcaagatgctgggcgaattgcttgaagagtcccagatggaagctacccgcctcagacaaaaagccgaagaattagtcaaagataacgaactgctgcccccgcctagccctagcctgggctcattcgacccgttggccgaactcacaggcaaggactcaaacgtcactgcctcacccaccgctccagcctgtccttcagacaaaccggccccagttcagaagcctcctagttctggaacaagtagcgaattcgaggtggtgactcccgaagagcagaactcaccagaatcttctagccatgctaacgccatggccctcgggcccctgcctcgggaggatggaaaccttatgttgcacctgcagcggctcgaaacaactttgtctgtttgcgcagaagaacctgaccatgggcaactgttcacacatctgggacggatggctctggaatttaacaggctcgcaagcaaagttcataaaaacgaacaaagaaccagcatcttgcagacactatgtgagcagttgcgaaaagagaacgaagccctgaaagctaagctcgataaggggctggagcaacgcgatcaggccgctgaacgacttcgagaggaaaacttagagctgaaaaaattgctgatgagcaatgggaataaggagggtgcgagcggccggcccggctcccccaagatggaggggaccgggaaaaaagccgtggcagggcaacagcaggccagcgtaaccgctggaaaggtacccgaggtggtggccctcggagccgctgaaaagaaagttaaaatgttggagcagcaacgcagcgagttgctggaggtgaacaaacagtgggatcagcacttccgtagtatgaagcagcagtatgaacaaaaaatcaccgaacttaggcagaaacttgccgatctgcagaagcaggtgaccgatctcgaggctgagcgcgagcagaaacagcgggactttgaccgcaagctcctgctggccaagagcaagattgaaatggaggagactgacaaggaacaacttacagcagaggccaaagagttaaggcagaaggtgaaatacctgcaggaccagctgtctcctctgacgaggcagcgggaataccaggaaaaagaaatccaacgcctcaacaaggccttggaggaagccctcagcatccagacacccccatctagccctcccaccgcatttggcagtcctgaaggggctggagccctcttaaggaaacaggaattagtgacccagaatgaactgttgaagcagcaggtgaaaattttcgaagaggattttcagcgggaacgatccgatcgagagagaatgaacgaagagaaggaggagctgaaaaaacaggtagaaaaattgcaggcacaagtgactttatcaaatgcccagctgaaggcttttaaggacgaggagaaggctcgcgaggccctcagacagcagaagagaaaggccaaagcgagcggcgagcggtatcatgttgaaccgcatccggaacacctgtgtggggcctatccgtacgcttaccctcctatgcctgcaatggtccctcatcacggattcgaggactggagtcagataaggtacccacccccccccatggctatggaacacccccctccactgcccaactctcgactgtttcacttacctgagtacacgtggagactgccttgcggaggggtgaggaaccccaaccagagctctcaggtgatggatcccccaacagcccgacccaccgaacccgaaagtcctaaaaatgatagagaggggccacagtag

SEQ ID NO: 333124 - DNA, 1797 bp, Artificial Sequence
  derived and/or modified sequence
atgcagggcatcaagatgctgggcgagctgctggaggagagccagatggaggccacccgtctaagacagaaagccgaggaactggtgaaggataatgagctgctgccccctccttccccctccctgggctcttttgatccattggccgagcttacgggcaaagacagtaacgtgacagcttcccccactgcccctgcttgtccaagtgataagccagcccctgtgcagaagccaccatcttctgggactagttcggagtttgaagtggtgactccagaagaacagaattcaccagagagctcctcgcacgctaacgctatggcactcggtccactccctcgcgaggatggcaacctgatgcttcacctgcagcggttggagacgaccttgtccgtttgtgctgaggagccagatcacggccagctcttcacccaccttggaagaatggctcttgaatttaacaggctggctagtaaagtccacaagaacgagcagcggacttccatcctgcagaccctgtgtgagcaactccgaaaagaaaatgaagcgctgaaagctaagctcgacaaggggctcgagcagcgagatcaggccgcggagcggcttcgcgaagaaaaccttgagctaaaaaaactcttgatgtctaatggtaacaaggaaggtgcaagtggccggccaggatctcctaaaatggaaggaacaggcaagaaggcagtcgcgggccaacagcaggccagtgtaaccgcaggcaaagtgcctgaagtcgttgccctgggtgctgctgagaagaaggttaagatgttggaacagcaacgctcagagctgttggaggtcaacaaacagtgggatcagcattttagatcgatgaaacagcaatacgagcagaaaattactgagctcaggcaaaaattggctgacctccaaaaacaggtcacagacctggaagccgaacgggagcagaagcagcgggattttgataggaaattactgcttgccaaatcaaagatcgagatggaagagaccgacaaggaacaactaactgctgaagcaaaggagctgagacaaaaggtgaagtatttgcaggaccagctgtctccactgactagacagagagaataccaggaaaaagagatccaacggcttaataaggctctggaggaagccctgagcatccagactccaccgagttcccctccgaccgctttcgggagccccgaaggagccggcgccttactgaggaaacaggagctggtcacacaaaacgagctcctcaaacagcaggtcaaaatatttgaggaagacttccagcgagagcgctccgatcgcgagcgcatgaatgaagaaaaagaggagttgaagaaacaggtggagaagctgcaggcacaggtgaccctgtctaacgcacagttaaaggcttttaaagatgaggaaaaagcaagagaagcccttagacagcagaaacgcaaagccaaagcctccggagaaaggtaccacgttgagccgcatcccgagcatctatgtggtgcatatccctacgcataccctccgatgccagcaatggtccctcaccacggcttcgaagattggagtcagatacggtatcccccgccccctatggccatggaacatccacctcctctccccaatagtcggctgttccacctgccagagtatacgtggcgactaccgtgtggtggagtgaggaaccctaatcagtcgagccaagtcatggatcccccgacggcaaggccaaccgaaccagagtctccaaagaatgaccgggagggtccacaatag

SEQ ID NO: 333125 - DNA, 1911 bp, Artificial Sequence
  derived and/or modified sequence
atggagggacgcggtccatacagaatctacgacccaggtggttccgtgccatctggggaggcctcagccgcattcgagcgactcgtaaaggagaactctagactgaaggaaaaaatgcagggcataaaaatgctgggcgagttactcgaggagagtcagatggaagccacccggctgagacaaaaggctgaagagcttgtcaaggacaacgaacttctgcccccaccttctccgtcacttggcagttttgaccccctcgctgagctcactgggaaagatagcaacgtgacagcctcacccactgcacccgcttgcccatccgataagccagccccagtgcagaaaccacccagctcaggcacatcttccgaatttgaagttgtgacacctgaggaacagaactcccccgagtccagctcacacgccaatgctatggctctcggcccattgccccgagaggacggcaacctgatgcttcacctgcaacggctcgagaccacgctctccgtgtgcgccgaggagccagaccacggtcagctcttcactcacctcgggagaatggccttggagtttaataggctggctagcaaggtacataagaacgagcagcggacatccattttgcagaccctttgtgagcagttgcgaaaggaaaacgaggccctcaaagccaaacttgataagggacttgaacaacgcgaccaagctgccgaaagacttcgagaggaaaacctcgagctcaagaagctgttgatgtctaatggaaataaggagggggcttctggcaggccaggctcccctaaaatggaaggcaccgggaagaaagcagtggccggacaacagcaggctagcgtgactgccggtaaagtgcctgaggtcgtggcccttggcgcagccgagaaaaaagtgaagatgctcgagcaacagcgctctgaattgcttgaagttaataaacaatgggaccaacacttcaggtctatgaaacagcagtacgagcagaaaattacagagctacgacagaaactggctgacctgcagaaacaagtgacagacctggaggcagaaagggaacaaaaacagcgagattttgaccgaaaactactactagctaagtcaaagatcgagatggaagagacagacaaagaacaactgactgccgaagctaaagaactgaggcagaaggtcaagtacctccaggaccagttaagccctctgacgagacagagagaataccaggagaaagaaattcagaggcttaataaggcacttgaggaggcattatccatccagactcccccaagcagccctcctaccgcttttgggagtccggagggggcaggcgcacttttgcgaaagcaagaactggtcactcagaacgagctactgaagcagcaagtcaagatcttcgaagaggactttcagcgagaacgctcggaccgagaaagaatgaacgaagaaaaggaggagctgaaaaaacaagtggaaaaacttcaggcccaggtgactctctcgaacgcccagttaaaggccttcaaggacgaagagaaggctcgggaagcattgagacaacagaagagaaaagctaaggcttccggggaacggtatcacgtggagccacatccagagcatctgtgcggagcctacccctacgcctatcccccaatgccggctatggtcccccaccatggattcgaggactggagccaaattagatacccccctccacctatggctatggagcaccctcctcccctccccaacagtcgcctctttcacctaccagagtatacctggcgcctgccttgtggcggagttcggaatccaaaccagtcctcccaggtgatggaccctccaaccgcacggcctaccgaacccgaatctcctaagaatgaccgtgaaggccctcagtag

SEQ ID NO: 333126 - DNA, 1911 bp, Artificial Sequence
  derived and/or modified sequence
atggagggaaggggtccttacagaatctacgaccctgggggatccgtgccttcaggggaggcttccgccgcttttgaacgcttggttaaagaaaacagccggctgaaagaaaagatgcagggtattaagatgttgggcgagcttctagaagaatctcaaatggaagccacccgccttcgtcagaaggccgaagagctggtgaaggataatgaactgctacctccacccagcccttcattgggttcgtttgaccccttggcagagttaactggcaaggattccaacgtgacagcttctccaacagccccagcctgtcccagcgataagccagctccggtccaaaagccaccttccagcggaacttcatccgagttcgaagtggtaacaccagaagagcaaaacagccctgagagttcctcccacgcgaatgctatggccttgggaccgctcccacgtgaggatgggaaccttatgttgcacctgcagcgcttggagacgacattgagcgtctgtgctgaggagcctgaccatggccagctgtttacccatttggggagaatggcgctggaatttaaccgattagcaagcaaagtgcacaaaaatgaacagcgcacttccatcctacaaacattgtgtgaacagctgagaaaagagaacgaggctctcaaggccaaactggacaaagggctcgaacagcgagaccaggctgccgaacgcttaagagaggagaacttggaactcaaaaaattgctcatgtctaacggtaacaaggaaggcgcttccgggagacctggatctccaaagatggaaggaaccggtaaaaaggccgtcgcagggcagcaacaggctagtgttacggccggaaaggtgcccgaggtcgttgcgctgggtgcggctgaaaagaaggtgaagatgttggaacagcaaagaagtgaactgctcgaggtcaacaaacagtgggaccagcactttcgctccatgaaacaacagtacgaacagaaaattacggaattgcggcagaaacttgccgatcttcagaagcaggtcaccgatctcgaagctgagcgagaacagaagcagagagactttgatagaaaattactgctcgccaagagtaaaatagagatggaggaaaccgacaaggagcaactcaccgcagaggctaaggagttgcgccaaaaagttaaatacctccaggatcagctttcacccctcacacgacagagggagtaccaggaaaaggagattcaacggctgaataaggcactggaagaggcactaagcatacagacccccccttcgagcccacccaccgcgttcggcagtcctgagggagcaggtgcccttttacggaagcaggagttggtcacccagaacgaattactgaaacagcaggtgaaaatctttgaggaagacttccagagggagcgcagcgaccgggagagaatgaacgaagaaaaagaagagctgaagaaacaggttgagaagctgcaggctcaggtaacgttgtctaacgcacagcttaaggctttcaaggacgaggagaaagcacgggaagccctgcggcaacagaaacgcaaggctaaagcaagcggcgaaagataccacgttgagccacacccggaacacctgtgtggagcgtatccctatgcctacccccctatgccagcaatggtgccccatcatggcttcgaggactggagccagataagataccctcctcccccaatggccatggaacacccacctcctttaccaaattctcgactatttcacctgccagagtacacctggcggttgccctgcggtggagtgcggaaccctaaccagtcatcccaagttatggacccaccaactgcacgacccacagagcctgagagcccaaaaaatgatagagagggaccacaatag

SEQ ID NO: 333127 - DNA, 1752 bp, Artificial Sequence
  derived and/or modified sequence
atggaagccaccagactcaggcaaaaagcggaagaattagtgaaggataatgaactgttgccaccaccttctccttccctgggcagtttcgatcccctggcagagctaaccggcaaagactcgaatgtaacagctagccccactgcacccgcttgtcccagtgacaagcccgcacctgtgcaaaaacctccttcatctggaacctcaagcgaattcgaagtcgtaaccccagaagagcagaacagcccggaaagctctagtcacgccaacgctatggccttaggacccctgcctcgtgaagatggtaacctgatgttgcacttacagcgccttgaaacgactctctccgtgtgtgcagaggaacctgaccatggacagctgtttacccacctgggacggatggcactcgagtttaatcgtttagcaagcaaggtacataaaaacgaacaaagaaccagcatcctacagacactatgcgaacagttgcgcaaagaaaacgaagctttgaaagcaaaacttgataagggcctggaacagagagatcaggccgctgagcggctacgcgaagaaaacctggagcttaaaaaactgctaatgtcaaacggcaacaaagaaggagctagcggtcggccaggaagtcccaagatggaaggcaccggaaagaaggcggtggcaggacagcagcaggccagtgtgaccgctggaaaagttcccgaggtggtggcgcttggcgctgccgagaagaaagtgaagatgttagaacagcagcgtagtgagctgctggaggtcaataagcagtgggatcagcacttcaggtcaatgaagcaacaatatgagcagaagatcacagagctgcgccaaaagttggctgacttacagaagcaggtcacagatctagaagccgagagagagcagaaacagcgcgattttgaccggaaattgctgctcgccaaatctaagatcgagatggaagaaacagacaaggaacagctgacagccgaggcaaaggaattgcgtcagaaagtgaagtatcttcaggatcagctatctcctctaaccagacaacgcgagtatcaagagaaagagatccagcggttgaacaaagcgctcgaagaggctctgtcaatccaaacacctccatctagcccccctacagcattcggctccccggagggcgcaggagccctgcttagaaaacaagaactggtcactcaaaatgagttgctcaagcagcaagtaaagattttcgaggaggacttccagcgcgagaggtcggaccgggaacgaatgaatgaggaaaaagaagaactgaaaaaacaggtggaaaagctgcaggcacaggtgacccttagcaatgcccaattgaaagcttttaaggacgaagagaaggctagggaagccctgagacagcagaaaagaaaggccaaagcttccggcgaaagatatcatgtcgaaccccatcctgaacacctgtgcggtgcctatccctacgcataccctccaatgccggctatggtcccccaccacggcttcgaggattggagccagatccgttatccgccacccccaatggctatggaacatcctcccccattgcccaatagcaggctcttccatttacctgagtacacatggcggctgccctgtggtggcgttaggaatccaaaccagagttcacaagtcatggacccgcctactgccagaccaaccgagcccgagtccccaaagaacgatagagaaggcccacagtag

SEQ ID NO: 333128 - DNA, 1911 bp, Artificial Sequence
  derived and/or modified sequence
atggagggcaggggaccctacaggatctatgaccctggcggaagcgtgcccagcggggaggcgtctgctgcatttgaaaggttagtcaaggaaaactctagactaaaagagaagatgcagggcattaagatgctcggagagctacttgaagagtcccagatggaggcaacacgtctgcgccagaaagctgaggagctcgtgaaggataacgaactcttgccgccaccctctccgagccttgggagtttcgatcccctggcagaactaaccggcaaggactccaatgtcactgcatcaccgactgctcctgcttgcccatcagataagcccgctcccgtgcagaagccccctagctcaggtacttccagcgaattcgaagtcgtaactcctgaggaacagaactctccggagtcatcaagccacgcgaatgccatggccctgggtcctctacccagagaggacggcaacctgatgctccatcttcagcggctggagactacactgtccgtgtgcgccgaggagccagatcatggtcagttgtttacacatctgggacgaatggcactggaatttaacagacttgcttcaaaagttcataaaaacgagcaaaggacatctatcctacaaaccctgtgtgagcaactcagaaaggagaacgaggccctgaaggccaagctcgataagggcctagagcagagggaccaggcagccgagagactgcgagaggaaaatcttgagttgaagaagcttcttatgtccaacggaaacaaggagggagcctccgggaggccagggtcccctaagatggagggcacaggcaagaaagcagtcgctgggcagcagcaggcttctgttacagccggaaaggtgcctgaggtcgtcgcccttggtgccgcagagaaaaaggtgaaaatgttggagcagcagagatctgagctactggaggtaaacaaacagtgggatcaacacttcagatccatgaagcagcagtacgaacaaaagattaccgagctgcgccaaaagttggccgacttgcagaaacaggtgacagacctggaggctgagcgcgaacagaagcaacgggatttcgatcgcaagttacttctcgcaaaaagtaagatagagatggaggagactgataaggaacagcttactgctgaagctaaagaactgaggcagaaagttaaataccttcaggaccagctttctccgctgactcggcagagagagtatcaagaaaaggagattcagcgcctcaataaagcactggaagaggcgctgagcatccagactcccccttcgagtcctccaaccgcttttggaagtccggaaggcgctggcgcacttctgcgaaaacaagagctggtcactcagaacgaactattgaaacagcaggttaaaatctttgaagaggacttccagcgagagcggtctgacagagagaggatgaatgaagaaaaagaggaacttaaaaagcaagtggaaaagttacaggctcaagttaccctgagcaatgcacagctgaaagcatttaaagatgaggaaaaggcaagggaggcattaaggcagcagaagcgaaaagcaaaggctagcggggagagataccacgtggagccacacccagagcacttgtgtggggcatatccttacgcatatccacctatgccagccatggttcctcaccacggctttgaggattggagtcaaatccggtaccctccccctccaatggctatggagcacccgcctccgttacctaactctagactgtttcatctccccgagtacacttggaggctcccttgtggcggagttcgaaacccaaatcaaagttcccaagtgatggatccacccactgcgaggcctaccgagcctgaatcccccaaaaatgaccgtgaggggcctcaatag

SEQ ID NO: 333129 - DNA, 1911 bp, Artificial Sequence
  derived and/or modified sequence
atggaggggagaggtccctatcgcatatatgaccccggaggatccgtgccatcaggtgaagcgagcgctgcctttgaacgcttggtcaaggaaaatagccggctaaaagagaaaatgcaaggaattaaaatgcttggagagctgctcgaagagtcacagatggaagccacccgactccgccagaaagccgaagaactagtcaaggataatgagctgctccctcccccatcaccgtctttgggaagctttgatccgttggcagaattgacaggcaaggacagcaatgtgaccgcgtcccctaccgcaccagcttgcccgagtgataagcccgctcctgtccagaaaccaccatcatctggcacgtctagtgagttcgaggttgtgacgcccgaagaacagaattcccccgagtcctctagccacgctaatgctatggcactcggccctcttccccgagaggatggaaacctgatgttacacctacaacgcctggaaaccacattgagtgtctgtgcagaggagcccgatcatggacagttattcactcacctgggaagaatggcgctcgagtttaatagactggcttccaaagtacacaagaacgaacagagaaccagtattttacagacattgtgcgagcagctacgcaaagaaaacgaagctttaaaagctaagttggataaaggcttggaacagcgtgaccaggcggctgagcgcctgagggaagagaatttagaactgaagaaactactgatgagcaatggcaacaaggaaggcgcttctggtcgccctggaagccctaaaatggagggcacagggaaaaaagcggtcgctggacagcagcaagcgagcgtcactgcgggaaaggtgcctgaagtggtggccctgggagccgctgagaagaaggtgaagatgctggagcaacagagatctgaacttttggaagtgaataagcaatgggaccagcatttcaggtctatgaaacagcagtatgaacagaaaattacagagctccgtcagaagctggccgacttacagaaacaggtgacagacctggaagcagaacgcgaacagaagcagcgtgacttcgaccgtaaattgttactcgctaagtctaagattgaaatggaagagaccgacaaggaacagctgaccgctgaagccaaagagctaagacagaaggtcaaatacctccaggatcagctctcccccctgacaagacagagggagtaccaggagaaagagatccagagattgaataaggcacttgaggaggccctgagcatccagactccgccttcatccccacctacggcattcggctctcccgagggcgcaggagcattgctgcgaaagcaggagctagtcacccagaatgaacttctcaagcagcaagtgaagatctttgaagaggattttcagcgcgaaaggtccgatcgcgagaggatgaatgaagagaaagaggagcttaagaaacaagtggagaagcttcaagcccaggtgaccttgtctaatgcacagttgaaggcatttaaagacgaggagaaagccagggaagcactaaggcagcaaaaaagaaaagcgaaagcctctggggagcggtatcatgtggaaccccatcccgagcacctctgcggcgcttacccttacgcctacccgcctatgcctgccatggttcctcaccacggattcgaagactggtcccagattcggtatcctccgccacccatggctatggagcacccccctccgttacccaattcacggttgtttcatcttccggagtacacatggagattaccgtgcggaggtgtcagaaatccaaaccagtcttcccaggtgatggatccaccaaccgcccgtcccacggagcctgagtcacccaaaaacgacagagaaggccctcaatag

SEQ ID NO: 333130 - DNA, 1797 bp, Artificial Sequence
  derived and/or modified sequence
atgcaagggattaaaatgctgggagaactcctcgaggaatcacagatggaagcaactcggctgagacagaaagctgaagaactggttaaagataacgaattgctcccacctcccagtcctagtctcggatcttttgatccccttgctgaattaaccgggaaggattccaacgtgaccgcaagccctaccgcacctgcttgcccttctgacaagcctgcaccggtacagaagccaccaagtagtggcactagcagtgaatttgaggttgtcacgccagaagaacagaacagccccgagtccagcagccacgccaacgcaatggccttagggccactgcccagagaggatggtaacctgatgctgcacctgcagcggctagaaactacactgagtgtgtgcgctgaggaacccgatcacggtcaactcttcacgcacttaggacgaatggctcttgagttcaaccgcctggcctcaaaggtacacaagaacgaacagcgcacatcaatactccagactctctgtgaacagctgcgcaaggagaacgaggcacttaaggccaagcttgacaagggcctcgagcaaagagaccaggccgcagaacgcctgcgcgaggaaaatctggaactcaaaaagctcttgatgagcaacggcaataaggagggagccagcggacgaccgggatcccctaagatggagggaaccggaaaaaaggccgtggccggacagcagcaggccagtgtgacggcagggaaagtcccagaagtcgtggccttgggggcagcagaaaagaaggttaagatgttggaacagcagaggagcgagctgttagaggtgaacaagcagtgggaccagcattttagaagcatgaagcagcaatacgaacaaaaaatcaccgagctgcggcaaaagcttgcagacctccagaagcaggtgaccgatctggaagcagagcgtgagcaaaagcagcgtgatttcgaccgcaagctgctcctcgcaaagtctaaaatcgagatggaggagacagataaggagcagctgacagctgaggccaaggaattacgacaaaaggttaaatacctccaggaccagcttagtcctctgacacgccagagggagtaccaggagaaggagatacagcgactgaacaaagctttggaggaggccctgtcaattcagacacccccatccagccctcccactgcattcgggagtcctgaaggtgcgggagccctgctgcgcaaacaggaactagtgactcagaatgagcttctcaaacaacaagttaaaatctttgaggaagatttccagcgagaacggtcagaccgtgagaggatgaatgaagagaaagaggagctgaagaaacaggtggagaagcttcaagcgcaggttacacttagcaacgcgcagctgaaagcatttaaagacgaagagaaggctcgagaggccctgagacagcagaaacggaaggctaaagcatcgggcgagcggtaccacgtagagccacacccggaacacctctgcggcgcatatccatacgcttatcccccaatgcccgctatggtacctcaccacggcttcgaagattggagccaaattaggtatccaccccctcccatggcaatggagcacccgccaccgttgccaaacagtaggctatttcacctgcccgaatacacttggaggttaccttgtggtggggtgcggaaccccaatcagtcttctcaggtcatggaccctccaactgcaaggcctacggaacccgagtccccaaaaaatgaccgggaaggaccacagtag

SEQ ID NO: 333131 - DNA, 2785 bp, Artificial Sequence
  derived and/or modified sequence
agtgagccgaggagccttcatagggacagccgcccctggtgcacacaccctcgtattctcctgcccttccccagccaggcgggcaccacggcaggggctgagctaccctcatggaagggagaggaccgtaccggatctacgaccctgggggcagcgtgccctcaggagaggcatccgcagcttttgagcgcctagtgaaggagaattcccggctgaaggaaaaaatgcaagggataaagatgttaggggagcttttggaagagtcccagatggaagcgaccaggctccggcagaaggcagaggagctagtgaaggacaacgagctgctcccaccaccttctccctccttgggctccttcgaccccctggctgagctcacaggaaaggactcaaatgtcacagcatctcccacagcccctgcatgccccagtgacaagccagcaccagtccagaagcctccatccagtggcacctcctctgaatttgaagtggtcactcctgaggagcagaattcaccagagagcagcagccatgccaatgcgatggcgctgggccccctgccccgtgaggacggcaacctgatgctgcacctgcagcgcctggagaccacgctgagtgtgtgtgccgaggagccggaccacggccagctcttcacccacctgggccgcatggccctggagttcaaccgactggcatccaaggtgcacaagaatgagcagcgcacctccattctgcagaccctgtgtgagcagcttcggaaggagaacgaggctctgaaggccaagttggataagggcctggaacagcgggatcaggctgccgagaggctgcgggaggaaaatttggagctcaagaagttgttgatgagcaatggcaacaaagagggtgcgtctgggcggccaggctcaccgaagatggaagggacaggcaagaaggcagtggctggacagcagcaggctagtgtgacggcaggtaaggtcccagaggtggtggccttgggcgcagccgagaagaaggtgaagatgctggagcagcagcgcagtgagctgctggaagtgaacaagcagtgggaccagcatttccggtccatgaagcagcagtatgagcagaagatcactgagctgcgtcagaagctggctgatttgcagaagcaggtgactgacctggaggccgagcgggagcagaagcagcgtgactttgaccgcaagctcctcctggccaagtccaagattgaaatggaggagaccgacaaggagcagctgacagcagaggccaaggagctgcgccaaaaggtcaagtacctgcaggatcagctgagcccactcacccgacagcgtgagtaccaggaaaaggagatccagcggctcaacaaggccctggaggaagcactgagcatccaaaccccgccatcatctccaccaacagcatttgggagcccagaaggagcaggggccctcctaaggaaacaggagctggtcacgcagaatgagttgctgaaacagcaggtgaagatcttcgaggaggacttccagagggagcgcagtgatcgtgagcgcatgaatgaggagaaggaagagctgaagaagcaagtggagaagctgcaggcccaggtcaccctgtcaaatgcccagctaaaagcattcaaagatgaggagaaggcaagagaagccctcagacagcagaagaggaaagcaaaggcctcaggagagcgttaccatgtggagccccacccagaacatctctgcggggcctacccctacgcctacccgcccatgccagccatggtgccacaccatggcttcgaggactggtcccagatccgctacccccctccccccatggccatggagcacccgcccccactccccaactcgcgcctcttccatctgccggaatacacctggcgtctaccctgtggaggggttcgaaatccaaatcagagctcccaagtgatggaccctcccacagccaggcctacagaaccagagtctccaaaaaatgaccgtgaggggcctcagtgagaccagattgtgtcatttggctccaccttcatcttgcagagccagctgatctcagattgccaagaaactagaagccacttgcacggtgtggccagagcctcagctggatgagaggctgagatgggtggccagcttgtacaccagtccctgaactgagctgtttacaggactggggaggctccacccagaaggctttcatttgtactctgctgggagtgactgggaaaaactccttccctgctgctgagtggagagaggcctcatccggctttgacccaccatccgttgcagaagcctccaggagcagcaatcctaagagtgggaggcagccaagacccccttccttcaaaacctcccggaagtggtttcaggccctctagttgccatgaccaatttgtgtgtgtgtttaatttttgcttcaagctctgtagcaggacctgccccacgcacacccctacccctctgtgaggagctgtgggaagtgtgggtttgtctccagaacagaagagaatgatggatattctggctctggggccctctccaccaccactcacagtagccttgctgaagccatcacagatgggagaaggccatgccagccacgtccgccgaggggcgccagcctgaagctgccaggccctgaggttcagaccctggaccccatagctggaggcctgtggtgccagaagcccagattagggtggctgtccatccctggatagctatttgcacgaatcatggacataaatccaagttgaagaaga

SEQ ID NO: 333132 - DNA, 3268 bp, Artificial Sequence
  derived and/or modified sequence
atgcttacgtgccttttggcaggtcccctccctgttctggcctgtgttcccctcggcacaaggaaggggctgggtggtctctgtggctcgcctccgctctgaaattccggctttcaaggtggccccaggccttcgacaggggcttccggcgctgggagtgcggcaaggcgccgcgcaggcccgggacggtggccccagggaagtcgctcctagaggggaaggccgccgaagggacgagagacaccgcgggcccccggaaccgcaggcagccggtgtttacctcgctcggtcccaccccaggcggccgcgggcccgcccggagcgcgcggcgcgattgggcgagtggcctgccagtctccggggactttcccaggggtggggcggcccggccaggcccccggcacttcctcgtcctcggcccgggtgccctgcccccgtccaggagccctaggagtgctacggggggccggagccttgcccgggccgctgccccgtccctggattcggggctggacgcagcaagcggggcgctgtgtccccaagctccccgtcctcgggcgggcaccacggcaggggctgagctaccctcatggaagggagaggaccgtaccggatctacgaccctgggggcagcgtgccctcaggagaggcatccgcagcttttgagcgcctagtgaaggagaattcccggctgaaggaaaaaatgcaagggataaagatgttaggggagcttttggaagagtcccagatggaagcgaccaggctccggcagaaggcagaggagctagtgaaggacaacgagctgctcccaccaccttctccctccttgggctccttcgaccccctggctgagctcacaggaaaggactcaaatgtcacagcatctcccacagcccctgcatgccccagtgacaagccagcaccagtccagaagcctccatccagtggcacctcctctgaatttgaagtggtcactcctgaggagcagaattcaccagagagcagcagccatgccaatgcgatggcgctgggccccctgccccgtgaggacggcaacctgatgctgcacctgcagcgcctggagaccacgctgagtgtgtgtgccgaggagccggaccacggccagctcttcacccacctgggccgcatggccctggagttcaaccgactggcatccaaggtgcacaagaatgagcagcgcacctccattctgcagaccctgtgtgagcagcttcggaaggagaacgaggctctgaaggccaagttggataagggcctggaacagcgggatcaggctgccgagaggctgcgggaggaaaatttggagctcaagaagttgttgatgagcaatggcaacaaagagggtgcgtctgggcggccaggctcaccgaagatggaagggacaggcaagaaggcagtggctggacagcagcaggctagtgtgacggcaggtaaggtcccagaggtggtggccttgggcgcagccgagaagaaggtgaagatgctggagcagcagcgcagtgagctgctggaagtgaacaagcagtgggaccagcatttccggtccatgaagcagcagtatgagcagaagatcactgagctgcgtcagaagctggctgatttgcagaagcaggtgactgacctggaggccgagcgggagcagaagcagcgtgactttgaccgcaagctcctcctggccaagtccaagattgaaatggaggagaccgacaaggagcagctgacagcagaggccaaggagctgcgccaaaaggtcaagtacctgcaggatcagctgagcccactcacccgacagcgtgagtaccaggaaaaggagatccagcggctcaacaaggccctggaggaagcactgagcatccaaaccccgccatcatctccaccaacagcatttgggagcccagaaggagcaggggccctcctaaggaaacaggagctggtcacgcagaatgagttgctgaaacagcaggtgaagatcttcgaggaggacttccagagggagcgcagtgatcgtgagcgcatgaatgaggagaaggaagagctgaagaagcaagtggagaagctgcaggcccaggtcaccctgtcaaatgcccagctaaaagcattcaaagatgaggagaaggcaagagaagccctcagacagcagaagaggaaagcaaaggcctcaggagagcgttaccatgtggagccccacccagaacatctctgcggggcctacccctacgcctacccgcccatgccagccatggtgccacaccatggcttcgaggactggtcccagatccgctacccccctccccccatggccatggagcacccgcccccactccccaactcgcgcctcttccatctgccggaatacacctggcgtctaccctgtggaggggttcgaaatccaaatcagagctcccaagtgatggaccctcccacagccaggcctacagaaccagagtctccaaaaaatgaccgtgaggggcctcagtgagaccagattgtgtcatttggctccaccttcatcttgcagagccagctgatctcagattgccaagaaactagaagccacttgcacggtgtggccagagcctcagctggatgagaggctgagatgggtggccagcttgtacaccagtccctgaactgagctgtttacaggactggggaggctccacccagaaggctttcatttgtactctgctgggagtgactgggaaaaactccttccctgctgctgagtggagagaggcctcatccggctttgacccaccatccgttgcagaagcctccaggagcagcaatcctaagagtgggaggcagccaagacccccttccttcaaaacctcccggaagtggtttcaggccctctagttgccatgaccaatttgtgtgtgtgtttaatttttgcttcaagctctgtagcaggacctgccccacgcacacccctacccctctgtgaggagctgtgggaagtgtgggtttgtctccagaacagaagagaatgatggatattctggctctggggccctctccaccaccactcacagtagccttgctgaagccatcacagatgggagaaggccatgccagccacgtccgccgaggggcgccagcctgaagctgccaggccctgaggttcagaccctggaccccatagctggaggcctgtggtgccagaagcccagattagggtggctgtccatccctggatagctatttgcacgaatcatggacataaatccaagttgaagaagatcaa

SEQ ID NO: 333133 - DNA, 2680 bp, Artificial Sequence
  derived and/or modified sequence
cgggtgccctgcccccgtccaggagccctaggagtgctacggggggccggagccttgcccgggccgctgccccgtccctggattcggggctggacgcagcaagcggggcgctgtgtccccaagctccccgtcctcgggggagcttttggaagagtcccagatggaagcgaccaggctccggcagaaggcagaggagctagtgaaggacaacgagctgctcccaccaccttctccctccttgggctccttcgaccccctggctgagctcacaggaaaggactcaaatgtcacagcatctcccacagcccctgcatgccccagtgacaagccagcaccagtccagaagcctccatccagtggcacctcctctgaatttgaagtggtcactcctgaggagcagaattcaccagagagcagcagccatgccaatgcgatggcgctgggccccctgccccgtgaggacggcaacctgatgctgcacctgcagcgcctggagaccacgctgagtgtgtgtgccgaggagccggaccacggccagctcttcacccacctgggccgcatggccctggagttcaaccgactggcatccaaggtgcacaagaatgagcagcgcacctccattctgcagaccctgtgtgagcagcttcggaaggagaacgaggctctgaaggccaagttggataagggcctggaacagcgggatcaggctgccgagaggctgcgggaggaaaatttggagctcaagaagttgttgatgagcaatggcaacaaagagggtgcgtctgggcggccaggctcaccgaagatggaagggacaggcaagaaggcagtggctggacagcagcaggctagtgtgacggcaggtaaggtcccagaggtggtggccttgggcgcagccgagaagaaggtgaagatgctggagcagcagcgcagtgagctgctggaagtgaacaagcagtgggaccagcatttccggtccatgaagcagcagtatgagcagaagatcactgagctgcgtcagaagctggctgatttgcagaagcaggtgactgacctggaggccgagcgggagcagaagcagcgtgactttgaccgcaagctcctcctggccaagtccaagattgaaatggaggagaccgacaaggagcagctgacagcagaggccaaggagctgcgccaaaaggtcaagtacctgcaggatcagctgagcccactcacccgacagcgtgagtaccaggaaaaggagatccagcggctcaacaaggccctggaggaagcactgagcatccaaaccccgccatcatctccaccaacagcatttgggagcccagaaggagcaggggccctcctaaggaaacaggagctggtcacgcagaatgagttgctgaaacagcaggtgaagatcttcgaggaggacttccagagggagcgcagtgatcgtgagcgcatgaatgaggagaaggaagagctgaagaagcaagtggagaagctgcaggcccaggtcaccctgtcaaatgcccagctaaaagcattcaaagatgaggagaaggcaagagaagccctcagacagcagaagaggaaagcaaaggcctcaggagagcgttaccatgtggagccccacccagaacatctctgcggggcctacccctacgcctacccgcccatgccagccatggtgccacaccatggcttcgaggactggtcccagatccgctacccccctccccccatggccatggagcacccgcccccactccccaactcgcgcctcttccatctgccggaatacacctggcgtctaccctgtggaggggttcgaaatccaaatcagagctcccaagtgatggaccctcccacagccaggcctacagaaccagagtctccaaaaaatgaccgtgaggggcctcagtgagaccagattgtgtcatttggctccaccttcatcttgcagagccagctgatctcagattgccaagaaactagaagccacttgcacggtgtggccagagcctcagctggatgagaggctgagatgggtggccagcttgtacaccagtccctgaactgagctgtttacaggactggggaggctccacccagaaggctttcatttgtactctgctgggagtgactgggaaaaactccttccctgctgctgagtggagagaggcctcatccggctttgacccaccatccgttgcagaagcctccaggagcagcaatcctaagagtgggaggcagccaagacccccttccttcaaaacctcccggaagtggtttcaggccctctagttgccatgaccaatttgtgtgtgtgtttaatttttgcttcaagctctgtagcaggacctgccccacgcacacccctacccctctgtgaggagctgtgggaagtgtgggtttgtctccagaacagaagagaatgatggatattctggctctggggccctctccaccaccactcacagtagccttgctgaagccatcacagatgggagaaggccatgccagccacgtccgccgaggggcgccagcctgaagctgccaggccctgaggttcagaccctggaccccatagctggaggcctgtggtgccagaagcccagattagggtggctgtccatccctggatagctatttgcacgaatcatggacataaatccaagttgaagaagatcaa

SEQ ID NO: 333134 - DNA, 2274 bp, Artificial Sequence
  derived and/or modified sequence
gactttcccaggggtggggcggcccggccaggcccccggcacttcctcgtcctcggcccgggtgccctgcccccgtccaggagccctaggagtgctacggggggccggagccttgcccgggccgctgccccgtccctggattcggggctggacgcagcaagcggggcgctgtgtccccaagctccccgtcctcggccaggcgggcaccacggcaggggctgagctaccctcatggaagggagaggaccgtaccggatctacgaccctgggggcagcgtgccctcaggagaggcatccgcagcttttgagcgcctagtgaaggagaattcccggctgaaggaaaaaatgcaagggataaagatgttaggggagcttttggaagagtcccagatggaagcgaccaggctccggcagaaggcagaggagctagtgaaggacaacgagctgctcccaccaccttctccctccttgggctccttcgaccccctggctgagctcacaggaaaggactcaaatgtcacagcatctcccacagcccctgcatgccccagtgacaagccagcaccagtccagaagcctccatccagtggcacctcctctgaatttgaagtggtcactcctgaggagcagaattcaccagagagcagcagccatgccaatgcgatggcgctgggccccctgccccgtgaggacggcaacctgatgctgcacctgcagcgcctggagaccacgctgagtgtgtgtgccgaggagccggaccacggccagctcttcacccacctgggccgcatggccctggagttcaaccgactggcatccaaggtgcacaagaatgagcagcgcacctccattctgcagaccctgtgtgagcagcttcggaaggagaacgaggctctgaaggccaagttggataagggcctggaacagcgggatcaggctgccgagaggctgcgggaggaaaatttggagctcaagaagttgttgatgagcaatggcaacaaagagggtgcgtctgggcggccaggctcaccgaagatggaagggacaggcaagaaggcagtggctggacagcagcaggctagtgtgacggcaggtaaggtcccagaggtggtggccttgggcgcagccgagaagaaggtgaagatgctggagcagcagcgcagtgagctgctggaagtgaacaagcagtgggaccagcatttccggtccatgaagcagcagtatgagcagaagatcactgagctgcgtcagaagctggctgatttgcagaagcaggtgactgacctggaggccgagcgggagcagaagcagcgtgactttgaccgcaagctcctcctggccaagtccaagattgaaatggaggagaccgacaaggagcagctgacagcagaggccaaggagctgcgccaaaaggtcaagtacctgcaggatcagctgagcccactcacccgacagcgtgagtaccaggaaaaggagatccagcggctcaacaaggccctggaggaagcactgagcatccaaaccccgccatcatctccaccaacagcatttgggagcccagaaggagcaggggccctcctaaggaaacaggagctggtcacgcagaatgagttgctgaaacagcaggtgaagatcttcgaggaggacttccagagggagcgcagtgatcgtgagcgcatgaatgaggagaaggaagagctgaagaagcaagtggagaagctgcaggcccaggtcaccctgtcaaatgcccagctaaaagcattcaaagatgaggagaaggcaagagaagccctcagacagcagaagaggaaagcaaaggcctcaggagagcgttaccatgtggagccccacccagaacatctctgcggggcctacccctacgcctacccgcccatgccagccatggtgccacaccatggcttcgaggactggtcccagatccgctacccccctccccccatggccatggagcacccgcccccactccccaactcgcgcctcttccatctgccggaatacacctggcgtctaccctgtggaggggttcgaaatccaaatcagagctcccaagtgatggaccctcccacagccaggcctacagaaccagagtctccaaaaaatgaccgtgaggggcctcagtgagaccagattgtgtcatttggctccaccttcatcttgcagagccagctgatctcagattgccaagaaactagaagccacttgcacggtgtggccagagcctcagctggatgagaggctgagatgggtggccag

SEQ ID NO: 333135 - DNA, 2238 bp, Artificial Sequence
  derived and/or modified sequence
atgcaccaaggaaggagtgggccccttcttcactatggatggagaagcctcagagagtaagtggcaacagccaggcgggcaccacggcaggggctgagctaccctcatggaagggagaggaccgtaccggatctacgaccctgggggcagcgtgccctcaggagaggcatccgcagcttttgagcgcctagtgaaggagaattcccggctgaaggaaaaaatgcaagggataaagatgttaggggagcttttggaagagtcccagatggaagcgaccaggctccggcagaaggcagaggagctagtgaaggacaacgagctgctcccaccaccttctccctccttgggctccttcgaccccctggctgagctcacaggaaaggactcaaatgtcacagcatctcccacagcccctgcatgccccagtgacaagccagcaccagtccagaagcctccatccagtggcacctcctctgaatttgaagtggtcactcctgaggagcagaattcaccagagagcagcagccatgccaatgcgatggcgctgggccccctgccccgtgaggacggcaacctgatgctgcacctgcagcgcctggagaccacgctgagtgtgtgtgccgaggagccggaccacggccagctcttcacccacctgggccgcatggccctggagttcaaccgactggcatccaaggtgcacaagaatgagcagcgcacctccattctgcagaccctgtgtgagcagcttcggaaggagaacgaggctctgaaggccaagttggataagggcctggaacagcgggatcaggctgccgagaggctgcgggaggaaaatttggagctcaagaagttgttgatgagcaatggcaacaaagagggtgcgtctgggcggccaggctcaccgaagatggaagggacaggcaagaaggcagtggctggacagcagcaggctagtgtgacggcaggtaaggtcccagaggtggtggccttgggcgcagccgagaagaaggtgaagatgctggagcagcagcgcagtgagctgctggaagtgaacaagcagtgggaccagcatttccggtccatgaagcagcagtatgagcagaagatcactgagctgcgtcagaagctggctgatttgcagaagcaggtgactgacctggaggccgagcgggagcagaagcagcgtgactttgaccgcaagctcctcctggccaagtccaagattgaaatggaggagaccgacaaggagcagctgacagcagaggccaaggagctgcgccaaaaggtcaagtacctgcaggatcagctgagcccactcacccgacagcgtgagtaccaggaaaaggagatccagcggctcaacaaggccctggaggaagcactgagcatccaaaccccgccatcatctccaccaacagcatttgggagcccagaaggagcaggggccctcctaaggaaacaggagctggtcacgcagaatgagttgctgaaacagcaggtgaagatcttcgaggaggacttccagagggagcgcagtgatcgtgagcgcatgaatgaggagaaggaagagctgaagaagcaagtggagaagctgcaggcccaggtcaccctgtcaaatgcccagctaaaagcattcaaagatgaggagaaggcaagagaagccctcagacagcagaagaggaaagcaaaggcctcaggagagcgttaccatgtggagccccacccagaacatctctgcggggcctacccctacgcctacccgcccatgccagccatggtgccacaccatggcttcgaggactggtcccagatccgctacccccctccccccatggccatggagcacccgcccccactccccaactcgcgcctcttccatctgccggaatacacctggcgtctaccctgtggaggggttcgaaatccaaatcagagctcccaagtgatggaccctcccacagccaggcctacagaaccagagtctccaaaaaatgaccgtgaggggcctcagtgagaccagattgtgtcatttggctccaccttcatcttgcagagccagctgatctcagattgccaagaaactagaagccacttgcacggtgtggccagagcctcagctggatgagaggctgagatgggtggccagcttgtacaccagtccctgaactgagctgtttacaggactggggaggctccacccagaaggctttcatttgtactctgctgggagtgact

SEQ ID NO: 333136 - DNA, 2406 bp, Artificial Sequence
  derived and/or modified sequence
agtgagccgaggagccttcatagggacagccgcccctggtgcacacaccctcgtattctcctgcccttccccagccaggcgggcaccacggcaggggctgagctaccctcatggaagggagaggcatccgcagcttttgagcgcctagtgaaggagaattcccggctgaaggaaaaaatgcaagggataaagatgttaggggagcttttggaagagtcccagatggaagcgaccaggctccggcagaaggcagaggagctagtgaaggacaacgagctgctcccaccaccttctccctccttgggctccttcgaccccctggctgagctcacaggaaaggactcaaatgtcacagcatctcccacagcccctgcatgccccagtgacaagccagcaccagtccagaagcctccatccagtggcacctcctctgaatttgaagtggtcactcctgaggagcagaattcaccagagagcagcagccatgccaatgcgatggcgctgggccccctgccccgtgaggacggcaacctgatgctgcacctgcagcgcctggagaccacgctgagtgtgtgtgccgaggagccggaccacggccagctcttcacccacctgggccgcatggccctggagttcaaccgactggcatccaaggtgcacaagaatgagcagcgcacctccattctgcagaccctgtgtgagcagcttcggaaggagaacgaggctctgaaggccaagttggataagggcctggaacagcgggatcaggctgccgagaggctgcgggaggaaaatttggagctcaagaagttgttgatgagcaatggcaacaaagagggtgcgtctgggcggccaggctcaccgaagatggaagggacaggcaagaaggcagtggctggacagcagcaggctagtgtgacggcaggtaaggtcccagaggtggtggccttgggcgcagccgagaagaaggtgaagatgctggagcagcagcgcagtgagctgctggaagtgaacaagcagtgggaccagcatttccggtccatgaagcagcagtatgagcagaagatcactgagctgcgtcagaagctggctgatttgcagaagcaggtgactgacctggaggccgagcgggagcagaagcagcgtgactttgaccgcaagctcctcctggccaagtccaagattgaaatggaggagaccgacaaggagcagctgacagcagaggccaaggagctgcgccaaaaggtcaagtacctgcaggatcagctgagcccactcacccgacagcgtgagtaccaggaaaaggagatccagcggctcaacaaggccctggaggaagcactgagcatccaaaccccgccatcatctccaccaacagcatttgggagcccagaaggagcaggggccctcctaaggaaacaggagctggtcacgcagaatgagttgctgaaacagcaggtgaagatcttcgaggaggacttccagagggagcgcagtgatcgtgagcgcatgaatgaggagaaggaagagctgaagaagcaagtggagaagctgcaggcccaggtcaccctgtcaaatgcccagctaaaagcattcaaagatgaggagaaggcaagagaagccctcagacagcagaagaggaaagcaaaggcctcaggagagcgttaccatgtggagccccacccagaacatctctgcggggcctacccctacgcctacccgcccatgccagccatggtgccacaccatggcttcgaggactggtcccagatccgctacccccctccccccatggccatggagcacccgcccccactccccaactcgcgcctcttccatctgccggaatacacctggcgtctaccctgtggaggggttcgaaatccaaatcagagctcccaagtgatggaccctcccacagccaggcctacagaaccagagtctccaaaaaatgaccgtgaggggcctcagtgagaccagattgtgtcatttggctccaccttcatcttgcagagccagctgatctcagattgccaagaaactagaagccacttgcacggtgtggccagagcctcagctggatgagaggctgagatgggtggccagcttgtacaccagtccctgaactgagctgtttacaggactggggaggctccacccagaaggctttcatttgtactctgctgggagtgactgggaaaaactccttccctgctgctgagtggagagaggcctcatccggctttgacccaccatccgttgcagaagcctccaggagcagcaatcctaagagtgggaggcagccaagacccccttccttcaaaacctcccggaagtggtttcaggccctctagttgccatgaccaatttgtgtgtgtgtttaatttttgcttcaagctctgtagc

SEQ ID NO: 333137 - DNA, 3054 bp, Artificial Sequence
  derived and/or modified sequence
atggctgggaacgactgcggggccctactggatgaagaactctcgagctttttccttaactatctggctgacacacagggcggcggctccggagaggagcagttatacgctgactttccagaattagatctttcccagttggatgcctcagacttcgactcggctacatgtttcggggagttgcagtggtgcccagaaaactccgagacggaaccaaatcaatatagtcccgatgattctgaactgttccagatagactccgagaacgaggcactcctcgcggagctgactaaaacactggacgacatcccggaagacgatgtaggcctggctgcctttcctgctctagatgggggggatgccctcagctgcacctccgcttcaccggcaccgagcagtgctcccccgtcgcctgccccagagaagccatctgcacccgcccccgaggtcgacgagttaagcctgcttcagaagttgttgctcgcaactagctatccgacaagcagctcagacactcaaaaagaagggaccgcttggagacaggccggcctgaggtctaagtcacagcgtccctgcgtgaaagccgatagtacccaggacaagaaagccccaatgatgcaaagccaatctcgctcttgcactgaactgcacaagcacttaacgagtgcacaatgttgcctccaggatcgcgggttgcagcccccctgcttacagagcccaaggttgcccgccaaagaggacaaggagccgggtgaggattgtccttccccacagcccgcccccgcgtccccaagggactctctggctctcggaagggcggacccgggggcacccgtttctcaagaggatatgcaggcgatggtgcagctgataaggtacatgcacacatattgtttgccacaacggaagctacccccgcagacaccggagcccctgcctaaggcttgttccaatccaagtcagcaggtccggagtcgtccttggtctcgacaccactctaaggcatcatgggccgagttctcaattctgcgcgagctgcttgctcaggatgtgctctgcgatgtgtctaagccctaccgactagccacacccgtttacgcctcccttactcctcgatcccggccccgccctcctaaggattctcaggccagcccaggaaggccatctagtgttgaggaggtcagaatagccgcctccccgaaatcaacaggccccagacctagtcttagaccccttaggcttgaagtaaaacgcgaagtcaggcgccccgccaggttgcagcagcaggaggaagaggatgaggaggaggaggaagaagaagaagaggaagagaaggaggaagaggaggagtggggtcggaagcgccccgggcgcggcctgccgtggacgaaactaggacggaaattggagagcagcgtatgtcctgtcagaaggtcccgacgcctcaatcccgaacttggcccatggctcacatttgctgatgagccgctagttcccagtgagcctcagggggctctgccctctctgtgcctggccccaaaggcttacgacgtggagcgagagctggggagtccaacggacgaggacagcggccaggaccagcagttgctcaggggtccacagatcccagctctggagtctccctgcgaaagcgggtgcggtgatatggacgaggacccaagttgtccccagctaccaccaagagacagtccccgttgtctgatgttggcgctcagtcaatccgatcctacctttggcaagaagtcatttgagcaaacccttactgtggagctgtgcggcactgccggactcaccccacctactacacccccatataaacctaccgaggaggacccttttaagcctgatatcaaacatagcctagggaaagaaatagccttatcattgccatcacccgagggcctctccctgaaggcgactcccggtgcagcacacaaactgcccaagaagcatcccgagaggagtgagctgctaagtcacctgagacacgccaccgctcaacctgccagtcaggccgggcagaagcggcccttttcctgcagctttggtgatcacgattactgccaggtgctgcggcccgagggggttcttcagcgtaaagtactgcggagttgggaaccatccggagtgcatctggaggattggccccagcagggggctccatgggctgaggcccaagcccccggacgggaagaagaccgcagctgtgatgctggcgcacctcctaaagactccaccctgctgcgggaccacgagatcagagctagccttacaaaacattttggtctgttggagacagctctggaggaagaggacctggcatcttgcaagagccctgagtacgacactgtgtttgaggactccagttcatcgtccggcgaatcgtcctttctgccagaggaagaggaagaggaaggagaggaagaagaagaggacgatgaagaagaagattctggggtctcccccacctgttccgatcactgcccctaccaaagtcccccgagcaaagcaaatcggcagctgtgcagccgcagccggagttcctcagggtcttcaccctgtcatagttggtcacccgccaccaggcgtaatttccgatgtgaaagtcgcgggccttgctcagaccggacaccttctattcgacatgctcgtaaacggagggagaaggcaattggcgaaggtcgtgtggtctatattcaaaacctgtcaagtgacatgagttctcgggaactgaagcgcaggtttgaggtcttcggcgagatcgaagagtgtgaagttctgactcgaaatcgccggggggaaaagtacggttttatcacctaccgctgcagcgaacacgccgccctgtccctgacaaagggcgccgcgctcagaaaaaggaatgagccctctttccagctgagctacggtgggctcagacatttctgttggccaaggtacaccgactacgggaagcccctgaagcctagccactctcttgttcgtctcaaagcttgggaagccgtgccttcattgaataaaacacagagctag

SEQ ID NO: 333138 - DNA, 3054 bp, Artificial Sequence
  derived and/or modified sequence
atggctggaaatgactgtggggccctgctggatgaggagctgagcagcttcttcctgaactacctggccgacacccagggcggcggcagcggggaggagcagctgtatgctgacttccctgagctggacctgagccagctggatgccagtgactttgacagcgccacctgcttcggggagctgcagtggtgcccagagaacagcgagacagagcccaaccagtacagcccagatgacagcgagctgttccagattgattctgaaaatgaggccctgctggccgagctgaccaagaccctggatgacatcccagaagatgatgtgggcctggccgccttccctgccctggatggaggagatgccctgagctgcaccagcgccagccctgcccccagcagcgccccacccagccctgcccctgagaagcccagcgccccagcccctgaggtggatgagctgagcctgctgcagaagctgctgctggccaccagctaccccaccagcagcagtgacacccagaaggagggcacagcctggaggcaggccggcctgcggagcaagagccagaggccctgtgtgaaggctgacagcacccaggacaagaaggcccccatgatgcagagccagagccgcagctgcacagagctgcacaagcacctgaccagcgcccagtgctgcctgcaggaccggggcctgcagcccccctgcctgcagagcccccggctgcctgccaaggaggacaaggagcccggggaggactgccccagcccccagcctgccccagccagcccccgggacagcctggccctgggccgggctgaccccggggcccctgtgtcccaggaggacatgcaggccatggtgcagctgatccgctacatgcacacctactgcctgccccagaggaagctgcccccccagaccccagagcccctgcccaaggcctgcagcaaccccagccagcaggtgcgcagccggccctggagccgccaccacagcaaggcctcctgggccgagttcagcatcctgcgggagctgctggcccaggatgtgctgtgtgatgtgtccaagccctaccgcctggccacccctgtgtatgccagcctgacccccaggagccggcccaggcctcccaaggacagccaggccagccctggccggcccagctctgtggaggaggtgagaattgctgccagccccaagagcacaggcccccggcccagcctgcggcccctgcggctggaggtgaagcgggaggtgagaagacctgcccggctgcagcagcaggaggaggaggatgaggaggaggaggaggaggaggaggaggaggagaaggaggaggaggaggagtggggcaggaagaggcctggccggggcctgccctggaccaagctgggcaggaagctggagagctctgtgtgccctgtgagaagaagccggcggctgaaccctgagctgggcccctggctgacctttgctgatgagcccctggtgcccagcgagccccagggcgccctgcccagcctgtgcctggcccccaaggcctatgatgtggagcgggagctgggcagccccacagatgaggacagcggccaggaccagcagctgctgcggggcccccagatcccagccctggagagcccctgtgagagcggctgtggggacatggatgaggaccccagctgcccccagctgcccccccgggacagcccccgctgcctgatgctggccctgagccagagcgaccccaccttcggcaagaagagctttgagcagaccctgactgtggagctgtgtggcacagctggcctgaccccacccaccaccccaccctacaagcccacagaggaggaccccttcaagccagacatcaagcacagcctgggcaaggagatcgccctgagcctgcccagccctgagggcctgagcctgaaggccacccctggggccgcccacaagctgcccaagaagcaccctgagaggtctgagctgctgagccacctgcggcatgccacagcccagcctgccagccaggccggccagaagaggcccttcagctgcagctttggagaccatgactactgccaggtgctgcggcctgagggcgtgctgcagaggaaggtgctgcgctcctgggagcccagcggcgtgcacctggaggactggccccagcagggcgccccctgggccgaggcccaggcccctggccgggaggaggacaggagctgtgatgctggggccccacccaaggacagcaccctgctgcgggaccacgagatccgggccagcctgaccaagcacttcggcctgctggagacagccctggaggaggaggacctggccagctgcaagagcccagaatatgacacagtgtttgaggacagcagcagcagcagtggagagagcagcttcctgcctgaggaggaggaggaggagggggaggaggaggaggaggatgatgaggaggaggacagcggcgtgagccccacctgcagcgaccactgcccctaccagagcccccccagcaaggccaaccggcagctgtgcagccgcagccgcagcagcagcggcagcagcccctgccacagctggagccctgccaccaggaggaacttccgctgtgagagccggggcccctgcagcgacaggacccccagcatcagacatgccaggaagagaagagagaaggccatcggggagggccgggtggtgtacatccagaacctgagcagtgacatgagcagccgggagctgaagagaagatttgaggtgtttggagaaattgaggagtgtgaggtgctgaccaggaacagaagaggagagaagtatggcttcatcacctaccgctgcagcgagcacgccgccctgagcctgaccaagggggccgccctgaggaagagaaatgagcccagcttccagctgtcctatggaggcctgcggcacttctgctggccccgctacacagattatggcaagcccctgaagcccagccacagcctggtgcggctgaaggcctgggaggccgtgcccagcctgaacaagacccagagctag

SEQ ID NO: 333139 - DNA, 3054 bp, Artificial Sequence
  derived and/or modified sequence
atggccggcaacgactgcggcgccctgctggacgaggagctgagcagcttttttctaaactatcttgccgatacacagggagggggaagtggtgaggaacagttgtatgccgatttcccagagttagacctcagccaacttgacgccagtgacttcgactcagctacctgcttcggggaacttcaatggtgcccagagaactcggagactgagccaaatcagtacagccccgacgacagcgagctgttccagatcgattctgagaatgaggccctcttggcagaactgaccaagacactggatgatattccagaggacgacgttggcttagctgcattccccgccttggatgggggcgacgccctgtcttgcaccagcgcttcaccggctccgtcttcagcaccaccatcgccagctcctgagaagcccagcgctccagctccagaggtagatgaactctccctgctccagaaattattgctggctacaagctatccaacttcaagttctgatacccagaaagaaggcaccgcttggagacaagccggattgcggtccaaaagtcagcgaccatgcgtgaaggctgatagcacccaggacaaaaaggcacccatgatgcagtctcagtctaggagctgtaccgaactgcataaacacctgacgagtgcccagtgttgtttacaggaccgcggtcttcagccgccttgcctgcaaagccccagactgccggccaaggaagacaaggagccgggcgaggactgcccctccccccagccggcccccgcctcccctagggatagcctagccctcgggagagctgatccaggcgctccagtgagtcaggaggatatgcaagctatggtgcagctcataaggtacatgcacacatactgtctgccccagaggaagctccccccccagaccccggaacccctccccaaagcgtgctctaacccttctcaacaagtccgatcaaggccttggagccggcatcactccaaggcctcatgggcggaattctccattcttcgggagctactggcccaggatgtcttgtgcgacgtgagtaaaccctacagactcgcgactcctgtctatgcaagcctgacccctaggtctcggccaaggccccccaaggactcccaggcatcaccaggcagacctagttcagttgaagaggtgcgaattgctgctagtccgaagagcaccgggcctcgaccatccctccgtcctctaagactggaggtgaagcgcgaggtgcggaggccagctagacttcaacaacaggaagaggaggacgaagaagaagaggaagaggaggaagaagaagagaaggaggaggaggaggagtgggggcggaagagacccggccgaggtctcccctggaccaagctggggaggaaactggagtcaagcgtttgcccggtaaggcggagcagaagactgaatccggaacttggtccttggttaacctttgcggatgagcctttagtaccaagcgaaccccagggagcattaccttcactgtgccttgcccccaaagcctacgatgtggagcgtgagctgggctctcccaccgacgaagacagcggccaggatcagcagctgctccgtggtcctcaaataccagcactagagagtccatgtgaatctggatgtggagacatggacgaggaccctagttgcccacagctcccccctagagatagtcccaggtgtctgatgctcgcactgtcccagtcagacccaacattcggaaagaagagcttcgagcagactctaaccgtggagttgtgcgggaccgctggactaaccccccccactaccccgccctacaagcccactgaggaagaccctttcaagcccgatataaagcattccttggggaaggaaatcgctctgagtctaccaagccctgagggcttgtcattgaaggcaacgcctggtgcagcccacaaactccccaagaaacaccccgagaggtctgagttactgtcacatctccggcacgctacagctcagcccgcttcccaggctgggcagaagcgaccattttcctgtagcttcggcgaccacgactattgtcaggtgctcaggcccgaaggcgtgctccagaggaaggtgctccgatcgtgggagccaagtggcgtccatctggaagattggccgcagcagggggcaccgtgggccgaggcccaggcacccggccgcgaagaggacaggtcatgcgatgctggcgccccacctaaggactcaactttgctccgagatcatgagatacgtgcatctttgactaagcactttgggcttctcgaaacagctttggaagaagaggatctggctagctgtaagagccccgagtacgacaccgtgttcgaagatagttccagctcaagcggggagtcttcctttctgcccgaggaggaagaagaagaaggggaggaggaagaagaagacgatgaagaggaggattctggtgtctcacctacctgtagcgatcattgtccctatcagtccccaccaagcaaagccaatagacagttgtgctcgcgcagccggagcagttcggggagctcaccgtgccactcctggtcccccgctacgcgaagaaacttccggtgtgagtccagaggaccctgcagcgacagaaccccctctatccgccacgctcgtaagagacgggagaaagctatcggtgagggaagggtcgtgtacatccagaatctgtcttccgatatgtcttcacgtgagctgaagaggcggttcgaggtgtttggggaaattgaggaatgcgaagttctgacaagaaaccgtcggggcgagaaatacggctttatcacataccggtgttccgaacacgcagcactatccctgaccaagggtgccgcattgagaaagagaaatgaaccaagctttcagctcagctacgggggccttcggcacttttgttggcctcgttatacagactatggaaaacctctgaagccttcccattcactagtcagactgaaagcctgggaggcggtgcctagtctgaataagactcagtcttag

SEQ ID NO: 333140 - DNA, 4803 bp, Artificial Sequence
  derived and/or modified sequence
ctcggcgttgactccgccgcacgctgcagccgcggctggaagatggcggggaacgactgcggcgcgctgctggacgaagagctctcctccttcttcctcaactatctcgctgacacgcagggtggagggtccggggaggagcaactctatgctgactttccagaacttgacctctcccagctggatgccagcgactttgactcggccacctgctttggggagctgcagtggtgcccagagaactcagagactgaacccaaccagtacagccccgatgactccgagctcttccagattgacagtgagaatgaggccctcctggcagagctcaccaagaccctggatgacatccctgaagatgacgtgggtctggctgccttcccagccctggatggtggagacgctctatcatgcacctcagcttcgcctgccccctcatctgcaccccccagccctgccccggagaagccctcggccccagcccctgaggtggacgagctctcactgctgcagaagctcctcctggccacatcctacccaacatcaagctctgacacccagaaggaagggaccgcctggcgccaggcaggcctcagatctaaaagtcaacggccttgtgttaaggcggacagcacccaagacaagaaggctcccatgatgcagtctcagagccgaagttgtacagaactacataagcacctcacctcggcacagtgctgcctgcaggatcggggtctgcagccaccatgcctccagagtccccggctccctgccaaggaggacaaggagccgggtgaggactgcccgagcccccagccagctccagcctctccccgggactccctagctctgggcagggcagaccccggtgccccggtttcccaggaagacatgcaggcgatggtgcaactcatacgctacatgcacacctactgcctcccccagaggaagctgcccccacagacccctgagccactccccaaggcctgcagcaacccctcccagcaggtcagatcccggccctggtcccggcaccactccaaagcctcctgggctgagttctccattctgagggaacttctggctcaagacgtgctctgtgatgtcagcaaaccctaccgtctggccacgcctgtttatgcctccctcacacctcggtcaaggcccaggccccccaaagacagtcaggcctcccctggtcgcccgtcctcggtggaggaggtaaggatcgcagcttcacccaagagcaccgggcccagaccaagcctgcgcccactgcggctggaggtgaaaagggaggtccgccggcctgccagactgcagcagcaggaggaggaagacgaggaagaagaggaggaggaagaggaagaagaaaaagaggaggaggaggagtggggcaggaaaaggccaggccgaggcctgccatggacgaagctggggaggaagctggagagctctgtgtgccccgtgcggcgttctcggagactgaaccctgagctgggcccctggctgacatttgcagatgagccgctggtcccctcggagccccaaggtgctctgccctcactgtgcctggctcccaaggcctacgacgtagagcgggagctgggcagccccacggacgaggacagtggccaagaccagcagctcctacggggaccccagatccctgccctggagagcccctgtgagagtgggtgtggggacatggatgaggaccccagctgcccgcagctccctcccagagactctcccaggtgcctcatgctggccttgtcacaaagcgacccaacttttggcaagaagagctttgagcagaccttgacagtggagctctgtggcacagcaggactcaccccacccaccacaccaccgtacaagcccacagaggaggatcccttcaaaccagacatcaagcatagtctaggcaaagaaatagctctcagcctcccctcccctgagggcctctcactcaaggccaccccaggggctgcccacaagctgccaaagaagcacccagagcgaagtgagctcctgtcccacctgcgacatgccacagcccagccagcctcccaggctggccagaagcgtcccttctcctgttcctttggagaccatgactactgccaggtgctccgaccagaaggcgtcctgcaaaggaaggtgctgaggtcctgggagccgtctggggttcaccttgaggactggccccagcagggtgccccttgggctgaggcacaggcccctggcagggaggaagacagaagctgtgatgctggcgccccacccaaggacagcacgctgctgagagaccatgagatccgtgccagcctcaccaaacactttgggctgctggagaccgccctggaggaggaagacctggcctcctgcaagagccctgagtatgacactgtctttgaagacagcagcagcagcagcggcgagagcagcttcctcccagaggaggaagaggaagaaggggaggaggaggaggaggacgatgaagaagaggactcaggggtcagccccacttgctctgaccactgcccctaccagagcccaccaagcaaggccaaccggcagctctgttcccgcagccgctcaagctctggctcttcaccctgccactcctggtcaccagccactcgaaggaacttcagatgtgagagcagagggccgtgttcagacagaacgccaagcatccggcacgccaggaagcggcgggaaaaggccattggggaaggccgcgtggtgtacattcaaaatctctccagcgacatgagctcccgagagctgaagaggcgctttgaagtgtttggtgagattgaggagtgcgaggtgctgacaagaaataggagaggcgagaagtacggcttcatcacctaccggtgttctgagcacgcggccctctctttgacaaagggcgctgccctgaggaagcgcaacgagccctccttccagctgagctacggagggctccggcacttctgctggcccagatacactgactacggtaagcccctgaaacccagccacagtctagtaagactcaaagcttgggaagcagtgccttccttgaacaaaacccagagctaaagcgccttgtggacatagcttccatccccacaccccagtgtgctgcttggtataactttgcagccactttgcctgaagactaccatcctgtttctcttctggcctctggtccaccttatcctgtcctgtgactgctaccaaagagaatccagcctcccacggcctctaggaagattcagtcatgtgcacagccagctggcagaaccgtggctacggtctccttgacttcacagggccagctgctaccctgtccccttcaggggcattccgtggtgaccccagacaaggcagcagccacctggggacaagatgatgaagaaggacaaagaagtacaatgtacgaaagaattacttggccaggctcagtggctcatgcctgtaatcccatcaccttgggaggctgaggcaagaggatcacttgagcccaggagttcgagaccagcttgggcaacatagtgaaatcctgtctctacaaaaaatataaaaattagccaggcatggtggcttgcgcctatagtcccagctactcaggaggcagaggtgggaggatcacctgaacccaagaggttggagctgcagtgagccatgatggcactactgcattccagcctgggcaacagagcaagaccctgtctcaaaaggaaagaaaaaaaaaaaaacacttactggagagaatccaatgcagccttgatggtacaggactgagtgtcagtgacccggctgggtgccaggccaggcggccctgcccttggctgcatgtccatttatgggaatcagtttcccaatctattaaaaaattctagtgttggctgggtgcagttgctcacgcctgtaatcccagcactttgggaggccgaggcaggaagatcatgaggtcaagagatcgagaccatcgtggccaacatggtgaaaccccctctctattaaaaatacaaaaattagctgggcgtggtggcgcacacctgtagtcccagcaacttgggaggctgaggcgggagaatcacttgaacccgagaggcagaggttgcagtgagctgagatcacatccctgcactccagccttggtgacagagcgagactgcatctcaaaaaaaaaaaaattctagtgttgttagccctcccttatgtggcactgcagcaggttactaatggacgagaagctgttgggggaagtagagttgtagggtgttggagctagaaaggctctggagtgctctagtttgggcctccaggtctctagataggacagccaaggccctgagacactgataccatggccaagatgtcccagcaggatggcaggcagtgcccacagtccagcgctcatcccagctccccaaggccttgggctgcagccactccacggtgcccactcatagtggcagattcttcaaccatccggtctttgtaagttgctcactgccttcccctcttccctgcctcttcacccccatgcccagattccaattcagaagaggcccttcctgcgtcagggaaaagcaagtatgaagccatggattttgacagcttactgaaagaggcccagcagagcctgcattgataacagccttaaccctcgaggaatacctcaatacctcagacaaggcccttccaatatgtttacgttttcaaagaaatcaagtatatgaggagagcgagcgagcgtgagagaacacccgtgagagagacttgaaactgctgtccttt

SEQ ID NO: 333141 - DNA, 3054 bp, Artificial Sequence
  derived and/or modified sequence
atggccggtaatgactgtggggctctgctggacgaagagctttcgtctttcttcctaaattacttggcagacacgcaaggcggaggtagtggagaggagcagctatatgccgatttcccggaattagacttgagccaactggatgcaagtgatttcgacagcgccacatgtttcggggagctccaatggtgtcccgagaatagcgaaacagagcccaatcagtattctccggacgactccgaactttttcagatagattccgagaacgaggctctgctggccgaactgacaaaaaccctggacgatatcccagaggatgacgtaggcctcgcagccttccccgcactggacggtggggacgcactctcatgcacgagcgcaagtccagccccatcctcagctcctccaagtccagctcccgaaaagccaagtgcccctgcccctgaggtcgatgagctgtccctgctgcagaaattgctgctggctacttcttaccctacaagcagcagtgacacacaaaaggagggtactgcctggcggcaagcgggactgagatcaaagtcacagagaccatgcgtgaaggctgacagcacccaggacaaaaaggcgcctatgatgcagagtcagtcccgatcctgtactgaactccataagcatctgactagcgcccaatgctgtcttcaggaccggggattgcagcctccttgtctgcagagtccacggctgcccgctaaagaggataaggagccgggagaggactgcccatcaccgcagcccgctcccgcaagtccaagagattctctcgctttgggcagagccgaccccggtgcacccgtgtcacaagaggacatgcaggcaatggtgcagctcatacgctacatgcatacctactgtttaccacagaggaaattaccacctcaaactccagaacctctgcccaaggcctgttctaatccgagtcaacaggtccgctcacgaccttggagccggcatcactcaaaggcgtcctgggctgagttttcgatcctgagggaactcctggctcaggatgtcctgtgtgatgtctctaagccttatagactggctacaccggtatacgcttctttaacaccacgttcacggcctagaccccctaaggacagccaggcctctcccggacgaccatcctctgtggaggaagtgaggatcgccgcaagccctaagtcgactgggccaaggcctagcctgagacctctgcgcctcgaagtgaaacgagaggtgcgtcggccagcaagacttcagcagcaggaagaggaggacgaggaagaagaggaggaggaggaggaggaggagaaggaggaggaggaagagtggggacggaagcgtcccggaagggggctgccctggacaaaactggggagaaagctggagtcatccgtgtgtcccgttaggcggtctaggagattgaacccagagctcgggccttggctgacattcgccgacgagcctctcgtccctagcgagccccagggtgcgctgccttcactgtgtcttgcgcctaaagcgtatgacgttgagagagagttggggagccccactgatgaagacagcgggcaagatcagcagttgttgagaggccctcagattccagctcttgagagtccatgcgaatccggttgcggggacatggacgaggaccccagttgccctcagctgcctcctcgggacagccctcgctgtctcatgctggccctgtcccaaagtgaccctacttttggcaaaaagagcttcgaacagaccctgacggtcgaactgtgtggcacagccggacttacacctcccacaacaccaccctataagcctaccgaagaggatccatttaaaccagacataaagcactcccttggaaaagagattgctctgtctctgccctcccctgagggtttatcgcttaaggctacaccaggggcagctcataagctgccaaaaaagcaccccgagcggtcagaattgctaagccatcttcgtcatgcaactgcacagcctgcgtcccaggctgggcaaaaaaggcctttcagttgctcctttggagatcatgattactgtcaagtgttaagaccggagggagtcctccaaagaaaagtgcttcggtcctgggagcccagcggggtacacctcgaagactggccccagcaaggagccccatgggccgaggcacaagcacccggtagggaggaagaccgctcctgtgacgccggagcgcctcccaaggactccaccctgctccgggaccacgagattcgggcaagcctgactaaacacttcgggctattggaaactgccctagaagaggaggacctggcctcatgcaaaagtccagagtatgataccgtgttcgaggacagctcttccagtagcggagagagctcattcctccccgaggaggaagaagaggagggcgaggaagaggaagaggacgatgaggaagaggattccggggtgtctccaacttgctccgatcactgcccttaccagtctcctccgtctaaagctaaccgtcagctatgctcccggagccggtcttcgtccggcagttccccttgccactcctggtcccctgccacccggaggaactttagatgcgaatctaggggcccttgctcagacaggacaccatccattcggcacgcacggaagaggcgcgaaaaggctatcggtgaaggacgggtcgtgtatatacagaatctgtcttcagatatgagcagccgggaactgaagcgccgattcgaagtctttggcgaaattgaagaatgtgaagtcctcacccgtaaccgaagaggtgaaaaatacggatttataacatacagatgctctgagcacgccgctctgagtctgactaaaggagccgctttgcggaagaggaacgagccgagtttccaattgtcctacggaggcctaagacacttttgttggccgaggtataccgattacggtaagcctttaaaaccctctcattcactggttcggctcaaagcttgggaggcggtcccctctcttaacaagacacaaagctag

SEQ ID NO: 333142 - DNA, 3054 bp, Artificial Sequence
  derived and/or modified sequence
atggccggcaacgactgcggcgccctgctggacgaggagctgagcagcttcttcctgaactacctggccgacacccagggcggcggcagcggcgaggagcagctgtacgccgacttccccgagctggacctgagccagctggacgccagcgacttcgacagcgccacctgcttcggcgagctgcagtggtgccccgagaacagcgagaccgagcccaaccagtacagccccgacgacagcgagctgttccagatcgacagcgagaacgaggccctgctggccgagctgaccaagaccctggacgacatccccgaggacgacgtgggcctggccgccttccccgccctggacggcggcgacgccctgagctgcaccagcgccagccccgcccccagcagcgccccccccagccccgcccccgagaagcccagcgcccccgcccccgaggtggacgagctgagcctgctgcagaagctgctgctggccaccagctaccccaccagcagcagcgacacccagaaggagggcaccgcctggagacaggccggcctgagaagcaagagccagagaccctgcgtgaaggccgacagcacccaggacaagaaggcccccatgatgcagagccagagcagaagctgcaccgagctgcacaagcacctgaccagcgcccagtgctgcctgcaggacagaggcctgcagcccccctgcctgcagagccccagactgcccgccaaggaggacaaggagcccggcgaggactgccccagcccccagcccgcccccgccagccccagagacagcctggccctgggcagagccgaccccggcgcccccgtgagccaggaggacatgcaggccatggtgcagctgatcagatacatgcacacctactgcctgccccagagaaagctgcccccccagacccccgagcccctgcccaaggcctgcagcaaccccagccagcaggtgagaagcagaccctggagcagacaccacagcaaggccagctgggccgagttcagcatcctgagagagctgctggcccaggacgtgctgtgcgacgtgagcaagccctacagactggccacccccgtgtacgccagcctgacccccagaagcagacccagaccccccaaggacagccaggccagccccggcagacccagcagcgtggaggaggtgagaatcgccgccagccccaagagcaccggccccagacccagcctgagacccctgagactggaggtgaagagagaggtgagaagacccgccagactgcagcagcaggaggaggaggacgaggaggaggaggaggaggaggaggaggaggagaaggaggaggaggaggagtggggcagaaagagacccggcagaggcctgccctggaccaagctgggcagaaagctggagagcagcgtgtgccccgtgagaagaagcagaagactgaaccccgagctgggcccctggctgaccttcgccgacgagcccctggtgcccagcgagccccagggcgccctgcccagcctgtgcctggcccccaaggcctacgacgtggagagagagctgggcagccccaccgacgaggacagcggccaggaccagcagctgctgagaggcccccagatccccgccctggagagcccctgcgagagcggctgcggcgacatggacgaggaccccagctgcccccagctgccccccagagacagccccagatgcctgatgctggccctgagccagagcgaccccaccttcggcaagaagagcttcgagcagaccctgaccgtggagctgtgcggcaccgccggcctgaccccccccaccacccccccctacaagcccaccgaggaggaccccttcaagcccgacatcaagcacagcctgggcaaggagatcgccctgagcctgcccagccccgagggcctgagcctgaaggccacccccggcgccgcccacaagctgcccaagaagcaccccgagagaagcgagctgctgagccacctgagacacgccaccgcccagcccgccagccaggccggccagaagagacccttcagctgcagcttcggcgaccacgactactgccaggtgctgagacccgagggcgtgctgcagagaaaggtgctgagaagctgggagcccagcggcgtgcacctggaggactggccccagcagggcgccccctgggccgaggcccaggcccccggcagagaggaggacagaagctgcgacgccggcgccccccccaaggacagcaccctgctgagagaccacgagatcagagccagcctgaccaagcacttcggcctgctggagaccgccctggaggaggaggacctggccagctgcaagagccccgagtacgacaccgtgttcgaggacagcagcagcagcagcggcgagagcagcttcctgcccgaggaggaggaggaggagggcgaggaggaggaggaggacgacgaggaggaggacagcggcgtgagccccacctgcagcgaccactgcccctaccagagcccccccagcaaggccaacagacagctgtgcagcagaagcagaagcagcagcggcagcagcccctgccacagctggagccccgccaccagaagaaacttcagatgcgagagcagaggcccctgcagcgacagaacccccagcatcagacacgccagaaagagaagagagaaggccatcggcgagggcagagtggtgtacatccagaacctgagcagcgacatgagcagcagagagctgaagagaagattcgaggtgttcggcgagatcgaggagtgcgaggtgctgaccagaaacagaagaggcgagaagtacggcttcatcacctacagatgcagcgagcacgccgccctgagcctgaccaagggcgccgccctgagaaagagaaacgagcccagcttccagctgagctacggcggcctgagacacttctgctggcccagatacaccgactacggcaagcccctgaagcccagccacagcctggtgagactgaaggcctgggaggccgtgcccagcctgaacaagacccagagctag

SEQ ID NO: 333143 - DNA, 200 bp, Artificial Sequence
  derived and/or modified sequence
gacccctggaccaccagccccagcaagagcacaagaggaagagagagaccctcactgctggggagtccctgccacactcagtcccccaccacactgaatctcccctcctcacagttgccatgtagaccccttgaagaggggaggggcctagggagccgcaccttgtcatgtaccatcaataaagtaccctgtgctcaacc

SEQ ID NO: 333144 - protein, 284 aa, Artificial Sequence
  derived and/or modified sequence
MASLSAAAITVPPSVPSRAPVPPAPPLPGDSGTIIPPPPAPGDSTTPPPPPPPPPPPPPLPGGVCISSPPSLPGGTAISPPPPLSGDATIPPPPPLPEGVGIPSPSSLPGGTAIPPPPPLPGSARIPPPPPPLPGSAGIPPPPPPLPGEAGMPPPPPPLPGGPGIPPPPPFPGGPGIPPPPPGMGMPPPPPFGFGVPAAPVLPFGLTPKKLYKPEVQLRRPNWSKLVAEDLSQDCFWTKVKEDRFENNELFAKLTLTFSAQTKSEKAKKDQEGGEEKKSVQKKK

SEQ ID NO: 333145 - protein, 196 aa, Artificial Sequence [sequence omitted]

SEQ ID NO: 333146 - DNA, 591 bp, Artificial Sequence
  derived and/or modified sequence
atggacgagaaccaattcgtggccgtgacgagcactaatgccgcgaagatctttaacctgtaccctaggaagggccgcataagcgtgggctctgatagcgaccttgtgatttgggatccagatgcagtcaagatcgtctctgcaaaaaaccatcaaagcgctgctgagtataacattttcgaagggatggagctgaggggggcgccactggtagtcatatgtcaggggaaaatcatgctggaagatggaaacctgcacgttacccagggagctggccgttttatcccctgttccccattttctgattatgtgtataaaagaatcaaggctcgccggaaaatggctgacctccatgcggtgccacgaggcatgtacgatggccctgtgtttgacctgacaactacccccaaaggaggcacccccgccgggtccgcacgtgggtcccctacacgacccaacccaccagtacggaacctgcaccagagtggcttctctctgtccggaactcaagtggacgaaggcgtgcggtctgcatccaagcgcatcgtagccccaccgggagggcggtcaaacatcacgtccctatcttag

SEQ ID NO: 333147 - DNA, 591 bp, Artificial Sequence
  derived and/or modified sequence
atggatgagaaccagtttgtggccgtgaccagcaccaatgctgccaagatcttcaacctgtaccccaggaagggccgcatctctgtgggcagtgacagcgacctggtgatctgggaccctgatgctgtgaagatcgtgtctgccaagaaccaccagagcgctgctgagtacaacatctttgagggcatggagctgcggggggcccccctggtggtgatctgccagggcaagatcatgctggaggatggcaacctgcacgtgacccagggcgccggccgcttcatcccctgcagccccttcagtgactatgtgtacaagaggatcaaggcccggaggaagatggctgacctgcatgctgtgccccggggcatgtatgatggccctgtgtttgacctgaccaccacccccaagggcggcaccccagctggcagcgcccggggcagccccacccggcccaacccccctgtgaggaacctgcaccagagcggcttcagcctgagcggcacccaggtggatgagggcgtgcgcagcgccagcaagagaattgtggcccctcctgggggccgcagcaacatcaccagcctgtcctag

SEQ ID NO: 333148 - DNA, 591 bp, Artificial Sequence
  derived and/or modified sequence
atggacgagaaccagttcgtggccgtgaccagcaccaacgccgccaaaatctttaatctgtacccccgcaaggggaggatcagtgttggaagcgactcagacctggtcatatgggatcccgacgctgtgaaaattgtctccgcaaagaatcaccagtctgccgccgagtacaatatatttgaaggtatggaactgcggggcgcacccctggtagtcatttgtcagggtaaaatcatgctggaagatggcaatctgcatgtcacccagggtgcaggacgctttattccatgtagcccgttttctgattacgtctacaagcgaatcaaggccagaagaaaaatggccgacctccatgctgtcccgcgcggaatgtatgatgggcccgtgtttgacctgacgacgacgcctaagggaggaacccctgctggaagcgcacgaggctcgccaacgagacctaaccctcccgtacgcaacttgcatcaatctgggttttcgctgtctgggacacaggtggacgagggtgtgcgcagcgcgagcaagagaatagtagcgcctccgggtggccggtcgaatataaccagcctttcctag

SEQ ID NO: 333149 - DNA, 591 bp, Artificial Sequence
  derived and/or modified sequence
atggacgaaaatcaattcgtggcggtgacctccactaatgccgctaaaatattcaatctgtatcctcggaaaggtaggatttctgtgggaagtgactccgacttggttatttgggacccagacgctgtcaaaatcgtgagcgccaagaatcatcagtctgctgccgaatacaatattttcgaaggaatggagctgcgaggggcaccactggtcgttatctgtcagggaaagattatgctggaggacgggaacctgcatgttacccagggagccggaagatttataccatgttcacctttctccgactatgtgtacaaacgcataaaggccagacgaaagatggccgacctccacgcagtgcccagaggaatgtacgatggccctgtgttcgacctgaccactaccccaaagggaggcacccctgccggttccgctcgcggttcccccacccgtcctaatccccctgtccgaaatctgcaccagtccggatttagtctctctggaacccaggtggatgagggcgtgaggagcgctagcaagcgaattgtagcaccccctggaggtagaagtaacatcacttcactctcatag

SEQ ID NO: 333150 - DNA, 591 bp, Artificial Sequence
  derived and/or modified sequence
atggacgagaaccagttcgtggccgtgaccagcaccaacgccgccaagatcttcaacctgtaccccagaaagggcagaatcagcgtgggcagcgacagcgacctggtgatctgggaccccgacgccgtgaagatcgtgagcgccaagaaccaccagagcgccgccgagtacaacatcttcgagggcatggagctgagaggcgcccccctggtggtgatctgccagggcaagatcatgctggaggacggcaacctgcacgtgacccagggcgccggcagattcatcccctgcagccccttcagcgactacgtgtacaagagaatcaaggccagaagaaagatggccgacctgcacgccgtgcccagaggcatgtacgacggccccgtgttcgacctgaccaccacccccaagggcggcacccccgccggcagcgccagaggcagccccaccagacccaacccccccgtgagaaacctgcaccagagcggcttcagcctgagcggcacccaggtggacgagggcgtgagaagcgccagcaagagaatcgtggccccccccggcggcagaagcaacatcaccagcctgagctag

SEQ ID NO: 333151 - DNA, 1043 bp, Artificial Sequence
  derived and/or modified sequence
actccacctgatctcggggcgctgtgcgctgaggaaggcgcgggcgagccggagcagaagaaggagggagggagccagccgctgcagccaccaccgccacagggaaaatggacgaaaaccagttcgtggctgtgacaagcacaaacgctgccaagatcttcaacctgtatccccgcaagggaagaatatctgtgggttctgacagcgacctcgtcatctgggatccagatgctgtgaagatcgtctctgccaagaaccaccagtctgcggcagagtacaacatctttgaagggatggagctgcgcggggctcctctggttgtcatctgccagggcaagatcatgctggaagatggcaacctgcacgtgacccagggggctggccgcttcataccctgcagcccgttctccgactatgtctacaagcgcattaaagcacggaggaagatggcagacctgcatgccgtcccaaggggcatgtacgatgggcctgtgtttgacctgaccaccacccccaaaggtggcacccccgcaggctctgctcggggctctcctactcggccgaacccacctgtgaggaatcttcatcagtcgggatttagcctgtcaggcacccaagtggatgagggggttcgctcagccagcaagcgcatcgtggcgcccccaggcggccgttctaatatcacatctctgagttaagcaagccttcctcaaagagaggggcagaagcaagaagagattgttttgaagccaaaatggtacaccgatatttaagaaggaaagcgaatccaaacggttgtgatctaaagaatcaataagcctcaagccttatgtttctccaatgttacgctcgcttgcctagctttacgaatattgctttgttttctgtttatgcatagccttgatttgtttgactcccctccccccatttacatgcatgcaatcagacaggccactaaggtaaaagagtctgctctatcatagtgttgagagcgtgtgtagtgctgcatcttatgacaaggggacagacaagctgggacgtca

SEQ ID NO: 333152 - protein, 476 aa, Artificial Sequence
  derived and/or modified sequence
MSTQRLRNEDYHDYSSTDVSPEESPSEGLNNLSSPGSYQRFGQSNSTTWFQTLIHLLKGNIGTGLLGLPLAVKNAGIVMGPISLLIIGIVAVHCMGILVKCAHHFCRRLNKSFVDYGDTVMYGLESSPCSWLRNHAHWGRRVVDFFLIVTQLGFCCVYFVFLADNFKQVIEAANGTTNNCHNNETVILTPTMDSRLYMLSFLPFLVLLVFIRNLRALSIFSLLANITMLVSLVMIYQFIVQRIPDPSHLPLVAPWKTYPLFFGTAIFSFEGIGMVLPLENKMKDPRKFPLILYLGMVIVTILYISLGCLGYLQFGANIQGSITLNLPNCWLYQSVKLLYSIGIFFTYALQFYVPAEIIIPFFVSRAPEHCELVVDLFVRTVLVCLTCILAILIPRLDLVISLVGSVSSSALALIIPPLLEVTTFYSEGMSPLTIFKDALISILGFVGFVVGTYEALYELIQPSNAPIFINSTCAFI

SEQ ID NO: 333153 - protein, 386 aa, Artificial Sequence
  derived and/or modified sequence
MSTQRLRNEDYHDYSSTDVSPEESPSEGLNNLSSPGSYQRFGQSNSTTWFQTLIHLLKGNIGTGLLGLPLAVKNAGIVMGPISLLIIGIVAVHCMGILVKCAHHFCRRLNKSFVDYGDTVMYGLESSPCSWLRNHAHWGRRVVDFFLIVTQLGFCCVYFVFLADNFKQVIEAANGTTNNCHNNETVILTPTMDSRLYMLSFLPFLVLLVFIRNLRALSIFSLLANITMLVSLVMIYQFIVQRIPDPSHLPLVAPWKTYPLFFGTAIFSFEGIGMVLPLENKMKDPRKFPLILYLGMVIVTILYISLGCLGYLQFGANIQGSITLNLPNCWLYQSVKLLYSIGIFFTYALQFYVPAEIIIPFFVSRAPEHCELVVDLFVRTVLVCLT

SEQ ID NO: 333154 - protein, 70 aa, Artificial Sequence
  derived and/or modified sequence
MSTQRLRNEDYHDYSSTDVSPEESPSEGLNNLSSPGSYQRFGQSNSTTWFQTLIHLLKGNIGTGLLGLPL

SEQ ID NO: 333155 - protein, 72 aa, Artificial Sequence
  derived and/or modified sequence
MSTQRLRNEDYHDYSSTDVSPEESPSEGLNNLSSPGSYQRFGQSNSTTWFQTLIHLLKGNIGTGLLGLPLAV

SEQ ID NO: 333156 - protein, 388 aa, Artificial Sequence
  derived and/or modified sequence
MSTQRLRNEDYHDYSSTDVSPEESPSEGLNNLSSPGSYQRFGQSNSTTWFQTLIHLLKGNIGTGLLGLPLAVKNAGIVMGPISLLIIGIVAVHCMGILVKCAHHFCRRLNKSFVDYGDTVMYGLESSPCSWLRNHAHWGRRVVDFFLIVTQLGFCCVYFVFLADNFKQVIEAANGTTNNCHNNETVILTPTMDSRLYMLSFLPFLVLLVFIRNLRALSIFSLLANITMLVSLVMIYQFIVQRIPDPSHLPLVAPWKTYPLFFGTAIFSFEGIGMVLPLENKMKDPRKFPLILYLGMVIVTILYISLGCLGYLQFGANIQGSITLNLPNCWLYQSVKLLYSIGIFFTYALQFYVPAEIIIPFFVSRAPEHCELVVDLFVRTVLVCLTCE

SEQ ID NO: 333157 - DNA, 5781 bp, Artificial Sequence
  derived and/or modified sequence
acgtgatgaggtccggaagcggctgccgggcagcaaaggaggatggcgaggggctgatactgaacccgggaagggtgggctgtgctgaagccagagccggagccggagctggggccagaacccgagcagtgagttcctccactggctgccggctggcggcgctcgccgccttgggcaggacccacctcgccttcctcccggcgtggcagatgctccagctgccatgtccacgcagagacttcggaatgaagactaccacgactacagctccacggacgtgagccctgaggagagcccgtcggaaggcctcaacaacctctcctccccgggctcctaccagcgctttggtcaaagcaatagcacaacatggttccagaccttgatccacctgttaaaaggcaacattggcacaggactcctgggactccctctggcggtgaaaaatgcaggcatcgtgatgggtcccatcagcctgctgatcataggcatcgtggccgtgcactgcatgggtatcctggtgaaatgtgctcaccacttctgccgcaggctgaataaatcctttgtggattatggtgatactgtgatgtatggactagaatccagcccctgctcctggctccggaaccacgcacactggggaagacgtgttgtggacttcttcctgattgtcacccagctgggattctgctgtgtctattttgtgtttctggctgacaactttaaacaggtgatagaagcggccaatgggaccaccaataactgccacaacaatgagacggtgattctgacgcctaccatggactcgcgactctacatgctctccttcctgcccttcctggtgctgctggttttcatcaggaacctccgagccctgtccatcttctccctgttggccaacatcaccatgctggtcagcttggtcatgatctaccagttcattgttcagaggatcccagaccccagccacctccccttggtggccccttggaagacctaccctctcttctttggcacagcgattttttcatttgaaggcattggaatggttctgcccctggaaaacaaaatgaaggatcctcggaagttcccactcatcctgtacctgggcatggtcatcgtcaccatcctctacatcagcctggggtgtctggggtacctgcaatttggagctaatatccaaggcagcataaccctcaacctgcccaactgctggttgtaccagtcagttaagctgctgtactccatcgggatctttttcacctacgcactccagttctacgtcccggctgagatcatcatccccttctttgtgtcccgagcgcccgagcactgtgagttagtggtggacctgtttgtgcgcacagtgctggtctgcctgacatgcatcttggccatcctcatcccccgcctggacctggtcatctccctggtgggctccgtgagcagcagcgccctggccctcatcatcccaccgctcctggaggtcaccaccttctactcagagggcatgagccccctcaccatctttaaggacgccctgatcagcatcctgggcttcgtgggctttgtggtggggacctatgaggctctctatgagctgatccagccaagcaatgctcccatcttcatcaattccacctgtgccttcatatagggatctgggttcgtctctgcagctgcctacccctgccccatgtgtcccccgttacctgtcctcagagcctcaggtatggtccaggctctgaggaaagtcagggttgctgtgtgggaacccctctgcctggcacctggataccctgggccaggtaacctgagggcaggggagaggtggggtggcagacacgcagaagtgctactagtgacagggctgccatcgctcacctgtacctatttacacccagaactttccagctccccctcatcatgcctcctccttcctacctgcctcccctctgctggtgcacctcgcccaactcattcttactgcacagttcactttatttaacaattttcatgtcccccacctcatgttttcaccttttctgggccaggcatagattaagtaactgggaacgccccctctttataaagctgggcttctttctcatctctctcccaaatgttgtatctcagtattcttcctattcgagtctccagggggtggctggacctacctggtcatttgaaacaggcccccaagctggagtttttaatctggactctctggcttgctgtgacccctaaggcaatgcttctcttccctggattccttagtgtgggtcacagtactgtgttcttagttgctttagctcttaaaacatacgaagtgttgcctaaactgaaaatatttatcttttatttaaaatcagatttttgtttttagactgtcttagatctggggctattacgaatcacttcttcttcagtaaactttgactcaacttctcctgctgaaaagaagctcgctccagatgtctgcatgggtcctcggcactcttggctgaggactcaaaggttttaatcaggatcgtctaaaaatgtacctcggtgaggaggcacagattttgcctcctgttgaccagcctggtttcataccgaaaagacattgaaggactgcagaaatgtatgggtgcaccgggccgagggaagggtggctgagtgagaggcgtataaaatggggctgtgtgcatgcaggcccatgtttcagcctcagcccacgccaggtgaaaggatcagcaatgctctgttgccatcgtgctgggacgacaccagctctattgccaccgatgagtagctgaggtcagtgtgcacagagtttgaaattaagttaatagactttacagcagctggtctgacactacgcgcagtgctcggttgtttacaatcagtggggaaaagggcagaaccagtgcccggccccacactgcctctgtggcctggactttgaaaggaacccactgaacactaattatgagccctgtctttcccccagaatgcctccctgggtttcacaaacagccttgaggttggccctcctcaaggtcagccttcagatttgggagcaaacttcagagaaggcagaggaagatacattgccttgctgtgggctgcctcttctttcctcttggtgtgcgaagtatttcagaaggccattgatgaattccccctctttagctgtgtatttgtgcacgtgtgtgtgtacgtgcgtgtgtgtgtgtgttcctgtgtaagtaacagaccagactccttttctcttctgtcccgtcaccaggctcttgcttcactgcagatacagttcactctgaaagctggttgaaggagagcagcaaaaatgtatcaggggttttgcttctgtgtttcgccaaagctcataagggctgtgacccacccatatggccccagttttttctgtctcttctgttccaaagccaggagagctgacttccaggtgaagggatgggaaaagtggactctcattgtagtgactcccaacctacctaataatttgttaacttaggaatatgctatcattgttgacttgttcttccttaggagaaggacgattttcacccaccctttctgttctatggtggactcttaacaggtgctatgtgaccaggaatctagccgggagtagcagaggccctgtcttctgaagtctcaggcttagaagttaccaaagtgggctcagaaactgtcatctcctggttccaagttcgggctctggcagcccagccgctatcttagctgtctttcccagcggtgctaagagtggtctcagtgagaaggtagatgccaactggagggccagacctgtgtcctgcccatgtcctccttggtggacgtttctgtttactcagagctgctagagaccatcctgcccatccgagttctgagattgggactgtgatgttgggacctgaggactggatggtagaatactggggtcccccagctcttagcaggatgcaggctattgcttccacacccctggccgtgagaacgtggtatgtaggagagttggctgtagctttaggatttctggaagccaatttggcatggcctatttgatctctggcttgtgctcctgctacactgacagactgattgcgtggctctttcagaagacccaggaagggcagctccagccagaggaccttcctggctatgcaggtgcacagctcttaggcatcaagcaaagggtcagccagtcagtagtagtgggaggaagcccttcctcctcttatgcaagcagctcgcagccagcccagaatctcttatgcagcccaaagggcttcttgaggtagagagccctccccagtgtcttcccaggataagtagaaatatgatcacagagcaacggagcaaaggctttcgggagtgtgaggctgcatctgctggagcaaagggaaaccgtgggcttttccggccagatactcttgagctctgtgaccctgctcctgtcaccccaatttctccaagccagaggtagctttctcagagccccttggtggttctgtcctccaaatgctgctgttgggagcgggcttccagctctcagtgggcagtgcacctcctcctaaatgcaggcacttgctaggaagagtgtgagctggcgtcttctgttcaccctgcctagcagttgtcaccattcacaagtggcattatttatgttgtgctgctgtccagctgctaagatcccttcatctgcacaagccctggctagatatgtgtgaatgtgtggcatcatttcacttcagccgcccaattccatctctcctctgcagccagattcactggctgatgctcactgctcactgtctatccccacgaaatttagttttatcagtagtcttaaagtgttgatctcaaacaagtacattagaaaaatcatgtttcttctctctcatcttactttttcttctcagatttctcccttcctagaacattctctctgtttagcactaatgttcacctcgtattttttggaagtgcaaaaatctcaatttgtgtctgtttacagctctctctcctcactgctcacagcaaggggttctgtatcagtggatttcattttgtagctgctgagatgttaaggcaagcctcagcatctgcccctgctgggtgcacaatgctgcttcctcgaagagaagacacagagtccaagtggcaggacttgaggttggcttccactctgccttagaagttaattttccaaagtacattacaaatctctgaggccattaggggaaaaggaaggggtgtggtttgtctttgaaattacggttaatacttttagacagtaagtccggctggttgcagggctatttgccccgacagcatcagcctgtaacatttcttctctttcctttgtgccactgagtcgttccctggccagaggacataaatggtgctggtaggaggttatcagagtaaggaaggtagcagatataggtgcagggtgcctgtcattcactgtgttatttggtttaaatcaaagtgattctgggggaagctatgctctttcagtggataataaaattggtaactctattgtaaaacatgtcaatggtgtgtgaagaaaaatcaaccaatctgtaggtgttgataactagacagtactgtgtatgttacgtgcctgtgtggatgtgcacttccagcatggtatgtgtagcgatgtggatcatgccagagttcgtagatcctgttttggggtttgcacatggatcgtatgttaagctttttcttttcaataaatgaattttatttttatttttgaga

SEQ ID NO: 333158 - DNA, 2005 bp, Artificial Sequence
  derived and/or modified sequence
gagctcttcatccgcctgggcccaaccctggaactattcctttcaatggtgtcttttcttgccttgtttcagaaggatctactagttggccctatcttgtgccaagactgacagcaaggaagctgctggctgactgccatgtccacgcagagacttcggaatgaagactaccacgactacagctccacggacgtgagccctgaggagagcccgtcggaaggcctcaacaacctctcctccccgggctcctaccagcgctttggtcaaagcaatagcacaacatggttccagaccttgatccacctgttaaaaggcaacattggcacaggactcctgggactccctctggcggtgaaaaatgcaggcatcgtgatgggtcccatcagcctgctgatcataggcatcgtggccgtgcactgcatgggtatcctggtgaaatgtgctcaccacttctgccgcaggctgaataaatcctttgtggattatggtgatactgtgatgtatggactagaatccagcccctgctcctggctccggaaccacgcacactggggaagacgtgttgtggacttcttcctgattgtcacccagctgggattctgctgtgtctattttgtgtttctggctgacaactttaaacaggtgatagaagcggccaatgggaccaccaataactgccacaacaatgagacggtgattctgacgcctaccatggactcgcgactctacatgctctccttcctgcccttcctggtgctgctggttttcatcaggaacctccgagccctgtccatcttctccctgttggccaacatcaccatgctggtcagcttggtcatgatctaccagttcattgttcagaggatcccagaccccagccacctccccttggtggccccttggaagacctaccctctcttctttggcacagcgattttttcatttgaaggcattggaatggttctgcccctggaaaacaaaatgaaggatcctcggaagttcccactcatcctgtacctgggcatggtcatcgtcaccatcctctacatcagcctggggtgtctggggtacctgcaatttggagctaatatccaaggcagcataaccctcaacctgcccaactgctggttgtaccagtcagttaagctgctgtactccatcgggatctttttcacctacgcactccagttctacgtcccggctgagatcatcatccccttctttgtgtcccgagcgcccgagcactgtgagttagtggtggacctgtttgtgcgcacagtgctggtctgcctgacatgcatcttggccatcctcatcccccgcctggacctggtcatctccctggtgggctccgtgagcagcagcgccctggccctcatcatcccaccgctcctggaggtcaccaccttctactcagagggcatgagccccctcaccatctttaaggacgccctgatcagcatcctgggcttcgtgggctttgtggtggggacctatgaggctctctatgagctgatccagccaagcaatgctcccatcttcatcaattccacctgtgccttcatatagggatctgggttcgtctctgcagctgcctacccctgccccatgtgtcccccgttacctgtcctcagagcctcaggtatggtccaggctctgaggaaagtcagggttgctgtgtgggaacccctctgcctggcacctggataccctgggccaggtaacctgagggcaggggagaggtggggtggcagacacgcagaagtgctactagtgacagggctgccatcgctcacctgtacctatttacacccagaactttccagctccccctcatcatgcctcctccttcctacctgcctcccctctgctggtgcacctcgcccaactcattcttactgcacagttcactttatttaacaattttcatgtcccccacctcatgttttcaccttttctgggccaggcatagattaagtaactgggaacgccccctctttataaa

SEQ ID NO: 333159 - DNA, 1389 bp, Artificial Sequence
  derived and/or modified sequence
gcggctgccgggcagcaaaggaggatggcgaggggctgatactgaacccgggaagggtgggctgtgctgaagccagagccggagccggagctgggcaggacccacctcgccttcctcccggcgtggcagatgctccagctgccatgtccacgcagagacttcggaatgaagactaccacgactacagctccacggacgtgagccctgaggagagcccgtcggaaggcctcaacaacctctcctccccgggctcctaccagcgctttggtcaaagcaatagcacaacatggttccagaccttgatccacctgttaaaaggcaacattggcacaggactcctgggactccctctggcggtgaaaaatgcaggcatcgtgatgggtcccatcagcctgctgatcataggcatcgtggccgtgcactgcatgggtatcctggtgaaatgtgctcaccacttctgccgcaggctgaataaatcctttgtggattatggtgatactgtgatgtatggactagaatccagcccctgctcctggctccggaaccacgcacactggggaagacgtgttgtggacttcttcctgattgtcacccagctgggattctgctgtgtctattttgtgtttctggctgacaactttaaacaggtgatagaagcggccaatgggaccaccaataactgccacaacaatgagacggtgattctgacgcctaccatggactcgcgactctacatgctctccttcctgcccttcctggtgctgctggttttcatcaggaacctccgagccctgtccatcttctccctgttggccaacatcaccatgctggtcagcttggtcatgatctaccagttcattgttcagaggatcccagaccccagccacctccccttggtggccccttggaagacctaccctctcttctttggcacagcgattttttcatttgaaggcattggaatggttctgcccctggaaaacaaaatgaaggatcctcggaagttcccactcatcctgtacctgggcatggtcatcgtcaccatcctctacatcagcctggggtgtctggggtacctgcaatttggagctaatatccaaggcagcataaccctcaacctgcccaactgctggttgtaccagtcagttaagctgctgtactccatcgggatctttttcacctacgcactccagttctacgtcccggctgagatcatcatccccttctttgtgtcccgagcgcccgagcactgtgagttagtggtggacctgtttgtgcgcacagtgctggtctgcctgacatgagtgtaagttaaaagacaggatacccttctgtttgctgtggttgaaaactggtgacatttagaaaataaaagtaaattttttttgt

SEQ ID NO: 333160 - DNA, 1621 bp, Artificial Sequence
  derived and/or modified sequence
agcaaaggaggatggcgaggggctgatactgaacccgggaagggtgggctgtgctgaagccagagccggagccggagctggggccagaacccgagcagtgagttcctccactggctgccggctggcggcgctcgccgccttgggcaggacccacctcgccttcctcccggcgtggcagatgctccagctgccatgtccacgcagagacttcggaatgaagactaccacgactacagctccacggacgtgagccctgaggagagcccgtcggaaggcctcaacaacctctcctccccgggctcctaccagcgctttggtcaaagcaatagcacaacatggttccagaccttgatccacctgttaaaaggcaacattggcacaggactcctgggactccctctggcggtgaaaaatgcaggcatcgtgatgggtcccatcagcctgctgatcataggcatcgtggccgtgcactgcatgggtatcctggtgaaatgtgctcaccacttctgccgcaggctgaataaatcctttgtggattatggtgatactgtgatgtatggactagaatccagcccctgctcctggctccggaaccacgcacactggggaagacgtgttgtggacttcttcctgattgtcacccagctgggattctgctgtgtctattttgtgtttctggctgacaactttaaacaggtgatagaagcggccaatgggaccaccaataactgccacaacaatgagacggtgattctgacgcctaccatggactcgcgactctacatgctctccttcctgcccttcctggtgctgctggttttcatcaggaacctccgagccctgtccatcttctccctgttggccaacatcaccatgctggtcagcttggtcatgatctaccagttcattgttcagaggatcccagaccccagccacctccccttggtggccccttggaagacctaccctctcttctttggcacagcgattttttcatttgaaggcattggaatggttctgcccctggaaaacaaaatgaaggatcctcggaagttcccactcatcctgtacctgggcatggtcatcgtcaccatcctctacatcagcctggggtgtctggggtacctgcaatttggagctaatatccaaggcagcataaccctcaacctgcccaactgctggttgtaccagtcagttaagctgctgtactccatcgggatctttttcacctacgcactccagttctacgtcccggctgagatcatcatccccttctttgtgtcccgagcgcccgagcactgtgagttagtggtggacctgtttgtgcgcacagtgctggtctgcctgacatgtgagtagaagatgataattgccttgcttgtttttccctaaagggcacccagtctgcaggctttcatgagaaaagacaatgtgtgttgtagtgaagctggctatgtttgtgacagagaacctggcccatggcctcactttcagagttgaggcacctccagatggggaagtgaattaattacatatgtactgtaaagaacatgggaatgaggacagtggtttatgtatagatagggtatgaaatgctgtggaggtggttatcattcagagt

SEQ ID NO: 333161 - DNA, 552 bp, Artificial Sequence
  derived and/or modified sequence
agcaaaggaggatggcgaggggctgatactgaacccgggaagggtgggctgtgctgaagccagagccggagccggagctggggccagaacccgagcagtgagttcctccactggctgccggctggcggcgctcgccgccttgggcaggacccacctcgccttcctcccggcgtggcagatgctccagaattccatcgacagagaggagaaaatacatctggggaatttgccgctgctctgagttccaaagtccaaaccaatgtaattgtttcagaataacggatgacacttttagcttgcaaacaaggggcgccaatgcgtgaattctggtaggagctgccatgtccacgcagagacttcggaatgaagactaccacgactacagctccacggacgtgagccctgaggagagcccgtcggaaggcctcaacaacctctcctccccgggctcctaccagcgctttggtcaaagcaatagcacaacatggttccagaccttgatccacctgttaaaaggcaacattggcacaggactcctgggactccctctgg

SEQ ID NO: 333162 - DNA, 558 bp, Artificial Sequence
  derived and/or modified sequence
atgtagagtggatggagcagatgtctgcttactagcatgtgggatgaatggagccgatgtccacttactggcattctcttgtttcccatagaagaagctctcactgagtctgtttacttccacccaggccttggaagaatcctgtacctctctcctttggccaggccttactgtgatgagcacataaagaattccatcgacagagaggagaaaatacatctggggaatttgccgctgctctgagttccaaagtccaaaccaatgtaattgtttcagaataacggatgacacttttagcttgcaaacaaggggcgccaatgcgtgaattctggtaggagctgccatgtccacgcagagacttcggaatgaagactaccacgactacagctccacggacgtgagccctgaggagagcccgtcggaaggcctcaacaacctctcctccccgggctcctaccagcgctttggtcaaagcaatagcacaacatggttccagaccttgatccacctgttaaaaggcaacattggcacaggactcctgggactccctctggcggt

SEQ ID NO: 333163 - protein, 4349 aa, Artificial Sequence
  derived and/or modified sequence
MTIALLGFAIFLLHCATCEKPLEGILSSSAWHFTHSHYNATIYENSSPKTYVESFEKMGIYLAEPQWAVRYRIISGDVANVFKTEEYVVGNFCFLRIRTKSSNTALLNREVRDSYTLIIQATEKTLELEALTRVVVHILDQNDLKPLFSPPSYRVTISEDMPLKSPICKVTATDADLGQNAEFYYAFNTRSEMFAIHPTSGVVTVAGKLNVTWRGKHELQVLAVDRMRKISEGNGFGSLAALVVHVEPALRKPPAIASVVVTPPDSNDGTTYATVLVDANSSGAEVESVEVVGGDPGKHFKAIKSYARSNEFSLVSVKDINWMEYLHGFNLSLQARSGSGPYFYSQIRGFHLPPSKLSSLKFEKAVYRVQLSEFSPPGSRVVMVRVTPAFPNLQYVLKPSSENVGFKLNARTGLITTTKLMDFHDRAHYQLHIRTSPGQASTVVVIDIVDCNNHAPLFNRSSYDGTLDENIPPGTSVLAVTATDRDHGENGYVTYSIAGPKALPFSIDPYLGIISTSKPMDYELMKRIYTFRVRASDWGSPFRREKEVSIFLQLRNLNDNQPMFEEVNCTGSIRQDWPVGKSIMTMSAIDVDELQNLKYEIVSGNELEYFDLNHFSGVISLKRPFINLTAGQPTSYSLKITASDGKNYASPTTLNITVVKDPHFEVPVTCDKTGVLTQFTKTILHFIGLQNQESSDEEFTSLSTYQINHYTPQFEDHFPQSIDVLESVPINTPLARLAATDPDAGFNGKLVYVIADGNEEGCFDIELETGLLTVAAPLDYEATNFYILNVTVYDLGTPQKSSWKLLTVNVKDWNDNAPRFPPGGYQLTISEDTEVGTTIAELTTKDADSEDNGRVRYTLLSPTEKFSLHPLTGELVVTGHLDRESEPRYILKVEARDQPSKGHQLFSVTDLIITLEDVNDNSPQCITEHNRLKVPEDLPPGTVLTFLDASDPDLGPAGEVRYVLMDGAHGTFRVDLMTGALILERELDFERRAGYNLSLWASDGGRPLARRTLCHVEVIVLDVNENLHPPHFASFVHQGQVQENSPSGTQVIVVAAQDDDSGLDGELQYFLRAGTGLAAFSINQDTGMIQTLAPLDREFASYYWLTVLAVDRGSVPLSSVTEVYIEVTDANDNPPQMSQAVFYPSIQEDAPVGTSVLQLDAWDPDSSSKGKLTFNITSGNYMGFFMIHPVTGLLSTAQQLDRENKDEHILEVTVLDNGEPSLKSTSRVVVGILDVNDNPPIFSHKLFNVRLPERLSPVSPGPVYRLVASDLDEGLNGRVTYSIEDSDEEAFSIDLVTGVVSSSSTFTAGEYNILTIKATDSGQPPLSASVRLHIEWIPWPRPSSIPLAFDETYYSFTVMETDPVNHMVGVISVEGRPGLFWFNISGGDKDMDFDIEKTTGSIVIARPLDTRRRSNYNLTVEVTDGSRTIATQVHIFMIANINHHRPQFLETRYEVRVPQDTVPGVELLRVQAIDQDKGKSLIYTIHGSQDPGSASLFQLDPSSGVLVTVGKLDLGSGPSQHTLTVMVRDQEIPIKRNFVWVTIHVEDGNLHPPRFTQLHYEASVPDTIAPGTELLQVRAMDADRGVNAEVHYSLLKGNSEGFFNINALLGIITLAQKLDQANHAPHTLTVKAEDQGSPQWHDLATVIIHVYPSDRSAPIFSKSEYFVEIPESIPVGSPILLVSAMSPSEVTYELREGNKDGVFSMNSYSGLISTQKKLDHEKISSYQLKIRGSNMAGAFTDVMVVVDIIDENDNAPMFLKSTFVGQISEAAPLYSMIMDKNNNPFVIHASDSDKEANSLLVYKILEPEALKFFKIDPSMGTLTIVSEMDYESMPSFQFCVYVHDQGSPVLFAPRPAQVIIHVRDVNDSPPRFSEQIYEVAIVGPIHPGMELLMVRASDEDSEVNYSIKTGNADEAVTIHPVTGSISVLNPAFLGLSRKLTIRASDGLYQDTALVKISLTQVLDKSLQFDQDVYWAAVKENLQDRKALVILGAQGNHLNDTLSYFLLNGTDMFHMVQSAGVLQTRGVAFDREQQDTHELAVEVRDNRTPQRVAQGLVRVSIEDVNDNPPKFKHLPYYTIIQDGTEPGDVLFQVSATDEDLGTNGAVTYEFAEDYTYFRIDPYLGDISLKKPFDYQALNKYHLKVIARDGGTPSLQSEEEVLVTVRNKSNPLFQSPYYKVRVPENITLYTPILHTQARSPEGLRLIYNIVEEEPLMLFTTDFKTGVLTVTGPLDYESKTKHVFTVRATDTALGSFSEATVEVLVEDVNDNPPTFSQLVYTTSISEGLPAQTPVIQLLASDQDSGRNRDVSYQIVEDGSDVSKFFQINGSTGEMSTVQELDYEAQQHFHVKVRAMDKGDPPLTGETLVVVNVSDINDNPPEFRQPQYEANVSELATCGHLVLKVQAIDPDSRDTSRLEYLILSGNQDRHFFINSSSGIISMFNLCKKHLDSSYNLRVGASDGVFRATVPVYINTTNANKYSPEFQQHLYEAELAENAMVGTKVIDLLAIDKDSGPYGTIDYTIINKLASEKFSINPNGQIATLQKLDRENSTERVIAIKVMARDGGGRVAFCTVKIILTDENDNPPQFKASEYTVSIQSNVSKDSPVIQVLAYDADEGQNADVTYSVNPEDLVKDVIEINPVTGVVKVKDSLVGLENQTLDFFIKAQDGGPPHWNSLVPVRLQVVPKKVSLPKFSEPLYTFSAPEDLPEGSEIGIVKAVAAQDPVIYSLVRGTTPESNKDGVFSLDPDTGVIKVRKPMDHESTKLYQIDVMAHCLQNTDVVSLVSVNIQVGDVNDNRPVFEADPYKAVLTENMPVGTSVIQVTAIDKDTGRDGQVSYRLSADPGSNVHELFAIDSESGWITTLQELDCETCQTYHFHVVAYDHGQTIQLSSQALVQVSITDENDNAPRFASEEYRGSVVENSEPGELVATLKTLDADISEQNRQVTCYITEGDPLGQFGISQVGDEWRISSRKTLDREHTAKYLLRVTASDGKFQASVTVEIFVLDVNDNSPQCSQLLYTGKVHEDVFPGHFILKVSATDLDTDTNAQITYSLHGPGAHEFKLDPHTGELTTLTALDRERKDVFNLVAKATDGGGRSCQADITLHVEDVNDNAPRFFPSHCAVAVFDNTTVKTPVAVVFARDPDQGANAQVVYSLPDSAEGHFSIDATTGVIRLEKPLQVRPQAPLELTVRASDLGTPIPLSTLGTVTVSVVGLEDYLPVFLNTEHSVQVPEDAPPGTEVLQLATLTRPGAEKTGYRVVSGNEQGRFRLDARTGILYVNASLDFETSPKYFLSIECSRKSSSSLSDVTTVMVNITDVNEHRPQFPQDPYSTRVLENALVGDVILTVSATDEDGPLNSDITYSLIGGNQLGHFTIHPKKGELQVAKALDREQASSYSLKLRATDSGQPPLHEDTDIAIQVADVNDNPPRFFQLNYSTTVQENSPIGSKVLQLILSDPDSPENGPPYSFRITKGNNGSAFRVTPDGWLVTAEGLSRRAQEWYQLQIQASDSGIPPLSSLTSVRVHVTEQSHYAPSALPLEIFITVGEDEFQGGMVGKIHATDRDPQDTLTYSLAEEETLGRHFSVGAPDGKIIAAQGLPRGHYSFNVTVSDGTFTTTAGVHVYVWHVGQEALQQAMWMGFYQLTPEELVSDHWRNLQRFLSHKLDIKRANIHLASLQPAEAVAGVDVLLVFEGHSGTFYEFQELASIITHSAKEMEHSVGVQMRSAMPMVPCQGPTCQGQICHNTVHLDPKVGPTYSTARLSILTPRHHLQRSCSCNGTATRFSGQSYVRYRAPAARNWHIHFYLKTLQPQAILLFTNETASVSLKLASGVPQLEYHCLGGFYGNLSSQRHVNDHEWHSILVEEMDASIRLMVDSMGNTSLVVPENCRGLRPERHLLLGGLILLHSSSNVSQGFEGCLDAVVVNEEALDLLAPGKTVAGLLETQALTQCCLHSDYCSQNTCLNGGKCSWTHGAGYVCKCPPQFSGKHCEQGRENCTFAPCLEGGTCILSPKGASCNCPHPYTGDRCEMEARGCSEGHCLVTPEIQRGDWGQQELLIITVAVAFIIISTVGLLFYCRRCKSHKPVAMEDPDLLARSVGVDTQAMPAIELNPLSASSCNNLNQPEPSKASVPNELVTFGPNSKQRPVVCSVPPRLPPAAVPSHSDNEPVIKRTWSSEEMVYPGGAMVWPPTYSRNERWEYPHSEVTQGPLPPSAHRHSTPVVMPEPNGLYGGFPFPLEMENKRAPLPPRYSNQNLEDLMPSRPPSPRERLVAPCLNEYTAISYYHSQFRQGGGGPCLADGGYKGVGMRLSRAGPSYAVCEVEGAPLAGQGQPRVPPNYEGSDMVESDYGSCEEVMF

SEQ ID NO: 333164 - DNA, 14534 bp, Artificial Sequence
  derived and/or modified sequence
ggagttttccaccatgactattgccctgctgggttttgccatattcttgctccattgtgcgacctgtgagaagcctctagaagggattctctcctcctctgcttggcacttcacacactcccattacaatgccaccatctatgaaaattcttctcccaagacctatgtggagagcttcgagaaaatgggcatctacctcgcggagccacagtgggcagtgaggtaccggatcatctctggggatgtggccaatgtatttaaaactgaggagtatgtggtgggcaacttctgcttcctaagaataaggacaaagagcagcaacacagctcttctgaacagagaggtgcgagacagctacaccctcatcatccaagccacagagaagaccttggagttggaagctttgacccgtgtggtggtccacatcctggaccagaatgacctgaagcctctcttctctccaccttcgtacagagtcaccatctctgaggacatgcccctgaagagccccatctgcaaggtgactgccacagatgctgatctaggccagaatgctgagttctattatgcctttaacacaaggtcagagatgtttgccatccatcccaccagcggtgtggtcactgtggctgggaagcttaacgtcacctggcgaggaaagcatgagctccaggtgctagctgtggaccgcatgcggaaaatctctgagggcaatgggtttggcagcctggctgcacttgtggttcatgtggagcctgccctcaggaagcccccagccattgcttcggtggtggtgactccaccagacagcaatgatggtaccacctatgccactgtactggtcgatgcaaatagctcaggagctgaagtggagtcagtggaagttgttggtggtgaccctggaaagcacttcaaagccatcaagtcttatgcccggagcaatgagttcagtttggtgtctgtcaaagacatcaactggatggagtaccttcatgggttcaacctcagcctccaggccaggagtgggagcggcccttatttttattcccagatcaggggctttcacctaccaccttccaaactgtcttccctcaaattcgagaaggctgtttacagagtgcagcttagtgagttttcccctcctggcagccgcgtggtgatggtgagagtcaccccagccttccccaacctgcagtatgttctaaagccatcttcagagaatgtaggatttaaacttaatgctcgaactgggttgatcaccaccacaaagctcatggacttccacgacagagcccactatcagctacacatcagaacctcaccgggccaggcctccaccgtggtggtcattgacattgtggactgcaacaaccatgcccccctcttcaacaggtcttcctatgatggtaccttggatgagaacatccctccaggcaccagtgttttggctgtgactgccactgaccgggatcatggggaaaatggatatgtcacctattccattgctggaccaaaagctttgccattttctattgacccctacctggggatcatctccacctccaaacccatggactatgaactcatgaaaagaatttataccttccgggtaagagcatcagactggggatccccttttcgccgggagaaggaagtgtccatttttcttcagctcaggaacttgaatgacaaccagcctatgtttgaagaagtcaactgtacagggtctatccgccaagactggccagtagggaaatcgataatgactatgtcagccatagatgtggatgagcttcagaacctaaaatacgagattgtatcaggcaatgaactagagtattttgatctaaatcatttctccggagtgatatccctcaaacgcccttttatcaatcttactgctggtcaacccaccagttattccctgaagattacagcctcagatggcaaaaactatgcctcacccacaactttgaatattactgtggtgaaggaccctcattttgaagttcctgtaacatgtgataaaacaggggtattgacacaattcacaaagactatcctccactttattgggcttcagaaccaggagtccagtgatgaggaattcacttctttaagcacatatcagattaatcattacaccccacagtttgaggaccacttcccccaatccattgatgtccttgagagtgtccctatcaacacccccttggcccgcctagcagccactgaccctgatgctggttttaatggcaaactggtctatgtgattgcagatggcaatgaggagggctgctttgacatagagctggagacagggctgctcactgtagctgctcccttggactatgaagccaccaatttctacatcctcaatgtaacagtatatgacctgggcacaccccagaagtcctcctggaagctgctgacagtgaatgtgaaagactggaatgacaacgcacccagatttcctcccggtgggtaccagttaaccatctcggaggacacagaagttggaaccacaattgcagagctgacaaccaaagatgctgactcggaagacaatggcagggttcgctacaccctgctaagtcccacagagaagttctccctccaccctctcactggggaactggttgttacaggacacctggaccgcgaatcagagcctcggtacatactcaaggtggaggccagggatcagcccagcaaaggccaccagctcttctctgtcactgacctgataatcacattggaggatgtcaacgacaactctccccagtgcatcacagaacacaacaggctgaaggttccagaggacctgccccccgggactgtcttgacatttctggatgcctctgatcctgacctgggccccgcaggtgaagtgcgatatgttctgatggatggcgcccatgggaccttccgggtggacctgatgacaggggcgctcattctggagagagagctggactttgagaggcgagctgggtacaatctgagcctgtgggccagtgatggtgggaggcccctagcccgcaggactctctgccatgtggaggtgatcgtcctggatgtgaatgagaatctccaccctccccactttgcctccttcgtgcaccagggccaggtgcaggagaacagcccctcgggaactcaggtgattgtagtggctgcccaggacgatgacagtggcttggatggggagctccagtacttcctgcgtgctggcactggactcgcagccttcagcatcaaccaagatacaggaatgattcagactctggcacccctggaccgagaatttgcatcttactactggttgacggtattagcagtggacaggggttctgtgcccctctcttctgtaactgaagtctacatcgaggttacggatgccaatgacaacccaccccagatgtcccaagctgtgttctacccctccatccaggaggatgctcccgtgggcacctctgtgcttcaactggatgcctgggacccagactccagctccaaagggaagctgaccttcaacatcaccagtgggaactacatgggattctttatgattcaccctgttacaggtctcctatctacagcccagcagctggacagagagaacaaggatgaacacatcctggaggtgactgtgctggacaatggggaaccctcactgaagtccacctccagggtggtggtaggcatcttggacgtcaatgacaatccacctatattctcccacaagctcttcaatgtccgccttccagagaggctgagccctgtgtcccctgggcctgtgtacaggctggtggcttcagacctggatgagggtcttaatggcagagtcacctacagtatcgaggacagcgatgaggaggccttcagtatcgacctggtcacaggtgtggtttcatccagcagcacttttacagctggagagtacaacatcctaacgatcaaggcaacagacagtgggcagccaccactctcagccagtgtccggctacacattgagtggatcccttggccccggccgtcctccatccctctggcctttgatgagacctactacagctttacggtcatggagacggaccctgtgaaccacatggtgggggtcatcagcgtagagggcagacccggactcttctggttcaacatctcaggtggggataaggacatggactttgacattgagaagaccacaggcagcatcgtcattgccaggcctcttgataccaggagaaggtcgaactataacttgactgttgaggtgacagatgggtcccgcaccattgccacacaggtccacatcttcatgattgccaacattaaccaccatcggccccagtttctggaaactcgttatgaagtcagagttccccaggacaccgtgccaggggtagagctcctgcgagtccaggccatagatcaagacaagggcaaaagcctcatctataccatacatggcagccaagacccaggaagtgccagcctcttccagctggacccaagcagtggtgtcctggtaacggtgggaaaattggacctcggctcggggccctcccagcacacactgacagtcatggtccgagaccaggaaatacctatcaagaggaacttcgtgtgggtgaccattcatgtggaggatggaaacctccacccaccccgcttcactcagctccattatgaggcaagtgttcctgacaccatagcccccggcacagagctgctgcaggtccgagccatggatgctgaccggggagtcaatgctgaggtccactactccctcctgaaagggaacagcgaaggtttcttcaacatcaatgccctgctaggcatcattactctagctcaaaagcttgatcaggcaaatcatgccccacatactctgacagtgaaggcagaagatcaaggctccccacaatggcatgacctggctacagtgatcattcatgtctatccctcagataggagtgcccccatcttttcaaaatctgagtactttgtagagatccctgaatcaatccctgttggttccccaatcctccttgtctctgctatgagcccctctgaagttacctatgagttaagagagggaaataaggatggagtcttctctatgaactcatattctggccttatttccacccagaagaaattggaccatgagaaaatctcgtcttaccagctgaaaatccgaggcagcaatatggcaggtgcatttactgatgtcatggtggtggttgacataattgatgaaaatgacaatgctcctatgttcttaaagtcaacttttgtgggccaaattagtgaagcagctccactgtatagcatgatcatggataaaaacaacaacccctttgtgattcatgcctctgacagtgacaaagaagctaattccttgttggtctataaaattttggagccggaggccttgaagtttttcaaaattgatcccagcatgggaaccctaaccattgtatcagagatggattatgagagcatgccctctttccaattctgtgtctatgtccatgaccaaggaagccctgtattatttgcacccagacctgcccaagtcatcattcatgtcagagatgtgaatgattcccctcccagattctcagaacagatatatgaggtagcaatagtcgggcctatccatccaggcatggagcttctcatggtgcgggccagcgatgaagactcagaagtcaattatagcatcaaaactggcaatgctgatgaagctgttaccatccatcctgtcactggtagcatatctgtgctgaatcctgctttcctgggactctctcggaagctcaccatcagggcttctgatggcttgtatcaagacactgcgctggtaaaaatttctttgacccaagtgcttgacaaaagcttgcagtttgatcaggatgtctactgggcagctgtgaaggagaacttgcaggacagaaaggcactggtgattcttggtgcccagggcaatcatttgaatgacaccctttcctactttctcttgaatggcacagatatgtttcatatggtccagtcagcaggtgtgttgcagacaagaggtgtggcgtttgaccgggagcagcaggacactcatgagttggcagtggaagtgagggacaatcggacacctcagcgggtggctcagggtttggtcagagtctctattgaggatgtcaatgacaatccccccaaatttaagcatctgccctattacacaatcatccaagatggcacagagccaggggatgtcctctttcaggtatctgccactgatgaggacttggggacaaatggggctgttacatatgaatttgcagaagattacacatatttccgaattgacccctatcttggggacatatcactcaagaaaccctttgattatcaagctttaaataaatatcacctcaaagtcattgctcgggatggaggaacgccatccctccagagtgaggaagaggtacttgtcactgtgagaaataaatccaacccactgtttcagagtccttattacaaagtcagagtacctgaaaatatcaccctctataccccaattctccacacccaggcccggagtccagagggactccggctcatctacaacattgtggaggaagaacccttgatgctgttcaccactgacttcaagactggtgtcctaacagtaacagggcctttggactatgagtccaagaccaaacatgtgttcacagtcagagccacggatacagctctggggtcattttctgaagccacagtggaagtcctagtggaggatgtcaatgataaccctcccactttttcccaattggtctataccacttccatctcagaaggcttgcctgctcagacccctgtgatccaactgttggcttctgaccaggactcagggcggaaccgtgacgtctcttatcagattgtggaggatggctcagatgtttccaagttcttccagatcaatgggagcacaggggagatgtccacagttcaagaactggattatgaagcccaacaacactttcatgtgaaagtcagggccatggataaaggagatcccccactcactggtgaaacccttgtggttgtcaatgtgtctgatatcaatgacaaccccccagagttcagacaacctcaatatgaagccaatgtcagtgaactggcaacctgtggacacctggttcttaaagtccaggctattgaccctgacagcagagacacctcccgcctggagtacctgattctttctggcaatcaggacaggcacttcttcattaacagctcatcgggaataatttctatgttcaacctttgcaaaaagcacctggactcttcttacaatttgagggtaggtgcttctgatggagtcttccgagcaactgtgcctgtgtacatcaacactacaaatgccaacaagtacagcccagagttccagcagcacctttatgaggcagaattagcagagaatgcaatggttggaaccaaggtgattgatttgctagccatagacaaagatagtggtccctatggcactatagattatactatcatcaataaactagcaagtgagaagttctccataaaccccaatggccagattgccactctgcagaaactggatcgggaaaattcaacagagagagtcattgctattaaggtcatggctcgggatggaggaggaagagtagccttctgcacggtgaagatcatcctcacagatgaaaatgacaaccccccacagttcaaagcatctgagtacacagtatccattcaatccaatgtcagtaaagactctccggttatccaggtgttggcctatgatgcagatgaaggtcagaacgcagatgtcacctactcagtgaacccagaggacctagttaaagatgtcattgaaattaacccagtcactggtgtggtcaaggtgaaagacagcctggtgggattggaaaatcagacccttgacttcttcatcaaagcccaagatggaggccctcctcactggaactctctggtgccagtacgacttcaggtggttcctaaaaaagtatccttaccgaaattttctgaacctttgtatactttctctgcacctgaagaccttccagaggggtctgaaattgggattgttaaagcagtggcagctcaagatccagtcatctacagtctagtgcggggcactacacctgagagcaacaaggatggtgtcttctccctagacccagacacaggggtcataaaggtgaggaagcccatggaccacgaatccaccaaattgtaccagattgatgtgatggcacattgccttcagaacactgatgtggtgtccttggtctctgtcaacatccaagtgggagacgtcaatgacaataggcctgtatttgaggctgatccatataaggctgtcctcactgagaatatgccagtggggacctcagtcattcaagtgactgccattgacaaggacactgggagagatggccaggtgagctacaggctgtctgcagaccctggtagcaatgtccatgagctctttgccattgacagtgagagtggttggatcaccacactccaggaacttgactgtgagacctgccagacttatcattttcatgtggtggcctatgaccacggacagaccatccagctatcctctcaggccctggttcaggtctccattacagatgagaatgacaatgctccccgatttgcttctgaagagtacagaggatctgtggttgagaacagtgagcctggcgaactggtggcgactctaaagaccctggatgctgacatttctgagcagaacaggcaggtcacctgctacatcacagagggagaccccctgggccagtttggcatcagccaagttggagatgagtggaggatttcctcaaggaagaccctggaccgcgagcatacagccaagtacttgctcagagtcacagcatctgatggcaagttccaggcttcggtcactgtggagatctttgtcctggacgtcaatgataacagcccacagtgttcacagcttctctatactggcaaggttcatgaagatgtatttccaggacacttcattttgaaggtttctgccacagacttggacactgataccaatgctcagatcacatattctctgcatggccctggggcgcatgaattcaagctggatcctcatacaggggagctgaccacactcactgccctagaccgagaaaggaaggatgtgttcaaccttgttgccaaggcgacggatggaggtggccgatcgtgccaggcagacatcaccctccatgtggaggatgtgaatgacaatgccccgcggttcttccccagccactgtgctgtggctgtcttcgacaacaccacagtgaagacccctgtggctgtagtatttgcccgggatcccgaccaaggcgccaatgcccaggtggtttactctctgccggattcagccgaaggccacttttccatcgacgccaccacgggggtgatccgcctggaaaagccgctgcaggtcaggccccaggcaccactggagctcacggtccgtgcctctgacctgggcaccccaataccgctgtccacgctgggcaccgtcacagtctcggtggtgggcctagaagactacctgcccgtgttcctgaacaccgagcacagcgtgcaggtgcccgaggacgccccacctggcacggaggtgctgcagctggccaccctcactcgcccgggcgcagagaagaccggctaccgcgtggtcagcgggaacgagcaaggcaggttccgcctggatgctcgcacagggatcctgtatgtcaacgcaagcctggactttgagacaagccccaagtacttcctgtccattgagtgcagccggaagagctcctcttccctcagtgacgtgaccacagtcatggtcaacatcactgatgtcaatgaacaccggccccaattcccccaagatccatatagcacaagggtcttagagaatgcccttgtgggtgacgtcatcctcacggtatcagcgactgatgaagatggacccctaaatagtgacattacctatagcctcataggagggaaccagcttgggcacttcaccattcaccccaaaaagggggagctacaggtggccaaggccctggaccgggaacaggcctctagttattccctgaagctccgagccacagacagtgggcagcctccactgcatgaggacacagacatcgctatccaagtggctgatgtcaatgataacccaccgagattcttccagctcaactacagcaccactgtccaggagaactcccccattggcagcaaagtcctgcagctgatcctgagtgacccagattctccagagaatggccccccctactcgtttcgaatcaccaaggggaacaacggctctgccttccgagtgaccccggatggatggctggtgactgctgagggcctaagcaggagggctcaggaatggtatcagcttcagatccaggcgtcagacagtggcatccctcccctctcgtctttgacgtctgtccgtgtccatgtcacagagcagagccactatgcaccttctgctctcccactggagatcttcatcactgttggagaggatgagttccagggtggcatggtgggtaagatccatgccacagaccgagacccccaggacacgctgacctatagcctggcagaagaggagaccctgggcaggcacttctcagtgggtgcgcctgatggcaagattatcgccgcccagggcctgcctcgtggccactactcgttcaacgtcacggtcagcgatgggaccttcaccacgactgctggggtccatgtgtacgtgtggcatgtggggcaggaggctctgcagcaggccatgtggatgggcttctaccagctcacccccgaggagctggtgagtgaccactggcggaacctgcagaggttcctcagccataagctggacatcaaacgggctaacattcacttggccagcctccagcctgcagaggccgtggctggtgtggatgtgctcctggtctttgaggggcattctggaaccttctacgagtttcaggagctagcatccatcatcactcactcagccaaggagatggagcattcagtgggggttcagatgcggtcagctatgcccatggtgccctgccaggggccaacctgccagggtcaaatctgccataacacagtgcatctggaccccaaggttgggcccacgtacagcaccgccaggctcagcatcctaaccccgcggcaccacctgcagaggagctgctcctgcaatggtactgctacaaggttcagtggtcagagctatgtgcggtacagggccccagcggctcggaactggcacatccatttctatctgaaaacactccagccacaggccattcttctattcaccaatgaaacagcgtccgtctccctgaagctggccagtggagtgccccagctggaataccactgtctgggtggtttctatggaaacctttcctcccagcgccatgtgaatgaccacgagtggcactccatcctggtggaggagatggacgcttccattcgcctgatggttgacagcatgggcaacacctcccttgtggtcccagagaactgccgtggtctgaggcccgaaaggcacctcttgctgggcggcctcattctgttgcattcttcctcgaatgtctcccagggctttgaaggctgcctggatgctgtcgtggtcaacgaagaggctctagatctgctggcccctggcaagacggtggcaggcttgctggagacacaagccctcacccagtgctgcctccacagtgactactgcagccagaacacatgcctcaatggtgggaagtgctcatggacccatggggcaggctatgtctgcaaatgtcccccacagttctctgggaagcactgtgaacaaggaagggagaactgtacttttgcaccctgcctggaaggtggaacttgcatcctctcccccaaaggagcttcctgtaactgccctcatccttacacaggagacaggtgtgaaatggaggcgaggggttgttcagaaggacactgcctagtcactcccgagatccaaaggggggactgggggcagcaggagttactgatcatcacagtggccgtggcgttcattatcataagcactgtcgggcttctcttctactgccgccgttgcaagtctcacaagcctgtggccatggaggacccagacctcctggccaggagtgttggtgttgacacccaagccatgcctgccatcgagctcaacccattgagtgccagctcctgcaacaacctcaaccaaccggaacccagcaaggcctctgttccaaatgaactcgtcacatttggacccaattctaagcaacggccagtggtctgcagtgtgccccccagactcccgccagctgcggtcccttcccactctgacaatgagcctgtcattaagagaacctggtccagcgaggagatggtgtaccctggcggagccatggtctggccccctacttactccaggaacgaacgctgggaatacccccactccgaagtgactcagggccctctgccgccctcggctcaccgccactcaaccccagtcgtgatgccagagcctaatggcctctatgggggcttccccttccccctggagatggaaaacaagcgggcacctctcccaccccgttacagcaaccagaacctggaagatctgatgccctctcggccccctagtccccgggagcgcctggttgccccctgtctcaatgagtacacggccatcagctactaccactcgcagttccggcagggagggggagggccctgcctggcagacgggggctacaagggggtgggtatgcgcctcagccgagctgggccctcttatgctgtctgtgaggtggagggggcacctcttgcaggccagggccagccccgggtgccccccaactatgagggctctgacatggtggagagtgattatggcagctgtgaggaggtcatgttctagcttcccattcccagagcaaggcaggcgggaggccaaggactggacttggcttatttcttcctgtctcgtagggggtgagttgagtgtggctgggagagtgggagggaagccctcagcccaggctgttgtcccttgaaatgtgctcttccaatcccccacctagtccctgagggtggagggaagctgaggatagagctccagaaacagcactagggtcccaggagaggggcatttctagagcagtgaccctggaaaaccaggaacaattgactcccggggtgggcgagagacaggagggctccctgatctgccggctctcagtccccggggcagagcctgattgactgtgctggctcaacttcaccaagatgcattctcatacctgcccacagctccattttggaggcaggcaggttggtgcctgacagacaaccactacgcgggccgtacagaggagctctagagggctgcgtggcatcctcctaggggctgagaggtgagcagcaggggagcgggcacagtcccctctgcccctgcctcagtcgagcactcactgtgtctttgtcaagtgtctgctccacgtcaggcactgtgctttgcaccggggagaaaatggtgatggagggcaacaaggactccgaggagcaccaccaggcctcgggccccagaggtcccactcctcagcctacacgcagaggaacgggcccacctcagagtcacaccactggctgccagtcagggcctgccaggagtctacacagctctgaaccttctttgttaaagaattcagacctcatggaactctgggttcttcatcccaagtttcccaggcacttttggccaaaggaaggaaggaactaattcttcattttaaaaattcttaggcactttttgaccttgctgtctggatgagtttcctcaatgggatttttcttccctagacacaaggaagtctgaactcctatttagggccggttggaagcagggagctggaccgcagtgtccaggctggacacctgccattgcctcctctccattgcagacgcctgcccatcaagtattacctgcggcgactcaaccctatgcatggagggtcaatgtgggcacatgtctacacatgtgggtgcccatggatagtacgtgtgtacacatgtgtagagtgtatgtagccaggagtggtggggaccagaagcctctgtggcctttggtgacctcaccactccctcccacccagtccctccctctggtccactgccttttcatatgtgttgtttctggagacagaagtcaaaaggaagagcagtggagccttgcccacagggctgctgcttcatgcgagagggagatgtgtgggcgagagccaatttgtgtgagtggtttgtggctgtgtgtgtgactgtgagtgtgagtgacagatacatagtttcattggtcattttttttttaacaataaagtatctttttttactgt

SEQ ID NO: 333165 - DNA, 13050 bp, Artificial Sequence
  derived and/or modified sequence
atgaccatcgcccttctgggcttcgctatctttctgctgcactgtgccacttgtgagaaaccactggagggaattctgagctcgtctgcatggcacttcacccactctcattacaacgccacaatctacgagaattcttcccctaaaacctacgtggaatcattcgagaagatgggaatctatctcgccgagccgcagtgggccgtccggtacaggataatcagtggtgacgtcgctaatgttttcaagactgaggagtacgtggtggggaacttctgttttcttaggatccggacaaaaagctcaaacaccgcgctgctcaatagggaggtccgggatagctacacactgatcatacaggctaccgagaagacactggaattggaggccctcacccgcgtggtggttcacatcctagaccagaacgatcttaagcctcttttttcccccccatcctatagagtgaccatatcggaggatatgcctctgaagtccccaatctgtaaagtcacagctactgatgcagatctggggcagaatgcggagttctactacgctttcaacaccaggtctgagatgtttgcgattcatcctacctctggtgtggtgactgtggccggcaaacttaacgtgacatggcgtggcaaacatgagctgcaggttctcgctgtggataggatgagaaaaatttctgagggcaacggtttcggcagtctcgccgccctggtcgtccatgtcgagccagccctccgcaaaccgcccgctatcgcctccgtcgtagtgacaccaccagattctaacgatggcaccacatacgccaccgtgctggtcgatgcaaactcaagcggagctgaagttgagagcgtagaagttgtgggaggcgaccccgggaagcattttaaagcgattaaatcatacgccagaagcaacgagttctccctggtgtccgtgaaagacattaattggatggaatatcttcacggattcaatctgtctcttcaggcacggtcaggatccggaccatacttttactctcagatcaggggtttccacctccctccctcaaagctgtcatccctgaagttcgagaaggctgtgtatagggtgcagcttagtgagtttagcccaccagggagcagggttgtgatggtgcgggtcacaccagcattccctaacctccaatacgtcttaaaaccctctagtgagaatgtgggatttaagttgaacgcacgcactggtctgataacaaccacaaaactcatggattttcatgatcgagctcattaccagttgcacattcgcacctcaccagggcaggcctctactgtggtggtaattgacattgtggactgtaataatcatgccccactgttcaatcgctcaagctatgacggtactctcgatgagaatatccctccaggcacgtcagttctggctgtcaccgcaaccgatagggaccacggagagaatgggtacgttacatactctatagctggcccaaaagccttgccgttctcgatcgatccctacttgggaattatttctacgagcaaacctatggactatgagttgatgaagaggatctacacatttagggtccgagcctccgactgggggagccccttccggagggagaaggaagtttctattttcctgcagcttcgaaacctgaacgataaccagccaatgttcgaggaggtgaactgtacaggatctataaggcaagactggccggtaggaaagagtatcatgacaatgtctgcaatcgatgtcgacgagctgcaaaatcttaagtatgagatcgtgtctgggaacgagttggaatacttcgacctcaaccatttttcaggcgtcatatctctgaaaaggcccttcatcaatctgaccgcaggacagcctaccagttatagcctcaaaatcacagcgagcgacgggaaaaattacgcctcccctacaacccttaacattacagtcgtgaaagaccctcattttgaggtgccagtgacttgtgacaagacgggggtactaactcagtttacgaagacaatcctgcattttatcggtctccagaaccaggagtcctccgacgaagagtttacttctctgtctacctaccaaatcaatcactacacacctcagttcgaagatcatttcccacagagcatcgatgtgttggagagcgtgcccatcaataccccactcgccagacttgccgctacagatcctgacgctggatttaacgggaaactcgtgtacgtgattgccgacggaaacgaagaaggttgtttcgacattgagctggagaccgggttgctgacagtcgcagccccattggattatgaagctaccaacttctacattctgaatgtgaccgtatatgaccttggtactccacagaagagtagttggaagctgctgaccgtgaacgtcaaggactggaatgacaatgcccctcgcttcccacccggaggctatcagttgaccataagtgaggatacagaggtgggcaccacaatagctgaactgactaccaaggatgcggattctgaagacaatggcagagtccgctacacactgctcagtccaacagaaaagttctccctccaccccttaaccggtgagctagtagtcactggccacctcgatcgagagtctgagcctaggtacatactgaaagtggaggcaagagatcagcccagcaaggggcaccagctttttagtgtaaccgacttaattattactcttgaggacgtgaatgacaactcaccacagtgcattacagaacacaatcgccttaaggtgcccgaggatctgccccccggaactgtcctgaccttccttgatgcctcggacccagatcttggccctgccggcgaagtacggtacgtcctgatggacggcgcccacgggacttttagagtggacctcatgacgggagctcttatacttgagcgggaattggatttcgagcggagggctggttacaatctgtccctctgggctagcgatggcggacgcccactcgcacgccggacactttgtcatgttgaggtaatcgtattggacgtgaatgagaatttgcaccccccccattttgccagctttgtgcaccaagggcaggtacaggaaaactcgcccagcggtacccaagtcattgtcgtcgcagcccaggatgacgactctgggctggatggtgaattgcagtactttcttagagcagggaccggactggcagcgttctcaataaaccaggatacaggcatgatccagacattagctcctctggatagggaattcgcctcctactattggttgaccgttctggctgttgatagaggcagcgtgcctctgagtagcgtgactgaagtgtacatagaggtcacggacgcgaatgataatcctccacagatgagccaggccgttttctacccatctattcaggaggatgcgcccgttggaacatccgtgctgcaactggacgcctgggacccagattcttcatcgaaggggaaattgacctttaatatcacaagcggtaactatatgggtttttttatgattcacccagtgaccgggttgctgtcaaccgcccagcaactggatagagagaacaaagacgaacatatcttagaagtgaccgtattagacaatggcgagcctagtttgaaatcaacctctagagtcgttgttggcattcttgacgtgaacgacaatccaccgatcttctcacataagctgtttaatgtgagacttcccgagagactcagccccgtgagccccggaccagtgtaccgccttgtagcttccgacctggatgaaggcctgaacggtcgggtgacgtactctattgaggatagcgatgaggaagctttttcgattgacttagttaccggagtggtatcaagctcgtccaccttcaccgccggagagtataatattctgacaattaaggctacagactctggtcagcctccgttgtcagcctcggtccgcctgcacattgaatggattccgtggcccaggccatctagcattcctctcgccttcgacgagacatattacagtttcactgtgatggagacagatccagtgaaccatatggtcggcgttatctcagttgagggcagacccggcctgttttggtttaacatctctggtggtgataaagacatggatttcgatattgagaaaactaccggcagtattgtgatcgcgaggccactcgacactcgaagacgcagtaactacaatcttactgtagaggtaacagatgggtcgcggactatagcaacacaggttcatatctttatgatcgctaatataaaccaccaccgtccccaattcttagaaacacggtatgaggtcagagtgccccaggacactgtgccgggggtggagctgttgagagtccaggccatcgaccaagataagggtaagagcctgatttatacgatccatgggagtcaggatcctggttcagcaagcttgtttcagcttgatcccagctctggtgttctggtaaccgtggggaaattggacctcgggtccgggccgtctcagcacacattgacagtgatggtgagagatcaagagattcccataaagaggaatttcgtctgggtaaccatccacgtggaggacgggaacctccatccaccacgcttcacccaactccactatgaggcgtctgtcccagacacgattgctcctggtactgagctgctgcaggtgcgggcaatggacgcggacaggggggtcaatgcggaggtgcactactcgctgttgaagggaaatagcgagggcttttttaacataaacgccctcctgggcatcattacgctggcccagaagttggaccaggccaaccatgctccacataccctgaccgttaaggcagaggaccaaggctcgcctcagtggcacgacctggctaccgtgatcatccacgtgtatccctcggaccgttcagcaccaatattcagtaaaagcgagtacttcgtggaaattcccgagtccatccccgtcggcagtccgatactgttagtctcagccatgtctcctagtgaagttacatacgaactgagagagggtaataaagatggtgtgttctctatgaattcttacagcggactgatcagcacccaaaagaagctagaccatgagaaaatatcttcctaccagctgaaaatccgaggctcaaacatggctggagcctttacggacgttatggtggttgtagacatcatcgatgaaaacgacaacgcccccatgtttttgaaatcaactttcgttgggcaaataagcgaagccgcaccgttatacagtatgattatggataagaacaacaacccattcgttatccacgccagtgactcagataaagaggctaattcattactcgtctataaaatccttgagcctgaagccttgaagtttttcaaaattgatcctagtatgggcaccctcacaatcgtgtccgagatggactacgaaagcatgccaagtttccagttctgcgtgtatgtccacgaccaggggagtccggtcctattcgcacccagacccgcacaagtgatcatacatgtaagggacgtgaacgattctcctccaaggttctctgaacagatctacgaggtcgctattgtggggccaattcacccgggcatggagctcctgatggtaagggcaagcgacgaggatagtgaggttaactactccattaagaccggaaatgccgatgaggctgtcactattcatcccgtaactgggtccatctcagtccttaatccagcctttttgggactgagtcggaaactgacaattagagcgtctgacggtctgtaccaggacactgccctggtgaagatcagcctgacacaagtcctcgataaatccctgcagttcgaccaagatgtgtactgggccgccgttaaggagaatctgcaggacagaaaagccctggtgattcttggggcccagggaaatcacctcaacgataccttgagttatttcctgctcaacggcacagacatgtttcatatggtgcagagtgctggcgttctgcaaacacgcggagtggctttcgatcgtgagcaacaggacacgcatgagcttgcagtggaggtaagagacaatcgaactccccagcgcgtggcccaagggctggtgcgggtttcgattgaagacgtgaacgataacccgcctaagtttaaacatcttccgtactacactatcatccaggacggcactgaaccaggggatgtcttgttccaggtttctgctaccgacgaggacctcggcaccaatggagccgtcacatacgagtttgccgaagactacacatacttcagaatagacccttatctgggagatatctccttgaaaaagccatttgactaccaggccctcaataaataccacctcaaggtcattgcaagggacgggggcacccccagcctgcaaagcgaggaggaagtcctggtgacggttaggaataaaagcaaccctctgtttcagagcccttactataaagtcagagtacctgagaacattacactctatactccgatcctccatacacaggcaagatcaccagagggacttaggttgatttacaatattgttgaggaggagcccctgatgttgtttactaccgacttcaaaactggagtgctgaccgtcactggccccctggattacgaaagcaaaaccaaacacgtctttactgtgcgggcaactgataccgccctgggcagttttagtgaagccactgtggaagtgctggtggaggacgtgaacgataatccgcccacattctcacagctggtatacactacctccatttcagagggtttgcctgcgcagacccccgtgatccaactgctggccagcgatcaggacagtggacgcaatcgggatgtgtcttatcagattgtcgaggatgggtccgatgtcagcaagtttttccagattaacggctctacaggggaaatgtccaccgtgcaggagctggattatgaggcacaacagcactttcacgtgaaggtgcgagccatggataagggcgatcctccccttaccggcgaaactcttgtcgtggttaacgtttccgacattaacgacaaccctccagaattcaggcagcctcagtacgaagctaatgtgtctgaattagctacatgcggtcaccttgttttgaaggtgcaggctatcgaccctgattctcgtgatacatcccgtttggaatatctgatattaagtggaaaccaggaccggcactttttcataaacagttcgtcgggaatcatttcgatgtttaatctttgcaagaagcacttggatagttcttataacctccgtgtcggcgcttcagacggcgtgtttagggccaccgtccctgtgtacatcaatacgactaacgcaaacaaatattcacccgaatttcaacagcatctctatgaagccgagcttgctgagaacgctatggtgggaacaaaggttattgacttgcttgctattgataaagactctggcccctatggtaccatagactacacaatcattaataagctggcgtctgagaaattctctatcaatccgaacggccagatcgccaccctacagaaactcgaccgggaaaacagtactgaaagggtgatcgccattaaagtgatggcacgggacggcggcggtagggtagctttttgcacggttaaaatcatcttaaccgatgaaaatgacaatcctccacaattcaaggcctcagagtacaccgttagtatacagagcaacgtttctaaagacagccctgttatccaagtgctagcgtatgatgcagacgaaggacagaacgccgacgtgacctattcagtgaatcccgaagatcttgtgaaggatgtgattgagatcaaccccgttaccggagtcgtgaaggtcaaagatagtctcgtggggcttgagaaccaaacactcgatttttttatcaaggctcaagacggtggtcccccccactggaacagcctggttcctgtccgtctccaggtggtacctaagaaggtgtcgctgcctaaattctccgaacccctgtatactttttcagcccccgaagacctacccgagggctctgagatcggcattgtgaaggcagtggctgcccaagaccctgtgatatacagcctcgttcggggtaccacccctgaatctaacaaagacggagtgttctcactggatcccgataccggcgtgatcaaggtgcgcaaaccaatggatcatgaaagcaccaagttgtatcagatcgatgtaatggctcattgcctgcagaacaccgatgttgtgtcgttagttagtgtcaacatacaggtcggcgatgttaacgataaccgaccagtgttcgaagcagatccttacaaagctgttctaaccgagaacatgccagtgggtacctctgtcattcaggtcaccgcgatcgataaagacaccggccgggacggtcaagtgtcttaccgcctgtctgcagaccccggttcgaatgtccatgaattattcgctatcgacagcgaaagcggatggataactaccttgcaggagctggactgcgaaacgtgccagacctatcacttccacgtcgtggcttatgatcatggccagacgattcagctgtcttcccaggcactggtccaggtctcaatcacagacgagaatgacaatgctccccgctttgcctcagaggagtacaggggatccgtcgtcgagaactctgagcccggagagcttgtggctacactgaagacccttgacgccgacataagcgaacagaataggcaggtgacttgttacattacagaaggcgatcccctcggccagttcggcatttcgcaagtgggagacgaatggcggatcagctcccggaaaactttggacagggagcacaccgctaaatacctgctgagggtgacagcctccgacggaaagttccaggccagcgtgacagtcgagatatttgtcctcgacgtaaatgacaacagccctcagtgctcccagctgctctacaccggcaaagtccatgaggacgtattccctggccactttattctcaaggtctccgccacagacttagatacggataccaacgcccagattacatactctctccacggcccgggagcacacgaattcaagctggacccacatactggcgaacttaccacgctgaccgctctcgaccgggagcggaaagatgtgttcaacttagtcgccaaagcaactgacggcggtgggagatcatgtcaggctgacataactctgcatgtagaggacgtgaatgacaatgccccgaggttcttccctagccactgtgctgtggctgtatttgataatactacagttaagactcctgttgcagtagtgttcgccagagatccggaccaaggcgcaaatgctcaagtcgtgtattctctgccagatagcgccgagggccatttttccattgatgcaacgacgggcgtaatccgactcgagaaacccttgcaggtcaggcctcaggcccccttggaacttacggtgcgggccagtgacctggggacacccatccctttgagtacactgggtaccgtcacagtctctgtcgtcggcctggaggactatcttcccgtcttcttgaacactgaacatagcgtgcaggtgcctgaggatgcaccacccggcaccgaagtgctccaactggcaacactgacacgacccggagccgagaaaaccggatatagggtagtgtccggaaacgaacagggtaggttcagactggacgctaggaccggaattctgtacgtaaatgcttccctcgacttcgaaacatcacccaagtattttctgtctatcgaatgttctagaaaatcttcatcaagcctctccgacgtaactactgtcatggtaaatattacagatgtgaatgaacatcggcctcagttcccccaggacccttattctacaagagtgctggagaatgccctcgtgggcgatgtcattttgacagtgtccgcgaccgatgaggacggccccttgaattccgacattacatacagcctaattggcggaaaccaacttggccactttactatccatcccaagaaaggcgaactgcaggtcgctaaggctcttgatagagagcaggcctccagttattccctaaagcttcgggccaccgactccggtcagcctcctctgcatgaggacactgacattgccattcaagttgcagacgtcaatgataatcccccgcgcttcttccagctcaattacagcaccacagttcaagagaacagtcccataggttctaaagtgttgcaattgattctaagtgaccctgattcgcccgagaacggacccccatatagctttagaattacaaaggggaacaacggttcagcctttagagttactccagatggatggctcgtgactgcagagggtttaagccggagagcccaggagtggtaccaactccagatccaggcatcagatagtggtataccaccactgtcctcactgacctccgtacgcgtgcacgtgacagagcagagccactatgcaccaagcgctctgccactggagatcttcattacagtgggcgaggacgagtttcagggcggcatggtgggtaaaatccatgccacagatagagaccctcaagacactctgacatactcattggccgaggaagaaacattaggtaggcacttttcggtcggggctccagatggaaaaataatagctgcccagggactcccaaggggtcactatagttttaatgtcacggtgagtgacgggacatttaccaccactgctggcgtgcacgtgtatgtgtggcacgtggggcaagaagcccttcaacaggcaatgtggatgggcttttatcagttgacaccggaagaactggtctccgaccactggagaaacttacagcgctttctctcacataaactggatataaagcgagcaaatatccatttggccagtttacaaccagctgaggccgtcgccggggtggatgtgttattggtgtttgaggggcacagtggtacattctacgagtttcaggaactggcctccatcatcacacattctgccaaagagatggagcactctgtgggggtacagatgcgatcagctatgccgatggtaccgtgccaagggcctacctgccagggccagatttgtcataacaccgtgcatttggaccctaaagtcggacctacctacagtacggcgcgtttaagcatcctaacaccaaggcaccatctacagagatcttgcagctgtaacggcactgccactaggttctccggccaatcttatgtcaggtaccgcgctccagccgccaggaactggcacatacacttttatctcaagaccttacagccccaagccatcttactgttcacaaacgagaccgccagtgtatccctgaagcttgcgtctggagtgccccagctcgagtaccactgcttaggcggcttctatggcaatctctcatcccagcgacacgtcaatgaccacgagtggcattctattctggtggaggaaatggacgcttcaatccggctaatggttgattccatgggaaatacctctttggttgtcccagagaactgtcggggcctaagaccggaacggcacctgctgctgggaggcttgatcctgttacacagcagtagcaacgtctcccaaggctttgaaggatgtctcgatgccgtggtggttaacgaagaggcattggacttacttgcaccaggcaagactgtggctgggctgctcgagacgcaggcacttacccagtgttgtctgcattctgattattgctcccagaacacctgcctgaacggtggcaaatgtagctggacacatggtgctggctacgtgtgcaagtgtccaccccaattctccgggaagcactgtgaacagggtagagagaactgtacattcgccccgtgcttggagggggggacttgtatcctgtctccaaagggagctagttgcaactgtccgcatccttacacgggcgacaggtgtgaaatggaggcaagggggtgtagtgagggtcactgtctggtgacacctgagattcaaaggggagattgggggcaacaggaactcctgatcatcaccgtggccgtggccttcatcatcatcagcacggtgggcttgctgttctactgtcggaggtgtaaatctcacaagccggtggctatggaagatccagatctactggccaggagtgtcggagtagacactcaggctatgcccgctatcgagttgaaccccctctcagcctcgtcatgtaataacttaaatcagcctgaaccatctaaggcctcagtgcccaatgaactggttacttttggtcctaattcaaagcaaagaccagtggtgtgttcagtcccgccacgcctgccacctgccgcagtgccatcccacagcgacaacgaaccagtcataaaacgcacatggtcttccgaggaaatggtctacccgggaggagcaatggtttggcccccgacatattcccgtaacgaaaggtgggagtatccccattctgaggtaactcaaggtccactgccaccctccgcccaccggcatagcacccctgtggtgatgcctgagcccaatggcctctatggcgggttcccatttccactggagatggagaacaaacgagcaccactgccaccccgctattctaaccagaacttggaagacctcatgcccagtagacctccatcaccgcgcgagagactcgtggctccctgcctaaacgagtataccgccatcagttactatcacagtcagtttaggcaggggggagggggaccatgtctggcagatggcggctataagggcgtgggtatgagacttagccgagccgggccatcatacgcggtttgcgaagttgagggtgctcccctggcagggcaaggacagccccgggtaccgccaaactacgaggggtctgatatggtcgagagtgactacgggagctgcgaggaggtgatgttttag

SEQ ID NO: 333166 - DNA, 13050 bp, Artificial Sequence
  derived and/or modified sequence
atgaccatcgccctgctgggctttgccatcttcctgctgcactgtgccacctgtgagaagcccctggagggcatcctgagcagcagcgcctggcacttcacccacagccactacaatgccaccatctatgagaacagcagccccaagacctacgtggagagctttgagaagatgggcatctacctggccgagccccagtgggccgtgcgctaccgcatcatctctggagatgtggccaacgtgttcaagacagaggagtatgtggtgggcaacttctgcttcctgcgcatccgcaccaagagcagcaacacagccctgctgaaccgggaggtgcgggacagctacaccctcatcatccaggccacagagaagaccctggagctggaggccctgaccagggtggtggtgcacatcctggaccagaatgacctgaagcccctcttcagcccccccagctacagagtgaccatcagcgaggacatgcccctgaagagccccatctgcaaggtgacagccacagatgctgacctgggccagaatgctgagttctactatgccttcaacaccaggtctgagatgtttgccatccaccccaccagcggcgtggtgacagtggccggcaagctgaatgtgacctggaggggcaagcatgagctgcaggtgctggccgtggacaggatgaggaagatcagcgagggcaatggcttcggcagcctggccgccctggtggtgcacgtggagcccgccctgaggaagcccccagccatcgcctctgtggtggtgaccccaccagacagcaatgatggcaccacctacgccaccgtgctggtggatgccaacagcagcggggctgaggtggagagcgtggaggtggtgggcggggaccccgggaagcacttcaaggccatcaagagctatgcccggagcaatgagttcagcctggtgtctgtgaaggacatcaactggatggagtacctgcacggcttcaacctgagcctgcaggcccggagcggcagcggcccctacttctacagccagatccggggcttccacctgccccccagcaagctgagcagcctgaagtttgagaaggctgtgtacagagtgcagctgtctgagttcagccccccaggcagccgggtggtgatggtgcgggtgaccccagccttccccaacctgcagtatgtgctgaagcccagcagtgaaaatgtgggcttcaagctgaatgccaggacaggcctcatcaccaccaccaagctgatggacttccatgaccgggcccactaccagctgcacatccgcaccagccctggccaggccagcacagtggtggtgattgacatcgtggactgcaacaaccacgcccccctcttcaacagaagcagctatgatggcaccctggatgagaacatccccccaggcacctctgtgctggccgtgacagccacagaccgggaccatggagaaaatggctacgtgacctacagcattgctggccccaaggccctgcccttcagcattgacccctacctgggcatcatcagcaccagcaagcccatggactatgagctgatgaagaggatctacaccttccgggtgcgggccagtgactggggcagccccttcagaagagagaaggaggtgtccatcttcctgcagctgaggaacctgaatgacaaccagcccatgtttgaggaggtgaactgcaccggcagcatccggcaggactggcctgtgggcaagagcatcatgaccatgtctgccattgatgtggatgagctgcagaacctgaagtatgaaattgtgtctggaaatgagctggagtactttgacctgaaccacttcagcggggtcatcagcctgaagaggcccttcatcaacctgacagctggccagcccaccagctacagcctgaagatcacagccagtgatggcaagaactatgccagccccaccaccctgaacatcaccgtggtgaaggacccccactttgaggtgcctgtgacctgtgacaagacaggagtgctgacccagttcaccaagaccatcctgcacttcatcggcctgcagaaccaggagagcagtgatgaggagttcaccagcctgagcacctaccagatcaaccactacaccccccagtttgaggaccacttcccccagagcattgatgtgctggagagcgtgcccatcaacacccccctggcccggctggccgccacagatcctgatgctggcttcaacgggaagctggtgtatgtgattgctgatggaaatgaggagggctgctttgatattgagctggagaccggcctgctgactgtggccgcccccctggactatgaggccaccaacttctacatcctgaatgtgacagtgtatgacctgggcaccccccagaagagctcctggaagctgctgactgtgaatgtgaaggactggaatgacaatgccccccgcttccccccaggcggctaccagctgaccatcagcgaggacacagaggtgggcaccaccatcgccgagctgaccaccaaggatgctgacagcgaggacaatggccgggtgcgctacaccctgctgagccccacagagaagttcagcctgcaccccctgaccggggagctggtggtgacaggccacctggaccgggagagcgagccccgctacatcctgaaggtggaggcccgggaccagcccagcaagggccaccagctgttctctgtgacagacctgatcatcaccctggaggatgtgaatgacaacagcccccagtgcatcacagagcacaaccggctgaaggtgcctgaggacctgcccccaggcaccgtgctgaccttcctggatgccagtgaccctgacctgggccctgctggggaggtgcgctacgtgctgatggatggagcccacggcaccttccgggtggacctgatgaccggggccctgatcctggagcgggagctggactttgaaagaagagctggctacaacctgagcctgtgggccagtgatggcggccggcccctggcccggaggaccctgtgccacgtggaggtgattgtgctggatgtgaatgaaaacctgcaccccccccactttgccagctttgtgcaccagggccaggtgcaggagaacagccccagcggcacccaggtgattgtggtggccgcccaggatgatgattctggcctggatggagagctgcagtacttcctgcgggccggcaccggcctggccgccttcagcatcaaccaggacaccggcatgatccagaccctggcccccctggaccgggagtttgccagctactactggctgactgtgctggccgtggaccggggctctgtgcccctgagctctgtgacagaggtgtacatcgaggtgacagatgccaatgacaaccccccccagatgagccaggccgtgttctaccccagcatccaggaggatgcccctgtgggcacctctgtgctgcagctggatgcctgggaccctgacagcagcagcaagggcaagctgaccttcaacatcaccagcggcaactacatgggcttcttcatgatccaccctgtgacaggcctgctgagcacagcccagcagctggaccgggagaacaaggatgagcacatcctggaggtgacagtgctggacaatggagagcccagcctgaagagcaccagccgggtggtggtgggcatcctggatgtgaatgacaacccccccatcttcagccacaagctgttcaacgtgcggctgcctgagcggctgagccctgtgtccccaggccctgtgtaccgcctggtggccagtgacctggatgagggcctgaatggccgggtgacctacagcattgaggacagtgatgaggaggccttcagcattgacctggtgactggagtggtgagcagcagcagcaccttcaccgctggggagtacaacatcctgaccatcaaggccacagattctggccagccccccctgagcgcctctgtgcggctgcacatcgagtggatcccctggccccggcccagcagcatccccctggcctttgatgagacctactacagcttcaccgtgatggagacagatcctgtgaaccacatggtgggcgtcatctctgtggagggccggcccggcctcttctggttcaacatctctggaggagacaaggacatggactttgatattgagaagaccaccggcagcatcgtcatcgcccggcccctggacacccggcggcgcagcaactacaacctgactgtggaggtgacagatggcagcaggaccatcgccacccaggtgcacatcttcatgattgccaacatcaaccaccaccggccccagttcctggagaccaggtatgaggtgcgggtgccccaggacacagtgcctggggtggagctgctgcgggtgcaggccatcgaccaggacaagggcaagagcctcatctacaccatccacggcagccaggaccccggcagcgccagcctcttccagctggaccccagcagtggagtgctggtgacagtgggcaagctggacctgggcagcggccccagccagcacaccctgactgtgatggtgcgggaccaggagatccccatcaagaggaactttgtgtgggtgaccatccacgtggaggatggcaacctgcaccccccacgcttcacccagctgcactatgaggcctctgtgcctgacaccatcgcccctggaacagagctgctgcaggtgcgggccatggatgctgacagaggagtgaatgctgaggtgcactacagcctgctgaagggcaacagcgagggcttcttcaacatcaatgccctgctgggcatcatcaccctggcccagaagctggaccaggccaaccacgccccccacaccctgactgtgaaggccgaggaccagggcagcccccagtggcatgacctggccaccgtcatcatccacgtgtaccccagcgacagaagtgcccccatcttcagcaagtctgagtactttgtggagatccctgagagcatccctgtgggcagccccatcctgctggtgtctgccatgagccccagcgaggtgacctatgagctgcgggagggcaacaaggatggagtcttctccatgaacagctacagcggcctcatcagcacccagaagaagctggaccacgagaagatcagcagctaccagctgaagatccggggcagcaacatggccggggccttcacagatgtgatggtggtggtggacatcattgatgaaaatgacaatgcccccatgttcctgaagagcacctttgtgggccagatcagcgaggccgcccccctgtacagcatgatcatggacaagaacaacaacccctttgtgatccacgccagtgacagcgacaaggaggccaacagcctgctggtgtacaagatcctggagcctgaggccctgaagttcttcaagattgaccccagcatgggcaccctgaccatcgtgtctgagatggactatgagagcatgcccagcttccagttctgtgtgtatgtgcatgaccagggcagccctgtgctgtttgcccccaggcctgcccaggtgatcatccacgtgagagatgtgaatgacagccccccacgcttcagcgagcagatctatgaggtggccatcgtgggccccatccaccctggcatggagctgctgatggtgcgggccagtgatgaagattctgaggtgaactacagcatcaagacaggaaatgctgatgaagctgtgaccatccaccctgtgacaggcagcatctctgtgctgaacccagccttcctgggcctgagcaggaagctgaccatccgggccagtgatggcctgtaccaggacacagccctggtgaagatcagcctgacccaggtgctggacaagagcctgcagtttgaccaggatgtgtactgggccgctgtgaaggagaacctgcaggacaggaaggccctggtgatcctgggcgcccagggcaaccacctgaatgacaccctgagctacttcctgctgaatggaacagacatgttccacatggtgcagagcgctggggtgctgcagacccggggcgtggcctttgaccgggagcagcaggacacccatgagctggccgtggaggtgcgggacaacagaacaccccagagggtggcccagggcctggtgcgggtgtccattgaagatgtgaatgacaacccccccaagttcaagcacctgccctactacaccatcatccaggatggaacagagcctggagatgtgctcttccaggtgtctgccacagatgaggacctgggcaccaacggggctgtgacctatgaatttgctgaggactacacctacttcagaattgacccctacctgggggacatcagcctgaagaagccctttgactaccaggccctgaacaagtaccacctgaaggtgattgccagagatggcggcacccccagcctgcagagcgaggaggaggtgctggtgacagtgaggaacaagagcaaccccctcttccagagcccctactacaaggtgcgggtgcctgagaacatcaccctgtacacccccatcctgcacacccaggcccggagccctgagggcctgcggctcatctacaacatcgtggaggaggagcccctgatgctgttcaccacagacttcaagacaggagtgctgactgtgacaggccccctggactatgagagcaagaccaagcacgtgttcaccgtgcgggccacagacacagccctgggcagcttcagcgaggccaccgtggaggtgctggtggaggatgtgaatgacaacccccccaccttcagccagctggtgtacaccaccagcatcagcgagggcctgcctgcccagacccctgtgatccagctgctggccagtgaccaggacagcggcaggaacagagatgtgtcctaccagatcgtggaggatggcagtgatgtgtccaagttcttccagatcaatggcagcactggagagatgagcacagtgcaggagctggactatgaggcccagcagcacttccacgtgaaggtgcgggccatggacaagggggacccccccctgaccggggagaccctggtggtggtgaatgtgtctgacatcaatgacaaccccccagagttccggcagccccagtatgaggccaacgtgtctgagctggccacctgtggccacctggtgctgaaggtgcaggccatcgaccctgacagccgggacaccagccggctggagtacctgatcctgagcggcaaccaggacagacacttcttcatcaacagcagcagcggcatcatctccatgttcaacctgtgcaagaagcacctggacagcagctacaacctgcgggtgggcgccagtgatggagtcttccgggccaccgtgcctgtgtacatcaacaccaccaatgccaacaagtacagccctgagttccagcagcacctgtatgaggccgagctggccgagaatgccatggtgggcaccaaggtgattgacctgctggccatcgacaaggacagcggcccctacggcaccatcgactacaccatcatcaacaagctggccagcgagaagttcagcatcaaccccaacggccagatcgccaccctgcagaagctggaccgggagaacagcacagagcgggtgattgccatcaaggtgatggccagagatggcggcggccgggtggccttctgcaccgtgaagatcatcctgacagatgaaaatgacaaccccccccagttcaaggccagcgagtacacagtgtccatccagagcaatgtgtccaaggacagccctgtgatccaggtgctggcctatgatgctgatgagggccagaatgctgatgtgacctacagcgtgaaccctgaggacctggtgaaggatgtgattgagatcaaccctgtgactggagtggtgaaggtgaaggacagcctggtgggcctggagaaccagaccctggacttcttcatcaaggcccaggacggcggccccccccactggaacagcctggtgcctgtgcggctgcaggtggtgcccaagaaggtgtccctgcccaagttcagcgagcccctgtacaccttcagcgcccctgaggacctgcctgagggcagcgagatcggcatcgtgaaggctgtggccgcccaggaccctgtgatctacagcctggtgcggggcaccaccccagagagcaacaaggatggagtcttcagcctggaccctgacaccggggtcatcaaggtgaggaagcccatggaccacgagagcaccaagctgtaccagattgatgtgatggcccactgcctgcagaacacagatgtggtgtccctggtgtctgtgaacatccaggtgggagatgtgaatgacaacagacctgtgtttgaagctgacccctacaaggctgtgctgacagagaacatgcctgtgggcaccagcgtcatccaggtgacagccatcgacaaggacaccggcagagatggccaggtgtcctaccgcctgtctgctgaccccggcagcaatgtgcatgagctgtttgccatcgacagcgagagcggctggatcaccaccctgcaggagctggactgtgagacctgccagacctaccacttccacgtggtggcctatgaccacggccagaccatccagctgagcagccaggccctggtgcaggtgtccatcacagatgaaaatgacaatgcccccaggtttgccagcgaggagtaccggggctctgtggtggagaacagcgagcctggagagctggtggccaccctgaagaccctggatgctgacatcagcgagcagaaccggcaggtgacctgctacatcacagaaggagaccccctgggccagtttggcatcagccaggtgggagatgagtggaggatcagcagcaggaagaccctggaccgggagcacacagccaagtacctgctgcgggtgacagccagtgatggcaagttccaggcctctgtgacagtggagatctttgtgctggatgtgaatgacaacagcccccagtgcagccagctgctgtacacaggcaaggtgcatgaagatgtgtttcctggccacttcatcctgaaggtgtctgccacagacctggacacagacaccaatgcccagatcacctacagcctgcacggccctggggcccacgagttcaagctggacccccacactggagagctgaccaccctgacagccctggaccgggagaggaaggatgtgttcaacctggtggccaaggccacagatggcggcggccgcagctgccaggccgacatcaccctgcacgtggaggatgtgaatgacaatgccccccgcttcttccccagccactgtgctgtggccgtgtttgacaacaccaccgtgaagacccctgtggccgtggtgtttgcccgggaccctgaccagggcgccaatgcccaggtggtgtacagcctgcctgattctgctgagggccacttcagcattgatgccaccaccggggtcatccggctggagaagcccctgcaggtgcggccccaggcccccctggagctgactgtgcgggccagtgacctgggcacccccatccccctgagcaccctgggcaccgtgacagtgtctgtggtgggcctggaggactacctgcccgtcttcctgaacacagagcacagcgtgcaggtgcctgaagatgcccctcctggaacagaggtgctgcagctggccaccctgaccaggcctggagctgagaagacaggctacagagtggtgtctggaaatgagcagggccgcttccggctggatgccaggacaggcatcctgtatgtgaatgccagcctggactttgagaccagccccaagtacttcctgagcattgagtgcagcaggaagagcagcagcagcctgagtgatgtgaccaccgtgatggtgaacatcacagatgtgaatgagcaccggccccagttcccccaggacccctacagcaccagggtgctggagaatgccctggtgggagatgtgatcctgactgtgtctgccacagatgaagatggccccctgaacagcgacatcacctacagcctgattggaggcaaccagctgggccacttcaccatccaccccaagaagggggagctgcaggtggccaaggccctggaccgggagcaggccagcagctacagcctgaagctgcgggccacagattctggccagccccccctgcacgaggacacagacatcgccatccaggtggctgatgtgaatgacaaccccccacgcttcttccagctgaactacagcaccaccgtgcaggagaacagccccatcggcagcaaggtgctgcagctgatcctgagtgaccctgacagcccagaaaatggccccccctacagcttccgcatcaccaagggcaacaatggaagtgccttccgggtgaccccagatggctggctggtgacagctgagggcctgagcagaagagcccaggagtggtaccagctgcagatccaggccagtgacagcggcatcccccccctgagcagcctgacctctgtgcgggtgcacgtgacagagcagagccactacgcccccagcgccctgcccctggagatcttcatcaccgtgggggaggatgagttccagggcggcatggtgggcaagatccacgccacagaccgggacccccaggacaccctgacctacagcctggccgaggaggagaccctgggccgccacttctctgtgggcgccccagatggcaagatcatcgccgcccagggcctgccccggggccactacagcttcaacgtgacagtgtctgatggcaccttcaccaccacagctggggtgcacgtgtatgtgtggcacgtgggccaggaggccctgcagcaggccatgtggatgggcttctaccagctgaccccagaggagctggtgtctgaccactggaggaacctgcagcgcttcctgagccacaagctggacatcaagagggccaacatccacctggccagcctgcagcctgctgaggccgtggccggcgtggatgtgctgctggtgtttgagggccacagcggcaccttctatgagttccaggagctggccagcatcatcacccacagcgccaaggagatggagcacagcgtgggcgtgcagatgaggtctgccatgcccatggtgccctgccagggccccacctgccagggccagatctgccacaacacagtgcacctggaccccaaggtgggccccacctacagcacagcccggctgagcatcctgacccccaggcaccacctgcagaggagctgcagctgcaatggaacagccacccgcttcagcggccagagctatgtgcgctaccgggccccagctgccaggaactggcacatccacttctacctgaagaccctgcagccccaggccatcctgctcttcaccaatgaaacagcctctgtgtccctgaagctggccagcggcgtgccccagctggagtaccactgcctgggcggcttctacggcaacctgagcagccagagacatgtgaatgaccacgagtggcacagcatcctggtggaggagatggatgccagcatccggctgatggtggacagcatgggcaacaccagcctggtggtgcctgagaactgccggggcctgcggcctgagcggcacctgctgctgggcggcctcatcctgctgcacagcagcagcaatgtgtcccagggctttgagggctgcctggatgctgtggtggtgaatgaggaggccctggacctgctggcccctgggaagacagtggccggcctgctggagacccaggccctgacccagtgctgcctgcacagcgactactgcagccagaacacctgcctgaatggaggaaaatgttcctggacccacggggccggctacgtgtgcaagtgccccccccagttcagcggcaagcactgtgagcagggccgggagaactgcacctttgccccctgcctggagggcggcacctgcatcctgagccccaagggggccagctgcaactgcccccacccctacacaggagacagatgtgagatggaggcccggggctgcagcgagggccactgcctggtgaccccagagatccagagaggagactggggccagcaggagctgctgatcatcaccgtggccgtggccttcatcatcatcagcacagtgggcctgctcttctactgccgccgctgcaagagccacaagcctgtggccatggaggaccctgacctgctggcccggtctgtgggcgtggacacccaggccatgcctgccatcgagctgaaccccctgagcgccagcagctgcaacaacctgaaccagcctgagcccagcaaggcctctgtgcccaatgagctggtgaccttcggccccaacagcaagcagaggcctgtggtgtgcagcgtgcccccccggctgcccccagctgctgtgcccagccacagcgacaatgaacctgtgatcaagaggacctggagcagcgaggagatggtgtacccaggaggagccatggtgtggccacccacctacagcagaaatgaacgctgggagtacccccacagcgaggtgacccagggccccctgccccccagcgcccaccgccacagcacccctgtggtgatgcctgagcccaacggcctgtatggaggcttccccttccccctggagatggagaacaagagggcccccctgcccccacgctacagcaaccagaacctggaggacctgatgcccagccggccccccagcccccgggagcggctggtggccccctgcctgaatgagtacacagccatctcctactaccacagccagttccggcagggcggcggcggcccctgcctggctgatggcggctacaagggcgtgggcatgaggctgagcagagctggccccagctatgctgtgtgtgaggtggagggcgcccccctggccggccagggccagccccgggtgccccccaactatgagggcagtgacatggtggagagtgactatggcagctgtgaggaggtgatgttttag

SEQ ID NO: 333167 - DNA, 13050 bp, Artificial Sequence
  derived and/or modified sequence
atgaccatcgccctgctgggcttcgccatcttcctgctgcactgcgccacctgcgagaaaccacttgagggaatcctgagctctagcgcctggcacttcactcactcacactacaatgcaactatttacgaaaattcgtcgcctaagacctatgtggagtccttcgaaaagatgggtatatacctggctgagccgcagtgggccgttcgctacaggatcatatcaggcgatgtcgccaacgtctttaaaaccgaggagtatgttgttggaaacttctgttttcttcggattcgaacaaaaagcagcaacaccgcccttttgaatagggaagtgagagacagttatactctaattatacaggctactgagaagaccttggaattggaagcactcacccgagtcgtggtacatatcttggaccagaatgatcttaagccactcttttctccgccatcttacagggtaaccatcagcgaggacatgccactgaagtcccccatttgtaaggttacagccactgatgcggacctgggtcagaacgccgagttttattatgcctttaacacccgctccgagatgtttgctatacaccccacttctggagttgtcaccgtagccggtaaactgaacgtgacctggaggggtaagcacgaacttcaggtgctggcagtggataggatgagaaaaatctccgaagggaatggattcggcagtctggccgcactcgttgttcacgtagaacctgcactccggaaacccccagctatcgcgtctgtagtagtcacgcctcccgactcaaacgacggcacgacttatgccacggtgctggttgatgccaattcatcgggggccgaagtcgagagcgtcgaggttgtaggcggagatccaggcaagcattttaaggccattaagagctacgctcgtagcaatgaattttctcttgtgagcgtcaaggacattaattggatggagtatctgcacgggttcaacctctctctgcaggctcgcagcgggagtggcccttacttctatagccagattcggggtttccatctcccacccagtaagttaagctctctaaagttcgagaaggccgtgtaccgggtccagctgtccgaattttctccacccggatcccgggtcgtgatggtgcgcgtgaccccagccttcccaaacttgcagtacgtcctgaaaccttcttcggagaacgtaggctttaagctgaacgcacggacaggactgatcacaaccacgaagctgatggatttccacgaccgagcacactatcaattacatattcgcactagtcctggccaggcgtcaacagtcgttgtaatcgatattgtggattgcaacaatcacgcacccctgttcaacagatcctcctatgacgggacactggacgaaaacatccctcccggaaccagcgtactggcggttacagcaacagaccgcgatcacggtgagaatggatacgtgacctacagcatagctggccctaaagcactgccattttctatcgacccatacctgggaataatttccacaagtaagcccatggactacgaactcatgaaaagaatatatacatttagagtgcgggctagtgattgggggagcccgttcagacgggagaaggaggtctctatcttcctgcagttacggaatctcaacgataatcagccaatgttcgaagaggtgaattgtaccggctctatccggcaggactggcctgtcggcaagtccatcatgaccatgagcgccatcgatgtggatgagctgcagaacttgaagtatgagatagtgtctgggaacgaactggagtatttcgacctgaaccacttttccggcgtgatatccctaaagcggccttttattaacctgacggccgggcagcctacgtcttacagcctcaaaattacagccagtgacggaaagaattatgcctctcccacaacattaaatatcaccgtagtaaaggatccacacttcgaggtgcctgttacatgtgataagacaggggtgttgacccagttcactaaaacaatattacatttcatcggtctgcagaaccaggagagctctgacgaggagttcaccagtctcagcacataccagatcaatcattacactcctcagttcgaagaccactttccgcagagcatcgatgtcctggagtctgtcccaatcaacacgcccctcgccaggctagctgcgacagatcctgatgcaggcttcaatgggaagctggtgtacgtaattgccgatggaaatgaagaagggtgcttcgatatcgaactcgagacagggctgctgacagttgccgctccattggattatgaggccacaaacttctatattctgaatgtgacagtctatgatcttgggacgccccaaaagtctagctggaagctcctgactgtgaatgtcaaggattggaatgataacgcccccaggttcccacccggcggctaccagcttacaattagtgaagacactgaagttggcacaaccattgccgaactcactactaaagacgcggacagtgaagataacggaagggtgcgttacactctcttgtcacccaccgaaaagttctccctgcacccgctgacaggggaattggtcgtgactggccacctcgatagggagagcgagccgcgctatattcttaaagtggaagcgcgcgaccaacccagcaaaggccaccaactcttttcagtgaccgacctgatcattacattggaggatgtgaatgacaattcccctcagtgtataactgagcataataggctgaaggtaccagaagacctgcctccgggcaccgtcctcacgttcttggatgcctccgatccagacctgggaccggctggtgaggtgaggtacgtgctgatggatggggctcatgggactttccgcgttgatctgatgactggagcactcatcttagagcgagagctcgatttcgagcggcgcgccgggtacaatctctcactctgggcaagcgatggcggaagacccttagctcggcgtacgctatgtcatgtggaggtgatcgtcctggatgtcaacgagaacctacacccaccacacttcgctagctttgtccatcaggggcaggtgcaggaaaacagccctagtggcacacaagtgatcgttgtggccgcgcaggatgatgatagcggtttagatggagaattgcagtattttctgcgggcagggactgggctcgctgcattctcaatcaatcaggacactggaatgatccagaccctcgcaccactcgaccgcgaatttgcatcctactactggctgacggtgctcgccgtggatcgcgggtccgtgccgctttctagcgttaccgaggtgtatattgaggtcaccgacgccaacgacaaccctccccagatgtctcaggctgtcttttatccatctattcaggaagatgcacctgtaggaacctcagtgctgcagctcgacgcatgggatcctgattcttccagcaagggaaaactgacctttaacatcacatctggaaattatatgggcttctttatgatccatccagttaccggactattgagcacagctcagcaactggacagggaaaacaaagatgagcacattctggaggtgacagtcctcgacaatggggagccctccttgaaaagtacatctagggtggtggtggggattctggacgtgaatgacaaccctccgatattctctcacaagctctttaatgtgaggctaccagagcggctgtcccccgtgagcccaggccctgtttatcgccttgtggctagtgatcttgacgaagggctcaacggccgggtgacttacagcatcgaggactctgatgaggaggccttctcaatagacctagtcacgggtgtggtgtccagctccagcacctttactgctggtgaatataatattttaaccatcaaggcgacagactcggggcagcccccgctctcagcatctgtgaggcttcacattgaatggatcccatggccccgtcccagttctatccccttggcattcgacgagacctactatagtttcacggtcatggagaccgaccctgtgaatcacatggtgggagtcatctccgtcgaggggagacctgggctcttttggtttaatatctcaggtggtgataaagacatggattttgacatagaaaaaaccaccgggagcattgttatcgcgcgccccctcgataccagaagaagatccaactataacctcaccgttgaagtcacagacggaagtcggaccatcgcaacccaggttcacatcttcatgatagcaaatataaaccaccaccgcccacagttcctcgaaacccgctatgaggtcagagtgccccaagacactgtcccaggagtggagctcctcagagtccaagctattgatcaggacaagggtaaatctcttatttatacaatacatggttcacaagacccagggagtgcctcactgtttcagttagatccttctagtggggtgcttgtgacggtggggaaactcgatctagggtcaggacctagtcagcatacgctgacagtcatggtgcgagaccaggagattccgattaagcgcaacttcgtttgggtgacaattcacgtcgaggatggcaatctgcatccacccagattcacccagttgcattatgaggctagtgtcccagacaccatcgcacctggcacggaacttctgcaggtacgcgccatggatgcggataggggagtgaacgctgaagtccactacagcctcctaaaaggcaattcggagggcttcttcaacattaacgcattgctgggcatcatcaccctggctcaaaagcttgaccaggcaaaccatgctcctcataccctgaccgtgaaggcagaagatcagggttctccccagtggcatgacctggctacagtgattattcacgtatacccctccgatcgatctgccccaatcttctcaaagagcgaatacttcgtggaaatacccgaatcaatacccgtaggaagtcccatcttactggttagcgctatgtccccaagtgaggtgacatacgagcttcgtgaaggaaacaaggatggagtcttcagtatgaactcctactccggactgatctcaacacagaaaaagctggatcatgaaaagatcagctcttaccaactcaagattcggggtagcaatatggcgggtgcctttaccgacgtgatggttgtggtggatattatcgacgaaaacgataacgcccccatgtttctcaagtccacttttgtcggacagatcagtgaggctgccccactgtattcgatgatcatggataaaaataacaatccatttgtgatccacgccagtgattcggacaaagaggccaactccctcctggtgtacaaaatactcgagcctgaggccttgaagtttttcaagatcgatccttccatgggcactctcactattgtcagcgagatggattacgaaagcatgccaagctttcagttttgcgtctacgtccacgatcaaggaagcccggtattattcgctcctcggcccgcccaggtgattattcacgtgcgggatgtgaacgacagtcctccccggtttagcgagcagatatacgaagtggcaatcgtgggaccaattcacccaggcatggagcttttgatggttcgcgcatcagatgaagactcggaagtcaactacagcatcaaaacggggaacgctgatgaggctgtgactatccacccagttacaggtagtatctctgtcttaaatcctgcttttttggggctttccagaaaactgacgatcagagccagtgacggactctatcaggatacagcacttgtcaagatctctctgacccaagtgctggacaagagcctccaattcgaccaggatgtatattgggccgccgtcaaggaaaaccttcaagaccgcaaggccctggtgattttgggcgcccaaggaaaccacctcaacgacacactgtcctatttcttgttaaacggaacagacatgttccatatggtccaaagcgccggagtcctgcagacgagaggcgtcgcctttgatagagagcagcaggacacacatgagctagcagttgaagtgcgagacaatcgaacgccgcagagagtcgcgcagggattggtgcgtgtatccatcgaggatgtaaacgacaaccctcctaagtttaagcacctcccgtattatactatcatccaagacggtacggagcctggagacgtcctttttcaagtgagtgccactgacgaagacctggggactaacggagccgttacttacgaattcgccgaggattacacttattttaggattgacccatacctgggggacatctctttgaagaaacccttcgactaccaggctttaaacaaataccacctaaaagtaatcgctcgcgatgggggtaccccttctctgcagtccgaagaggaagttttggtgaccgtgagaaacaaatctaatcctcttttccagtcgccatactataaagtgcgcgtccccgagaatatcaccctctacacgcctatcctccacactcaagcgagatcaccggaagggctgcgactgatatacaacatagtggaagaagagcctctgatgctgtttaccaccgactttaaaacaggcgtgttgaccgtgaccggcccactggattatgagagcaaaaccaaacacgtatttacagtaagagccaccgatacagctctgggctctttcagtgaagctaccgtggaagtcctggtggaggatgtgaatgataatcccccaactttctcacagttggtatacaccacatccattagtgaggggctccccgctcagacccccgtgatacagctcctcgcctcggaccaggacagcggccgaaaccgggacgtgtcttaccagatcgtggaggacggttcagatgtcagcaagtttttccagattaacggaagcaccggggagatgtctaccgtgcaggaattggactacgaagcccagcagcatttccacgtgaaagttcgtgcaatggacaaaggagaccccccactgaccggggagacgctggttgtagttaatgtttccgacatcaatgataatccccccgaattcaggcaacctcagtacgaggctaacgtgtcagagctggctacgtgtggccacctggtgttgaaagtgcaggcaattgatcccgattcccgggacacctcccgcctggagtacctgattctcagtggcaatcaggaccgacacttcttcattaactctagttcaggaattatttcaatgttcaacctttgcaagaagcaccttgattcctcatataatctcagagtgggggcttcagatggcgtgtttcgggccacagtaccggtctatataaacacaactaacgcgaacaagtactctcccgagtttcagcagcacctgtacgaagctgaacttgcagagaacgcaatggtgggaaccaaagtgattgatcttttggcaatagacaaggattccggtccttacggcacaatcgattatactattatcaacaagctggccagtgagaaattcagtatcaatccaaacggtcagattgcgaccctacaaaaactggatagggaaaatagcactgagcgtgtgatagctattaaggtgatggcacgggacggcggcggaagggtcgccttctgtaccgtaaaaattatattgacggacgagaacgacaaccctcctcaattcaaagcctcagagtacaccgtgtcaattcaatctaacgtgtccaaagatagcccggtgatccaagtactggcgtacgacgccgacgaggggcagaatgctgacgttacatatagtgtgaatcccgaggatctggttaaagatgtcatcgagataaaccctgtcacgggagtcgtcaaggtaaaagacagcctcgtcggcctggagaatcagaccctggattttttcataaaagctcaagatggtggcccacctcattggaattccttagtgcctgtgcgtctgcaggtggttccaaagaaggtgtcactgcctaaattctccgagccactgtatacctttagtgcaccagaggacctgcccgaaggtagcgagattggcattgtgaaagccgtcgccgctcaggatcccgttatttactctttagttcgcggcaccacaccagagtctaataaggatggggtgttttcactggacccagacacaggggtcatcaaagtgagaaaacccatggaccacgagtcgactaagctataccagatcgatgttatggctcattgtcttcagaacaccgacgtagtgagcctagtctccgtgaacattcaggtgggagacgttaacgataatagaccagtcttcgaggcagacccttataaggcagtgttgacggagaatatgcctgtcggaacctcggtgattcaggtgaccgccattgacaaggacacagggcgcgacggccaggtgtcctaccgtctctcagcagaccctggaagcaacgtacacgagcttttcgcaattgacagtgaaagtggctggattactaccctccaggagctagactgcgaaacttgccaaacttatcacttccacgtggtggcttatgaccacggccagacgatccagctatcttcgcaggcgctcgtccaggtctcgataaccgacgagaatgacaacgctcctaggttcgcaagtgaggagtaccgtggctcggtcgtagagaatagcgaacctggagaattagtggccacactcaaaactctcgacgctgatatttccgagcagaaccgacaggtgacttgctacatcacagagggagaccccctcggacagtttggcatctcacaagtgggggatgagtggcgcatttcttccaggaagacccttgatcgggaacatacggcaaagtacttgcttcgcgtgactgctagcgacgggaagtttcaggcctctgtgacagttgagatcttcgtgctagatgtcaatgacaattctccacagtgttcgcagctgctgtatacggggaaggtccatgaggatgtctttccaggccacttcatactcaaagtttccgctaccgacctagacactgataccaatgcccagatcacctattccctgcatggccccggagcacacgagtttaagctcgatccacacaccggtgagctgactaccctaactgccctggacagggagcggaaggacgtgtttaacctcgtcgcgaaagcgacagacggaggcgggagatcttgccaagctgatatcacgctgcatgtcgaggacgtcaacgacaacgcgccacgttttttcccctcccactgtgccgtcgcggtgtttgacaacaccaccgttaaaaccccagtcgcggtggtctttgcacgagacccagatcaaggtgccaacgcccaggtggtgtattctttaccagattcagcagagggccatttctcaatcgacgccacaactggggtgattcggcttgaaaagcctctgcaggtccgaccacaagcaccactggagctgaccgtgcgggccagcgatctcggcacccccatccctctctcaacactgggaacagtgactgtatctgtggtaggactcgaggactatttacctgtgtttctcaacacagagcacagtgtccaggtgcctgaggatgcaccacctggaaccgaagttctacagctggctaccctgacaaggcctggggctgagaaaacaggctacagagtggtctctggaaatgagcagggtcgcttccgactggacgccaggactggaattctctatgtgaacgcctcactggatttcgaaacctctcccaagtatttcctgagcatagaatgctccagaaaaagcagcagcagcctgtcggatgtgaccacagtgatggtaaacatcacagacgttaacgagcaccggccacagttccctcaagacccgtactcgaccagagtcttagagaacgccctggtgggtgatgtcatcctgacagtgagcgcgaccgacgaagatggacccctgaattccgatatcacctatagcttgatcgggggcaaccagctgggacactttaccatccatcccaagaagggggaactccaggtggcgaaggctctggacagagaacaggcaagcagttatagcctcaagctccgggccactgattctggtcaacctcctctgcacgaggataccgatattgctattcaagtggccgacgtgaacgataacccaccacgtttctttcagttaaattactctaccacggttcaggagaacagccccatagggtcgaaagtgctccagttgatactgagtgacccagactcacctgaaaacgggccgccatacagcttcaggattaccaaggggaacaatggcagcgcatttcgcgtcacgcctgacggatggctagtgacagctgagggattgagtcggcgggcgcaggaatggtaccagctgcagattcaggccagcgatagcggtattcctcctctcagttcactaacgtctgtgagggtacacgtcactgaacagagccactatgctcctagcgcactgccactcgagattttcattacggtgggcgaagatgaatttcagggcgggatggtgggtaaaattcacgctacggacagggatccccaggacacacttacttattcattggccgaagaggagactctggggagacacttcagcgtgggagcccctgatggtaagattatagctgcacagggcctgcctagaggacattattccttcaacgttacagtgtcggatggtacttttacaacaacagccggggtccacgtgtatgtatggcacgtaggccaggaggccttgcaacaagccatgtggatgggattttatcaactgacccccgaagagttggtgtctgatcactggagaaatctacagcggtttctgtcacataaattggatatcaagcgcgctaacatccatttagcctccttgcagcccgcagaggccgttgctggagtagatgtgttactggtgtttgaaggacacagcggaacattctatgagttccaggagctggcgtccataatcacacatagtgctaaagaaatggagcacagtgtgggagtgcagatgagaagcgccatgcccatggtgccctgccagggccctacttgccaagggcagatctgccataatacagtgcatctggaccctaaggtcggcccaacgtacagcacggcccgactgagcattctcacgccacgccaccacctccagcgcagttgcagttgtaacgggacagctacgcggttcagcggccagagttacgtccgttaccgggcccctgctgcgagaaattggcacatccatttctatttaaagaccctgcagccacaggctatcttactgttcactaatgagactgcctcggtcagccttaaactggcaagcggcgtcccccaactggaataccactgcctggggggattttacggcaacctttcttcccagaggcacgttaacgaccatgaatggcactctatcctcgttgaggaaatggacgcaagcatacggcttatggtggacagtatgggaaatacgagtcttgtggttcccgagaattgccgtggccttcgcccggagagacatctgctccttggcggcctgattttactccattctagtagcaacgtgagccagggttttgagggttgtctcgatgctgtcgtagtcaacgaagaagctttggacctcctggcgccaggcaaaactgttgctggcctgttagagacccaggccctgacacagtgctgcctccattcagactactgtagccaaaacacttgtctgaatggcggcaagtgtagctggactcacggcgccggatacgtgtgcaaatgtcctcctcaatttagcggaaaacattgtgagcagggccgagagaattgcacctttgccccctgtctcgagggtggtacatgcattttatcacctaagggggcttcctgcaattgtccacacccctacacaggcgaccggtgcgagatggaagctcgggggtgtagtgagggccattgtctggttactcccgagatacagagaggggactggggtcagcaggagctgctgatcatcaccgtggctgtagcattcatcattatcagcacagtggggctacttttttactgccgccggtgtaaaagccataagccagtcgccatggaagatcccgatttacttgctcgtagtgtgggcgtggatacacaggccatgccagcaattgaactgaatccactgtctgcttcttcctgcaataatctcaaccagcccgaaccgtctaaagccagtgtgccaaatgagttagtaacgttcggtcctaattccaaacagagacctgtggtttgctctgtcccaccaagactcccccccgcagctgttccctcgcattcagacaacgagcccgtgataaagcgaacatggagttccgaggagatggtttaccctgggggtgccatggtgtggcctccaacctactcacggaatgaaaggtgggaatatcctcacagcgaggtgacacagggccctctgccaccatctgcccaccggcacagtactcctgttgtgatgcctgagcctaatggtctgtacggaggtttcccttttccactggagatggagaataagagagcacccttaccaccgcggtatagcaatcagaacctagaagatctcatgccttccaggccaccatctcctagagaacgactcgtggctccctgtctgaatgaatatacagcaatctcttattaccactcccaatttagacaggggggcgggggtccctgtctggccgatggtgggtacaagggtgtcggcatgagactctcacgagccggtcctagttatgcagtgtgtgaagtggagggtgcacccctggccggccaaggacagcccagagtgccccccaattacgaaggatccgatatggtcgagagcgattacggttcatgcgaggaagtcatgttctag

SEQ ID NO: 333168 - DNA, 13050 bp, Artificial Sequence
  derived and/or modified sequence
atgacaatcgctctactgggttttgctatttttctgctgcactgtgcgacctgtgaaaaacccctggaaggcatcttgagcagctctgcatggcacttcacacatagccactacaacgcaacaatctatgagaactcttcccccaaaacatatgtggagagctttgagaagatgggaatttacctcgccgagccacagtgggcggtgcgttaccgtatcatttccggagatgtggcaaacgtctttaagaccgaggagtatgtagtaggtaatttctgtttccttagaatccggacgaaatcatccaacacagcgctgctgaatcgcgaggtacgcgattcttacactctcatcatccaggccactgagaaaactctcgagttggaagcactgactcgagtcgtcgtgcatatcttagatcaaaatgacttgaagccactcttcagtcctccctcataccgggtgacaattagcgaagacatgcctctgaaatcgccgatttgtaaagtcaccgccacagacgccgacctcggccagaacgccgagttctactacgcatttaatacgagatccgaaatgttcgccatccatcctacctcgggcgtcgtcacagttgcaggcaaactgaacgtcacatggaggggtaagcacgagcttcaggtacttgccgtggacaggatgcggaagatatccgagggcaatgggtttggcagtctagccgctctggtcgtccacgtcgagcccgcactccgaaaacctcctgcaattgcgtctgtggttgtgaccccacccgattctaacgacggcaccacctatgccactgtcctcgtggacgcgaactcgtctggtgcagaggtggagtcggttgaagtcgtcggcggagaccctggaaaacacttcaaggccattaagtcctatgccagatccaacgaattttctctggtatctgtcaaagatatcaattggatggaatacctccatgggtttaacttgagcctgcaggcgaggagcgggtcagggccttacttctacagccagattagaggattccatctcccaccgtctaagttgagcagcctgaaattcgagaaagctgtatacagagttcagctcagtgagttcagcccacccggatctcgcgtagtgatggtgcgtgtgactccagcctttccaaacttacaatacgtactcaagcctagttcggaaaacgttggattcaagctcaacgcgagaaccggtcttattactactaccaagctcatggatttccacgacagagcccattaccagcttcatattaggacctctccaggacaggctagcacggtggtcgtgattgacatcgtggattgcaacaaccatgctcccctgtttaatcggtctagctacgatgggactctcgacgagaacatcccgccagggacatcagtgttggctgtgaccgccactgatcgagaccatggggagaacggctatgttacatactcaattgcgggacccaaggccctgcctttcagcatcgatccatacctggggatcatttctactagtaaacccatggactacgaactgatgaagcgaatatatacatttagagtgagagcaagcgattgggggtcaccattccgtcgagaaaaagaggtatcaatcttcttacagttgaggaatctgaatgataatcagccgatgttcgaagaggtgaactgcacaggttcaattagacaggattggcccgttggaaaatcaattatgacaatgtccgccatcgacgttgacgagctccagaacctaaagtacgaaattgtctcagggaacgaactggagtattttgatttgaaccacttctctggcgttatctctctgaagagacccttcatcaatctgaccgcaggtcaacctacgtcgtactctctcaagattaccgcttcagatgggaagaactacgcttccccaaccacgctgaatattacagtggtgaaagacccccatttcgaagtgccggtaacctgcgataagactggcgtattgactcagttcacaaaaaccatcttgcattttatcgggttacaaaatcaggaatccagcgacgaagaatttacttccctttctacctaccagatcaaccactacactccccagttcgaagaccacttcccccaatctatagatgtgctcgagtctgtgccaatcaacactccgttagcccgactggccgcaaccgatccagacgctggctttaacggcaagctggtgtacgtgatcgctgacggtaatgaagaggggtgtttcgacatcgagctggagactggcctcctgaccgtggccgcacctctggattatgaagcaactaatttttatatcctgaatgtgacggtgtacgatttgggaaccccacagaaaagttcctggaagcttctcaccgtaaatgtaaaagattggaatgacaacgcccctcgcttcccccctggtggctaccaactcaccatcagcgaggacaccgaagtgggcactaccatagctgaactgactactaaggacgccgatagcgaagacaatgggagggtcagatatacgttgctcagccccaccgagaaattctcccttcatcccctgacgggagaactcgtggtgacggggcatctcgaccgagaatccgagccccgttacatcctgaaagtcgaggctcgcgaccaaccaagtaaaggccaccaactgttcagtgtcaccgatctgattattacactggaagatgtcaacgataacagcccacagtgtatcacggagcataatagattaaaagtccccgaggatctgccccctgggactgttcttaccttcttggatgcatcagatccagacttgggaccagcgggagaggtgaggtatgttttaatggatggggctcatgggacctttcgcgttgatctgatgactggcgctctcatcctggaaagggaactcgattttgaacgacgggctggatataacctgtcactttgggcaagtgacggtggcaggcccctcgcgaggcgaaccctgtgccacgtagaggtgatcgtcctggacgtgaatgaaaacctccaccccccacattttgcctccttcgttcatcagggccaggtccaggagaatagcccctctggaacccaggtaatagttgtggcagcacaggatgatgactcggggcttgatggcgaattgcagtacttcctacgggcagggactggtctggccgctttctcaatcaatcaagatacagggatgattcaaaccctagcgccactcgatagagaatttgcgtcctattactggcttaccgtgttggctgtagataggggtagtgtaccgctttctagtgtcaccgaagtctatatcgaggttactgacgccaatgataatccacctcagatgtctcaggctgtgttctaccccagcatccaagaagatgccccagtaggtactagcgtcctgcagttggacgcatgggacccggatagcagctccaaaggcaagttgacttttaacatcaccagcggtaactacatgggcttctttatgattcatcccgtcacgggactcttgtccactgctcagcaactggatagggaaaataaagacgaacatatactggaagttaccgtgctggacaatggcgaacctagtctgaagagtacttctcgtgtcgtggtgggcattctggacgtcaatgataatccccctattttctctcataagttgtttaatgttcgactacccgaacgtctctccccggtgagcccaggcccagtgtatagactggtcgcatctgatctggacgagggccttaacggtagggtgacatactccatcgaggattctgacgaagaagcgttcagcatcgatttggtgactggggtcgttagctcaagtagcacctttactgcgggagaatacaatatccttaccatcaaggccactgactccggacagcccccattgagtgctagcgttagattacacatagagtggataccctggcctcgccctagcagtataccgctggccttcgacgaaacttactactctttcacagtcatggaaacggatcctgtcaaccacatggtgggcgtaatctcagtagaaggtcgccctgggttgttctggttcaatatatcaggcggtgacaaagatatggatttcgatatcgagaagaccaccggaagtatagtcatcgccagacctctggatactaggcgcagatccaattacaatcttactgtggaagtaacggacgggtccaggactatcgccacccaagtgcacatttttatgattgccaatataaatcaccatcgacctcagtttcttgaaacgagatatgaggtacgcgtgcctcaggataccgtaccgggagtagaactcttaagagtgcaggctatcgatcaggacaaaggcaaatctctgatctatacgattcatggctctcaagatcctggcagcgcgtccttgtttcagctggacccgtctagcggagtccttgttacagtcggcaagttggatctcgggagtggcccatcccagcacactctgactgttatggtgcgggaccaagaaattcctattaaacgaaattttgtgtgggtgactatccacgtcgaagacggcaacctgcatccccctcggttcacccagctacactatgaggcctccgtgcccgatactatagcacccggtaccgaattgctgcaggtcagagcgatggatgccgacagaggcgtgaatgccgaagttcattatagcctgttgaagggtaactcagagggctttttcaatataaatgcgcttctcgggattatcactttggctcagaagttagaccaggcaaaccacgccccacatacattgaccgtcaaggccgaggatcagggctcaccgcaatggcatgatctggcaactgttattattcacgtctacccctccgatcgctcagctcctatcttctccaagtcagaatattttgtcgagattcccgaatccattccggtcggctcaccaattttgctggtgagcgcgatgagcccctctgaagtaacatacgagcttcgggagggaaacaaagacggcgtcttttctatgaattcatacagcggcctaatttcaactcagaagaaactggatcacgagaagataagttcctatcagcttaagattcggggaagcaacatggctggagccttcacagatgttatggtcgttgtcgatatcatcgacgagaacgataatgcgcctatgttcttgaagtcaacttttgttggccagatctccgaagctgcaccactctacagtatgataatggataaaaacaataatcctttcgtcatccatgcttctgactcagacaaggaggccaattcgttactggtgtacaaaattcttgagcctgaagcactcaaattttttaaaattgaccctagtatgggtaccctgacaattgtcagcgaaatggattatgagtcaatgccctcttttcagttctgtgtatacgttcacgatcagggatcacctgtgctgtttgcaccgcgaccggcacaggtgatcatccatgtacgagacgtcaatgactcccccccacgtttcagcgagcagatttacgaggtggccattgtcgggcctattcaccccggaatggaactgctcatggtgagggcctccgacgaggactccgaggtgaactattctatcaagacaggcaatgcggacgaagccgtgactattcatccagtcacaggctccattagtgtacttaacccggcttttctcggcctctcgcgcaaactgaccatccgcgcaagcgacggactctatcaggacactgctctggtgaagatatcactgactcaggttttagataagtctctccagttcgaccaggatgtttactgggcagctgtgaaggagaacctgcaggataggaaagccctagtaatcctgggcgcacagggaaaccatctgaatgacacactgtcttacttccttcttaatgggactgacatgttccacatggtacagagtgctggagtgctccagaccagaggagtggcctttgacagagagcagcaagacacccatgaactggcagttgaagtgcgggacaatcgcactccgcagcgggtcgcccagggcctggtgagagtaagcatcgaggacgtaaacgacaacccacctaaattcaaacatctcccatactacactattattcaagatggtaccgagcctggtgatgtattattccaggttagcgcgactgacgaagacttgggcaccaacggtgccgtcacttacgaattcgcagaagattacacctactttaggatcgacccttacctgggagacatatccctgaagaagcccttcgattaccaggccctgaataagtaccacttgaaagtcattgcacgcgatggagggaccccgtcccttcagagtgaggaagaggtcctggtgacagtgcggaacaaaagcaatcctctgttccagtccccttattacaaagtacgagtgccagaaaacattacactgtacaccccaatactacatactcaggcgagatctcctgagggtttgcgtttgatttacaatatcgtggaagaagaacccctcatgctgttcacgaccgacttcaagaccggcgtgctaaccgtgactggtccgctggactacgagtccaagacgaaacacgtgttcactgtacgcgcaactgataccgctctgggcagcttcagcgaagccacggtggaagttttagtcgaggacgttaatgacaaccctcccaccttctctcagctggtttacaccacctccatcagtgagggtctacccgctcagacacctgtgattcaacttctagccagcgatcaggattcggggcgaaaccgcgacgtgagctaccagatcgttgaagatggcagcgatgtctctaaattctttcagattaacggctcaacgggcgaaatgagcaccgttcaagagctagactatgaagcccaacagcactttcatgtgaaagtcagggccatggataagggagacccccctttaaccggcgaaactctagtagtggttaacgtctcggacatcaatgataaccctcctgagttcaggcagcctcaatacgaggcgaacgtgagtgagttggctacatgcgggcacctggtactgaaggtgcaggccatcgatccagattccagagataccagccgcctggaatatctgatcctttccggcaaccaagataggcacttttttatcaacagcagcagtggaattatcagcatgttcaatctgtgcaaaaagcacctagactcttcatacaatctccgagtcggggcttccgacggggtgttcagagccaccgtccctgtctacatcaatactactaacgcaaacaagtacagccccgaatttcagcaacatctttacgaagcggagttggcggagaacgcgatggtagggaccaaagtgatagacctactcgccattgacaaggactctggcccatatggaacaatagactatacgatcatcaataaacttgcttccgagaagttttccatcaatccaaatggccagatagctactctccaaaaactagaccgcgagaacagtaccgagcgtgtgattgccattaaagtcatggcccgagacggcggtgggcgtgtggcattctgtacggtcaagattatcctgactgacgaaaacgacaatccaccccagtttaaagcctcagaatatacagtatccatacagtccaacgtcagcaaggattcacccgttatccaggtactggcctatgatgccgacgagggacagaatgctgatgtcacatacagcgtgaatcctgaggacctcgtgaaagacgtcattgaaatcaatccagtaaccggagttgtgaaagtgaaggactctctggtcggcctggaaaatcagaccttggactttttcatcaaagcccaggacgggggaccgcctcactggaactcactggtccccgtgcggctgcaggttgttcccaaaaaagtctctctgcccaagttcagcgaacctctctataccttctcagctccagaagatctccccgagggatccgagattggtattgtgaaagctgtcgcagcccaggaccctgtgatatactctctggtgcggggtacaaccccagagagcaataaggatggggtcttttctttggatccagataccggcgtgataaaggtgcggaagcccatggatcacgaatctaccaaactctaccagatagatgtgatggcccactgtctgcagaatactgatgtcgtgtctctcgtgagtgtgaatatccaagttggcgacgtgaatgataatagacccgtcttcgaggctgacccctataaagccgtcttaaccgagaatatgcctgttgggacctccgtgatccaggttactgccattgataaggacaccggtagggatggccaggtgtcctatcgccttagcgccgacccagggtccaacgtgcatgaattatttgctatcgatagtgaatccgggtggatcacaaccctgcaggagttggattgtgagacctgccagacataccatttccacgtagttgcatacgatcatggtcagaccatacagctttcttcacaggctcttgttcaggtgtccattaccgacgagaacgacaatgctcccaggtttgctagcgaagagtatcgagggagtgtggtagagaattccgaaccaggggaactggtcgccaccctcaaaacactcgacgcagatatttccgaacaaaatcggcaggtgacatgctatataaccgaaggcgacccacttggtcagttcggtatatctcaggtcggggatgagtggcgcatctcttcccgaaagacattggacagagaacacactgcaaagtacctgttgcgagtgacagcttccgacggaaaatttcaggcaagcgtgacagtagaaattttcgttctggacgtgaacgacaactctccccagtgtagccagctcctctacaccggtaaggtccacgaagacgtttttcctgggcattttattctcaaagtctctgcaacagaccttgacactgataccaacgctcagatcacatactcgctgcacggtcccggagcgcatgaattcaagctcgatccgcacacaggggagctcactacattgaccgcgctggatagggagcggaaggatgtgtttaatcttgtggctaaggccacggacgggggagggcgatcttgccaagcagacatcaccctccatgtcgaagatgtgaatgataatgcccctaggttcttcccttctcattgtgccgtcgccgtttttgataatacaaccgtgaagacgcctgtggcagtagtgttcgcaagagacccggatcagggagccaatgcacaggttgtgtactccctccccgatagcgccgagggacactttagtatcgacgccaccaccggcgtcatccgcctcgagaagcctttgcaggtgcgaccacaggccccactagagctcacagtgcgggcttctgacctcggcaccccaattcccctctcaaccttgggcacagtcactgtgtccgtagttggattagaagactacttacctgtgtttcttaatacagaacattccgtgcaggtccccgaggacgcacccccagggaccgaggtcttacagcttgccactcttaccaggcccggtgccgagaagacagggtaccgcgtggtgagcggcaatgaacaaggcagattccgacttgatgcccgaactggcatcctctatgtcaacgcctccctcgatttcgagaccagccccaaatatttcctgtcaattgagtgttcacgcaaatctagttccagcctctccgatgtgactacagtgatggttaacatcacggacgtcaatgagcacagaccacagttcccccaagacccatatagcactcgtgttttagaaaacgctctggtgggtgatgtgattctgactgtgagcgcaacggatgaggacggacccctcaattccgacatcacctacagcttgattggaggtaatcaactcggtcacttcacaatccaccctaagaaaggagagcttcaggtcgctaaggcgctggacagagagcaggcaagcagctacagcctgaagttgagagccacggatagcggccagcccccactgcacgaagataccgacattgccattcaggtggccgatgtcaatgataatccacctcggtttttccagttaaactacagcaccacagtccaggagaattccccaatcggaagcaaggtgcttcagcttatactctctgaccccgattccccggaaaacggacctccctactcctttcgaattacaaaagggaacaacggttctgcttttcgggtaacccctgacgggtggctggtgacagccgaaggcctgtctcggagggcacaagagtggtaccagctacagatccaggccagcgacagcggaatccctccactcagctcattaactagcgtgcgcgtacatgtcaccgagcagagtcactatgccccaagtgctctgcccttggaaatattcattacagtaggggaagatgagttccaaggcggaatggtcggaaagatccatgcaaccgaccgagaccctcaagatacgctgacctatagcttagctgaggaagagactctcggacgccatttctctgttggcgctcccgacggcaaaataatcgccgctcagggcctgcctcgcggacactattcatttaatgtgaccgtgagcgatgggaccttcacgacaaccgcaggcgtgcacgtctacgtttggcatgtgggccaggaggccctgcagcaggccatgtggatgggattctaccagctaacgcctgaagaactggtttcagatcattggaggaacctgcagcgctttttatctcacaagttagacattaaacgcgctaacatccacctcgcgagtctgcagccagccgaagccgtggccggagttgatgtcctgcttgtatttgaaggtcactccgggactttctatgagttccaagagcttgcttcaattattacacattcagccaaggagatggaacacagtgtgggggtgcagatgcggtctgccatgccgatggtcccttgtcagggacctacatgccaggggcaaatatgccacaacactgtgcatttagaccctaaagttggaccaacctacagtactgcacgcctcagcatcctgacacctaggcaccacctgcaaaggtcatgctcctgtaacgggaccgctaccagattctccggccagtcttatgtgaggtatcgggctcccgctgccaggaattggcacattcacttttacctgaagaccttgcagccacaagctatcctcttgttcaccaatgagaccgcctctgtttcgctgaagctagcctccggggtgcctcagctcgaatatcactgcctcggcggattttatgggaatttatcctcccagaggcatgtaaacgatcacgagtggcacagcatcctggtcgaagagatggacgctagcattcggcttatggtagatagcatgggaaacacgagtttggtcgttcctgagaattgtaggggcctgcgaccggaaaggcacctgctgctgggaggactgattctgctgcacagttccagcaatgtgagccagggctttgaaggctgtttagatgcagttgtagtgaatgaggaagctttggacctgctagcaccgggtaaaacagttgccggactgttggagacacaagctttaactcaatgctgtctccatagtgactactgcagccagaacacctgtctcaatgggggaaaatgttcctggacgcacggcgctgggtacgtatgtaaatgcccccctcagttttcaggcaagcactgtgagcagggacgtgaaaactgcaccttcgcaccctgcttagagggcggaacctgcattctgtctcccaagggcgcttcctgcaactgtccccacccatacaccggagacagatgcgaaatggaggccaggggatgctccgaggggcactgcctggttaccccagaaatccaacgcggagactgggggcagcaagaattgttaataataaccgtggccgtggccttcataatcataagcactgtcggactcttattctattgccgccgatgtaagagccataagcccgttgcgatggaggatccagacctcctggctcgatctgtcggcgtcgacacccaggcaatgcccgctatcgaactcaacccgctgtccgcctcttcgtgcaacaatctcaatcagccagagcctagtaaggctagcgtacctaacgagctagtcacatttggtcctaattccaaacaaaggccagtcgtgtgttccgtgcctccacgactaccaccagccgcagtcccttctcatagtgataatgaacctgtcataaaaaggacctggagctccgaggaaatggtgtacccgggaggagctatggtctggccacctacctacagtcgcaatgaacgctgggaatatcctcacagcgaggtcacacaaggccctttaccaccatcagctcatcgccatagcacgcctgtcgtgatgcccgagccaaacggcctctacgggggattccctttccccctagagatggagaataagagggctcctctgcccccaagatacagcaaccagaacctcgaggacctcatgccctcacggccaccttctccacgtgagcgtttagtggccccatgtctcaatgagtatacagcaatttcctattaccattctcagttccgccagggaggaggaggcccatgtcttgccgacggcggatacaagggggtaggcatgagactgtccagagcaggccctagttacgcggtttgcgaggtggaaggcgctccactcgccggtcagggacagcccagggtgccacccaactatgaggggagtgacatggttgaaagcgactacggatcttgcgaggaagtgatgttctaa

SEQ ID NO: 333169 - DNA, 13050 bp, Artificial Sequence
  derived and/or modified sequence
atgaccatcgccctgctgggcttcgccatcttcctgctgcactgcgccacctgcgagaagcccctggagggcatcctgagcagcagcgcctggcacttcacccacagccactacaacgccaccatctacgagaacagcagccccaagacctacgtggagagcttcgagaagatgggcatctacctggccgagccccagtgggccgtgagatacagaatcatcagcggcgacgtggccaacgtgttcaagaccgaggagtacgtggtgggcaacttctgcttcctgagaatcagaaccaagagcagcaacaccgccctgctgaacagagaggtgagagacagctacaccctgatcatccaggccaccgagaagaccctggagctggaggccctgaccagagtggtggtgcacatcctggaccagaacgacctgaagcccctgttcagcccccccagctacagagtgaccatcagcgaggacatgcccctgaagagccccatctgcaaggtgaccgccaccgacgccgacctgggccagaacgccgagttctactacgccttcaacaccagaagcgagatgttcgccatccaccccaccagcggcgtggtgaccgtggccggcaagctgaacgtgacctggagaggcaagcacgagctgcaggtgctggccgtggacagaatgagaaagatcagcgagggcaacggcttcggcagcctggccgccctggtggtgcacgtggagcccgccctgagaaagccccccgccatcgccagcgtggtggtgaccccccccgacagcaacgacggcaccacctacgccaccgtgctggtggacgccaacagcagcggcgccgaggtggagagcgtggaggtggtgggcggcgaccccggcaagcacttcaaggccatcaagagctacgccagaagcaacgagttcagcctggtgagcgtgaaggacatcaactggatggagtacctgcacggcttcaacctgagcctgcaggccagaagcggcagcggcccctacttctacagccagatcagaggcttccacctgccccccagcaagctgagcagcctgaagttcgagaaggccgtgtacagagtgcagctgagcgagttcagcccccccggcagcagagtggtgatggtgagagtgacccccgccttccccaacctgcagtacgtgctgaagcccagcagcgagaacgtgggcttcaagctgaacgccagaaccggcctgatcaccaccaccaagctgatggacttccacgacagagcccactaccagctgcacatcagaaccagccccggccaggccagcaccgtggtggtgatcgacatcgtggactgcaacaaccacgcccccctgttcaacagaagcagctacgacggcaccctggacgagaacatcccccccggcaccagcgtgctggccgtgaccgccaccgacagagaccacggcgagaacggctacgtgacctacagcatcgccggccccaaggccctgcccttcagcatcgacccctacctgggcatcatcagcaccagcaagcccatggactacgagctgatgaagagaatctacaccttcagagtgagagccagcgactggggcagccccttcagaagagagaaggaggtgagcatcttcctgcagctgagaaacctgaacgacaaccagcccatgttcgaggaggtgaactgcaccggcagcatcagacaggactggcccgtgggcaagagcatcatgaccatgagcgccatcgacgtggacgagctgcagaacctgaagtacgagatcgtgagcggcaacgagctggagtacttcgacctgaaccacttcagcggcgtgatcagcctgaagagacccttcatcaacctgaccgccggccagcccaccagctacagcctgaagatcaccgccagcgacggcaagaactacgccagccccaccaccctgaacatcaccgtggtgaaggacccccacttcgaggtgcccgtgacctgcgacaagaccggcgtgctgacccagttcaccaagaccatcctgcacttcatcggcctgcagaaccaggagagcagcgacgaggagttcaccagcctgagcacctaccagatcaaccactacaccccccagttcgaggaccacttcccccagagcatcgacgtgctggagagcgtgcccatcaacacccccctggccagactggccgccaccgaccccgacgccggcttcaacggcaagctggtgtacgtgatcgccgacggcaacgaggagggctgcttcgacatcgagctggagaccggcctgctgaccgtggccgcccccctggactacgaggccaccaacttctacatcctgaacgtgaccgtgtacgacctgggcaccccccagaagagcagctggaagctgctgaccgtgaacgtgaaggactggaacgacaacgcccccagattcccccccggcggctaccagctgaccatcagcgaggacaccgaggtgggcaccaccatcgccgagctgaccaccaaggacgccgacagcgaggacaacggcagagtgagatacaccctgctgagccccaccgagaagttcagcctgcaccccctgaccggcgagctggtggtgaccggccacctggacagagagagcgagcccagatacatcctgaaggtggaggccagagaccagcccagcaagggccaccagctgttcagcgtgaccgacctgatcatcaccctggaggacgtgaacgacaacagcccccagtgcatcaccgagcacaacagactgaaggtgcccgaggacctgccccccggcaccgtgctgaccttcctggacgccagcgaccccgacctgggccccgccggcgaggtgagatacgtgctgatggacggcgcccacggcaccttcagagtggacctgatgaccggcgccctgatcctggagagagagctggacttcgagagaagagccggctacaacctgagcctgtgggccagcgacggcggcagacccctggccagaagaaccctgtgccacgtggaggtgatcgtgctggacgtgaacgagaacctgcaccccccccacttcgccagcttcgtgcaccagggccaggtgcaggagaacagccccagcggcacccaggtgatcgtggtggccgcccaggacgacgacagcggcctggacggcgagctgcagtacttcctgagagccggcaccggcctggccgccttcagcatcaaccaggacaccggcatgatccagaccctggcccccctggacagagagttcgccagctactactggctgaccgtgctggccgtggacagaggcagcgtgcccctgagcagcgtgaccgaggtgtacatcgaggtgaccgacgccaacgacaaccccccccagatgagccaggccgtgttctaccccagcatccaggaggacgcccccgtgggcaccagcgtgctgcagctggacgcctgggaccccgacagcagcagcaagggcaagctgaccttcaacatcaccagcggcaactacatgggcttcttcatgatccaccccgtgaccggcctgctgagcaccgcccagcagctggacagagagaacaaggacgagcacatcctggaggtgaccgtgctggacaacggcgagcccagcctgaagagcaccagcagagtggtggtgggcatcctggacgtgaacgacaacccccccatcttcagccacaagctgttcaacgtgagactgcccgagagactgagccccgtgagccccggccccgtgtacagactggtggccagcgacctggacgagggcctgaacggcagagtgacctacagcatcgaggacagcgacgaggaggccttcagcatcgacctggtgaccggcgtggtgagcagcagcagcaccttcaccgccggcgagtacaacatcctgaccatcaaggccaccgacagcggccagccccccctgagcgccagcgtgagactgcacatcgagtggatcccctggcccagacccagcagcatccccctggccttcgacgagacctactacagcttcaccgtgatggagaccgaccccgtgaaccacatggtgggcgtgatcagcgtggagggcagacccggcctgttctggttcaacatcagcggcggcgacaaggacatggacttcgacatcgagaagaccaccggcagcatcgtgatcgccagacccctggacaccagaagaagaagcaactacaacctgaccgtggaggtgaccgacggcagcagaaccatcgccacccaggtgcacatcttcatgatcgccaacatcaaccaccacagaccccagttcctggagaccagatacgaggtgagagtgccccaggacaccgtgcccggcgtggagctgctgagagtgcaggccatcgaccaggacaagggcaagagcctgatctacaccatccacggcagccaggaccccggcagcgccagcctgttccagctggaccccagcagcggcgtgctggtgaccgtgggcaagctggacctgggcagcggccccagccagcacaccctgaccgtgatggtgagagaccaggagatccccatcaagagaaacttcgtgtgggtgaccatccacgtggaggacggcaacctgcacccccccagattcacccagctgcactacgaggccagcgtgcccgacaccatcgcccccggcaccgagctgctgcaggtgagagccatggacgccgacagaggcgtgaacgccgaggtgcactacagcctgctgaagggcaacagcgagggcttcttcaacatcaacgccctgctgggcatcatcaccctggcccagaagctggaccaggccaaccacgccccccacaccctgaccgtgaaggccgaggaccagggcagcccccagtggcacgacctggccaccgtgatcatccacgtgtaccccagcgacagaagcgcccccatcttcagcaagagcgagtacttcgtggagatccccgagagcatccccgtgggcagccccatcctgctggtgagcgccatgagccccagcgaggtgacctacgagctgagagagggcaacaaggacggcgtgttcagcatgaacagctacagcggcctgatcagcacccagaagaagctggaccacgagaagatcagcagctaccagctgaagatcagaggcagcaacatggccggcgccttcaccgacgtgatggtggtggtggacatcatcgacgagaacgacaacgcccccatgttcctgaagagcaccttcgtgggccagatcagcgaggccgcccccctgtacagcatgatcatggacaagaacaacaaccccttcgtgatccacgccagcgacagcgacaaggaggccaacagcctgctggtgtacaagatcctggagcccgaggccctgaagttcttcaagatcgaccccagcatgggcaccctgaccatcgtgagcgagatggactacgagagcatgcccagcttccagttctgcgtgtacgtgcacgaccagggcagccccgtgctgttcgcccccagacccgcccaggtgatcatccacgtgagagacgtgaacgacagcccccccagattcagcgagcagatctacgaggtggccatcgtgggccccatccaccccggcatggagctgctgatggtgagagccagcgacgaggacagcgaggtgaactacagcatcaagaccggcaacgccgacgaggccgtgaccatccaccccgtgaccggcagcatcagcgtgctgaaccccgccttcctgggcctgagcagaaagctgaccatcagagccagcgacggcctgtaccaggacaccgccctggtgaagatcagcctgacccaggtgctggacaagagcctgcagttcgaccaggacgtgtactgggccgccgtgaaggagaacctgcaggacagaaaggccctggtgatcctgggcgcccagggcaaccacctgaacgacaccctgagctacttcctgctgaacggcaccgacatgttccacatggtgcagagcgccggcgtgctgcagaccagaggcgtggccttcgacagagagcagcaggacacccacgagctggccgtggaggtgagagacaacagaaccccccagagagtggcccagggcctggtgagagtgagcatcgaggacgtgaacgacaacccccccaagttcaagcacctgccctactacaccatcatccaggacggcaccgagcccggcgacgtgctgttccaggtgagcgccaccgacgaggacctgggcaccaacggcgccgtgacctacgagttcgccgaggactacacctacttcagaatcgacccctacctgggcgacatcagcctgaagaagcccttcgactaccaggccctgaacaagtaccacctgaaggtgatcgccagagacggcggcacccccagcctgcagagcgaggaggaggtgctggtgaccgtgagaaacaagagcaaccccctgttccagagcccctactacaaggtgagagtgcccgagaacatcaccctgtacacccccatcctgcacacccaggccagaagccccgagggcctgagactgatctacaacatcgtggaggaggagcccctgatgctgttcaccaccgacttcaagaccggcgtgctgaccgtgaccggccccctggactacgagagcaagaccaagcacgtgttcaccgtgagagccaccgacaccgccctgggcagcttcagcgaggccaccgtggaggtgctggtggaggacgtgaacgacaacccccccaccttcagccagctggtgtacaccaccagcatcagcgagggcctgcccgcccagacccccgtgatccagctgctggccagcgaccaggacagcggcagaaacagagacgtgagctaccagatcgtggaggacggcagcgacgtgagcaagttcttccagatcaacggcagcaccggcgagatgagcaccgtgcaggagctggactacgaggcccagcagcacttccacgtgaaggtgagagccatggacaagggcgacccccccctgaccggcgagaccctggtggtggtgaacgtgagcgacatcaacgacaacccccccgagttcagacagccccagtacgaggccaacgtgagcgagctggccacctgcggccacctggtgctgaaggtgcaggccatcgaccccgacagcagagacaccagcagactggagtacctgatcctgagcggcaaccaggacagacacttcttcatcaacagcagcagcggcatcatcagcatgttcaacctgtgcaagaagcacctggacagcagctacaacctgagagtgggcgccagcgacggcgtgttcagagccaccgtgcccgtgtacatcaacaccaccaacgccaacaagtacagccccgagttccagcagcacctgtacgaggccgagctggccgagaacgccatggtgggcaccaaggtgatcgacctgctggccatcgacaaggacagcggcccctacggcaccatcgactacaccatcatcaacaagctggccagcgagaagttcagcatcaaccccaacggccagatcgccaccctgcagaagctggacagagagaacagcaccgagagagtgatcgccatcaaggtgatggccagagacggcggcggcagagtggccttctgcaccgtgaagatcatcctgaccgacgagaacgacaaccccccccagttcaaggccagcgagtacaccgtgagcatccagagcaacgtgagcaaggacagccccgtgatccaggtgctggcctacgacgccgacgagggccagaacgccgacgtgacctacagcgtgaaccccgaggacctggtgaaggacgtgatcgagatcaaccccgtgaccggcgtggtgaaggtgaaggacagcctggtgggcctggagaaccagaccctggacttcttcatcaaggcccaggacggcggccccccccactggaacagcctggtgcccgtgagactgcaggtggtgcccaagaaggtgagcctgcccaagttcagcgagcccctgtacaccttcagcgcccccgaggacctgcccgagggcagcgagatcggcatcgtgaaggccgtggccgcccaggaccccgtgatctacagcctggtgagaggcaccacccccgagagcaacaaggacggcgtgttcagcctggaccccgacaccggcgtgatcaaggtgagaaagcccatggaccacgagagcaccaagctgtaccagatcgacgtgatggcccactgcctgcagaacaccgacgtggtgagcctggtgagcgtgaacatccaggtgggcgacgtgaacgacaacagacccgtgttcgaggccgacccctacaaggccgtgctgaccgagaacatgcccgtgggcaccagcgtgatccaggtgaccgccatcgacaaggacaccggcagagacggccaggtgagctacagactgagcgccgaccccggcagcaacgtgcacgagctgttcgccatcgacagcgagagcggctggatcaccaccctgcaggagctggactgcgagacctgccagacctaccacttccacgtggtggcctacgaccacggccagaccatccagctgagcagccaggccctggtgcaggtgagcatcaccgacgagaacgacaacgcccccagattcgccagcgaggagtacagaggcagcgtggtggagaacagcgagcccggcgagctggtggccaccctgaagaccctggacgccgacatcagcgagcagaacagacaggtgacctgctacatcaccgagggcgaccccctgggccagttcggcatcagccaggtgggcgacgagtggagaatcagcagcagaaagaccctggacagagagcacaccgccaagtacctgctgagagtgaccgccagcgacggcaagttccaggccagcgtgaccgtggagatcttcgtgctggacgtgaacgacaacagcccccagtgcagccagctgctgtacaccggcaaggtgcacgaggacgtgttccccggccacttcatcctgaaggtgagcgccaccgacctggacaccgacaccaacgcccagatcacctacagcctgcacggccccggcgcccacgagttcaagctggacccccacaccggcgagctgaccaccctgaccgccctggacagagagagaaaggacgtgttcaacctggtggccaaggccaccgacggcggcggcagaagctgccaggccgacatcaccctgcacgtggaggacgtgaacgacaacgcccccagattcttccccagccactgcgccgtggccgtgttcgacaacaccaccgtgaagacccccgtggccgtggtgttcgccagagaccccgaccagggcgccaacgcccaggtggtgtacagcctgcccgacagcgccgagggccacttcagcatcgacgccaccaccggcgtgatcagactggagaagcccctgcaggtgagaccccaggcccccctggagctgaccgtgagagccagcgacctgggcacccccatccccctgagcaccctgggcaccgtgaccgtgagcgtggtgggcctggaggactacctgcccgtgttcctgaacaccgagcacagcgtgcaggtgcccgaggacgccccccccggcaccgaggtgctgcagctggccaccctgaccagacccggcgccgagaagaccggctacagagtggtgagcggcaacgagcagggcagattcagactggacgccagaaccggcatcctgtacgtgaacgccagcctggacttcgagaccagccccaagtacttcctgagcatcgagtgcagcagaaagagcagcagcagcctgagcgacgtgaccaccgtgatggtgaacatcaccgacgtgaacgagcacagaccccagttcccccaggacccctacagcaccagagtgctggagaacgccctggtgggcgacgtgatcctgaccgtgagcgccaccgacgaggacggccccctgaacagcgacatcacctacagcctgatcggcggcaaccagctgggccacttcaccatccaccccaagaagggcgagctgcaggtggccaaggccctggacagagagcaggccagcagctacagcctgaagctgagagccaccgacagcggccagccccccctgcacgaggacaccgacatcgccatccaggtggccgacgtgaacgacaacccccccagattcttccagctgaactacagcaccaccgtgcaggagaacagccccatcggcagcaaggtgctgcagctgatcctgagcgaccccgacagccccgagaacggccccccctacagcttcagaatcaccaagggcaacaacggcagcgccttcagagtgacccccgacggctggctggtgaccgccgagggcctgagcagaagagcccaggagtggtaccagctgcagatccaggccagcgacagcggcatcccccccctgagcagcctgaccagcgtgagagtgcacgtgaccgagcagagccactacgcccccagcgccctgcccctggagatcttcatcaccgtgggcgaggacgagttccagggcggcatggtgggcaagatccacgccaccgacagagacccccaggacaccctgacctacagcctggccgaggaggagaccctgggcagacacttcagcgtgggcgcccccgacggcaagatcatcgccgcccagggcctgcccagaggccactacagcttcaacgtgaccgtgagcgacggcaccttcaccaccaccgccggcgtgcacgtgtacgtgtggcacgtgggccaggaggccctgcagcaggccatgtggatgggcttctaccagctgacccccgaggagctggtgagcgaccactggagaaacctgcagagattcctgagccacaagctggacatcaagagagccaacatccacctggccagcctgcagcccgccgaggccgtggccggcgtggacgtgctgctggtgttcgagggccacagcggcaccttctacgagttccaggagctggccagcatcatcacccacagcgccaaggagatggagcacagcgtgggcgtgcagatgagaagcgccatgcccatggtgccctgccagggccccacctgccagggccagatctgccacaacaccgtgcacctggaccccaaggtgggccccacctacagcaccgccagactgagcatcctgacccccagacaccacctgcagagaagctgcagctgcaacggcaccgccaccagattcagcggccagagctacgtgagatacagagcccccgccgccagaaactggcacatccacttctacctgaagaccctgcagccccaggccatcctgctgttcaccaacgagaccgccagcgtgagcctgaagctggccagcggcgtgccccagctggagtaccactgcctgggcggcttctacggcaacctgagcagccagagacacgtgaacgaccacgagtggcacagcatcctggtggaggagatggacgccagcatcagactgatggtggacagcatgggcaacaccagcctggtggtgcccgagaactgcagaggcctgagacccgagagacacctgctgctgggcggcctgatcctgctgcacagcagcagcaacgtgagccagggcttcgagggctgcctggacgccgtggtggtgaacgaggaggccctggacctgctggcccccggcaagaccgtggccggcctgctggagacccaggccctgacccagtgctgcctgcacagcgactactgcagccagaacacctgcctgaacggcggcaagtgcagctggacccacggcgccggctacgtgtgcaagtgccccccccagttcagcggcaagcactgcgagcagggcagagagaactgcaccttcgccccctgcctggagggcggcacctgcatcctgagccccaagggcgccagctgcaactgcccccacccctacaccggcgacagatgcgagatggaggccagaggctgcagcgagggccactgcctggtgacccccgagatccagagaggcgactggggccagcaggagctgctgatcatcaccgtggccgtggccttcatcatcatcagcaccgtgggcctgctgttctactgcagaagatgcaagagccacaagcccgtggccatggaggaccccgacctgctggccagaagcgtgggcgtggacacccaggccatgcccgccatcgagctgaaccccctgagcgccagcagctgcaacaacctgaaccagcccgagcccagcaaggccagcgtgcccaacgagctggtgaccttcggccccaacagcaagcagagacccgtggtgtgcagcgtgccccccagactgccccccgccgccgtgcccagccacagcgacaacgagcccgtgatcaagagaacctggagcagcgaggagatggtgtaccccggcggcgccatggtgtggccccccacctacagcagaaacgagagatgggagtacccccacagcgaggtgacccagggccccctgccccccagcgcccacagacacagcacccccgtggtgatgcccgagcccaacggcctgtacggcggcttccccttccccctggagatggagaacaagagagcccccctgccccccagatacagcaaccagaacctggaggacctgatgcccagcagaccccccagccccagagagagactggtggccccctgcctgaacgagtacaccgccatcagctactaccacagccagttcagacagggcggcggcggcccctgcctggccgacggcggctacaagggcgtgggcatgagactgagcagagccggccccagctacgccgtgtgcgaggtggagggcgcccccctggccggccagggccagcccagagtgccccccaactacgagggcagcgacatggtggagagcgactacggcagctgcgaggaggtgatgttctag

SEQ ID NO: 333170 - protein, 59 aa, Artificial Sequence
  derived and/or modified sequence
MAEGEITTFTALTEKFNLPPGNYKKPKLLYCSNGGHFLRILPDGTVDGTRDRSDQHNTK

SEQ ID NO: 333171 - DNA, 126 bp, Artificial Sequence
  derived and/or modified sequence
atggccgagggcgagatcaccaccttcaccgccctgaccgagaagttcaacctgccccccggcaactacaagaagcccaagctgctgtactgcagcaacggcggccacttcctgagaatcctgtag

SEQ ID NO: 333172 - DNA, 126 bp, Artificial Sequence
  derived and/or modified sequence
atggccgagggagagatcacaacattcaccgctctgactgagaaattcaacttaccccccggaaactacaagaaacctaagctgctgtattgttcaaatggcggccactttctgcgaattctgtag

SEQ ID NO: 333173 - DNA, 550 bp, Artificial Sequence
  derived and/or modified sequence
agagagccgggctactctgagaagaagacaccaagtggattctgcttcccctgggacagcactgagcgagtgtggagagaggtacagccctcggcctacaagctctttagagcacaattaaagaagatcaggtctggctgttgctcggcttcctttctcgttgtgactatgagagggaacacagagttgtgtggactcagtcatggcaattaccctcttctttgtcatcacttcttcctgaaatacctgagagaagacaaagtgagtggacataggaagaagatggccatctactagccaaggagagaggcttggaacaagtccttctttcatagcctcagaaggaaccaaccctgctgacaccttgatcttggacttccagccttcaacacttcttgaaagcgccacaagcagcagctgctgagccatggctgaaggggaaatcaccaccttcacagccctgaccgagaagtttaatctgcctccagggaattacaagaagcccaaactcctctactgtagcaacgggggccacttcctgaggatcctt

SEQ ID NO: 333174 - DNA, 126 bp, Artificial Sequence
  derived and/or modified sequence
atggccgagggggagatcaccaccttcaccgccctgacagagaagttcaacctgcccccaggcaactacaagaagcccaagctgctgtactgcagcaatggaggccacttcctgcgcatcctgtag

SEQ ID NO: 333175 - DNA, 126 bp, Artificial Sequence
  derived and/or modified sequence
atggccgagggcgagatcaccaccttcaccgccctgaccgagaagttcaatctgcctccgggcaactataagaagcccaagctgctatattgtagcaatggggggcacttccttagaattttgtag

SEQ ID NO: 333176 - DNA, 126 bp, Artificial Sequence
  derived and/or modified sequence
atggccgagggagaaatcacaactttcactgccctgactgagaagtttaatttacccccagggaactacaaaaaacccaaactcctgtactgctccaacggcggacacttccttcgcattctgtag

SEQ ID NO: 333177 - protein, 611 aa, Artificial Sequence [sequence omitted]

SEQ ID NO: 333178 - protein, 93 aa, Artificial Sequence
  derived and/or modified sequence
MKEQEKGEGSDSKESPKTKSDESGEEKNGDEDCQRGGQKKKGNKHKWVPLQIDMKPEVPREKLASRPTRPPEPRHIPANRGEIKGSESATYVP

SEQ ID NO: 333179 - DNA, 282 bp, Artificial Sequence
  derived and/or modified sequence
atgaaagagcaggaaaaaggtgaaggaagtgacagcaaggaatcgcccaagactaagagcgacgaaagtggggaggaaaagaacggggacgaggactgtcagaggggtgggcagaaaaagaaggggaataaacataagtgggtgccactgcagatcgatatgaagcccgaggttcccagggagaagttagccagcagaccaacccgccctccggaaccacgccatatccccgccaaccgtggcgaaatcaaggggagcgagagcgcaacgtacgtgccatag

SEQ ID NO: 333180 - DNA, 282 bp, Artificial Sequence
  derived and/or modified sequence
atgaaggagcaggagaagggggagggcagtgacagcaaggagagccccaagaccaagagtgatgaaagtggagaggagaagaatggagatgaggactgccagaggggcggccagaagaagaagggcaacaagcacaagtgggtgcccctgcagattgacatgaagccagaggtgccccgggagaagctggccagccggcccacccggcccccagagcccaggcacatcccagccaacagaggagagatcaagggcagcgagagcgccacctacgtgccctag

SEQ ID NO: 333181 - DNA, 282 bp, Artificial Sequence
  derived and/or modified sequence
atgaaggagcaggagaagggcgagggcagcgacagcaaggagagccccaagactaaaagtgacgagtcaggagaggagaagaatggggacgaggactgtcagcgcgggggtcaaaaaaaaaaaggcaacaaacacaaatgggtgcccctccagatcgatatgaagcccgaggttcccagagagaaactggcttctcggcctacacgccctcctgagcccaggcacatcccagcaaatagaggggaaattaaaggaagtgaaagcgccacctatgtcccgtag

SEQ ID NO: 333182 - DNA, 282 bp, Artificial Sequence
  derived and/or modified sequence
atgaaggagcaggaaaagggggagggttccgactcaaaggagtccccgaagaccaagtcagatgagagcggcgaggagaaaaatggggacgaggactgtcagagagggggtcagaaaaagaagggaaacaaacataaatgggtgcccctgcaaatcgacatgaagccagaagttcccagagagaagctggccagtcgcccaactaggcctcccgaacctaggcatatccccgctaacaggggtgaaattaaaggcagcgagtctgctacctatgtgccttag

SEQ ID NO: 333183 - DNA, 282 bp, Artificial Sequence
  derived and/or modified sequence
atgaaggagcaggagaagggcgagggcagcgacagcaaggagagccccaagaccaagagcgacgagagcggcgaggagaagaacggcgacgaggactgccagagaggcggccagaagaagaagggcaacaagcacaagtgggtgcccctgcagatcgacatgaagcccgaggtgcccagagagaagctggccagcagacccaccagaccccccgagcccagacacatccccgccaacagaggcgagatcaagggcagcgagagcgccacctacgtgccctag

SEQ ID NO: 333184 - protein, 345 aa, Artificial Sequence
  derived and/or modified sequence
MTLLEVPFARYLAMNKVKKMKRYHVGKVWRRESPTIVQGRYREFCQCDFDIAGQFDPMIPDAECLKIMCEILSGLQLGDFLIKMAWKDVRHEMVVKKGLAPEVADRIGDYVQCHGGVSLVEQMFQDPRLSQNKQALEGLGDLKLLFEYLTLFGIADKISFDLSLARGLDYYTGVIYEAVLLQTPTQAGEEPLNVGSVAAGGRYDGLVGMFDPKGHKVPCVGLSIGVERIFYIVEQRMKTKGEKVRTTETQVFVATPQKNFLQERLKLIAELWDSGIKAEMLYKNNPKLLTQLHYCESTGIPLVVIIGEQELKEGVIKIRSVASREEVAIKRENFVAEIQKRLSES

SEQ ID NO: 333185 - protein, 334 aa, Artificial Sequence
  derived and/or modified sequence
MPLLGLLPRRAWASLLSQLLRPPCASCTGAVRCQSQDFDIAGQFDPMIPDAECLKIMCEILSGLQLGDFLIKMAWKDVRHEMVVKKGLAPEVADRIGDYVQCHGGVSLVEQMFQDPRLSQNKQALEGLGDLKLLFEYLTLFGIADKISFDLSLARGLDYYTGVIYEAVLLQTPTQAGEEPLNVGSVAAGGRYDGLVGMFDPKGHKVPCVGLSIGVERIFYIVEQRMKTKGEKVRTTETQVFVATPQKNFLQERLKLIAELWDSGIKAEMLYKNNPKLLTQLHYCESTGIPLVVIIGEQELKEGVIKIRSVASREEVAIKRENFVAEIQKRLSES

SEQ ID NO: 333186 - DNA, 1038 bp, Artificial Sequence
  derived and/or modified sequence
atgacgctgctcgaagtgccatttgcgcggtacttggccatgaacaaggtcaagaaaatgaaacgataccacgtcggtaaagtctggcggagggaatcacctacgattgttcaaggccgctatagagaattttgccaatgtgactttgacattgctggacagtttgatccgatgatcccagacgctgagtgtctaaagatcatgtgtgagattctgagcggactgcaactgggagacttcctgataaagatggcctggaaggatgtgagacacgagatggttgttaagaagggactcgcccctgaagtggccgaccggatcggcgactacgtccagtgccatgggggtgtaagcctagtggagcagatgtttcaagacccacgtctgtctcagaataagcaggcactggagggccttggggacctgaaactgctgtttgagtacctcacgctgtttggaatcgccgacaaaataagttttgacctgagccttgcgagagggctagactactacacaggcgttatctacgaggctgtcttgctgcagacccctacccaggccggggaagagcccctcaacgtgggatctgtggccgcgggaggccggtacgacgggttggtgggcatgtttgacccaaagggccacaaggtgccctgtgtgggtctttctattggggttgagcgaattttttacatcgtggagcagcgcatgaagactaaaggagaaaaggttcgcacgacagaaactcaggtgtttgtggctaccccgcaaaaaaacttcctacaggagagattgaagctaatcgccgaactctgggattcaggtataaaagccgagatgttgtataaaaacaatcccaaactgctgacccagctgcactattgcgagagcacgggaattcctttagtggtgattatcggcgaacaggagctcaaggagggcgttatcaagatccgctcagttgcttcaagagaagaggtggcaatcaaaagagaaaacttcgttgccgagattcaaaagcgtctctctgaatcatag

SEQ ID NO: 333187 - DNA, 1005 bp, Artificial Sequence
  derived and/or modified sequence
atgccactactaggcctcctgccccggagagcctgggcatcactcctgtcccagctgcttagacctccgtgtgcttcttgcacaggggccgtcagatgccagagtcaggattttgatatcgccgggcaatttgatccgatgatccccgacgccgagtgcctcaagattatgtgcgagattctcagcgggctccagttgggcgattttctgattaagatggcatggaaggatgtccggcatgagatggtcgtcaagaagggcctggctcctgaggtggccgacagaattggagattatgtccagtgccatggcggggtctcattggttgaacagatgttccaggacccacggctctcgcagaacaaacaggccctggaagggctgggcgacttaaagctactctttgaataccttactctttttggaattgcagacaaaataagtttcgacctttccctggctagaggacttgactactataccggggtcatctatgaagcggttcttctgcagacacctacccaggccggtgaggaacccctaaacgtaggctctgtggcagccggcggtcggtatgacggattagtggggatgtttgatcctaagggccataaagtgccttgtgtgggtctgtcaattggggttgagagaatcttctacatcgtggaacagaggatgaagacaaagggggagaaagtgagaacgacagagactcaggtctttgttgccacacctcaaaaaaattttctccaggaaaggttaaagctgatagctgagctttgggactcaggcatcaaggcggagatgctgtacaaaaacaacccgaaactgctcacgcagctccactattgcgagtcaaccggtattcctctggtcgtgatcatcggggaacaagagctcaaggagggcgtgattaagattcgtagcgtggctagtagggaagaggtggccatcaagagggaaaacttcgtagcggagatccagaagcgactatctgagtcgtag

SEQ ID NO: 333188 - DNA, 1442 bp, Artificial Sequence
  derived and/or modified sequence
attcttgatttggttatcagctgctttaaacgtcatggagcaaaggggatggacaccccagcatttgagctgaaggaaaccctgactgagaagtatggagaggactctgggctcatgtatgatctgaaggatcaaggtggagagctgttgtccctccgctatgaccttacttgaggttccctttgctcgttatctggccatgaataaggtgaagaagatgaaacgttatcatgttggaaaggtgtggcggcgagagagcccaaccatagtccaaggccgttatagggagttctgccagtgtgattttgacattgctggtcagtttgaccctatgatccccgatgcagagtgtttgaagatcatgtgtgaaatcctaagtggattgcagttgggagactttctcattaagatggcttggaaagatgtgagacatgagatggtggtgaagaaaggcctggctcctgaggtggctgatcgaattggggactatgtccagtgtcatggtggggtatccctagtagagcaaatgtttcaggatcccagactatcccagaacaagcaggccctggagggcctgggagacctaaagctgctatttgaatacctgactttatttggaattgctgataagatctcctttgacctcagcctggctcggggcctagactactatacaggagtgatctatgaagcagtgctgctgcagaccccaactcaggctggggaggagcccctgaatgtgggcagtgtggctgctggtgggcgctatgatgggctggtgggcatgtttgaccccaagggccacaaggtgccatgtgtgggactcagcattggggttgagcgaatcttctacattgtggagcagaggatgaagaccaaaggtgagaaggtgcggactacagagactcaagtgtttgtggccacaccacagaagaactttctccaagaacggttgaagcttattgcagagctttgggattctggaatcaaggcagagatgctatacaagaacaaccccaaactattaacccagctgcactattgtgagagcacaggcattccactggtggtcattattggtgagcaagaactgaaagaaggggtcatcaagatccgttcagtggccagcagagaggaggtggccattaaacgggaaaattttgtggctgaaattcagaagcgactgtctgagtcttgatccttgcctgattcccatctgctgctctttgtagaaaaggtttcctctagaactgaattcctctggaattgagtgatggacttcacaacaactagccaggaagggtgacaagtaccttctgcctcctccattcttcctgggtgcagaactgtagaagaccctgaggactcctgggctagtgtgagcagctattctgcatgggtgcagatggctggatgtgaaagagacatgctctagctgcaga

SEQ ID NO: 333189 - DNA, 1426 bp, Artificial Sequence
  derived and/or modified sequence
gttcctgtcccggaaagccggcgtcctgccgcgcgatgcccctgctcggacttcttcccaggagggcctgggcttcgctgctcagccagctcctgcgaccgccctgcgcttcgtgcaccggggcggtccgttgccaaagccaggattttgacattgctggtcagtttgaccctatgatccccgatgcagagtgtttgaagatcatgtgtgaaatcctaagtggattgcagttgggagactttctcattaagatggcttggaaagatgtgagacatgagatggtggtgaagaaaggcctggctcctgaggtggctgatcgaattggggactatgtccagtgtcatggtggggtatccctagtagagcaaatgtttcaggatcccagactatcccagaacaagcaggccctggagggcctgggagacctaaagctgctatttgaatacctgactttatttggaattgctgataagatctcctttgacctcagcctggctcggggcctagactactatacaggagtgatctatgaagcagtgctgctgcagaccccaactcaggctggggaggagcccctgaatgtgggcagtgtggctgctggtgggcgctatgatgggctggtgggcatgtttgaccccaagggccacaaggtgccatgtgtgggactcagcattggggttgagcgaatcttctacattgtggagcagaggatgaagaccaaaggtgagaaggtgcggactacagagactcaagtgtttgtggccacaccacagaagaactttctccaagaacggttgaagcttattgcagagctttgggattctggaatcaaggcagagatgctatacaagaacaaccccaaactattaacccagctgcactattgtgagagcacaggcattccactggtggtcattattggtgagcaagaactgaaagaaggggtcatcaagatccgttcagtggccagcagagaggaggtggccattaaacgggaaaattttgtggctgaaattcagaagcgactgtctgagtcttgatccttgcctgattcccatctgctgctctttgtagaaaaggtttcctctagaactgaattcctctggaattgagtgatggacttcacaacaactagccaggaagggtgacaagtaccttctgcctcctccattcttcctgggtgcagaactgtagaagaccctgaggactcctgggctagtgtgagcagctattctgcatgggtgcagatggctggatgtgaaagagacatgctctagctgcagaggcaaatttgaagtgccacggaacgttgtcaagaggtagtgagattgttgctgtgagcaaggctctgggagagtcacctcaggctcaggattctgaaccattgagatcagaaaccagatacttagccttctactgtagctac

SEQ ID NO: 333190 - DNA, 1038 bp, Artificial Sequence
  derived and/or modified sequence
atgaccctgctggaggtgccctttgcccgctacctggccatgaacaaggtgaagaagatgaagcgctaccacgtgggcaaggtgtggaggcgggagagccccaccatcgtgcagggccgctaccgggagttctgccagtgtgactttgatattgctggccagtttgaccccatgatcccagatgctgaatgtctgaagatcatgtgtgagatcctgagcggcctgcagctgggggacttcctgatcaagatggcctggaaggatgtgagacatgagatggtggtgaagaagggcctggcccctgaggtggccgacagaattggagactatgtgcagtgccacggcggcgtgtccctggtggagcagatgttccaggacccccggctgagccagaacaagcaggccctggagggcctgggggacctgaagctgctgtttgagtacctgaccctgtttggaattgctgacaagatcagctttgacctgagcctggcccggggcctggactactacacaggagtcatctatgaggccgtgctgctgcagacccccacccaggccggggaggagcccctgaatgtgggctctgtggccgccggcggccgctatgatggcctggtgggcatgtttgaccccaagggccacaaggtgccctgtgtgggcctgagcattggagtggagcgcatcttctacatcgtggagcagaggatgaagaccaagggggagaaggtgaggaccacagagacccaggtgtttgtggccaccccccagaagaacttcctgcaggagcggctgaagctgattgctgagctgtgggacagcggcatcaaggccgagatgctgtacaagaacaaccccaagctgctgacccagctgcactactgtgagagcacaggcatccccctggtggtgatcatcggggagcaggagctgaaggagggcgtcatcaagatccgctctgtggccagccgggaggaggtggccatcaagcgggagaactttgtggccgagatccagaagaggctgtctgagagctag

SEQ ID NO: 333191 - DNA, 1005 bp, Artificial Sequence
  derived and/or modified sequence
atgcccctgctgggcctgctgccccggcgggcctgggccagcctgctgagccagctgctgcggcccccctgtgccagctgcaccggggctgtgcgctgccagagccaggactttgatattgctggccagtttgaccccatgatcccagatgctgagtgcctgaagatcatgtgtgagatcctgagcggcctgcagctgggggacttcctgatcaagatggcctggaaggatgtgagacatgagatggtggtgaagaagggcctggcccctgaggtggccgaccgcatcggggactatgtgcagtgccacggcggcgtgtccctggtggagcagatgttccaggacccccggctgagccagaacaagcaggccctggagggcctgggggacctgaagctgctgtttgagtacctgaccctgtttggaattgctgacaagatcagctttgacctgagcctggcccggggcctggactactacacaggagtcatctatgaagctgtgctgctgcagacccccacccaggccggggaggagcccctgaatgtgggctctgtggccgccggcggccgctatgatggcctggtgggcatgtttgaccccaagggccacaaggtgccctgtgtgggcctgagcattggagtggagcgcatcttctacatcgtggagcagaggatgaagaccaagggggagaaggtgaggaccacagagacccaggtgtttgtggccaccccccagaagaacttcctgcaggagcggctgaagctgattgctgagctgtgggacagcggcatcaaggccgagatgctgtacaagaacaaccccaagctgctgacccagctgcactactgtgagagcacaggcatccccctggtggtgatcattggagagcaggagctgaaggagggcgtcatcaagatccgctctgtggccagccgggaggaggtggccatcaagagagaaaattttgtggccgagatccagaagaggctgtctgagagctag

SEQ ID NO: 333192 - DNA, 1038 bp, Artificial Sequence
  derived and/or modified sequence
atgaccctgctggaggtgcccttcgcccggtacctggccatgaacaaagtgaaaaagatgaaacggtaccatgttgggaaggtttggcgcagagagagcccaaccattgtgcaaggccgttatagagaattttgtcaatgcgacttcgacatcgccggtcaatttgatccgatgatccctgatgctgaatgcctgaagatcatgtgcgaaatcctttccggcctgcagctcggggacttcctgataaagatggcatggaaggacgtgcggcatgagatggtggtgaagaagggcctggcaccagaggtggcggacaggatcggggattatgtgcagtgtcacgggggagtctcactggttgagcagatgtttcaggatccacgcttgagtcagaacaaacaggcattggagggtctcggcgacctcaaactgctcttcgagtacctaactctcttcggaatagcggataagattagctttgacctaagtctggccagagggttggattattacacaggcgtgatctacgaagctgttctgctgcaaacccctacacaagccggcgaggagccacttaatgtcggctcagtcgctgctgggggcaggtacgatggcctggtcggaatgttcgatcctaagggacataaggttccttgcgtcggcctcagcattggtgttgaacgaatcttttatatcgtggagcagcggatgaaaacaaaaggagagaaggttcgaaccacagagacacaagtatttgttgcaacacctcagaaaaattttctacaagagcggctgaaactcatagccgaattgtgggacagcggtatcaaagcagaaatgttatacaagaataaccctaaacttctgactcaactccactactgtgagtctacaggtattcccttggtggtcattatcggagagcaggaactgaaagaaggagtcataaaaatacgaagcgttgcaagcagggaagaggtcgctatcaagcgagaaaacttcgtcgccgagatccagaagcggctgagtgagagttag

SEQ ID NO: 333193 - DNA, 1005 bp, Artificial Sequence
  derived and/or modified sequence
atgcccctgctgggcctgctgccccggcgggcctgggccagcctgctgtctcagctgcttaggcctccctgcgcctcctgtactggggcagtgcgctgccagagtcaagatttcgatatagcgggccagtttgatccgatgatacccgatgctgaatgtctgaaaatcatgtgcgagattttgagtggtcttcagctgggagattttctgatcaagatggcatggaaagacgtgcgccacgagatggttgttaagaaaggtttagcccccgaggttgctgacagaattggcgactatgtacaatgtcatggcggcgtgagcttggtggaacagatgttccaggaccctagactatcacagaataagcaggcactcgagggtctgggcgacctgaaactactgtttgagtacctcaccttgtttgggatagcagacaaaatcagttttgatctttcactggcccgggggttggactattacactggtgtgatttacgaggcggtgttgctgcagacacctacacaggctggagaggaacctctgaacgtcggatcagtagcggcaggtggacgatacgacggcctagtgggcatgttcgaccccaaggggcataaggtcccctgcgtcggactgtctatcggcgtggagcgcattttttacatcgtcgagcagcggatgaaaacaaagggcgagaaggtgagaacaacagaaactcaggtgtttgttgccacaccacaaaagaattttctccaggagcgcctgaagctcatcgcagagctttgggattctggcattaaggcggaaatgctctataaaaataatccaaagctgctcactcagttacactattgtgagtcaacaggaattcccctagtagttattattggcgaacaggagctgaaagaaggcgtgattaagatccgtagcgtggcttcccgcgaggaggttgccatcaaaagggagaattttgttgcagaaatccagaagcggctgtctgaaagttag

SEQ ID NO: 333194 - DNA, 1038 bp, Artificial Sequence
  derived and/or modified sequence
atgacgctccttgaagtgccattcgcgcgataccttgccatgaataaggttaagaaaatgaaacggtaccatgtgggcaaagtatggagaagggaatcccctacgattgttcaagggcgatatagggaattttgccagtgcgattttgatatcgccggacagttcgatcccatgatccctgatgctgaatgtttgaagattatgtgcgagatactatccggcctgcagctaggagattttctgataaaaatggcgtggaaagatgtgaggcacgaaatggtagttaaaaaaggccttgctcccgaggtagcagataggataggcgattacgtgcaatgtcacgggggtgtgagcctcgtggaacagatgtttcaggatcctcgcctttcccagaataaacaggcccttgagggcttgggcgatctaaagctgctttttgaatacctgacactgtttggaatcgcagataagatcagcttcgacctgtcactcgctaggggattggactactacacaggcgtcatctatgaagctgtcctgttgcagacaccaactcaggctggggaagagccactgaacgtggggagcgtcgccgctggcggaagatacgacggtcttgtggggatgtttgatcccaaaggtcacaaggtgccctgtgtaggcctatctatcggtgtcgagcgaatcttttatatcgtggaacaaaggatgaaaacgaagggagagaaggtccgcacgacagaaacgcaagtgttcgtggctacgccccagaagaacttcctacaagagcggctgaaactaattgccgaactgtgggactccggtatcaaagccgagatgctttacaaaaacaatccaaagctgctaacccaattacattattgtgaaagtacaggtattccactcgtggtgatcattggggagcaagagctgaaggaaggagtcattaagatccgatctgtggcctccagagaggaggtcgccattaagagggaaaatttcgtggcagaaatccagaaaagactgtccgaaagctag

SEQ ID NO: 333195 - DNA, 1005 bp, Artificial Sequence
  derived and/or modified sequence
atgccactcctgggcctgttacctaggcgagcgtgggctagcctgctctcacaactgttacgcccaccctgtgcaagctgtactggagccgtcaggtgccagagccaggacttcgacatcgctgggcagtttgaccccatgattcccgacgccgagtgtctgaaaattatgtgtgaaatcctatccgggcttcagctgggcgactttctgataaaaatggcatggaaggatgttcggcatgaaatggtcgtcaaaaagggtctggctcctgaagtggctgaccgaatcggagactacgtccagtgtcacgggggtgtgagtctggtcgagcagatgttccaagatcctaggttgagtcaaaacaaacaggccctggagggcctcggcgatttgaaacttctttttgaatacctgactctgttcgggatcgcagacaagattagctttgacctgtcactggcacgaggcttggattactacacgggcgtaatttatgaggcagtgttgctccagaccccaacacaggctggggaagagcccctgaacgtcggatccgtagcagctggcggacgctacgacggcctggtgggaatgtttgaccctaagggccataaggttccttgtgtcgggctctctattggagtcgaacgaattttctatattgtcgagcagaggatgaaaacaaagggcgagaaagtgaggaccacagagacgcaagtctttgtcgcaaccccacagaagaatttccttcaagaaaggctgaagctaatcgcggagctttgggactccgggatcaaagccgagatgctgtataaaaacaatccaaagctgctgacccagctgcattactgtgaaagcaccggaattcctcttgtggttattatcggagaacaggaactaaaggagggggtgatcaagattagatctgtcgcgtctagggaggaggtggccatcaaacgcgagaattttgtggcggagatacagaagcggttgtccgagtcctag

SEQ ID NO: 333196 - DNA, 1038 bp, Artificial Sequence
  derived and/or modified sequence
atgaccctgctggaggtgcccttcgccagatacctggccatgaacaaggtgaagaagatgaagagataccacgtgggcaaggtgtggagaagagagagccccaccatcgtgcagggcagatacagagagttctgccagtgcgacttcgacatcgccggccagttcgaccccatgatccccgacgccgagtgcctgaagatcatgtgcgagatcctgagcggcctgcagctgggcgacttcctgatcaagatggcctggaaggacgtgagacacgagatggtggtgaagaagggcctggcccccgaggtggccgacagaatcggcgactacgtgcagtgccacggcggcgtgagcctggtggagcagatgttccaggaccccagactgagccagaacaagcaggccctggagggcctgggcgacctgaagctgctgttcgagtacctgaccctgttcggcatcgccgacaagatcagcttcgacctgagcctggccagaggcctggactactacaccggcgtgatctacgaggccgtgctgctgcagacccccacccaggccggcgaggagcccctgaacgtgggcagcgtggccgccggcggcagatacgacggcctggtgggcatgttcgaccccaagggccacaaggtgccctgcgtgggcctgagcatcggcgtggagagaatcttctacatcgtggagcagagaatgaagaccaagggcgagaaggtgagaaccaccgagacccaggtgttcgtggccaccccccagaagaacttcctgcaggagagactgaagctgatcgccgagctgtgggacagcggcatcaaggccgagatgctgtacaagaacaaccccaagctgctgacccagctgcactactgcgagagcaccggcatccccctggtggtgatcatcggcgagcaggagctgaaggagggcgtgatcaagatcagaagcgtggccagcagagaggaggtggccatcaagagagagaacttcgtggccgagatccagaagagactgagcgagagctag

SEQ ID NO: 333197 - DNA, 1005 bp, Artificial Sequence
  derived and/or modified sequence
atgcccctgctgggcctgctgcccagaagagcctgggccagcctgctgagccagctgctgagacccccctgcgccagctgcaccggcgccgtgagatgccagagccaggacttcgacatcgccggccagttcgaccccatgatccccgacgccgagtgcctgaagatcatgtgcgagatcctgagcggcctgcagctgggcgacttcctgatcaagatggcctggaaggacgtgagacacgagatggtggtgaagaagggcctggcccccgaggtggccgacagaatcggcgactacgtgcagtgccacggcggcgtgagcctggtggagcagatgttccaggaccccagactgagccagaacaagcaggccctggagggcctgggcgacctgaagctgctgttcgagtacctgaccctgttcggcatcgccgacaagatcagcttcgacctgagcctggccagaggcctggactactacaccggcgtgatctacgaggccgtgctgctgcagacccccacccaggccggcgaggagcccctgaacgtgggcagcgtggccgccggcggcagatacgacggcctggtgggcatgttcgaccccaagggccacaaggtgccctgcgtgggcctgagcatcggcgtggagagaatcttctacatcgtggagcagagaatgaagaccaagggcgagaaggtgagaaccaccgagacccaggtgttcgtggccaccccccagaagaacttcctgcaggagagactgaagctgatcgccgagctgtgggacagcggcatcaaggccgagatgctgtacaagaacaaccccaagctgctgacccagctgcactactgcgagagcaccggcatccccctggtggtgatcatcggcgagcaggagctgaaggagggcgtgatcaagatcagaagcgtggccagcagagaggaggtggccatcaagagagagaacttcgtggccgagatccagaagagactgagcgagagctag

SEQ ID NO: 333198 - DNA, 435 bp, Artificial Sequence
  derived and/or modified sequence
atggacagcaaggagagcctgacccccggcagagaggagaaccccagcagcgtgctggcccaggagagaggcgacgtgatggacttctacaagaccctgagaggcggcgccaccgtgaaggtgagcgccagcagccccagcctggccgtggccagccagagcgacagcaagcagagaagactgctggtggacttccccaagggcagcgtgagcaacgcccagcagcccgacctgagcaaggccgtgagcctgagcatgggcctgtacatgggcgagaccgagaccaaggtgatgggcaacgacctgggcttcccccagcagggccagatcagcctgagcagcggcgagaccgacctgaagctgctggaggagagcatcgccaacctgaacagaagcaccagcgtgcccgagaaccccaagagcagcgccagctag

SEQ ID NO: 333199 - DNA, 438 bp, Artificial Sequence
  derived and/or modified sequence
atggacagcaaggagagcctgacccccggcagagaggagaaccccagcagcgtgctggcccaggagagaggcgacgtgatggacttctacaagaccctgagaggcggcgccaccgtgaaggtgagcgccagcagccccagcctggccgtggccagccagagcgacagcaagcagagaagactgctggtggacttccccaagggcagcgtgagcaacgcccagcagcccgacctgagcaaggccgtgagcctgagcatgggcctgtacatgggcgagaccgagaccaaggtgatgggcaacgacctgggcttcccccagcagggccagatcagcctgagcagcggcgagaccgacctgaagctgctggaggagagcatcgccaacctgaacagaagcaccagcgtgcccgagaaccccaagagcagcgccagcacctag

SEQ ID NO: 333200 - DNA, 435 bp, Artificial Sequence
  derived and/or modified sequence
atggactcaaaggaatcactgactcctggccgcgaggagaacccctctagcgtccttgctcaggaaagaggggacgtcatggatttttataagacgcttaggggtggtgctaccgtcaaagtcagtgccagctcaccctcactggccgtcgccagccagagcgattctaaacagaggcgcctcttggtggactttcccaagggcagtgtcagcaatgcgcagcaacctgacctgagcaaggctgtcagtctgtccatggggctgtatatgggtgaaacggaaactaaggtaatgggcaatgatctgggtttccctcagcagggccaaatttcactgtcctccggcgagaccgaccttaagctgctggaggagagcatcgccaacctcaacaggtctacttcagtgccagaaaaccctaagagctccgcaagttag

SEQ ID NO: 333201 - DNA, 438 bp, Artificial Sequence
  derived and/or modified sequence
atggacagtaaagagagcctaacaccaggaagggaggagaaccctagctccgtgttagctcaggaacggggcgacgtgatggacttttacaagactctcagggggggtgccacggtgaaggtgagcgcaagcagccccagcctcgcggttgcatcccagagcgactccaaacaacggcggctactggtggacttcccgaaggggagcgtgtcaaacgcccagcagcccgatctcagtaaggccgtaagccttagcatgggactctatatgggggagaccgaaactaaggtcatgggcaatgatctggggttcccccaacagggacagattagcctctcctcgggggagactgatctgaaattactcgaagaaagcattgctaatctcaataggtcaacatccgtcccggagaatcctaaaagtagcgccagtacttag

SEQ ID NO: 333202 - DNA, 438 bp, Artificial Sequence
  derived and/or modified sequence
atggatagcaaggagtcattaacgcctgggagagaagaaaatcccagtagcgtgctagcccaggaaagaggagacgtgatggacttctataaaacactgcgcggtggagccactgtcaaagtgagcgcttctagcccaagcctggcggtcgcaagccagtctgattctaagcagaggcgcctccttgtcgatttcccgaaaggtagcgtgagcaacgcccagcaaccagacctgagcaaagctgtgtctctttccatgggcctgtatatgggtgaaactgaaaccaaggttatggggaacgatcttggtttcccacagcagggacagatcagtctctccagcggcgaaactgatctcaaactgctggaggaatctatagccaacctgaaccgtagcaccagcgtgcctgagaacccgaaaagcagcgccagcacgtag

SEQ ID NO: 333203 - DNA, 438 bp, Artificial Sequence
  derived and/or modified sequence
atggacagtaaggagagcttgaccccggggagagaagagaatccttcatcggtgcttgcacaagagcggggtgatgttatggacttttataagactctgcgtgggggggccaccgttaaggtgagtgctagctcaccctccttggccgtggcaagccagtccgattccaaacaacgcaggctccttgttgatttcccaaaaggttctgtttcaaatgcgcaacaaccagatctaagtaaagcagtgtcactctccatggggctttatatgggtgagaccgaaaccaaggtaatgggaaacgatttgggcttccctcagcaaggtcaaatctcactgtcctcgggcgagactgatctaaagttgttggaggagagcatagccaacctgaatcgtagcacctccgtacctgagaacccaaagtccagcgcaagtacttag

SEQ ID NO: 333204 - DNA, 438 bp, Artificial Sequence
  derived and/or modified sequence
atggactccaaggagagtctgaccccgggacgagaggaaaatccttccagcgtcctggcccaggaaagaggggacgttatggacttttacaagacactaaggggaggggccactgtcaaggtgagtgcttccagcccctcactcgctgttgccagccaatctgattcaaaacagcggagactgcttgtggatttccctaagggaagcgtctccaacgcccaacagcccgacctgtcaaaggcagtgtctctgtcaatgggtttgtatatgggagagactgaaacaaaggttatgggtaacgatttggggtttccacagcagggtcagatctcactttcaagcggcgaaactgatctgaaactcctggaggagtcaatagctaatttgaaccggagcacaagcgtccccgagaatcctaagtcctcagcttctacttag

SEQ ID NO: 333205 - DNA, 435 bp, Artificial Sequence
  derived and/or modified sequence
atggacagcaaggagagcctgaccccaggccgggaggagaaccccagctctgtgctggcccaggagagaggagatgtgatggacttctacaagaccctgcggggcggggccaccgtgaaggtgtctgccagcagccccagcctggccgtggccagccagagcgacagcaagcagaggcggctgctggtggacttccccaagggctctgtgtccaatgcccagcagcctgacctgagcaaggctgtgtccctgtccatgggcctgtacatgggagaaacagagaccaaggtgatgggaaatgacctgggcttcccccagcagggccagatcagcctgagcagcggggagacagacctgaagctgctggaggagagcatcgccaacctgaacagaagcacctctgtgcctgagaaccccaagagcagcgccagctag

SEQ ID NO: 333206 - DNA, 438 bp, Artificial Sequence
  derived and/or modified sequence
atggacagcaaggagagcctgaccccaggccgggaggagaaccccagctctgtgctggcccaggagagaggagatgtgatggacttctacaagaccctgcggggcggggccaccgtgaaggtgtctgccagcagccccagcctggccgtggccagccagagcgacagcaagcagaggcggctgctggtggacttccccaagggctctgtgtccaatgcccagcagcctgacctgagcaaggctgtgtccctgtccatgggcctgtacatgggagaaacagagaccaaggtgatgggaaatgacctgggcttcccccagcagggccagatcagcctgagcagcggggagacagacctgaagctgctggaggagagcatcgccaacctgaacagaagcacctctgtgcctgagaaccccaagagcagcgccagcacctag

SEQ ID NO: 333207 - DNA, 435 bp, Artificial Sequence
  derived and/or modified sequence
atggacagcaaggagagcctgacccccggccgggaggagaacccctcctcagtcctagcccaggagaggggcgacgtgatggatttttataagaccctgagaggcggcgctactgtgaaggtgagcgcatcctctccaagcttagcagtggcatcacaatccgactctaagcagcgccgattgctggtcgatttccccaagggatccgtatccaacgcccagcaacccgacctgtcaaaggccgtgtcattatccatgggactgtacatgggcgaaacagaaaccaaagtcatgggcaacgatcttggctttccacaacaggggcaaatcagcttgtcatcaggtgagactgacttaaagttacttgaggaatcgatcgccaatcttaatagatccacctcggtccctgagaatccaaaatcttctgccagctag

SEQ ID NO: 333208 - DNA, 438 bp, Artificial Sequence
  derived and/or modified sequence
atggacagcaaggagagcctgacccccggccgggaggagaacccctcttctgttttggcacaggaaagaggagatgtgatggatttttataagaccctgcggggtggggcaacagtgaaagtgagtgcttcctcacccagtctcgctgtggcttctcagtccgactctaagcagcggcgcctactggtggactttcctaagggttctgtgagcaacgcccaacagcctgacctgtctaaagccgtttccctgagtatgggattgtatatgggcgaaactgaaacgaaagtgatgggaaacgatctgggctttccacagcaggggcagatctctctatcctcgggggagaccgacctgaaactgctagaagaaagcatcgcgaacttgaaccgcagcacgagcgtacccgagaacccgaaaagttccgctagtacgtag

SEQ ID NO: 333209 - DNA, 438 bp, Artificial Sequence
  derived and/or modified sequence
atggacagcaaggagagcctgacccccggccgggaggagaacccctccagcgtattggcccaggagcgcggggacgtgatggatttttataaaacattgcgagggggagcgactgtcaaagtgtctgccagctccccttcgctggctgtcgccagccagagcgattccaagcagcggaggttgcttgtagatttcccaaaagggtcagtgtctaatgcacagcaaccagatctgagcaaggctgtcagcttaagcatgggcctgtatatgggggagacagagaccaaggtcatgggtaatgatctgggattcccccagcaaggacagatttccctatcctctggagaaacggacctgaagctcctagaagaatcgattgcaaatttgaaccgcagcacttcagtacccgaaaatcctaagtcttccgcttctacctag

SEQ ID NO: 333210 - DNA, 438 bp, Artificial Sequence
  derived and/or modified sequence
atggacagcaaggagagcctgacccccggccgggaggagaaccccagctctgttctggcccaggaacgcggcgacgtgatggatttttataaaacactgcggggaggagccacagttaaggtaagcgcctccagtccctctctggccgtcgcttctcagtctgactctaagcaacggcgtctgctggtcgactttcccaaagggagcgtgtctaatgcccagcagccggatctgtctaaggccgtctcgctgagcatggggttatacatgggcgaaacggagacgaaggtcatgggtaacgatctcgggtttccccaacaaggccagatcagcctgagcagtggagaaaccgaccttaagctgctggaagaaagcatcgcaaaccttaaccgttcaacatcggttcccgagaatcctaagagttccgccagcacgtag

SEQ ID NO: 333211 - DNA, 438 bp, Artificial Sequence
  derived and/or modified sequence
atggacagcaaggagagcctgacccccggccgggaggagaacccctctagcgtcctggctcaggagagaggcgatgtgatggacttctataagactctaagaggaggggcgaccgtgaaggtctcggcgtcaagcccatctctcgctgtggcttctcaatcagactcaaaacaacgacggctgctggtggactttcccaagggctccgtatctaacgcgcaacaacccgatctcagtaaagcagtctctctgtctatggggctttacatgggagaaacagaaaccaaggtcatgggtaatgatctcggctttccgcagcaggggcagatttccttgagctctggcgagactgacctgaagctcttagaagagtctattgccaatctgaaccggtcgacctctgtccctgagaatcccaagagtagtgcctccacttag

SEQ ID NO: 333212 - DNA, 585 bp, Artificial Sequence
  derived and/or modified sequence
gtactcaaaggtttggatgtgtgactagctggtaggagggaaatttggaagtaattagggattgagaattctagcatagtatttatcaaatgttatatgtattggttctcagaaaagcaaacagccgtgattgaaaagagttgatattcactgatggactccaaagaatcattaactcctggtagagaagaaaaccccagcagtgtgcttgctcaggagaggggagatgtgatggacttctataaaaccctaagaggaggagctactgtgaaggtttctgcgtcttcaccctcactggctgtcgcttctcaatcagactccaagcagcgaagacttttggttgattttccaaaaggctcagtaagcaatgcgcagcagccagatctgtccaaagcagtttcactctcaatgggactgtatatgggagagacagaaacaaaagtgatgggaaatgacctgggattcccacagcagggccaaatcagcctttcctcgggggaaacagacttaaagcttttggaagaaagcattgcaaacctcaataggtcgaccagtgttccagagaaccccaagagttcagcatcc

SEQ ID NO: 333213 - DNA, 498 bp, Artificial Sequence
  derived and/or modified sequence
aatccagctcgctggaggttttgcatttggcgtgcaacttccttcgagtttgatattcactgatggactccaaagaatcattaactcctggtagagaagaaaaccccagcagtgtgcttgctcaggagaggggagatgtgatggacttctataaaaccctaagaggaggagctactgtgaaggtttctgcgtcttcaccctcactggctgtcgcttctcaatcagactccaagcagcgaagacttttggttgattttccaaaaggctcagtaagcaatgcgcagcagccagatctgtccaaagcagtttcactctcaatgggactgtatatgggagagacagaaacaaaagtgatgggaaatgacctgggattcccacagcagggccaaatcagcctttcctcgggggaaacagacttaaagcttttggaagaaagcattgcaaacctcaataggtcgaccagtgttccagagaaccccaagagttcagcatccactg

SEQ ID NO: 333214 - DNA, 547 bp, Artificial Sequence
  derived and/or modified sequence
cgtgcaggcgccgtcggggccggggtggcggggcccgcgcggagggcgtgggggcagggaccgcgggcgcccctgcagttgccaagcgtcaccaacagttgatattcactgatggactccaaagaatcattaactcctggtagagaagaaaaccccagcagtgtgcttgctcaggagaggggagatgtgatggacttctataaaaccctaagaggaggagctactgtgaaggtttctgcgtcttcaccctcactggctgtcgcttctcaatcagactccaagcagcgaagacttttggttgattttccaaaaggctcagtaagcaatgcgcagcagccagatctgtccaaagcagtttcactctcaatgggactgtatatgggagagacagaaacaaaagtgatgggaaatgacctgggattcccacagcagggccaaatcagcctttcctcgggggaaacagacttaaagcttttggaagaaagcattgcaaacctcaataggtcgaccagtgttccagagaaccccaagagttcagcatccactg

SEQ ID NO: 333215 - DNA, 585 bp, Artificial Sequence
  derived and/or modified sequence
ggcgcctggcttgaggagggcgtgcggggcgcgtgagggtgcacacgcggggggctgacagcccgcaacttggagactgcggccggggccggcgttatctgttagaagtgggcgtgtcggagagagaactcaacagttgatattcactgatggactccaaagaatcattaactcctggtagagaagaaaaccccagcagtgtgcttgctcaggagaggggagatgtgatggacttctataaaaccctaagaggaggagctactgtgaaggtttctgcgtcttcaccctcactggctgtcgcttctcaatcagactccaagcagcgaagacttttggttgattttccaaaaggctcagtaagcaatgcgcagcagccagatctgtccaaagcagtttcactctcaatgggactgtatatgggagagacagaaacaaaagtgatgggaaatgacctgggattcccacagcagggccaaatcagcctttcctcgggggaaacagacttaaagcttttggaagaaagcattgcaaacctcaataggtcgaccagtgttccagagaaccccaagagttcagcatccactg

SEQ ID NO: 333216 - DNA, 623 bp, Artificial Sequence
  derived and/or modified sequence
ggctgtggccgagcgcccgagcaggattaggtggagctgcggcagcccccgcccgtgtcaggagctggcaagcgatgtcacctgtgggggcgcaaaagttacctccccaaaccctaaacccacacagcacaacctttcccagagtcacaaaaatcataatctgtgccgcacaagttgatattcactgatggactccaaagaatcattaactcctggtagagaagaaaaccccagcagtgtgcttgctcaggagaggggagatgtgatggacttctataaaaccctaagaggaggagctactgtgaaggtttctgcgtcttcaccctcactggctgtcgcttctcaatcagactccaagcagcgaagacttttggttgattttccaaaaggctcagtaagcaatgcgcagcagccagatctgtccaaagcagtttcactctcaatgggactgtatatgggagagacagaaacaaaagtgatgggaaatgacctgggattcccacagcagggccaaatcagcctttcctcgggggaaacagacttaaagcttttggaagaaagcattgcaaacctcaataggtcgaccagtgttccagagaaccccaagagttcagcatccactg

SEQ ID NO: 333217 - DNA, 435 bp, Artificial Sequence
  derived and/or modified sequence
atggattctaaggagtctctcactcccggacgggaggagaatccttcgagcgtgctggctcaggagcgaggtgatgtaatggacttttacaaaactcttagaggcggtgctaccgtcaaggtatccgcaagcagcccgagtttagccgtcgcatcacagtctgacagcaagcagaggcgattactcgtggatttccctaagggctcagtatctaacgcccagcagcccgacctcagcaaggccgtgagtttatccatggggctatatatgggagaaactgaaactaaggtgatggggaacgaccttgggttcccacaacaggggcagatatccctcagctcaggagagaccgatctcaagctgttggaggaatctattgctaatttgaaccgttcaactagcgtaccagaaaatcctaagagttcagcctcctag

SEQ ID NO: 333218 - DNA, 438 bp, Artificial Sequence
  derived and/or modified sequence
atggatagcaaggaatccctcaccccgggtagggaggaaaacccgagcagcgttttggctcaagaacggggagatgtcatggatttttacaaaaccttaaggggtggcgcaacagtgaaagtttcagccagctcaccgtcactggccgtggcatctcagtccgactccaaacagcgcaggctgttggttgattttccaaaaggctccgtttcaaacgcccagcaaccagatctgtctaaggcagtgagtctctctatgggcctttacatgggggaaaccgagactaaagtcatgggcaatgacctcgggttcccccagcaagggcaaatatcactcagtagcggggagacggatctgaagctgttggaggagtctatcgcgaatctgaacagaagcacctccgttcctgagaaccccaaaagttccgcctccacatag

SEQ ID NO: 333219 - DNA, 438 bp, Artificial Sequence
  derived and/or modified sequence
atggacagcaaagagagtctgacccctgggcgtgaggagaatccctcctccgtgctggctcaggaaaggggagacgtcatggatttttacaaaacactgcgaggtggcgctaccgtcaaggtttctgcctcatctccgagcctggcagtcgctagccagagtgacagcaagcagcggcgtctactggttgatttccccaaagggtcagtaagcaatgcccaacagccagatttatcaaaagccgtatccctgagtatgggattatatatgggtgagactgagaccaaggtgatgggaaatgacctgggatttccgcaacaggggcagatttctttatcctcaggcgaaacagaccttaaactcttagaagaatccattgccaatctgaacagatccacctctgttcctgagaaccccaaatcaagcgccagcacctag

SEQ ID NO: 333220 - DNA, 438 bp, Artificial Sequence
  derived and/or modified sequence
atggatagtaaggaaagcctgacccctgggcgtgaagaaaatccctcctcggtgctggcacaggaacgtggtgatgtgatggacttctacaaaacactgaggggaggggctacggttaaggtgtctgcttccagcccaagcctcgcggtagcctctcagtccgatagcaagcaacggcgtctcctagtagacttcccaaagggctccgtgtccaacgcacagcagccagacctgtctaaagcagtttctctcagtatgggtctctacatgggggagactgaaactaaagtgatggggaatgacctcgggtttccgcagcaggggcagatatcgctgtcgtcaggagaaaccgatttaaaactccttgaagaaagtatcgcgaaccttaacaggtcaacctcagtgcctgaaaaccccaagtcgagtgcctccacatag

SEQ ID NO: 333221 - DNA, 438 bp, Artificial Sequence
  derived and/or modified sequence
atggacagcaaggaatccctgaccccaggaagggaggagaatccctccagtgttctggcccaggaaaggggggacgtgatggacttttacaagactctgagaggaggggcaactgtgaaggtgagcgcgtcttctccctcgttggctgtcgcgagtcagagcgactcaaaacagcggaggctcttggtggacttccccaaaggctcagtttccaatgcccagcagcccgatctgagtaaggccgtgagcctgagtatgggcttgtatatgggggagacagagacaaaggtgatggggaacgacctcggttttccacaacaggggcagataagtctgtctagcggagaaaccgacctgaagttacttgaagaaagtatagctaatttgaaccggtctacctccgttcctgagaatccgaaaagctccgcgtctacctag

SEQ ID NO: 333222 - DNA, 1143 bp, Artificial Sequence
  derived and/or modified sequence
atgagacccgacgtgagcagcccccccagcagcagcagcaccgccaccaccggccccccccccaagctgtgcctggtgtgcagcgacgaggccagcggctgccactacggcgtgctgacctgcggcagctgcaaggtgttcttcaagagagccgtggagggccagcacaactacctgtgcgccggcagaaacgactgcatcatcgacaagatcagaagaaagaactgccccgcctgcagatacagaaagtgcctgcaggccggcatgaacctggaggccagaaagaccaagaagaagatcaagggcatccagcaggccaccaccggcgtgagccaggagaccagcgagaaccccggcaacaagaccatcgtgcccgccaccctgccccagctgacccccaccctggtgagcctgctggaggtgatcgagcccgaggtgctgtacgccggctacgacagcagcgtgcccgacagcacctggagaatcatgaccaccctgaacatgctgggcggcagacaggtgatcgccgccgtgaagtgggccaaggccatccccggcttcagaaacctgcacctggacgaccagatgaccctgctgcagtacagctggatgttcctgatggccttcgccctgggctggagaagctacagacagagcagcgccaacctgctgtgcttcgcccccgacctgatcatcaacgagcagagaatgaccctgccctgcatgtacgaccagtgcaagcacatgctgtacgtgagcagcgagctgcacagactgcaggtgagctacgaggagtacctgtgcatgaagaccctgctgctgctgagcagcgtgcccaaggacggcctgaagagccaggagctgttcgacgagatcagaatgacctacatcaaggagctgggcaaggccatcgtgaagagagagggcaacagcagccagaactggcagagattctaccagctgaccaagctgctggacagcatgcacgaggtggtggagaacctgctgaactactgcttccagaccttcctggacaagaccatgagcatcgagttccccgagatgctggccgagatcatcaccaaccagatccccaagtacagcaacggcaacatcaagaagctgctgttccaccagaagtag

SEQ ID NO: 333223 - DNA, 1143 bp, Artificial Sequence
  derived and/or modified sequence
atgcggccggacgtttcctctccaccttcttccagcagcacagcaacaactgggccaccccccaagctctgtctggtttgcagtgacgaggcgagcggctgtcattacggtgtcttaacatgcggttcatgtaaagtatttttcaagcgtgcggtggagggccagcacaattacttgtgtgcgggaagaaatgactgcataatcgacaagatacgcaggaaaaactgccccgcctgcaggtacaggaaatgcttacaggctggtatgaacctggaagcacgcaagacgaaaaaaaaaatcaagggcatacagcaagcgaccacaggagtctcccaggaaacgtctgaaaaccccggcaacaaaaccatcgtgccggcaacgctgcctcagctgacacctaccctggtgtccctgctggaggtcatcgaacccgaggttctgtacgcaggatacgattcaagcgttccagatagcacctggcggattatgactaccctgaacatgctgggcggccggcaagtgatagccgcagttaagtgggctaaagctatccctgggtttcggaacttacacctcgatgaccagatgaccttgctccagtattcttggatgtttcttatggcttttgcccttgggtggagaagttaccgtcaatcttctgcaaacttgctgtgctttgcacccgacctgattatcaacgagcagcgaatgactctgccatgtatgtacgatcagtgcaagcatatgttatacgtgagcagcgagctgcatcgtctgcaagtgtcgtacgaagagtacctgtgcatgaaaaccctgctgctgttgtcatccgtccctaaagatggactcaagagccaagagctctttgatgaaatccggatgacatatatcaaggagctcggaaaggcaattgtcaagagggaaggtaacagctcccagaattggcagaggttctaccaactcacaaaacttctggactctatgcacgaagtggtggaaaatcttcttaactattgctttcagacattcttggataagaccatgtccatcgaattcccagaaatgctggctgagatcatcacaaaccagatccccaagtacagcaacggcaacatcaaaaagctgttgtttcaccagaaatag

SEQ ID NO: 333224 - DNA, 1143 bp, Artificial Sequence
  derived and/or modified sequence
atgaggccagatgtgagcagcccccccagcagcagcagcacagccaccactggacctccacccaagctgtgcctggtgtgcagtgatgaggccagcggctgccactacggcgtgctgacctgtggcagctgcaaggtgttcttcaagagagctgtggagggccagcacaactacctgtgtgccggcagaaatgactgcatcatcgacaagatccggaggaagaactgcccagcctgccgctacaggaagtgcctgcaggccggcatgaacctggaggccaggaagaccaagaagaagatcaagggcatccagcaggccaccaccggggtgtcccaggagaccagcgagaaccctggcaacaagaccatcgtgcctgccaccctgccccagctgacccccaccctggtgtccctgctggaggtgattgagcctgaggtgctgtatgccggctatgacagctctgtgcctgacagcacctggaggatcatgaccaccctgaacatgctgggcggccggcaggtgattgctgctgtgaagtgggccaaggccatccctggcttcaggaacctgcacctggatgaccagatgaccctgctgcagtacagctggatgttcctgatggcctttgccctgggctggaggagctaccggcagagcagcgccaacctgctgtgctttgccccagacctgatcatcaatgagcagaggatgaccctgccctgcatgtatgaccagtgcaagcacatgctgtatgtgagcagcgagctgcaccggctgcaggtgtcctatgaggagtacctgtgcatgaagaccctgctgctgctgagctctgtgcccaaggatggcctgaagagccaggagctgtttgatgagatccgcatgacctacatcaaggagctgggcaaggccatcgtgaagcgggagggcaacagcagccagaactggcagcgcttctaccagctgaccaagctgctggacagcatgcatgaggtggtggagaacctgctgaactactgcttccagaccttcctggacaagaccatgagcattgagttccctgagatgctggccgagatcatcaccaaccagatccccaagtacagcaatggaaacatcaagaagctgctcttccaccagaagtag

SEQ ID NO: 333225 - DNA, 1143 bp, Artificial Sequence
  derived and/or modified sequence
atgcggcccgacgtgagcagcccccccagcagcagcagcaccgccactacaggaccaccgccgaaactttgcttggtctgcagtgatgaggcaagcggatgccattacggcgttctgacatgtgggtcgtgtaaggtgttctttaagcgggccgtcgaggggcagcataactatctgtgcgccgggcgcaatgactgtatcattgataagatcagacgcaagaattgcccagcgtgtcggtaccgaaagtgtctccaggcaggcatgaatctagaggcacgcaagaccaaaaaaaagatcaaggggattcagcaggctacaacaggagtgtcacaggaaacctctgaaaatccaggaaacaagactattgttccggccacactgccccaactgacacctaccctggtgtcattactggaagtgatcgagccagaggtgctgtacgccggctacgattctagcgtccccgactccacatggcgcattatgacaacattaaatatgctcggcgggcgtcaggtcatagcagcggtgaagtgggcgaaggccattcccggcttccgcaaccttcacctcgacgatcaaatgaccctcttgcagtatagttggatgtttttgatggccttcgcccttgggtggcgaagttaccggcagagcagcgccaatctgctttgcttcgcaccggacctgatcattaacgaacaaaggatgaccttgccgtgcatgtacgaccagtgtaagcacatgctctatgtcagttccgagttacaccgccttcaagtcagctatgaggaatacctctgtatgaagacacttttacttctgagttcggtgccaaaggacggactaaaaagccaggagctttttgacgagatcagaatgacctacataaaggagctgggaaaggctatagttaagagagaggggaattcatcgcagaattggcagcgcttctatcagctgaccaagctcctggacagtatgcatgaggtggttgagaaccttttgaattactgcttccagaccttcctcgacaaaacaatgtccatagaattcccagaaatgctcgcagagattattactaaccagattccaaaatatagcaatggaaatatcaaaaaattgcttttccaccagaaatag

SEQ ID NO: 333226 - DNA, 1430 bp, Artificial Sequence
  derived and/or modified sequence
agtgcgagagcgcggcggcggcagctgaagacccggccgcccagatgatgcggtggtgggggacctgccggcacgcgactccccccgggcccaaaccccagcatgagaccagatgtaagctctcctccatccagctcctcaacagcaacaacaggaccacctcccaaactctgcctggtgtgctctgatgaagcttcaggatgtcattatggagtcttaacttgtggaagctgtaaagttttcttcaaaagagcagtggaaggacagcacaattacctatgtgctggaaggaatgattgcatcatcgataaaattcgaagaaaaaactgcccagcatgccgctatcgaaaatgtcttcaggctggaatgaacctggaagctcgaaaaacaaagaaaaaaataaaaggaattcagcaggccactacaggagtctcacaagaaacctctgaaaatcctggtaacaaaacaatagttcctgcaacgttaccacaactcacccctaccctggtgtcactgttggaggttattgaacctgaagtgttatatgcaggatatgatagctctgttccagactcaacttggaggatcatgactacgctcaacatgttaggagggcggcaagtgattgcagcagtgaaatgggcaaaggcaataccaggtttcaggaacttacacctggatgaccaaatgaccctactgcagtactcctggatgtttcttatggcatttgctctggggtggagatcatatagacaatcaagtgcaaacctgctgtgttttgctcctgatctgattattaatgagcagagaatgactctaccctgcatgtacgaccaatgtaaacacatgctgtatgtttcctctgagttacacaggcttcaggtatcttatgaagagtatctctgtatgaaaaccttactgcttctctcttcagttcctaaggacggtctgaagagccaagagctatttgatgaaattagaatgacctacatcaaagagctaggaaaagccattgtcaagagggaaggaaactccagccagaactggcagcggttttatcaactgacaaaactcttggattctatgcatgaagtggttgaaaatctccttaactattgcttccaaacatttttggataagaccatgagtattgaattccccgagatgttagctgaaatcatcaccaatcagataccaaaatattcaaatggaaatatcaaaaaacttctgtttcatcaaaagtgactgccttaataagaatggttgccttaaagaaagtcgaattaatagcttttattgtataaactatcagtttgtcctgtagaggttttgttgttttattttttattgttttcatctgttgttttgttttaaatacgcactacatgtggtttatagagggccaagacttggcaacagaagcagttgag

SEQ ID NO: 333227 - DNA, 1143 bp, Artificial Sequence
  derived and/or modified sequence
atgcgcccagacgttagttctcccccatccagctcttccacagcaactaccggaccacctccgaaattatgtctggtttgcagcgatgaggcctctggctgccattacggcgtcctcacatgcggatcttgcaaggtgttttttaaacgggctgtggagggacagcacaactacctatgtgccggacggaatgattgtatcattgacaagatacgccgaaaaaactgccctgcgtgcaggtataggaagtgtctgcaggcgggaatgaatctggaggccaggaagaccaagaaaaagattaagggtatccagcaggccacaacgggggtgagtcaagaaacatctgagaacccgggtaataagaccatcgtgccggcaactcttcctcagctcacccccaccctcgtcagcctactggaagtgattgaaccagaggttctttatgccggatatgatagttcagttcccgacagtacatggaggattatgactaccctgaacatgctcggcggtcgccaggtaatagccgcagttaaatgggccaaggccatcccgggattccgcaatctgcatctagacgaccagatgacactcctgcagtatagctggatgttcttgatggcatttgccctcggatggcgctcctatcgacagagcagcgccaacttactttgctttgctccagacctcatcattaatgagcagagaatgacactcccatgcatgtatgaccagtgtaaacacatgttgtatgtgtctagcgagctgcaccggctgcaggtgagctacgaggagtatctttgcatgaagactttgctcttgctgagttcagtacccaaggatggtttaaaatctcaggaactcttcgacgaaattagaatgacttacataaaagaactcggaaaagctatagtgaaacgggaggggaactcgtcccaaaattggcaacggttttatcagttgacaaaactgctcgattccatgcatgaagtcgtcgagaatctactcaattattgttttcaaacgttcctggataagacgatgagtatcgaattcccagaaatgctagctgagatcatcacgaaccagatccccaaatacagcaatggcaatatcaagaagctactgtttcaccagaaatag

SEQ ID NO: 333228 - DNA, 762 bp, Artificial Sequence
  derived and/or modified sequence
atgccccacagcagcctgcaccccagcatcccctgccccagaggccacggcgcccagaaggccgccctggtgctgctgagcgcctgcctggtgaccctgtggggcctgggcgagccccccgagcacaccctgagatacctggtgctgcacctggccagcctgcagctgggcctgctgctgaacggcgtgtgcagcctggccgaggagctgagacacatccacagcagatacagaggcagctactggagaaccgtgagagcctgcctgggctgccccctgagaagaggcgccctgctgctgctgagcatctacttctactacagcctgcccaacgccgtgggcccccccttcacctggatgctggccctgctgggcctgagccaggccctgaacatcctgctgggcctgaagggcctggcccccgccgagatcagcgccgtgtgcgagaagggcaacttcaacgtggcccacggcctggcctggagctactacatcggctacctgagactgatcctgcccgagctgcaggccagaatcagaacctacaaccagcactacaacaacctgctgagaggcgccgtgagccagagactgtacatcctgctgcccctggactgcggcgtgcccgacaacctgagcatggccgaccccaacatcagattcctggacaagctgccccagcagaccggcgaccacgccggcatcaaggacagagtgtacagcaacagcatctacgagctgctggagaacggccagagatag

SEQ ID NO: 333229 - DNA, 762 bp, Artificial Sequence
  derived and/or modified sequence
atgccccactcttccttgcacccttcaatcccttgccctagggggcacggcgcacagaaggccgccctggtcttgttaagcgcatgtctggtgacactttggggattgggcgagccacccgagcacactctgagatatttggttctccacctggcctcactccaactgggccttctgctcaatggggtatgcagcctcgcagaggaactcaggcacattcactcgcggtacaggggatcctactggagaactgtacgcgcatgcctggggtgccccctccggaggggagccctgctcctcctgagcatatacttttattattcgcttcccaatgcagtgggcccaccttttacatggatgctggccttactggggctgtcacaagccctcaacattctcctaggactaaaggggttggctccagccgagatttccgccgtttgcgagaaaggcaattttaatgtggcccacggtctggcctggtcttattacattgggtacctgagactaatcctccccgagctccaggctcggatcagaacttacaaccaacactacaacaatctgcttcggggcgccgtctcccagcggctgtatatactcctgccgctggattgtggggtgccagacaatctgtctatggccgaccccaacatccggttcctggacaagctcccccagcagaccggcgaccatgcaggcatcaaggatcgggtgtacagtaactcaatttatgaactgctggagaatggacagcggtag

SEQ ID NO: 333230 - DNA, 762 bp, Artificial Sequence
  derived and/or modified sequence
atgccccacagcagcctgcaccccagcatcccctgcccccggggccacggggcccagaaggccgccctggtgctgctgagcgcctgcctggtgaccctgtggggcctgggggagcccccagagcacaccctgcgctacctggtgctgcacctggccagcctgcagctgggcctgctgctgaatggagtgtgcagcctggccgaggagctgcggcacatccacagccgctaccggggcagctactggaggacagtgcgggcctgcctgggctgccccctgcggcggggggccctgctgctgctgagcatctacttctactacagcctgcccaatgctgtgggcccccccttcacctggatgctggccctgctgggcctgagccaggccctgaacatcctgctgggcctgaagggcctggccccagctgagatctctgctgtgtgtgagaagggcaacttcaacgtggcccacggcctggcctggagctactacatcggctacctgcggctcatcctgcctgagctgcaggcccgcatccgcacctacaaccagcactacaacaacctgctgcggggagctgtgtcccagaggctgtacatcctgctgcccctggactgtggggtgcctgacaacctgtccatggctgaccccaacatccgcttcctggacaagctgccccagcagacaggagaccatgctggcatcaaggacagagtgtacagcaacagcatctatgagctgctggagaatggccagaggtag

SEQ ID NO: 333231 - DNA, 762 bp, Artificial Sequence
  derived and/or modified sequence
atgccccacagcagcctgcaccccagcatcccctgcccccggggccatggggcccagaaagccgccttagtgctactgtctgcttgtctggtgactttgtggggcttgggtgaaccccctgaacatactctgcggtacttagtcctccaccttgcctctctccagttgggcctccttctcaacggagtctgctctttggcggaagaactgcgacatatccatagccgctatagaggtagttactggaggacagtgagggcttgcctcggctgtccgcttagacgaggagccctcctgctcctgagcatttatttctattactcactccccaatgctgttggacctcccttcacttggatgctcgcgttactcggcctgagccaggcactgaatatactgttgggtctgaaagggttggcacccgccgagatcagtgccgtgtgcgaaaaggggaactttaacgtagctcatggcctcgcatggagctactacattggatatttgagactgatcctgcccgagttgcaagctcgcatcagaacttataatcagcactataataaccttctcagaggtgctgtgagccaacgactctatattttactgccgctggattgtggagtgcctgataatctctcaatggcagacccaaatattcgattcctggacaagctgcctcagcaaactggggatcacgctgggatcaaagatcgtgtgtattcaaattctatatatgaactgctcgagaatggacaacgctag

SEQ ID NO: 333232 - DNA, 762 bp, Artificial Sequence
  derived and/or modified sequence
atgccccattcttctctgcatccatcaattccttgtccgaggggacacggggcacagaaagcagccttagtgctgcttagtgcttgtttggtgacgctctggggcctgggggaacccccagagcataccctgagataccttgtcctgcacctggcaagcctgcagctaggtctgttgctaaacggcgtttgtagtctggccgaggaactgcggcacatccactcgcggtatagagggagctattggcggaccgtcagggcatgtctcggctgccctctgaggaggggcgctctcctcctcctgagcatctacttctactattccttacctaacgccgttggcccaccttttacttggatgctcgcccttctgggtttgtcccaggcccttaacatcttgctcgggctgaagggtctggctcccgcagaaattagtgcagtgtgcgagaagggaaactttaacgtcgcacacggactcgcctggtcttactatataggatacctgcgactcatattacctgaattgcaagccaggatccgcacgtacaaccaacattataataacttgcttcgtggcgctgtgagccaacggctttatatcttgttgccactagattgtggagtgcccgataacctatctatggccgatccgaacatccggttcttagacaaactaccccaacagactggagatcacgccggtattaaggaccgagtctattctaattcaatctatgaattattagagaacgggcagagatag

SEQ ID NO: 333233 - DNA, 901 bp, Artificial Sequence
  derived and/or modified sequence
ggctagagtgttgtggagaaaccaatcgttgttaacatctcattttcaggctgcactcagagaagctgcccttggctgctcgtagcgccgggccttctctcctcgtcatcatccagagcagccagtgtccgggaggcagaagatgccccactccagcctgcatccatccatcccgtgtcccaggggtcacggggcccagaaggcagccttggttctgctgagtgcctgcctggtgaccctttgggggctaggagagccaccagagcacactctccggtacctggtgctccacctagcctccctgcagctgggactgctgttaaacggggtctgcagcctggctgaggagctgcgccacatccactccaggtaccggggcagctactggaggactgtgcgggcctgcctgggctgccccctccgccgtggggccctgttgctgctgtccatctatttctactactccctcccaaatgcggtcggcccgcccttcacttggatgcttgccctcctgggcctctcgcaggcactgaacatcctcctgggcctcaagggcctggccccagctgagatctctgcagtgtgtgaaaaagggaatttcaacgtggcccatgggctggcatggtcatattacatcggatatctgcggctgatcctgccagagctccaggcccggattcgaacttacaatcagcattacaacaacctgctacggggtgcagtgagccagcggctgtatattctcctcccattggactgtggggtgcctgataacctgagtatggctgaccccaacattcgcttcctggataaactgccccagcagaccggtgaccatgctggcatcaaggatcgggtttacagcaacagcatctatgagcttctggagaacgggcagcgg

SEQ ID NO: 333234 - DNA, 480 bp, Artificial Sequence
  derived and/or modified sequence
atggccgagaggaaagggaccgccaaggtcgactttttaaaaaaaatcgaaaaggaaatccagcagaagtgggataccgagagggtcttcgaggtaaacgcaagtaacctcgaaaaacagaccagcaagggaaagtattttgttacctttccgtacccctatatgaatggcagactccatctaggacacactttctctctttccaagtgcgagttcgctgtggggtaccagcggctaaagggaaagtgttgtctgttcccattcggactgcattgtacgggtatgccaattaaagcttgcgcagacaagttaaaaagggaaatcgaactgtacggctgtccgccagacttccccgacgaggaagaggaggaagaggaaacatcagttaagacagaagatatcatcatcaaagataaagccaaaggtaagaagagtaaagctgcgaagttggatttgctgaatacttctggcgcgctgtag

SEQ ID NO: 333235 - DNA, 480 bp, Artificial Sequence
  derived and/or modified sequence
atggccgagaggaaaggaacagccaaggtggacttcctgaagaagattgagaaggagatccagcagaagtgggacacagagcgggtgtttgaggtgaatgccagcaacctggagaagcagaccagcaagggcaagtactttgtgaccttcccctacccctacatgaatggccgcctgcacctgggccacaccttcagcctgagcaaatgtgaatttgctgtgggctaccagaggctgaagggcaagtgctgcctcttccccttcggcctgcactgcaccggcatgcccatcaaggcctgtgccgacaagctgaagcgggagattgagctgtatggctgccccccagacttcccagatgaggaggaggaggaggaggagacctctgtgaagacagaggacatcatcatcaaggacaaggccaagggcaagaagagcaaggccgccaagctggacctgctgaacaccagcggggccctgtag

SEQ ID NO: 333236 - DNA, 647 bp, Artificial Sequence
  derived and/or modified sequence
ggctgtagttagtaaggagccggatgattgcctcagcaggtgtgaagcgtgtgctttagtttcgtgggaggcctggcatccccgagagggaggggaaaggtaaccactcctttgtggaggtcgccagggtcattgtcgtggatttgcacagtcggctgggcggtgcaatggcggaaagaaaaggaacagccaaagtggactttttgaagaagattgagaaagaaatccaacagaaatgggatactgagagagtgtttgaggtcaatgcatctaatttagagaaacagaccagcaagggcaagtattttgtaaccttcccatatccatatatgaatggacgccttcatttgggacacacgttttctttatccaaatgtgagtttgctgtagggtaccagcgattgaaaggaaaatgttgtctgtttccctttggcctgcactgtactggaatgcctattaaggcatgtgctgataagttgaaaagagaaatagagctgtatggttgcccccctgattttccagatgaagaagaggaagaggaagaaaccagtgttaaaacagaagatataataattaaggataaagctaaaggaaaaaagagtaaagctgctaagctggatcttctaaataccagtggggcattatga

SEQ ID NO: 333237 - DNA, 2652 bp, Artificial Sequence
  derived and/or modified sequence
gattgcaaaggaaaaattagatcagttaaagcaggagtttgaattctggtatcctgttgatcttcgcgtctctggcaaggatcttgttccaaatcatctttcatattacctttataatcatgtggctatgtggccggaacaaagtgacaaatggcctacagctgtgagagcaaatggacatctcctcctgaactctgagaagatgtcaaaatccacaggcaacttcctcactttgacccaagctattgacaaattttcagcagatggaatgcgtttggctctggctgatgctggtgacactgtagaagatgccaactttgtggaagccatggcagatgcaggtattctccgtctgtacacctgggtagagtgggtgaaagaaatggttgccaactgggacagcctaagaagtggtcctgccagcactttcaatgatagagtttttgccagtgaattgaatgcaggaattataaaaacagatcaaactatgaaaagatgatgtttaaagaagctttgaaaacagggttttttgagtttcaggccgcaaaagataagtaccgtgaattggctgtggaagggatgcacagagaacttgtgttccggtttattgaagttcagacacttctcctcgctccattctgtccacatttgtgtgagcacatctggacactcctgggaaagcctgactcaattatgaatgcttcatggcctgtggcaggtcctgttaatgaagttttaatacactcctcacagtatcttatggaagtaacacatgaccttagactacgactcaagaactatatgatgccagctaaagggaagaagactgacaaacaacccctgcagaagccctcacattgcaccatctatgtggcaaagaactatccaccttggcaacataccaccctgtctgttctacgtaaacactttgaggccaataacggaaaactgcctgacaacaaagtcattgctagtgaactaggcagtatgccagaactgaagaaatacatgaagaaagtcatgccatttgttgccatgattaaggaaaatctggagaagatggggcctcgtattctggatttgcaattagaatttgatgaaaaggctgtgcttatggagaatatagtctatctgactaattcgcttgagctagaacacatagaagtcaagtttgcctccgaagcagaagataaaatcagggaagactgctgtcctgggaaaccacttaatgtttttagaatagaacctggtgtgtccgtttctctggtgaatccccagccatccaatggccacttctcaaccaaaattgaaatcaggcaaggagataactgtgattccataatcaggcgtttaatgaaaatgaatcgaggaattaaagacctttccaaagtgaaactgatgagatttgatgatccactgttggggcctcgacgagttcctgtcctgggaaaggagtacaccgagaagacccccatttctgagcatgctgttttcaatgtggacctcatgagcaagaaaattcatctgactgagaatgggataagggtggatattggcgatacaataatctatctggttcattaaactcatgcacattggagatttatcctggtttcttaggaatactactactctgattgtgtctactgattggctatcagaaccttaggctggacctaaatagattgatttcatttctaaccatccaattctgcatgtattcataattctatcaagtcatctttgattcctggacctaataaattttttttccctttctttgggtgtccaagagaaatggtttttgccaaactctttttaaaaaacaaattgttgctatttcctagaagtttctggtttttaagatgaacataaaagtgtcagtatgcttcttttatgaggtgtactttatactttgatgaaggctaaggtgtacctaacagctttttatagtatattcatttatggagttagctgtatttttttttaaaaaagaaaagtagtaaattagcagcttttttttttaaatgaagagaacttcatgatgatttaaaagaactaatgagaatattttgacttgacttcaattactaagtattttgtataaagaacaaataggtcctgcattttataagactttttaaagctttaattattcaactaagaaccaataatggcttcttcaaggctaatatcaatagtttataagcagtatatttcacctacactaaatatgggcattttaaaagaagattccccccttcccccccagaaatctgcatttactaaatttgtcttaagtccaattgtgtttaaaggtcatgctggtcgggtgtggtggctcacacctataatcccagcactttgggaggccaaggtgggcagtcacctgaggtcaggagtttgagaccagcctgaccaacatggtgaaaccccgtctctactaaaaatacaaaaattagcttggcatggtggcgggtacctgtaatcccagctgcttgggagtgtgaggcaggagaatcgcttgaacctgggagaccgaggttgcagtgagctgaaaccgtgccattgcactccagcttaggcaacaagagtgaaactctgtctcaatcaatccatcaatcaatcaataaaatagaggtcatgctgact

SEQ ID NO: 333238 - DNA, 480 bp, Artificial Sequence
  derived and/or modified sequence
atggccgagcggaagggcaccgccaaggtggacttcctgaagaagattgaaaaggagattcagcagaagtgggacactgagcgcgtatttgaagtcaatgccagcaacctggaaaaacagactagtaagggcaaatacttcgtgacatttccctacccctatatgaacgggcgtcttcacctcggacatactttttccctgtccaagtgcgaattcgctgtaggataccaaagattgaagggtaaatgttgtctgtttccattcggtctacactgcaccggtatgccaatcaaggcgtgtgctgataagctgaagcgagagatcgagctttatggatgcccccccgactttccagacgaggaggaagaagaggaggagacctctgtcaagacagaggatatcatcattaaggataaggctaaaggcaaaaaatccaaagctgccaagcttgatctactcaatacatcgggcgccctgtag

SEQ ID NO: 333239 - DNA, 480 bp, Artificial Sequence
  derived and/or modified sequence
atggcagaacgaaagggtacagccaaggtggactttctcaaaaagattgagaaggagattcagcagaaatgggatacggagagggtatttgaagtcaatgcctcgaatcttgagaagcagacatctaaaggaaagtactttgtcacctttccctacccgtatatgaacggcaggttgcatctgggccatactttctcactgtctaaatgcgaatttgccgtgggctatcagcggttaaagggtaagtgttgtctcttcccttttggactgcactgcaccggaatgccaatcaaggcttgcgccgacaagctcaagagagaaattgaattgtacggatgccccccagattttcctgacgaggaggaagaggaagaggagacttcagtgaagacggaggatatcatcatcaaggacaaagctaagggtaagaaatcaaaggccgctaaactggacctgctgaatacatctggagcactgtag

SEQ ID NO: 333240 - DNA, 480 bp, Artificial Sequence
  derived and/or modified sequence
atggccgagagaaagggcaccgccaaggtggacttcctgaagaagatcgagaaggagatccagcagaagtgggacaccgagagagtgttcgaggtgaacgccagcaacctggagaagcagaccagcaagggcaagtacttcgtgaccttcccctacccctacatgaacggcagactgcacctgggccacaccttcagcctgagcaagtgcgagttcgccgtgggctaccagagactgaagggcaagtgctgcctgttccccttcggcctgcactgcaccggcatgcccatcaaggcctgcgccgacaagctgaagagagagatcgagctgtacggctgcccccccgacttccccgacgaggaggaggaggaggaggagaccagcgtgaagaccgaggacatcatcatcaaggacaaggccaagggcaagaagagcaaggccgccaagctggacctgctgaacaccagcggcgccctgtag

SEQ ID NO: 333241 - protein, 174 aa, Artificial Sequence
  derived and/or modified sequence
MRLPGAMPALALKGELLLLSLLLLLEPQISQGLVVTPPGPELVLNVSSTFVLTCSGSAPVVWERMSQEPPQEMAKAQDGTFSSVLTLTNLTGLDTGEYFCTHNDSRGLETDERKRLYIFVPDPTVGFLPNDAEELFIFLTEITEITIPCRVTDPQLVVTLHEKKGDVALPVPYD

SEQ ID NO: 333242 - DNA, 525 bp, Artificial Sequence
  derived and/or modified sequence
atgagactgcccggcgccatgcccgccctggccctgaagggcgagctgctgctgctgagcctgctgctgctgctggagccccagatcagccagggcctggtggtgaccccccccggccccgagctggtgctgaacgtgagcagcaccttcgtgctgacctgcagcggcagcgcccccgtggtgtgggagagaatgagccaggagcccccccaggagatggccaaggcccaggacggcaccttcagcagcgtgctgaccctgaccaacctgaccggcctggacaccggcgagtacttctgcacccacaacgacagcagaggcctggagaccgacgagagaaagagactgtacatcttcgtgcccgaccccaccgtgggcttcctgcccaacgacgccgaggagctgttcatcttcctgaccgagatcaccgagatcaccatcccctgcagagtgaccgacccccagctggtggtgaccctgcacgagaagaagggcgacgtggccctgcccgtgccctacgactag

SEQ ID NO: 333243 - DNA, 525 bp, Artificial Sequence
  derived and/or modified sequence
atgaggcttccgggagccatgccagccctggcgctcaagggcgagctgttgcttctgtctcttctcctcctactggaaccccagatttcacagggtctggttgtaacaccaccagggcccgagctggtcttaaacgtgtccagtacgtttgtactgacctgctctggctctgctccagtagtgtgggaaagaatgagtcaagagccaccccaggaaatggccaaagctcaagacggcactttctcatcagtgctgacccttactaacctgacaggactggatactggcgagtatttttgcacccataacgactctcgaggtctggagacagacgaacggaagagattgtacatattcgttcccgacccgacggtggggtttctacctaacgacgcggaggagcttttcatttttctgactgagatcacggagatcacaataccctgtcgggtgactgacccacagttggtagtcacactgcacgagaagaagggcgatgtggctctgcccgtcccatacgactag

SEQ ID NO: 333244 - DNA, 525 bp, Artificial Sequence
  derived and/or modified sequence
atgaggctgcccggggccatgcctgccctggccctgaagggggagctgctgctgctgagcctgctgctgctgctggagccccagatcagccagggcctggtggtgaccccacctggccctgagctggtgctgaatgtgagcagcacctttgtgctgacctgcagcggcagcgcccctgtggtgtgggagaggatgagccaggagcccccccaggagatggccaaggcccaggacggcaccttcagctctgtgctgaccctgaccaacctgaccggcctggacacaggagagtacttctgcacccacaatgacagccggggcctggagacagatgagaggaagaggctgtacatctttgtgcctgaccccaccgtgggcttcctgcccaatgatgctgaggagctgttcatcttcctgacagagatcacagagatcaccatcccctgccgggtgacagacccccagctggtggtgaccctgcacgagaagaagggagatgtggccctgcctgtgccctatgactag

SEQ ID NO: 333245 - DNA, 525 bp, Artificial Sequence
  derived and/or modified sequence
atgcggctgcccggcgccatgcccgccctggccctgaagggcgagttgcttttgctgtccttgctgctgctattggaacctcagatttcccagggcttggtggttacccccccgggtcccgaactggtcctcaacgtcagttctacttttgtactgacctgctctggaagtgctcctgtggtgtgggagcgcatgtcacaggagcctccacaagaaatggcgaaagctcaggatgggacgttcagtagtgtgctgaccctgaccaatctgacgggcctggatacaggcgagtacttctgtacgcacaacgacagcagaggactcgaaacagacgagcgcaagcgtctctacatctttgtaccagaccccactgtgggtttcctgcctaacgatgccgaggaactgttcatctttctgactgaaattacagaaataacgattccttgccgggtcactgaccctcagctggtggttacactccatgagaagaaaggggatgtggcacttcctgtgccatatgattag

SEQ ID NO: 333246 - DNA, 525 bp, Artificial Sequence
  derived and/or modified sequence
atgaggctacctggagccatgcccgctttagcattgaaaggtgagcttctgctgctgtccctgctgttgctgttggagccccagatcagtcagggcctggtggttacccccccaggcccagaactggtgctgaacgtaagttctaccttcgttctcacctgcagtggaagtgcccctgtggtgtgggaaaggatgtcacaggagcccccacaggaaatggctaaggcccaggacgggaccttttcaagcgtgctgacgttgactaatctcacaggcctcgatacaggagaatacttctgcacacacaatgactctaggggtctggagacagacgagcggaagaggttgtatatttttgtgcccgatccaactgtggggttcttgccaaacgacgctgaggagctgttcatatttttaaccgagattacagagattactattccgtgtagagtgacggacccacaattagtggttacactgcatgaaaagaagggagatgtcgcgctccccgtgccgtatgattag

SEQ ID NO: 333247 - DNA, 568 bp, Artificial Sequence
  derived and/or modified sequence
attggaactgtcacccggaggacaggctgtcagagctggacaccatgcggcttccgggtgcgatgccagctctggccctcaaaggcgagctgctgttgctgtctctcctgttacttctggaaccacagatctctcagggcctggtcgtcacacccccggggccagagcttgtcctcaatgtctccagcaccttcgttctgacctgctcgggttcagctccggtggtgtgggaacggatgtcccaggagcccccacaggaaatggccaaggcccaggatggcaccttctccagcgtgctcacactgaccaacctcactgggctagacacgggagaatacttttgcacccacaatgactcccgtggactggagaccgatgagcggaaacggctctacatctttgtgccagatcccaccgtgggcttcctccctaatgatgccgaggaactattcatctttctcacggaaataactgagatcaccattccatgccgagtaacagacccacagctggtggtgacactgcacgagaagaaaggggacgttgcactgcctgtcccctatgatca

SEQ ID NO: 333248 - protein, 248 aa, Artificial Sequence
  derived and/or modified sequence
MEDPEKKLNQKSDGKPRKVRFKISSSYSGRVLKQVFEDGQELESPKEEYPHSFLQESLETMDGVYGSGEVPRPQMCSPKLTAQRISVFREGNAYTLAGGQPRFNDYKANDHKPLPIIDFGKIIIYTNNLKIIRTPMDKRDFVRKILQKEEEAEEESLMNKEESYGGRDQHDRPLVEAESTLPQNRYTQEGDIPEDSCFHCRGSGSATCSLCHGSKFSMLANRFKESYRALRCPACNENGLQPCQICNQ

SEQ ID NO: 333249 - DNA, 747 bp, Artificial Sequence
  derived and/or modified sequence
atggaggaccccgagaagaagctgaaccagaagagcgacggcaagcccagaaaggtgagattcaagatcagcagcagctacagcggcagagtgctgaagcaggtgttcgaggacggccaggagctggagagccccaaggaggagtacccccacagcttcctgcaggagagcctggagaccatggacggcgtgtacggcagcggcgaggtgcccagaccccagatgtgcagccccaagctgaccgcccagagaatcagcgtgttcagagagggcaacgcctacaccctggccggcggccagcccagattcaacgactacaaggccaacgaccacaagcccctgcccatcatcgacttcggcaagatcatcatctacaccaacaacctgaagatcatcagaacccccatggacaagagagacttcgtgagaaagatcctgcagaaggaggaggaggccgaggaggagagcctgatgaacaaggaggagagctacggcggcagagaccagcacgacagacccctggtggaggccgagagcaccctgccccagaacagatacacccaggagggcgacatccccgaggacagctgcttccactgcagaggcagcggcagcgccacctgcagcctgtgccacggcagcaagttcagcatgctggccaacagattcaaggagagctacagagccctgagatgccccgcctgcaacgagaacggcctgcagccctgccagatctgcaaccagtag

SEQ ID NO: 333250 - DNA, 747 bp, Artificial Sequence
  derived and/or modified sequence
atggaggatcccgagaaaaaattgaaccagaagtccgatgggaagcctaggaaggtgcgtttcaagatctccagcagctattccgggagggtcctgaagcaggtattcgaggacggccaagaactcgagtcccccaaggaggagtaccctcactcatttctccaggagtcattagaaaccatggatggggtctatgggtctggggaggtgcctcggccccagatgtgctcacccaagctgacggctcaaagaatatccgtgtttcgggagggcaacgcttataccctagctggaggtcagccccggtttaatgactacaaagctaacgaccataaacccctccccatcatcgacttcgggaagattattatttacacgaataacctgaaaataatccggacaccaatggataaacgcgacttcgtgcgtaaaatcctgcagaaggaagaagaagctgaggaggaaagcctgatgaacaaggaggagtcctacggggggagagaccagcacgatcgccctttggtggaagccgagtctacactgccacagaatagatatacccaggagggagatattcccgaagacagctgctttcactgccggggatcagggtctgctacatgtagcttatgccacggtagcaagtttagcatgctagccaatagattcaaagaatcttacagagccctcaggtgtcctgcgtgcaacgagaacgggctccagccgtgccagatttgcaaccagtag

SEQ ID NO: 333251 - DNA, 747 bp, Artificial Sequence
  derived and/or modified sequence
atggaggaccctgagaagaagctgaaccagaagagtgatggcaagcccaggaaggtgcgcttcaagatcagcagcagctacagcggccgggtgctgaagcaggtgtttgaagatggccaggagctggagagccccaaggaggagtacccccacagcttcctgcaggagagcctggagaccatggatggagtgtatggcagcggggaggtgccccggccccagatgtgcagccccaagctgacagcccagaggatcagcgtcttccgggagggcaatgcctacaccctggccggcggccagccccgcttcaatgactacaaggccaatgaccacaagcccctgcccatcatcgactttgggaagatcatcatctacaccaacaacctgaagatcatccgcacccccatggacaagagggactttgtgaggaagatcctgcagaaggaggaggaggccgaggaggagagcctgatgaacaaggaggagagctatggaggccgggaccagcacgaccggcccctggtggaggccgagagcaccctgccccagaaccgctacacccaggagggggacatccctgaggacagctgcttccactgccggggcagcggcagcgccacctgcagcctgtgccacggcagcaagttctccatgctggccaaccgcttcaaggagagctaccgggccctgcgctgcccagcctgcaatgaaaatggcctgcagccctgccagatctgcaaccagtag

SEQ ID NO: 333252 - DNA, 747 bp, Artificial Sequence
  derived and/or modified sequence
atggaggaccctgagaaaaagctgaatcagaagagtgatggcaaaccccggaaagtacgatttaaaatctcctcctcctacagcggtcgagtattgaagcaggtctttgaggatgggcaggaattagagtcaccaaaggaggaataccctcacagttttctgcaagagtctcttgaaacaatggatggtgtttatgggtctggggaagtccccaggccccagatgtgctcccctaagctgactgctcagaggatcagtgtgtttagagagggtaatgcctacaccttggcaggcggccagcctcggttcaacgattacaaggcgaatgaccataagcccctacctattatagattttggaaagataatcatctacactaataacctgaaaatcattcgaaccccaatggacaagagagattttgtgaggaaaattctccagaaggaagaggaggctgaggaagagtctctgatgaacaaagaagaaagctatggaggcagggaccagcacgatagacctttggtggaggcagaaagcacattaccccaaaaccggtatacacaggaaggggatattcccgaggacagctgttttcactgccgagggtcgggcagtgccacctgctctctgtgccacggcagcaagttctcgatgctggccaacagatttaaggagtcctatcgggccctgaggtgccctgcctgcaatgagaatggcctacagccttgccagatttgcaatcaatag

SEQ ID NO: 333253 - DNA, 747 bp, Artificial Sequence
  derived and/or modified sequence
atggaggaccccgagaagaagctgaaccagaagagcgacggcaagccaaggaaggtgaggttcaaaatctccagcagttacagtgggcgcgtcctcaagcaggtgttcgaagatggtcaggagctggagtcacccaaggaagagtacccccattctttcctgcaggagagcctggaaactatggatggagtctatggtagcggtgaagtgcctcggcctcagatgtgcagcccaaagctcaccgctcagaggattagcgtttttcgggaggggaatgcctatacactggcggggggtcagcccagattcaacgattataaggcaaatgatcacaagcctctgcctatcatagacttcggtaaaatcatcatctatactaacaacttgaagattattagaacccccatggacaagcgggattttgtaaggaaaattcttcagaaagaggaagaggcagaagaagagtctttgatgaacaaggaggagtcttatggaggtcgagatcagcatgatagacctctcgtggaagctgagtctaccctgccacagaatcgctatacccaggaaggagacatccccgaggacagttgttttcactgcagggggagcggttccgccacctgcagcctctgccatgggagcaagtttagcatgctggccaataggtttaaagaatcgtatagggccctgcgctgccccgcatgcaatgagaacggacttcagccctgccagatttgtaaccagtag

SEQ ID NO: 333254 - DNA, 747 bp, Artificial Sequence
  derived and/or modified sequence
atggaggatcctgaaaagaaattgaatcagaagtccgacggtaaacccaggaaagtcagattcaagattagtagttcctatagtggtcgggttctgaagcaggtcttcgaagacggacaggaactggaaagcccaaaggaggagtacccacactcattcttgcaggaatccctggaaacaatggacggagtttatggatcaggtgaggttccacggcctcagatgtgttctcccaagctaaccgcacagcgaattagcgtatttcgagaaggcaatgcttatactttggcagggggacagcctaggttcaacgattacaaggctaacgaccataagcctctcccaataattgattttggtaaaatcattatttacactaataacctaaaaattatccggacaccaatggataagcgagacttcgtgcgaaagattttacagaaggaggaagaagcagaggaagagtctcttatgaacaaagaggaatcatacggaggtagagaccaacacgataggcccctggtagaggccgaaagcacactccctcagaaccgttacactcaagagggcgatattcctgaagacagttgtttccattgcaggggatctggctccgcaacttgttccctctgccatggtagcaagttctcaatgctagctaacaggttcaaggaatcatacagagccctgaggtgtcccgcttgcaatgagaacggtcttcagccctgccagatttgtaaccagtag

SEQ ID NO: 333255 - DNA, 2952 bp, Artificial Sequence
  derived and/or modified sequence
atggagatgaagctgcccggccaggagggcttcgaggccagcagcgcccccagaaacatccccagcggcgagctggacagcaaccccgaccccggcaccggccccagccccgacggccccagcgacaccgagagcaaggagctgggcgtgcccaaggaccccctgctgttcatccagctgaacgagctgctgggctggccccaggccctggagtggagagagaccggcagcagcagcgccagcctgctgctggacatgggcgagatgcccagcatcaccctgagcacccacctgcaccacagatgggtgctgttcgaggagaagctggaggtggccgccggcagatggagcgccccccacgtgcccaccctggccctgcccagcctgcagaagctgagaagcctgctggccgagggcctggtgctgctggactgccccgcccagagcctgctggagctggtggagcaggtgaccagagtggagagcctgagccccgagctgagaggccagctgcaggccctgctgctgcagagaccccagcactacaaccagaccaccggcaccagaccctgctggggcagcacccaccccagaaaggccagcgacaacgaggaggcccccctgagagagcagtgccagaaccccctgagacagaagctgccccccggcgccgaggccggcaccgtgctggccggcgagctgggcttcctggcccagcccctgggcgccttcgtgagactgagaaaccccgtggtgctgggcagcctgaccgaggtgagcctgcccagcagattcttctgcctgctgctgggcccctgcatgctgggcaagggctaccacgagatgggcagagccgccgccgtgctgctgagcgacccccagttccagtggagcgtgagaagagccagcaacctgcacgacctgctggccgccctggacgccttcctggaggaggtgaccgtgctgccccccggcagatgggaccccaccgccagaatccccccccccaagtgcctgcccagccagcacaagagactgcccagccagcagagagagatcagaggccccgccgtgcccagactgaccagcgccgaggacagacacagacacggcccccacgcccacagccccgagctgcagagaaccggcagactgttcggcggcctgatccaggacgtgagaagaaaggtgccctggtaccccagcgacttcctggacgccctgcacctgcagtgcttcagcgccgtgctgtacatctacctggccaccgtgaccaacgccatcaccttcggcggcctgctgggcgacgccaccgacggcgcccagggcgtgctggagagcttcctgggcaccgccgtggccggcgccgccttctgcctgatggccggccagcccctgaccatcctgagcagcaccggccccgtgctggtgttcgagagactgctgttcagcttcagcagagactacagcctggactacctgcccttcagactgtgggtgggcatctgggtggccaccttctgcctggtgctggtggccaccgaggccagcgtgctggtgagatacttcaccagattcaccgaggagggcttctgcgccctgatcagcctgatcttcatctacgacgccgtgggcaagatgctgaacctgacccacacctaccccatccagaagcccggcagcagcgcctacggctgcctgtgccagtaccccggccccggcggcaacgagagccagtggatcagaaccagacccaaggacagagacgacatcgtgagcatggacctgggcctgatcaacgccagcctgctgcccccccccgagtgcaccagacagggcggccaccccagaggccccggctgccacaccgtgcccgacatcgccttcttcagcctgctgctgttcctgaccagcttcttcttcgccatggccctgaagtgcgtgaagaccagcagattcttccccagcgtggtgagaaagggcctgagcgacttcagcagcgtgctggccatcctgctgggctgcggcctggacgccttcctgggcctggccacccccaagctgatggtgcccagagagttcaagcccaccctgcccggcagaggctggctggtgagccccttcggcgccaacccctggtggtggagcgtggccgccgccctgcccgccctgctgctgagcatcctgatcttcatggaccagcagatcaccgccgtgatcctgaacagaatggagtacagactgcagaagggcgccggcttccacctggacctgttctgcgtggccgtgctgatgctgctgaccagcgccctgggcctgccctggtacgtgagcgccaccgtgatcagcctggcccacatggacagcctgagaagagagagcagagcctgcgcccccggcgagagacccaacttcctgggcatcagagagcagagactgaccggcctggtggtgttcatcctgaccggcgccagcatcttcctggcccccgtgctgaagttcatccccatgcccgtgctgtacggcatcttcctgtacatgggcgtggccgccctgagcagcatccagttcaccaacagagtgaagctgctgctgatgcccgccaagcaccagcccgacctgctgctgctgagacacgtgcccctgaccagagtgcacctgttcaccgccatccagctggcctgcctgggcctgctgtggatcatcaagagcacccccgccgccatcatcttccccctgatgctgctgggcctggtgggcgtgagaaaggccctggagagagtgttcagcccccaggagctgctgtggctggacgagctgatgcccgaggaggagagaagcatccccgagaagggcctggagcccgagcacagcttcagcggcagcgacagcgaggacagcgagctgatgtaccagcccaaggcccccgagatcaacatcagcgtgaactag

SEQ ID NO: 333256 - DNA, 2952 bp, Artificial Sequence
  derived and/or modified sequence
atggagatgaagctgcctggtcaggaggggttcgaggcatcttcggcgcctaggaatatcccttctggcgagttagattcgaacccggatcccggcactggtccctcaccagacggccctagcgacacagagtcaaaggaactgggtgttcctaaggacccactactctttatacagttaaacgagctccttggttggccccaagccctcgaatggcgggagaccggaagtagttccgcatctctgctcctggatatgggagaaatgccttcaattacattatctactcacctgcaccaccgatgggtgctgtttgaagagaagttggaagtagccgctggaaggtggtcggccccacatgtaccaaccctagccttgcccagtctgcagaagctgcgatcactgcttgccgagggcttggtactcctcgattgccctgcccagagcctgcttgagctggtcgagcaggtgacccgggttgagtccctctcccccgaactgcgaggacagctgcaggccctgctgctgcaaagacctcagcactacaaccagacgacagggacaaggccatgttggggctccactcatcccaggaaagccagcgataatgaggaggcacctctacgtgagcagtgccaaaacccacttcgacagaaattgcccccaggcgccgaagccggaacggtgctggccggggagctggggtttttggcacagcctctcggcgctttcgtcagattgagaaaccctgtcgtgcttggatccttaacggaagtctcgctcccctccagattcttctgcctgttgctggggccttgtatgttaggtaaggggtaccacgaaatgggcagagctgccgccgtgctgttgtctgatccacagtttcaatggtccgtgcgtcgcgcctcgaaccttcatgacctgctggcagccctagatgccttccttgaggaggtgaccgtgctgccacctggccgctgggatcccactgcgcgcattccaccccccaaatgcttaccatctcagcacaagagattgccaagtcagcagcgcgagatccggggacctgccgttcccaggttgacttccgccgaggataggcaccggcatggaccccacgcccatagtccggaactgcagagaactggtagactgtttggtggcctgattcaggatgttagaagaaaagtaccctggtacccctcagactttctcgacgccctgcacctccaatgcttctccgctgtgttatacatatatctggccactgttacgaacgctattacttttggcggccttctgggggacgcgacagatggggctcagggggtgctggaatctttcttgggcaccgcggtagccggagccgcattctgtctaatggccgggcagcctttgacaatcctgtcgtccaccgggccggtgctggtgtttgaaaggcttttattttccttttctagggattatagtttagattatttaccgttcaggctttgggtcgggatttgggttgctacattctgcctggtgctggtagccaccgaggcctcagtgcttgtccgatactttacaagattcacggaggaagggttctgtgccctcatctccctgatcttcatatacgatgccgttggtaagatgttaaacctgacacacacctaccccatccagaaacctggtagtagcgcctacggatgtttgtgtcagtaccccggccccgggggcaacgagagccagtggatcagaacacggccaaaggatagggatgatattgtatccatggacctcggactgatcaacgcctcccttctcccacccccagagtgcactcgacaggggggtcatcccaggggacctggttgccacactgttccagacattgcttttttcagcctcttgttatttctcacaagcttttttttcgccatggccttgaagtgcgtgaagacatcgagattctttcctagtgtggtgagaaaaggtctcagcgatttttccagcgtactggctatactgctcggctgtgggcttgatgcattcctgggtcttgccaccccaaaactaatggtcccgagggaattcaaacctaccctgcccggtagaggctggctggtgtctcccttcggggccaacccatggtggtggtccgtggctgccgcactcccggctctgcttctcagtatcctgatatttatggatcaacagattacagccgtgatcctgaatagaatggaatacagactgcagaagggcgcggggtttcatcttgacttgttctgcgtggctgttctgatgttgctgaccagcgccctgggtctaccttggtacgttagcgccaccgtgatttcactggcccatatggacagtttgcgacgggaatctcgggcctgcgcaccaggggagcgccccaacttcctaggcatcagagagcagcgcctgaccggcctcgtggtattcatcttaacaggcgcgtctattttcctcgcgccagttctgaagttcatccctatgccggtcctgtatggtatttttctctatatgggcgtggctgccttgtcaagcatccagttcacaaaccgtgtgaagcttcttctaatgcccgctaaacatcagccggacttgctacttctgagacacgtacctcttactcgggtccatctttttacagccatccagctggcctgtttgggtctcctgtggatcattaaatccacaccggccgctataatctttccgctgatgttgctgggtcttgtgggtgtgaggaaggctttagaacgcgttttcagcccccaggaactcctgtggctggacgagttgatgcccgaagaggagaggtcgattccagaaaaagggctggaacctgagcactcattttccggaagtgactccgaagattccgagctgatgtaccaaccaaaggctccagaaatcaatatctctgtgaactag

SEQ ID NO: 333257 - DNA, 2952 bp, Artificial Sequence
  derived and/or modified sequence
atggagatgaagctgcccggccaggagggctttgaggccagcagcgcccccaggaacatccccagcggggagctggacagcaacccagaccccggcaccggccccagcccagatggccccagcgacacagagagcaaggagctgggcgtgcccaaggaccccctgctcttcatccagctgaatgagctgctgggctggccccaggccctggagtggagggagaccggcagcagcagcgccagcctgctgctggacatgggagagatgcccagcatcaccctgagcacccacctgcaccaccgctgggtgctgtttgaggagaagctggaggtggccgccggccgctggagcgccccccacgtgcccaccctggccctgcccagcctgcagaagctgcggagcctgctggccgagggcctggtgctgctggactgcccagcccagagcctgctggagctggtggagcaggtgaccagggtggagagcctgagccctgagctgcggggccagctgcaggccctgctgctgcagaggccccagcactacaaccagaccaccggcacccggccctgctggggcagcacccaccccaggaaggccagtgacaatgaggaggcccccctgcgggagcagtgccagaaccccctgcggcagaagctgcccccaggagctgaggccggcaccgtgctggccggggagctgggcttcctggcccagcccctgggcgcctttgtgcggctgaggaaccctgtggtgctgggcagcctgacagaggtgtccctgcccagccgcttcttctgcctgctgctgggcccctgcatgctgggcaagggctaccacgagatgggccgggctgctgctgtgctgctgagtgacccccagttccagtggagcgtgcggcgggccagcaacctgcatgacctgctggccgccctggatgccttcctggaggaggtgacagtgctgcccccaggccgctgggaccccacagcccgcatccccccacccaagtgcctgcccagccagcacaagaggctgcccagccagcagcgggagatccggggccctgctgtgccccggctgaccagcgcagaagatagacaccgccacggcccccacgcccacagccctgagctgcagaggacaggccgcctgtttggaggcctcatccaggatgtgcggaggaaggtgccctggtaccccagcgacttcctggatgccctgcacctgcagtgcttctctgctgtgctgtacatctacctggccaccgtgaccaatgccatcaccttcggcggcctgctgggagatgccacagatggagcccagggcgtgctggagagcttcctgggcacagctgtggccggggccgccttctgcctgatggccggccagcccctgaccatcctgagcagcacaggccctgtgctggtgtttgagcggctgctcttctccttcagccgggactacagcctggactacctgcccttccggctgtgggtgggcatctgggtggccaccttctgcctggtgctggtggccacagaggcctctgtgctggtgcgctacttcacccgcttcacagaggagggcttctgtgccctgatcagcctcatcttcatctatgatgctgtgggcaagatgctgaacctgacccacacctaccccatccagaagccaggcagcagcgcctacggctgcctgtgccagtacccaggccctggaggaaatgaaagccagtggatccgcacccggcccaaggacagagatgacatcgtgtccatggacctgggcctcatcaatgccagcctgctgcccccacctgagtgcacccggcagggcggccacccccggggccctggctgccacacagtgcctgacatcgccttcttcagcctgctgctcttcctgaccagcttcttctttgccatggccctgaagtgtgtgaagaccagccgcttcttccccagcgtggtgaggaagggcctgagtgacttcagctctgtgctggccatcctgctgggctgcggcctggatgccttcctgggcctggccacccccaagctgatggtgccccgggagttcaagcccaccctgcccggccggggctggctggtgagcccctttggagccaacccctggtggtggagcgtggccgccgccctgcctgccctgctgctgagcatcctgatcttcatggaccagcagatcacagctgtgatcctgaacaggatggagtaccgcctgcagaagggggccggcttccacctggacctcttctgtgtggccgtgctgatgctgctgaccagcgccctgggcctgccctggtacgtgtctgccaccgtcatcagcctggcccacatggacagcctgcggcgggagagccgggcctgtgcccctggagagcggcccaacttcctgggcatccgggagcagaggctgaccggcctggtggtgttcatcctgaccggggccagcatcttcctggcccctgtgctgaagttcatccccatgcctgtgctgtatggcatcttcctgtacatgggcgtggccgccctgagcagcatccagttcaccaacagagtgaagctgctgctgatgcctgccaagcaccagcctgacctgctgctgctgcggcacgtgcccctgaccagggtgcacctgttcaccgccatccagctggcctgcctgggcctgctgtggatcatcaagagcaccccagctgccatcatcttccccctgatgctgctgggcctggtgggcgtgaggaaggccctggagagggtcttcagcccccaggagctgctgtggctggatgagctgatgcctgaggaggagaggagcatccctgagaagggcctggagcctgagcacagcttcagcggcagtgacagtgaagattctgagctgatgtaccagcccaaggcccctgagatcaacatctctgtgaactag

SEQ ID NO: 333258 - DNA, 2952 bp, Artificial Sequence
  derived and/or modified sequence
atggagatgaagctgcccggccaggagggcttcgaggccagcagcgctcctcggaatatcccctcaggagaactggatagcaaccccgacccaggcactggcccttcgccagacggcccctctgacactgagtcaaaggagttaggtgtgcctaaggatcccctgctgtttattcagctcaacgagctgctcggctggccccaggccttagaatggagggaaacagggtctagctccgcaagcctgctactcgacatgggagaaatgccaagcatcactctaagcactcatctgcaccaccggtgggtcctctttgaggagaaacttgaggttgccgccggaaggtggtccgccccacatgtgccgaccctggccctgccttcccttcagaagctgagaagcctgcttgctgagggccttgtgctcttggattgtcccgcccagtcccttctagagcttgttgaacaggtgaccagggtcgagagcctgagcccagagcttcgtgggcagctccaggccctgctcctacaacgtccccagcactacaaccagactaccgggacgagaccgtgttgggggagtactcaccccaggaaggcatcagacaacgaggaggcgcccctgagggaacagtgccagaatccactgcgccagaagctgccccctggggctgaagccggaactgtactggcaggggagttaggcttcctagctcaaccactgggagcctttgtcagactccgtaacccagtggtcctcggctcattaaccgaagtttcattgccaagccgctttttttgcctcctgcttgggccctgtatgctgggcaaaggataccatgagatgggcagggcggctgctgtgttgctaagcgatcctcagttccagtggtctgtgcgaagggcctccaatctccatgacctgctggccgctctggatgcctttctggaagaagtgacggtactgccacccggacggtgggatccgacagcccggatccctccccccaagtgcctcccctcccagcataaacgtctgccctctcagcagcgggaaatcagaggccccgcagtacccaggttgacctcagcagaggatcgccaccggcacggaccccacgcccacagcccagaattgcagcgaaccggtagactcttcggagggttaatacaggacgtccggcggaaggttccctggtacccaagtgacttcctggacgctttacatttacaatgtttttctgcagtcctatatatttacttggccaccgtcaccaacgctatcaccttcggcggtctactcggagatgctactgacggcgctcagggcgtgctggagtccttcctcggaaccgctgttgcgggtgccgccttctgtctgatggccggacagccattgaccattctctcaagtactggaccagttctcgtcttcgagcggctcctctttagcttttcccgtgattattctctggactacctgccgttccgcctttgggtggggatttgggtagctactttctgtctggtgttagtggcgacagaagcttccgtactcgttcggtattttacacggtttacggaggagggtttttgcgcgctgatttctttgatctttatttacgatgctgtgggaaaaatgttgaacctaactcatacttaccccattcagaaacctggctctagtgcatatggctgcctgtgccaatatcctggacccggtggtaatgagagccaatggatcagaacaagaccgaaggacagggacgatatcgtttccatggatctgggcttgatcaacgcttcactgctccctccgcccgagtgcacccgtcaaggcggtcaccctaggggtccaggctgccacacagtgcccgatattgcctttttttctctgcttttattcctgacctctttcttctttgctatggctctgaagtgtgtgaagacatctcggttcttcccgtctgttgtgagaaaaggcctgagcgatttcagttccgtgctggcaattttactcggttgtgggctggacgcctttctgggcttggccacccccaagctgatggttcccagagagttcaaacctacactgcccggcagaggatggctggtctcaccctttggtgccaacccttggtggtggagcgttgctgctgcactgcccgctcttttgctgtcaatactgatctttatggaccagcagattacggccgtaatcctgaatcgcatggagtaccgcctgcagaagggagccgggttccatctcgacctgttttgtgttgcagtactgatgctcctgacctctgctctggggctcccttggtacgtgagcgccaccgtgatttccttagctcacatggactctctgaggagggagagtcgagcttgtgcacctggtgagagacccaactttctggggatcagagagcagcgtctaacagggcttgttgtgttcattctcactggcgcctccatttttctcgcgcctgtcctgaaatttatcccaatgcctgtgctgtacgggatcttcctgtatatgggcgtggcagccttatcttccattcaattcaccaaccgcgtgaaattgcttcttatgccggcgaagcaccagcccgacctcctgctactcaggcacgtgccccttacacgggttcatttgttcactgccatccagctcgcatgtctgggactactctggatcattaagtccacgcctgcagccatcatctttccactgatgctcctgggccttgtgggcgtgagaaaggcactcgagcgtgttttctccccccaggaacttctgtggctggacgagctgatgcccgaggaggagagatcaatcccagaaaagggattggagccagagcattcgttctctggatccgatagtgaagacagcgagctaatgtatcagccaaaggcaccagagatcaacattagtgtcaactag

SEQ ID NO: 333259 - DNA, 2952 bp, Artificial Sequence
  derived and/or modified sequence
atggaaatgaaactcccaggtcaggaagggttcgaggcctcttccgctcctcgcaatataccaagcggcgaattggacagcaatccggaccccggaaccggaccatctcctgatggtccatcagacaccgaatctaaggagctaggagttccaaaggatcctcttctgtttattcaactgaacgagctcctgggatggccacaggctttagagtggagggaaaccgggtcaagcagcgcttccctccttctcgatatgggcgagatgccttccatcaccctgtccacccatctacatcataggtgggtcctgttcgaagagaaactggaggtagccgctggacgctggtccgcaccacatgtccctacactagccctcccctcactgcaaaagctacgttctcttctcgctgagggattagtgctgctagattgtccggctcagtcccttcttgagttagtggagcaggttaccagagttgagagcttgtcccccgaactcagaggacaactccaggccttactactccaacgcccacagcactacaatcaaactacaggcacacgcccttgttggggaagcactcaccctcggaaggctagcgataacgaagaggccccactcagagagcagtgccagaacccgctgagacaaaagttgcctcccggtgcagaagcagggaccgtgctggccggagagctggggttcctggcacagcctctgggggcttttgtacgcctacggaatcctgttgtcctaggcagtctgaccgaggtgtccctaccctctaggttcttttgtctcctactgggcccttgcatgctcggcaaaggatatcatgagatgggaagggccgcagccgtcctgctgtctgatccccagtttcaatggagtgtgcgacgggcaagcaacttgcatgaccttctggccgcactggatgccttcctggaagaggtgactgtgcttcccccaggcaggtgggaccctaccgcccgaatccctcccccaaaatgcctgccttcacagcacaagcgcctcccaagccagcagcgagagatcaggggtccagcggtcccaaggttgacaagtgccgaggataggcataggcacgggcctcatgcgcacagtcccgagctgcagagaactggtcgcctctttgggggattaatccaggatgttcgcagaaaagtgccttggtaccctagtgatttcctggacgccctgcatctccagtgtttttcagccgtgctatacatctatttagccaccgtcaccaacgccattaccttcggaggcctgttaggcgatgccaccgatggggctcagggcgtgcttgagagttttttgggcaccgcagtggcaggagcagctttttgcttaatggcaggacagcccctgaccattctctcgagcactggaccagtgttggtgttcgagcgacttctgttctccttttccagagactactccctggactatctcccatttcggctgtgggtcgggatctgggtcgctactttttgcctggtcctggtagccaccgaggcttccgtcctcgttcgttattttacaaggttcacagaagagggattctgtgcattaatctcccttatcttcatatacgatgccgtggggaaaatgctgaacctcacacatacttaccctattcagaagccaggatccagcgcttacggctgtctgtgtcagtatccaggaccaggtggcaacgagtctcagtggatacgcacacgtccaaaagatcgcgatgatatcgtgagcatggatctgggactcattaatgcctccctgctgccccctcccgagtgcacaaggcaagggggtcatcccaggggcccagggtgtcacaccgtcccggatatcgctttcttctccttgcttctgtttctaacatctttcttttttgcaatggcactcaagtgtgtcaagacaagccgctttttcccctcagttgtgagaaagggactttcagatttctcctccgtcttggcaattctgttagggtgcggcctcgacgccttcttaggtcttgccaccccaaaactgatggtacccagggagttcaagcccacccttcccggacgtgggtggctggttagtcccttcggcgctaacccttggtggtggagtgttgcagccgctctgcccgcactcttattatcaattctgatttttatggaccagcaaattacggcagtgattctgaaccgcatggaataccggctccagaagggcgctggcttccatctagatctcttttgtgtggcggtgctaatgctcttgaccagtgctctggggcttccttggtatgtgtcagctaccgtgatcagtctggctcacatggattcacttagaagggagtctcgggcatgtgcccctggagagcggccaaattttttgggtatcagagaacaaagactgactgggctggtcgtctttattttgacaggcgctagcatttttcttgcacctgtgcttaagtttattcccatgcctgtgttgtatggcatcttcctctatatgggagtggccgcactctcttctatccaatttaccaatcgagtcaagctgctgctcatgcctgctaaacatcagcctgatctgctgctactcaggcacgtgcccctgacgagagtccacttgtttacagccatccagctggcttgcctcggtttactctggatcattaaaagcacacccgctgctataatcttcccactgatgctgctgggccttgtcggagtaagaaaagctcttgagcgggttttttctcctcaggagctgttatggctggatgagcttatgcccgaggaggagcgttcaattccagagaaggggctggagccagagcatagtttcagcgggtcggatagtgaagatagcgaactcatgtaccagccaaaagccccagaaataaacatctcagtaaattag

SEQ ID NO: 333260 - DNA, 3343 bp, Artificial Sequence
  derived and/or modified sequence
ggactgtactggttctgagattctgtgcaagcctcatggaaatgaagctgccaggccaggaagggtttgaagcctccagtgctcctagaaatattccttcaggggagctggacagcaaccctgaccctggcaccggccccagccctgatggcccctcagacacagagagcaaggaactgggagtacccaaagaccctctgctcttcattcagctgaatgagctgctgggctggccccaggcgctggagtggagagagacaggcagctcctctgcatctctgctcctggacatgggagaaatgccctcaataacactgtctacccaccttcatcacaggtgggtactgtttgaggagaagttggaggtggctgcaggccggtggagtgccccccacgtgcccaccctggcactgcccagcctccagaagctccgcagcctgctggccgagggccttgtactgctggactgcccagctcagagcctcctggagctcgtggagcaggtgaccagggtggagtcgctgagcccagagctgagagggcagttgcaggccttgctgctgcagagaccccagcattacaaccagaccacaggcaccaggccctgctggggctctactcatccaagaaaggcttctgacaatgaggaagcccccctgagggaacagtgtcagaaccccctgagacagaagctacctccaggagctgaggcagggactgtgctggcaggggagctgggcttcctggcacagccactgggagcctttgttcgactgcggaaccctgtggtactggggtcccttactgaggtgtccctcccaagcaggtttttctgccttctcctgggcccctgtatgctgggaaagggctaccatgagatgggacgggcagcagctgtcctcctcagtgacccgcaattccagtggtcagttcgtcgggccagcaaccttcatgaccttctggcagccctggatgcattcctagaggaggtgacagtgcttcccccaggtcggtgggacccaacagcccggattcccccgcccaaatgtctgccatctcagcacaaaaggcttccctcgcaacagcgggagatcagaggtcccgccgtcccgcgcctgacctcggctgaggacaggcaccgccatgggccacacgcacacagcccggagttgcagcggaccggcaggctgtttgggggccttatccaggacgtgcgcaggaaggtcccgtggtaccccagcgatttcttggacgccctgcatctccagtgcttctcggccgtactctacatttacctggccactgtcactaatgccatcacttttgggggtctgctgggagatgccactgatggtgcccagggagtgctggaaagtttcctgggcacagcagtggctggagctgccttctgcctgatggcaggccagcccctcaccattctgagcagcacggggccagtgctggtctttgagcgcctgctcttctctttcagcagagattacagcctggactacctgcccttccgcctatgggtgggcatctgggtggctaccttttgcctggtgctggtggccacagaggccagtgtgctggtgcgctacttcacccgcttcactgaggaaggtttctgtgccctcatcagcctcatcttcatctacgatgctgtgggcaaaatgctgaacttgacccatacctatcctatccagaagcctgggtcctctgcctacgggtgcctctgccaatacccaggcccaggaggaaatgagtctcaatggataaggacaaggccaaaagacagagacgacattgtaagcatggacttaggcctgatcaatgcatccttgctgccgccacctgagtgcacccggcagggaggccaccctcgtggccctggctgtcatacagtcccagacattgccttcttctcccttctcctcttccttacttctttcttctttgctatggccctcaagtgtgtaaagaccagccgcttcttcccctctgtggtgcgcaaagggctcagcgacttctcctcagtcctggccatcctgctcggctgtggccttgatgctttcctgggcctagccacaccaaagctcatggtacccagagagttcaagcccacactccctgggcgtggctggctggtgtcaccttttggagccaacccctggtggtggagtgtggcagctgccctgcctgccctgctgctgtctatcctcatcttcatggaccaacagatcacagcagtcatcctcaaccgcatggaatacagactgcagaagggagctggcttccacctggacctcttctgtgtggctgtgctgatgctactcacatcagcgcttggactgccttggtatgtctcagccactgtcatctccctggctcacatggacagtcttcggagagagagcagagcctgtgcccccggggagcgccccaacttcctgggtatcagggaacagaggctgacaggcctggtggtgttcatccttacaggagcctccatcttcctggcacctgtgctcaagttcattccaatgcctgtgctctatggcatcttcctgtatatgggggtggcagcgctcagcagcattcagttcactaatagggtgaagctgttgttgatgccagcaaaacaccagccagacctgctactcttgcggcatgtgcctctgaccagggtccacctcttcacagccatccagcttgcctgtctggggctgctttggataatcaagtctacccctgcagccatcatcttccccctcatgttgctgggccttgtgggggtccgaaaggccctggagagggtcttctcaccacaggaactcctctggctggatgagctgatgccagaggaggagagaagcatccctgagaaggggctggagccagaacactcattcagtggaagtgacagtgaagattcagagctgatgtatcagccaaaggctccagaaatcaacatttctgtgaattagctggagtaggagtctgggagtggagaccccaggaaacagcatgagatgctcagtcggcttggggaaggactgaagggcagctgccaagacctcagttacctcctgacctgagggtggagagtggcaggaagcaagcatgtttgctgtgcacttaggaaaggctggtgagccagagggactgatcaggccccattcactctctactcattaaaaggtcctgagccacgaagcgcttcccattttgaactttctgtcctcacagattctgtttgacagaatctaagggccatcagggaactcttttcatcttgcaaagagaaaaagccagtctttccagaataaatattcatctgttt

SEQ ID NO: 333261 - DNA, 3258 bp, Artificial Sequence
  derived and/or modified sequence
tctgagattctgtgcaagcctcatggaaatgaagctgccaggccaggaagggtttgaagcctccagtgctcctagaaatattccttcaggggagctggacagcaaccctgaccctggcaccggccccagccctgatggcccctcagacacagagagcaaggaactgggagtacccaaagaccctctgctcttcattcagctgaatgagctgctgggctggccccaggcgctggagtggagagagacaggcagctcctctgcatctctgctcctggacatgggagaaatgccctcaataacactgtctacccaccttcatcacaggtgggtactgtttgaggagaagttggaggtggctgcaggccggtggagtgccccccacgtgcccaccctggcactgcccagcctccagaagctccgcagcctgctggccgagggccttgtactgctggactgcccagctcagagcctcctggagctcgtggagcaggtgaccagggtggagtcgctgagcccagagctgagagggcagttgcaggccttgctgctgcagagaccccagcattacaaccagaccacaggcaccaggccctgctggggctctactcatccaagaaaggcttctgacaatgaggaagcccccctgagggaacagtgtcagaaccccctgagacagaagctacctccaggagctgaggcagggactgtgctggcaggggagctgggcttcctggcacagccactgggagcctttgttcgactgcggaaccctgtggtactggggtcccttactgaggtgtccctcccaagcaggtttttctgccttctcctgggcccctgtatgctgggaaagggctaccatgagatgggacgggcagcagctgtcctcctcagtgacccgcaattccagtggtcagttcgtcgggccagcaaccttcatgaccttctggcagccctggatgcattcctagaggaggtgacagtgcttcccccaggtcggtgggacccaacagcccggattcccccgcccaaatgtctgccatctcagcacaaaaggcttccctcgcaacagcgggagatcagaggtcccgccgtcccgcgcctgacctcggctgaggacaggcaccgccatgggccacacgcacacagcccggagttgcagcggaccggcaggctgtttgggggccttatccaggacgtgcgcaggaaggtcccgtggtaccccagcgatttcttggacgccctgcatctccagtgcttctcggccgtactctacatttacctggccactgtcactaatgccatcacttttgggggtctgctgggagatgccactgatggtgcccagggagtgctggaaagtttcctgggcacagcagtggctggagctgccttctgcctgatggcaggccagcccctcaccattctgagcagcacggggccagtgctggtctttgagcgcctgctcttctctttcagcagagattacagcctggactacctgcccttccgcctatgggtgggcatctgggtggctaccttttgcctggtgctggtggccacagaggccagtgtgctggtgcgctacttcacccgcttcactgaggaaggtttctgtgccctcatcagcctcatcttcatctacgatgctgtgggcaaaatgctgaacttgacccatacctatcctatccagaagcctgggtcctctgcctacgggtgcctctgccaatacccaggcccaggaggaaatgagtctcaatggataaggacaaggccaaaagacagagacgacattgtaagcatggacttaggcctgatcaatgcatccttgctgccgccacctgagtgcacccggcagggaggccaccctcgtggccctggctgtcatacagtcccagacattgccttcttctcccttctcctcttccttacttctttcttctttgctatggccctcaagtgtgtaaagaccagccgcttcttcccctctgtggtgcgcaaagggctcagcgacttctcctcagtcctggccatcctgctcggctgtggccttgatgctttcctgggcctagccacaccaaagctcatggtacccagagagttcaagcccacactccctgggcgtggctggctggtgtcaccttttggagccaacccctggtggtggagtgtggcagctgccctgcctgccctgctgctgtctatcctcatcttcatggaccaacagatcacagcagtcatcctcaaccgcatggaatacagactgcagaagggagctggcttccacctggacctcttctgtgtggctgtgctgatgctactcacatcagcgcttggactgccttggtatgtctcagccactgtcatctccctggctcacatggacagtcttcggagagagagcagagcctgtgcccccggggagcgccccaacttcctgggtatcagggaacagaggctgacaggcctggtggtgttcatccttacaggagcctccatcttcctggcacctgtgctcaagttcattccaatgcctgtgctctatggcatcttcctgtatatgggggtggcagcgctcagcagcattcagttcactaatagggtgaagctgttgttgatgccagcaaaacaccagccagacctgctactcttgcggcatgtgcctctgaccagggtccacctcttcacagccatccagcttgcctgtctggggctgctttggataatcaagtctacccctgcagccatcatcttccccctcatgttgctgggccttgtgggggtccgaaaggccctggagagggtcttctcaccacaggaactcctctggctggatgagctgatgccagaggaggagagaagcatccctgagaaggggctggagccagaacactcattcagtggaagtgacagtgaagattcagagctgatgtatcagccaaaggctccagaaatcaacatttctgtgaattagctggagtaggagtctgggagtggagaccccaggaaacagcatgagttcacaggtgcttactcaggaagtcaggacatttttggcctttggcttaacttccagatgctcagtcggcttggggaaggactgaagggcagctgccaagacctcagttacctcctgacctgagggtggagagtggcaggaagcaagcatgtttgctgtgcacttaggaaaggctggtgagccagagggactgatcaggccccattcactctctactcattaaaaggtcctgagccacg

SEQ ID NO: 333262 - DNA, 2952 bp, Artificial Sequence
  derived and/or modified sequence
atggaaatgaagctgcctggccaagagggctttgaggcatcttcagctcctcggaatatcccgtcaggagaactcgattccaaccccgacccaggtacaggcccgtccccagacggtccctcagacactgaaagtaaagagctgggcgttccgaaggatcccctcctgttcattcaactgaatgaattgctgggatggcctcaggccctagagtggcgagagacaggatcctcctcggcatcattactcctggatatgggagagatgccgtcgatcacattgtcaactcatttacaccacaggtgggtgttattcgaggaaaaactagaagtagcagcaggccgctggtctgccccccacgtccccactctcgcacttccaagcttacagaaactacgcagcctactggcggagggtctcgtgttgttagactgtccagctcagtctctgctggaattagtggagcaggtaacgcgggtggagtctctttcaccggaactgaggggtcaactgcaggcactgcttctgcaacggccacagcattataaccagaccaccggaactagaccctgctggggttcaacacatcctaggaaagcatccgataatgaggaggcccccttaagagaacagtgtcaaaatcccctccggcagaagctgcccccgggcgctgaggcagggaccgtgctggctggggaactggggtttctggcgcagcctttgggcgcatttgttcgcctcagaaacccagtggtgctggggtctttgaccgaagtgtccctgcctagccgatttttctgcctcttgctgggaccttgtatgctcggcaaggggtaccatgagatgggtagagctgccgcagttctgctctccgatccgcagttccaatggtccgtgagacgtgcatccaatttacacgacttgttagctgccctcgatgcgttcttagaagaagtgacagtgctgccccctgggagatgggaccctaccgctcggattcccccgccaaagtgccttccttctcagcacaaaagactgccgagtcagcagcgcgaaatacgcggaccagctgtaccccgcctaactagtgccgaggacaggcatagacacggccctcacgctcactcgcctgaactccaaagaaccgggagactgtttggaggtctgattcaggacgttagaaggaaggtgccctggtaccccagtgatttcctggacgcgctgcatttgcaatgtttcagcgctgttctctatatctatctggccactgtcacaaacgctattactttcgggggactcctgggagatgccaccgatggcgctcagggagtgctggagtcctttctcggtaccgctgtcgccggtgccgctttctgcctcatggcaggccagccactcaccatcctctcgtcaacaggccccgtcctggtgttcgagagactcctgttttccttttctcgggactatagccttgactatctgccatttcgattgtgggtgggcatttgggttgccaccttctgccttgtgctcgttgctacagaagcatcagttttggtgcgatatttcaccagatttacagaggaaggcttctgtgccctgattagcctcatcttcatttatgacgccgtggggaaaatgctgaacctaacccatacctatccaattcaaaagcccgggtcatctgcttatggttgtctgtgtcagtatcctgggccgggggggaatgaatcccagtggatccggactcgacccaaagaccgcgacgacattgtatctatggatctcggcttaattaatgccagcctcctacccccccctgagtgcacacgccagggggggcacccgcggggccctggctgtcacactgtgcccgatatagctttcttttccctgctgctgtttctcactagtttcttcttcgcaatggccctgaagtgcgtgaagaccagtcgcttctttccatcagtggtacgaaagggcctgagcgacttctcatcagtgttggctatcctgctcgggtgcggcttggacgccttcctcggcctggccacccctaagctcatggtcccccgcgagttcaaacctacactccctggcagaggctggctcgtcagcccattcggcgccaacccatggtggtggagcgttgctgctgccttacctgccctccttctatccatccttatatttatggatcagcagatcaccgcagtgatcctgaaccggatggaatacaggctgcaaaaaggggcgggcttccacctagacctgttctgcgtagctgtgctcatgctgctgacctcggcattgggcctgccgtggtatgtctcggcaaccgttattagtttggcacatatggacagccttagacgtgaatcaagagcatgcgcccctggagaaagaccaaactttctgggaattcgagaacagagactcacagggctcgtggttttcattctcacgggcgcctcaattttcctggcacccgttttgaaatttattccaatgcctgtgctgtatggcatcttcctgtacatgggcgtagcggccctctcctccatacagtttactaatagagtcaagctgctcctgatgccagcaaagcaccagcccgacctgcttttgctaaggcacgtgcctttgactagggtccacctgtttactgccatccagctcgcctgtctcgggctcctgtggatcattaagtcaaccccggctgctataatatttccactgatgctgttaggcctggtcggggtccgaaaggcgttagagagagtgttctcaccacaggaattgctgtggctcgatgagctcatgccagaggaggaaagaagcatcccagaaaaggggctggaaccggaacactccttttcaggatcagactcagaggattcggaacttatgtatcagcctaaggcacctgagatcaatatctccgttaattag

SEQ ID NO: 333263 - DNA, 2952 bp, Artificial Sequence
  derived and/or modified sequence
atggagatgaagctgcccggccaggagggcttcgaggccagcagcgctccacgaaacatcccctccggcgagctcgattccaatccagaccctggaaccggcccctcccctgacggtccttcagacacagagtctaaggaactgggggtacccaaagaccccttgctgtttatacagcttaacgaacttctcggatggccccaagcgctcgaatggcgtgagacagggtcatcttccgccagtctcctgctcgatatgggcgagatgccgagcattactttgagcacccatttgcatcacaggtgggtgctctttgaggaaaagctggaggttgctgcagggaggtggtccgctccccacgtgcctacgctggcacttccgtcgctccaaaagctgagatcccttcttgctgaagggctcgttctcctcgactgcccggcacagtctctactcgagctagtggagcaagtgacgcgagttgagtctctgagcccggaactcagagggcagttgcaggccctcctgttacagcgcccacagcactataaccaaactactgggacacgaccctgctggggcagcactcacccacggaaggcttccgataatgaggaagctcctttgcgagaacagtgtcagaaccctttgaggcaaaagttacctcccggcgctgaggcaggcacggtgctggccggggagctgggattcctggctcaaccactgggagcattcgtacgtttaaggaaccccgtcgtactggggagtctaactgaggtctcgctaccgtcacgttttttctgcttactgctgggaccgtgcatgctaggcaaaggataccatgagatgggacgggcagccgcagtactgctgtccgacccacaatttcagtggtccgtcagacgggcgagtaacctgcacgatctgctcgctgcactggacgcgttccttgaggaggtcacagtgctaccacccggacggtgggatcctacggccaggattcctccacccaagtgtctgccttcccagcacaaacgcttaccctctcagcagcgcgaaatcagggggcccgccgtgcctcggttgacatccgccgaggacagacatcggcacggaccgcatgctcactcgcccgaacttcagcggactgggagattgttcggcgggttgattcaggacgtgaggcgcaaggtgccttggtacccaagcgatttcttggacgctctgcacctccagtgcttttcagccgtgttatacatttacttagcaaccgtcactaatgctatcacttttggcgggctcctgggagacgccaccgatggcgcgcagggggtgctggagtcttttctagggaccgccgtggcgggcgccgccttctgcctaatggcagggcagccacttaccatcctctcatcaactggccctgtgctggtgttcgagagattgttgttcagcttctctcgcgattattcgcttgattacctccccttccgtctgtgggtgggcatctgggtggccacgttctgcctagttctggtggccaccgaggctagcgtcctggtgcgctattttacccgctttacggaggaggggttctgtgcattaataagtttgatctttatatatgacgctgttggtaaaatgctcaatcttacacacacctatcccatccagaaaccgggctcgagtgcctatggatgcctctgccagtatccaggtcccggaggaaatgaaagtcagtggatcagaactaggcccaaagaccgagacgacatcgtttccatggaccttggcttgatcaatgcgagcctgctccccccacctgaatgcacccgccagggagggcacccccgtgggcccggatgccacacagttcccgacatcgcctttttctcattgctgctctttctgacaagtttcttttttgccatggccttgaagtgcgtcaagacctctagattttttccttcagtggtgaggaagggcctgtcagatttctcaagcgtgctcgcaattctgcttggatgtggtctggacgcattcctcgggttagccaccccaaagctgatggtgccccgtgagttcaagcccaccctcccagggcgagggtggcttgtctctccttttggagcaaatccctggtggtggagtgtggcagctgctttgcccgccctactcttaagtatactgatcttcatggaccagcaaataacggccgtcatcttgaatcgcatggaataccgcctccagaaaggcgccgggtttcacttggacctattctgtgttgccgtgcttatgctcctaactagtgccctaggattaccctggtacgtttcagcaacagtgatctcattagcacacatggattctctccggcgcgagagtagagcctgtgcacccggtgaacggcccaatttcctcgggatccgggagcagcgcctgaccggactcgttgtgttcatcctgaccggagcctccattttcctcgcgcccgtcctcaagtttattccaatgccagtgttatatgggatatttctctacatgggagtcgctgccctttcaagtattcagttcaccaatagggtgaaactgctattgatgccagctaagcatcaacctgatctgctgctgttaagacacgtgccactcacccgggtccatctctttacagcaatacagttggcttgtttgggcctgctgtggattattaaatctacccccgccgctatcatctttcccctgatgcttctcgggctagtgggtgttaggaaagccttggagcgtgtttttagtccacaggagttgctttggttggacgaattaatgcccgaagaggaacgctctattcccgaaaagggattggaaccggagcatagtttttcaggaagtgactccgaggattcagagttaatgtaccagcctaaggcacctgagatcaacatctccgtcaactag

SEQ ID NO: 333264 - DNA, 2952 bp, Artificial Sequence
  derived and/or modified sequence
atggaaatgaagttacctggccaagaaggttttgaggccagctcagccccacgtaacatcccctcaggcgagctggatagtaaccctgaccccggaactgggcctagtcccgatggaccatcagacacagagagtaaggaactgggtgttcctaaggaccccctgcttttcatccagctaaatgaattgcttggatggcctcaggcactcgagtggcgagagactggtagcagttcagcctccctgctgctggacatgggcgagatgcccagtattactctgagcacgcacctccaccacagatgggtcttattcgaggaaaagctcgaggtggccgctgggagatggagtgcgcctcacgtacctacgttagcgcttccaagcctccagaaacttcgaagcctgctggcagagggattggttctgctggattgtcctgcccaatctttgctcgagctcgtggaacaagtgactagagtggagtcactaagtccagaactgagaggacaactccaagccttactcctgcagcggcctcagcattacaaccaaacaactggaaccaggccatgctggggatccactcaccctagaaaagcgtccgacaatgaagaagccccactgcgtgagcagtgtcagaatccattgagacagaagctgccccctggcgctgaagcaggcactgttctggcaggcgagctggggttcctggcacagcctcttggagcatttgtgcggctgagaaaccccgtcgtccttgggagcctgaccgaggttagtctcccttcaaggtttttctgcctgctgctgggcccttgcatgctgggcaaagggtatcatgagatggggcgtgctgctgccgttttgctgtccgatcctcagtttcagtggagcgtccgtagggcatctaatctgcacgaccttttagcagctttagatgcattcttggaggaggtcaccgtgctccccccaggacggtgggatcccaccgccaggataccccctcctaaatgcctcccgtctcagcataaaagattaccctcccagcagcgggaaatcagaggtccggctgtccccaggcttacctccgcggaggaccgccaccgccacgggcctcacgctcacagtcccgagttgcagcgcaccggacggttatttggcggactaattcaggatgtgcgccgaaaggtgccttggtacccttcagatttcttggatgccctgcacttgcaatgtttcagcgccgtgctgtacatataccttgctaccgtcactaacgcgatcactttcgggggactgctaggtgatgctacggatggtgcccagggggtgctggaatcttttctcggtactgcagtcgcaggtgcagcgttttgtctgatggctggtcagcctctgactatacttagtagtacaggtccagtactggtgtttgagcgtctgctcttctccttttccagggattactctctcgattatctgcccttccggctgtgggtcggtatctgggtcgctactttttgcctggtgctggtcgctacagaagcaagcgttctggtccggtattttaccagattcacagaggaggggttttgtgccttgatatccctgatttttatttatgatgccgttgggaaaatgcttaatctcacacatacgtatcctatccagaagcccggatcctccgcctatggctgtttgtgccagtatccaggccctggcggaaatgagtcacagtggataagaacacgccctaaggaccgggatgacatcgtgtcgatggatttagggcttatcaatgccagccttcttccgcctccagagtgtactcgacaggggggacatccaaggggacctgggtgccacactgtgccagacatagcattcttttccctgcttttgttcttgacatccttcttcttcgccatggcgcttaagtgcgtgaagaccagcagattttttcctagcgtggtgaggaaaggcttatcagacttctcctctgtcctagcaatccttttgggttgtggtctcgatgcttttctgggcctagcaacacctaagcttatggtgccccgagagttcaaacccacactacctgggagaggatggctggtgtcccccttcggagcgaacccatggtggtggagcgtggctgctgccttgcctgctctcttgctttcgatcttaatttttatggaccagcaaatcaccgccgtgattttaaatcgaatggaatacagactgcaaaaaggtgccggtttccatctcgatttattttgcgttgccgttctgatgttgctaaccagtgctcttggcctcccctggtatgtgagcgccactgtgattagtctggcccatatggactcgctgagacgcgagagtcgcgcttgcgccccaggtgaaagacctaattttttaggaatccgagaacagaggctgacaggactcgtggtctttattttgacaggcgcatccattttcctggcgccagttctgaaattcatcccaatgcccgtattgtatggcatcttcttgtatatgggggttgctgctctgtctagtatacaatttaccaatagagtcaagctgctgttgatgccagctaaacaccagccggacctcctactcttacgacatgttccactgactagagtgcaccttttcactgctatccagcttgcgtgcctcggcctcctgtggattattaagtccacaccagctgctatcatctttccactaatgctgctcggtctcgtgggagtgaggaaggcactggagcgagttttctccccccaggaactgctctggctggacgaattaatgcccgaggaagagagaagcattcctgaaaagggactcgaacctgaacacagtttttctggatccgactccgaggacagcgagctgatgtatcagccaaaagcgcctgagataaacatctcggttaactag

SEQ ID NO: 333265 - DNA, 2838 bp, Artificial Sequence
  derived and/or modified sequence
ctggttctgagattctgtgcaagcctcatggaaatgaagctgccaggccaggaagggtttgaagcctccagtgctcctagaaatattccttcaggggagctggacagcaaccctgaccctggcaccggccccagccctgatggcccctcagacacagagagcaaggaactgggagtacccaaagaccctctgctcttcattcagctgaatgagctgctgggctggccccaggcgctggagtggagagagacaggcaggtgggtactgtttgaggagaagttggaggtggctgcaggccggtggagtgccccccacgtgcccaccctggcactgcccagcctccagaagctccgcagcctgctggccgagggccttgtactgctggactgcccagctcagagcctcctggagctcgtggagcaggtgaccagggtggagtcgctgagcccagagctgagagggcagttgcaggccttgctgctgcagagaccccagcattacaaccagaccacaggcaccaggccctgctggggctctactcatccaagaaaggcttctgacaatgaggaagcccccctgagggaacagtgtcagaaccccctgagacagaagctacctccaggagctgaggcagggactgtgctggcaggggagctgggcttcctggcacagccactgggagcctttgttcgactgcggaaccctgtggtactggggtcccttactgaggtgtccctcccaagcaggtttttctgccttctcctgggcccctgtatgctgggaaagggctaccatgagatgggacgggcagcagctgtcctcctcagtgacccgcaattccagtggtcagttcgtcgggccagcaaccttcatgaccttctggcagccctggatgcattcctagaggaggtgacagtgcttcccccaggtcggtgggacccaacagcccggattcccccgcccaaatgtctgccatctcagcacaaaaggcttccctcgcaacagcgggagatcagaggtcccgccgtcccgcgcctgacctcggctgaggacaggcaccgccatgggccacacgcacacagcccggagttgcagcggaccggcaggctgtttgggggccttatccaggacgtgcgcaggaaggtcccgtggtaccccagcgatttcttggacgccctgcatctccagtgcttctcggccgtactctacatttacctggccactgtcactaatgccatcacttttgggggtctgctgggagatgccactgatggtgcccagggagtgctggaaagtttcctgggcacagcagtggctggagctgccttctgcctgatggcaggccagcccctcaccattctgagcagcacggggccagtgctggtctttgagcgcctgctcttctctttcagcagagattacagcctggactacctgcccttccgcctatgggtgggcatctgggtggctaccttttgcctggtgctggtggccacagaggccagtgtgctggtgcgctacttcacccgcttcactgaggaaggtttctgtgccctcatcagcctcatcttcatctacgatgctgtgggcaaaatgctgaacttgacccatacctatcctatccagaagcctgggtcctctgcctacgggtgcctctgccaatacccaggcccaggaggaaatgagtctcaatggataaggacaaggccaaaagacagagacgacattgtaagcatggtgcgcaaagggctcagcgacttctcctcagtcctggccatcctgctcggctgtggccttgatgctttcctgggcctagccacaccaaagctcatggtacccagagagttcaagcccacactccctgggcgtggctggctggtgtcaccttttggagccaacccctggtggtggagtgtggcagctgccctgcctgccctgctgctgtctatcctcatcttcatggaccaacagatcacagcagtcatcctcaaccgcatggaatacagactgcagaagggagctggcttccacctggacctcttctgtgtggctgtgctgatgctactcacatcagcgcttggactgccttggtatgtctcagccactgtcatctccctggctcacatggacagtcttcggagagagagcagagcctgtgcccccggggagcgccccaacttcctgggtatcagggaacagaggctgacaggcctggtggtgttcatccttacaggagcctccatcttcctggcacctgtgctcaagttcattccaatgcctgtgctctatggcatcttcctgtatatgggggtggcagcgctcagcagcattcagttcactaatagggtgaagctgttgttgatgccagcaaaacaccagccagacctgctactcttgcggcatgtgcctctgaccagggtccacctcttcacagccatccagcttgcctgtctggggctgctttggataatcaagtctacccctgcagccatcatcttccccctcatgttgctgggccttgtgggggtccgaaaggccctggagagggtcttctcaccacaggaactcctctggctggatgagctgatgccagaggaggagagaagcatccctgagaaggggctggagccagaacactcattcagtggaagtgacagtgaagattcagagctgatgtatcagccaaaggctccagaaatcaacatttctgtgaattagctggagtaggagtctgggagtggagaccccaggaaacagcatgagttcacaggtgcttactcaggaagtcaggacatttttggcctttggcttaacttccagatgctcagtcggcttggg

SEQ ID NO: 333266 - protein, 251 aa, Artificial Sequence
  derived and/or modified sequence
MIPKEQKGPVMAAMGDLTEPVPTLDLGKKLSVPQDLMMEELSLRNNRGSLLFQKRQRRVQKFTFELAASQRAMLAGSARRKVTGTAESGTVANANGPEGPNYRSELHIFPASPGASLGGPEGAHPAAAPAGCVPSPSALAPGYAEPLKGVPPEKFNHTAISKGYRCPWQEFVSYRDYQSDGRSHTPSPNDYRNFNKTPVPFGGPLVGGTFPRPGTPFIPEPLSGLELLRLRPSFNRVAQGWVRNLPESEEL

SEQ ID NO: 333267 - DNA, 756 bp, Artificial Sequence
  derived and/or modified sequence
atgattcctaaggaacaaaaaggacctgtcatggcagccatgggggacctgacagaacccgtgcctacattggacttgggcaagaaactgtcagtgcctcaggatctgatgatggaggagctttccctccggaacaataggggttctttactatttcaaaaacgtcaacggcgagttcagaagttcacattcgaactggcagccagtcaaagggctatgctggccgggtcagctagaaggaaggtaactggtacggctgagtcaggaaccgtggccaacgcaaacggtcctgaggggcctaactaccggagtgagctgcacatcttccccgctagtccaggagccagccttggcggacctgaaggggctcaccccgccgctgctcccgcgggctgcgtgcccagcccgagtgccctggctccgggatacgctgaacccttgaagggagtgcccccggagaaattcaatcacactgccattagtaaggggtaccgctgcccctggcaggaatttgtgtcatacagagactaccagtcagacggacgctcccatacaccatctcccaacgactacaggaacttcaacaagaccccagttcccttcggtggcccccttgtcgggggcactttcccccgtcccggaactccttttatccctgagccgctgagtggcctcgagctactgcgcctgagaccctccttcaatagggtggcccaaggttgggtgcgcaaccttccggaatcagaggaactgtag

SEQ ID NO: 333268 - DNA, 756 bp, Artificial Sequence
  derived and/or modified sequence
atgatccccaaggagcagaaaggcccggttatggccgccatgggcgatcttactgaacctgtgccaactctcgacctggggaagaaactctcggtcccgcaggacctgatgatggaggagctttcactgaggaacaatcgcgggtctctgctgtttcagaagaggcagaggagggtgcagaaattcacttttgaattggccgcatctcaacgtgctatgttagcgggatcagctagacgcaaggttacaggcacagctgagagtggtactgttgccaacgcaaatggtcctgaaggtcccaactataggtccgagctccacatcttcccagcttcgcccggggccagtctcggcggtcccgagggcgcgcacccggccgccgcacccgccggctgcgtcccttccccaagcgctctcgccccaggctacgcagagccccttaaaggagtcccccctgagaaatttaaccacactgccatcagcaaaggctatcgctgtccttggcaggagttcgtcagctatagagattaccagtctgacggacgttcccacactccaagcccaaatgactaccgcaattttaacaagacacctgttcccttcggtggtccgctggttggcggcacctttccacggccgggcaccccctttatcccggagccactctccgggctggagttgttacgattgagaccttccttcaaccgagtggcccagggatgggtgcgcaacctgcctgaaagtgaagaattgtag

SEQ ID NO: 333269 - DNA, 756 bp, Artificial Sequence
  derived and/or modified sequence
atgatccccaaggagcagaagggccctgtgatggccgccatgggagacctgacagagcctgtgcccaccctggacctgggcaagaagctgtctgtgccccaggacctgatgatggaggagctgagcctgaggaacaacagaggcagcctgctcttccagaagaggcagaggagagtgcagaagttcacctttgagctggccgccagccagagggccatgctggccggcagcgcccggaggaaggtgactggaacagctgagagcggcaccgtggccaatgccaatggacctgagggccccaactacagaagtgagctgcacatcttccctgccagccctggggccagcctgggcggccctgagggcgcccaccctgctgctgccccagctggctgtgtgcccagccccagcgccctggcccctggctacgccgagcccctgaagggcgtgcccccagagaagttcaaccacacagccatcagcaagggctaccgctgcccctggcaggagtttgtgtcctacagagactaccagagtgatggccgcagccacacccccagccccaatgactacagaaacttcaacaagacccctgtgccctttggaggccccctggtgggcggcaccttccccaggcctggcacccccttcatccctgagcccctgagcggcctggagctgctgcggctgcggcccagcttcaacagagtggcccagggctgggtgaggaacctgcctgagagcgaggagctgtag

SEQ ID NO: 333270 - DNA, 3445 bp, Artificial Sequence
  derived and/or modified sequence
caggagagaagaaaggaaggaagaaaaggataagtcaagcaaagatattgaggagcaattcattcatccatctatctatccatccattccttccttcgacaaatatctgctgagttcctatcaagcaccattcttggcactaaggatataacagttaacaagcggaagctaccagcagctgaccctcaacatttccaggatgatccccaaggagcagaaggggccagtgatggctgccatgggggacctcactgaaccagtccctacgctggacctgggcaagaagctgagcgtgccccaggacctgatgatggaggagctgtcactacgcaacaacagagggtccctcctcttccagaagaggcagcgccgtgtgcagaagttcactttcgagttagcagccagccagcgggcgatgctggccggaagcgccaggaggaaggtgactggaacagcggagtcggggacggttgccaatgccaatggccctgaggggccgaactaccgctcggagctccacatcttcccggcctcacccggggcctcactcgggggtcccgagggcgcccaccctgcagccgcccctgctgggtgcgtccccagccccagcgccctggcgccaggctatgcggagccgctgaagggcgtcccgccagagaagttcaaccacaccgccatctccaagggctaccgctgcccttggcaggagttcgtcagctaccgggactaccagagcgatggccgaagtcacacccccagccccaacgactaccgaaatttcaacaagaccccggtgccatttggaggacccctcgtggggggcacttttcccaggccaggcacccccttcatcccggagcccctcagtggcttggaactcctccgtctcagacccagcttcaacagagtggcccagggctgggtccgtaacctcccagagtccgaggagctgtagccctagcctgaatcttcagttccccagtctcgggggcctggtaacatccggagccaagacttgtggacagcacttcacagttgaagaagggccttcacacacaaaacctgattgcaaatggcttcagaggtcaccaagttcagtcgtcccaaaacatgggtgtgtttcaaaattacctggggatgttgttccaaatccagacaactggactgtcccagacttgcagcatcagagtctcctgagtcgaggaatctgtattattaatagcaaccagggccgggtgtcgtggctcacgcctgtcatcccagcactttgggaggccgaggcaggaggatcacctgaggtcaggagtttgagaccagtctggccaaaatagtggaaccccgtcgctactaaaaatacaaaaatgagtcggacatggtggtgcatgcctgtaatcccagctacttgggaggctgagacaggagaatcacttgaactaggaggcagaggttgcagtgagccgagattgcgccactgcaccccagcctggacaacagagtgagactccttctcaaaagtaaataaataaatagcaaccagtactccaggtgattccagcataacttatccatggtttgtgtcattaggagtccacatccacacctctgctctttcctgttcctgtagtgtacactcccccggtgacagggtgctcactggcaccccatcttcctgtgaataactcaaataattagaaaatgttccttttactgagatgcagttggtcttcatctattcatgctctaaacagttcctaagcgctgactgtgcgctagacactgccaggcccgggcctcgaggaggaaaagacagtagggaagacattatagagcatgaagtcaccataattttccctaaagcatgcttattgacaattgaggaacaaagtgttgtggagcagaagaaggagtccctcaccctaggtgtgagatgggattctggaagcttcctgaaggatttgagtgggaccttgtgggaggcgtgagagtccatgaagggggtgtgagggggagggtatttctggaaagtggaccagcatgtgcaaaaatatggaactgagcacgggtgcagggtgttctgcagaagggagaaggctgtgctagaggagccagtgagggccagcatggggtgggcttcactaaggaaatggggaaggttttagtgatgggtcttgctgggtgctgtgtggggcgcatattggagaagggtaatgccagaagccaggaagcctgcaagggatgaggccatgggaatggagagaaggggccacccactgggcacctaacaggacaggtgcaaagtggggtgcttattaagattccttctttccactccattttgagcaggctgcttaaagtggtggtgatgatgatgatgatgatggcagctttatatcgagtgcctcagtgcttgggctggtagtagtttctctacatatcttatttctaattctcagaacaaccctgagagaaagatattgttgtccccactttacagatgtggatatttaggccaaaaggaggaagtgacttgtccaggggcagacaccaaatgggaatctgattccagtggatgtctcttttcagtgcactgggtggtcaatgcccactcgctctgaaatcatctgactgtgatgccctgccttggagtttagaagttgagtgcaggcttgggagtcagactggatggggtaggttctaactctgccactgctagccggatgaacttgagcaagtcatttcacatctccgagcctctgtttctccaagtgtaagatgaggacaagtataaaacctcctttatgggtttgttgtgaacacagtgcagggcacatttataataagagctcagtcaatggtaggtttcatgcaactgctgctctaggctggaaaagttgttcttgcactggatgcagcatgagaagctggctgctaagatgtcactgggggtcactaaagctgaagcctgaaggaaagcctctcattgctgtagagctctccctgcctctctctctgggggcgatggggaaggtcaggagtccagcccattcccagggtgtgtgggatagcgattgcattttccttttgctctggagtttcactccccttctgggtcccaagggcccaatggcctgacttttagaattgcttgcaattggtgttttctcttgaatttgggggctgccatttaaagccaggtttccatgagctgaagaccagccattcaagaatctgaaaagtagacaagaggactccagttgcctcaggttggttctgctgtgctctggaaagtaactgcagccaccaggtatgaaaaggagcctggtggggagaccactgcacccaaaacaaatcctttcttcttctgagaatgtgactttttctggtgttgtaaaaaagaaaaaaaaaagaatgctcattgtaaaaataaaaaaataataataagcaa

SEQ ID NO: 333271 - DNA, 1451 bp, Artificial Sequence
  derived and/or modified sequence
aagaaaggcaggagagaagaaaggaaggaagaaaaggataagtcaagcaaagatattgaggagcaattcattcatccatctatctatccatccattccttccttcgacaaatatctgctgagttcctatcaagcaccattcttggcactaaggatataacagttaacaagcggaagctaccagcagctgaccctcaacatttccaggtgactttggtgtgtgcatatgtgagtgtgtgtgtacacgtgggtgcaagccctctgtctgcacaggcctgttgccagggcacctgtcttccctagggtctggtgcttttagcctctggctccagctcctattgcagcccgaaataaggctgtgacccatggcaaggcaggaatgattctcatcagctgaagccagagctggctgcaggggacaccctgctcgctgcctactgactgctgaccgctgactgcctacagggacgccacgcaactctcagcttcccgacagaggtgttaatcttgagggtctaagattccctcctgcctattgtggtcccatcctctcaggatgatccccaaggagcagaaggggccagtgatggctgccatgggggacctcactgaaccagtccctacgctggacctgggcaagaagctgagcgtgccccaggacctgatgatggaggagctgtcactacgcaacaacagagggtccctcctcttccagaagaggcagcgccgtgtgcagaagttcactttcgagttagcagccagccagcgggcgatgctggccggaagcgccaggaggaaggtgactggaacagcggagtcggggacggttgccaatgccaatggccctgaggggccgaactaccgctcggagctccacatcttcccggcctcacccggggcctcactcgggggtcccgagggcgcccaccctgcagccgcccctgctgggtgcgtccccagccccagcgccctggcgccaggctatgcggagccgctgaagggcgtcccgccagagaagttcaaccacaccgccatctccaagggctaccgctgcccttggcaggagttcgtcagctaccgggactaccagagcgatggccgaagtcacacccccagccccaacgactaccgaaatttcaacaagaccccggtgccatttggaggacccctcgtggggggcacttttcccaggccaggcacccccttcatcccggagcccctcagtggcttggaactcctccgtctcagacccagcttcaacagagtggcccagggctgggtccgtaacctcccagagtccgaggagctgtagccctagcctgaatcttcagttccccagtctcgggggcctggtaacatccggagccaagacttgtggacagcacttcacagttgaagaagggccttcacacacaaaacctgattgcaaatggcttcagaggtcaccaagtt

SEQ ID NO: 333272 - DNA, 756 bp, Artificial Sequence
  derived and/or modified sequence
atgatccccaaggagcagaagggccccgtgatggccgccatgggcgatctgaccgagcccgtacccacgctggatctcggaaagaaattgtccgtgccgcaagacctcatgatggaagaactctctctaagaaataatcggggctctctgctcttccagaagcgacagcgacgagtgcagaagtttaccttcgagctcgccgcctcgcagcgtgccatgttggcagggagcgctaggaggaaggtcactggtactgccgagtctgggacagtggctaatgccaacgggccagagggacccaattaccgttccgaattacacatcttccccgcttcccccggggcttcactgggcgggcccgaaggcgcacacccagcagccgctccagcaggctgtgtgccatccccaagcgcgctcgctcccggctacgccgagcccctaaagggggtgccccccgagaagttcaatcatacagccatcagcaaaggatacaggtgcccatggcaagagttcgtttcgtacagagattatcaatcggacggaaggtcccacactccaagcccaaatgactataggaacttcaataagactccagtgccttttggcggacccctggttggggggacttttccgcggccaggcacacctttcattccggagcccctgtcaggcctagagcttctgaggctgaggcctagctttaatagggtcgcgcaaggatgggtgcggaatctgcccgagtctgaagaactctag

SEQ ID NO: 333273 - DNA, 756 bp, Artificial Sequence
  derived and/or modified sequence
atgatccccaaggagcagaagggccccgtgatggccgccatgggcgaccttaccgaacccgtgcccacgctcgacttaggtaagaagctatccgtcccccaggatctgatgatggaagagctgagcctgaggaataatcgcggtagcctgctgttccagaaaaggcagcgccgggtgcagaagttcaccttcgagttagcagcatcgcaacgcgctatgctggcaggctcagcaagacggaaagtgaccggcacagccgaatcaggcaccgtggccaatgcaaatgggcccgaaggccctaactacaggtccgaactacatatcttcccagctagccccggagccagcctaggtgggcccgagggtgcccacccagcagccgcgccggccggttgtgtgccatcccctagcgccctggcacccggatacgcagagcctttaaagggcgtccccccagaaaagtttaaccatactgctatttccaagggctatagatgcccatggcaggagttcgtgtcttatcgggattaccaaagtgatggtaggtcccatacaccctcccccaacgactatagaaatttcaacaaaactccagtgcccttcggcggaccccttgtcgggggaacttttccaaggcccggaactccatttatccctgagcctctctctgggctggaattactccggctgcgccctagcttcaacagggtcgcacagggctgggtgagaaacctccccgaatccgaggagctctag

SEQ ID NO: 333274 - DNA, 756 bp, Artificial Sequence
  derived and/or modified sequence
atgatccccaaggagcagaagggccctgtgatggccgcaatgggagatctaaccgagcccgtgccaaccctggacctcgggaagaaactcagtgtcccccaggaccttatgatggaggagctcagtctgcgtaataaccgcggatcgctcttgtttcagaaaaggcagcgcagggtccaaaaattcaccttcgaacttgccgctagtcagagggccatgctggcagggagtgcaaggcggaaagttaccggaactgctgagagcggcactgtcgcaaacgcaaacggcccagagggaccaaattataggagtgaactccacattttcccagcctcccctggcgctagtttgggtggcccagaaggcgcacaccccgctgctgcaccagccggatgtgtcccatccccttctgcactcgcacccggatacgcagaaccgctgaagggggtcccaccggagaaatttaaccacactgccatatctaagggctataggtgcccatggcaggagttcgtttcatatagagactatcagagcgatgggagatctcacaccccttcacccaatgattaccgaaactttaacaaaactcccgtccccttcggcggtccgctggtgggcggtacattcccacgaccaggcaccccctttataccggagcccctgagcggattagaacttcttagactcagaccgagctttaatagagtggcccagggatgggtgcggaatctacctgaaagcgaggagctgtag

SEQ ID NO: 333275 - DNA, 756 bp, Artificial Sequence
  derived and/or modified sequence
atgatcccaaaagaacagaaaggccctgtgatggccgctatgggtgatctgacagagcccgtgcccactctcgatctcggaaagaagctcagtgtcccacaggacctgatgatggaggaactctcactgagaaacaacaggggatccctcctttttcaaaagaggcaaaggcgcgtccaaaagtttacctttgaacttgctgctagtcagagagcgatgttggccggttctgctaggagaaaggtgaccggcactgccgagtccggtactgtggccaatgcaaacggccctgagggcccaaactacagaagtgaactacatatctttcctgcctctccaggcgcatcacttgggggtcctgagggagctcaccctgccgcagctcctgcaggatgcgtgccgagtccttccgcccttgctcctggctacgcagagccactgaaaggcgtgcccccagagaaatttaatcacacagccatctccaaaggttaccgctgcccctggcaggaatttgtgagttaccgtgactaccagtctgatggacggagtcacacaccaagccctaacgattatcggaactttaacaagactcctgtcccttttggagggccactagtgggaggcactttcccgagaccaggtacaccctttatacccgaaccactatccggactagagctattacgactgaggccctcctttaaccgcgtggcgcaggggtgggtgcgaaacctccccgagtccgaagaactgtag

SEQ ID NO: 333276 - DNA, 756 bp, Artificial Sequence
  derived and/or modified sequence
atgatccccaaggagcagaagggccccgtgatggccgccatgggcgacctgaccgagcccgtgcccaccctggacctgggcaagaagctgagcgtgccccaggacctgatgatggaggagctgagcctgagaaacaacagaggcagcctgctgttccagaagagacagagaagagtgcagaagttcaccttcgagctggccgccagccagagagccatgctggccggcagcgccagaagaaaggtgaccggcaccgccgagagcggcaccgtggccaacgccaacggccccgagggccccaactacagaagcgagctgcacatcttccccgccagccccggcgccagcctgggcggccccgagggcgcccaccccgccgccgcccccgccggctgcgtgcccagccccagcgccctggcccccggctacgccgagcccctgaagggcgtgccccccgagaagttcaaccacaccgccatcagcaagggctacagatgcccctggcaggagttcgtgagctacagagactaccagagcgacggcagaagccacacccccagccccaacgactacagaaacttcaacaagacccccgtgcccttcggcggccccctggtgggcggcaccttccccagacccggcacccccttcatccccgagcccctgagcggcctggagctgctgagactgagacccagcttcaacagagtggcccagggctgggtgagaaacctgcccgagagcgaggagctgtag

SEQ ID NO: 333277 - protein, 474 aa, Artificial Sequence
  derived and/or modified sequence
MSSEDREAQEDELLALASIYDGDEFRKAESVQGGETRIYLDLPQNFKIFVSGNSNECLQNSGFEYTICFLPPLVLNFELPPDYPSSSPPSFTLSGKWLSPTQLSALCKHLDNLWEEHRGSVVLFAWMQFLKEETLAYLNIVSPFELKIGSQKKVQRRTAQASPNTELDFGGAAGSDVDQEEIVDERAVQDVESLSNLIQEILDFDQAQQIKCFNSKLFLCSICFCEKLGSECMYFLECRHVYCKACLKDYFEIQIRDGQVQCLNCPEPKCPSVATPGQVKELVEAELFARYDRLLLQSSLDLMADVVYCPRPCCQLPVMQEPGCTMGICSSCNFAFCTLCRLTYHGVSPCKVTAEKLMDLRNEYLQADEANKRLLDQRYGKRVIQKALEEMESKEWLEKNSKSCPCCGTPIEKLDGCNKMTCTGCMQYFCWICMGSLSRANPYKHFNDPGSPCFNRLFYAVDVDDDIWEDEVED

SEQ ID NO: 333278 - protein, 348 aa, Artificial Sequence
  derived and/or modified sequence
MQFLKEETLAYLNIVSPFELKIGSQKKVQRRTAQASPNTELDFGGAAGSDVDQEEIVDERAVQDVESLSNLIQEILDFDQAQQIKCFNSKLFLCSICFCEKLGSECMYFLECRHVYCKACLKDYFEIQIRDGQVQCLNCPEPKCPSVATPGQVKELVEAELFARYDRLLLQSSLDLMADVVYCPRPCCQLPVMQEPGCTMGICSSCNFAFCTLCRLTYHGVSPCKVTAEKLMDLRNEYLQADEANKRLLDQRYGKRVIQKALEEMESKEWLEKNSKSCPCCGTPIEKLDGCNKMTCTGCMQYFCWICMGSLSRANPYKHFNDPGSPCFNRLFYAVDVDDDIWEDEVED

SEQ ID NO: 333279 - protein, 132 aa, Artificial Sequence
  derived and/or modified sequence
MSSEDREAQEDELLALASIYDGDEFRKAESVQGGETRIYLDLPQNFKIFVSGNSNECLQNSGFEYTICFLPPLVLNFELPPDYPSSSPPSFTLSGKWLSPTQLSALCKHLDNLWEEHRGSVVLFAWMQFLKE

SEQ ID NO: 333280 - protein, 171 aa, Artificial Sequence
  derived and/or modified sequence
MSSEDREAQEDELLALASIYDGDEFRKAESVQGGETRIYLDLPQNFKIFVSGNSNECLQNSGFEYTICFLPPLVLNFELPPDYPSSSPPSFTLSGKWLSPTQLSALCKHLDNLWEEHRGSVVLFAWMQFLKEETLAYLNIVSPFELKIGSQKKVQRRTAQASPNTELDFGG

SEQ ID NO: 333281 - protein, 185 aa, Artificial Sequence
  derived and/or modified sequence
MSSEDREAQEDELLALASIYDGDEFRKAESVQGGETRIYLDLPQNFKIFVSGNSNECLQNSGFEYTICFLPPLVLNFELPPDYPSSSPPSFTLSGKWLSPTQLSALCKHLDNLWEEHRGSVVLFAWMQFLKEETLAYLNIVSPFELKIGSQKKVQRRTAQASPNTELDFGGAAGSDVDQEEIVDE

SEQ ID NO: 333282 - protein, 278 aa, Artificial Sequence
  derived and/or modified sequence
MSSEDREAQEDELLALASIYDGDEFRKAESVQGGETRIYLDLPQNFKIFVSGNSNECLQNSGFEYTICFLPPLVLNFELPPDYPSSSPPSFTLSGKWLSPTQLSALCKHLDNLWEEHRGSVVLFAWMQFLKEETLAYLNIVSPFELKIGSQKKVQRRTAQASPNTELDFGGAAGSDVDQEEIVDERAVQDVESLSNLIQEILDFDQAQQIKCFNSKLFLCSICFCEKLGSECMYFLECRHVYCKACLKDYFEIQIRDGQVQCLNCPEPKCPSVATPGQ

SEQ ID NO: 333283 - protein, 99 aa, Artificial Sequence
  derived and/or modified sequence
MSSEDREAQEDELLALASIYDGDEFRKAESVQGGETRIYLDLPQNFKIFVSGNSNECLQNSGFEYTICFLPPLVLNFELPPDYPSSSPPSFTLSGKWLS

SEQ ID NO: 333284 - DNA, 3144 bp, Artificial Sequence
  derived and/or modified sequence
gccggcggtcgcgccagcgggatccgcctggctcagctgacagctcccgagaacggaagaggcggcgcgccggttgagcagggcgtctctaggcctggtcggctggcggcgatggcaggattttcataatatatgtagtatgagttccacatcttggcctcttacccagcttcagcagtctcagctccaccagttagagaataaatgggatttgcatgaactccactctgagctgaaatacagactgcggtgttaatatccttttcttctgattgttattaacaggtccttatgtcgtcagaagatcgagaagctcaggaggatgaattgctggccctggcaagtatttacgatggagatgaatttagaaaagcagagtctgtccaaggtggagaaaccaggatctatttggatttgccacagaatttcaagatatttgtgagcggcaattcaaatgagtgtctccagaatagtggctttgaatacaccatttgctttctgcctccacttgtgctgaactttgaactgccaccagattatccatcctcttccccaccttcattcacacttagtggcaaatggctgtcaccaactcagctatctgctctatgcaagcacttagacaacctatgggaagaacaccgtggcagcgtggtcctgtttgcctggatgcaatttcttaaggaagagaccctagcatacttgaatattgtctctccttttgagctcaagattggttctcagaaaaaagtgcagagaaggacagctcaagcttctcccaacacagagctagattttggaggagctgctggatctgatgtagaccaagaggaaattgtggatgagagagcagtgcaggatgtggaatcactgtcaaatctgatccaggaaatcttggactttgatcaagctcagcagataaaatgctttaatagtaaattgttcctgtgcagtatctgtttctgtgagaagctgggtagtgaatgcatgtacttcttggagtgcaggcatgtgtactgcaaagcctgtctgaaggactactttgaaatccagatcagagatggccaggttcaatgcctcaactgcccagaaccaaagtgcccttcggtggccactcctggtcaggtcaaagagttagtggaagcagagttatttgcccgttatgaccgccttctcctccagtcctccttggacctgatggcagatgtggtgtactgcccccggccgtgctgccagctgcctgtgatgcaggaacctggctgcaccatgggtatctgctccagctgcaattttgccttctgtactttgtgcaggttgacctaccatggggtctccccatgtaaggtgactgcagagaaattaatggacttacgaaatgaatacctgcaagcggatgaggctaataaaagacttttggatcaaaggtatggtaagagagtgattcagaaggcactggaagagatggaaagtaaggagtggctagagaagaactcaaagagctgcccatgttgtggaactcccatagagaaattagacggatgtaacaagatgacatgtactggctgtatgcaatatttctgttggatttgcatgggttctctctctagagcaaacccttacaaacatttcaatgaccctggttcaccatgttttaaccggctgttttatgctgtggatgttgacgacgatatttgggaagatgaggtagaagactagttaactactgctcaagatatggaagtggattgtttttccctaatcttccgtcaagtacacaaagtaactttgcgggatatttagggtactattcattcactcttcctgcgtagaagatatggaagaacgaggtttatattttcatgtggtactactgaagaaggtgcattgatacatttttaaatgtaagttgagaaaaatttataagccaaaggttcagaaaattaaactacagaatattaaatattataatgtgcccaaagctctgaatagttaaaaattaaatatttattttcttccccaagctttaggtaaggagaagaggggtcaagagttaaacttagagaccctttgtctctgagaagcatccttctaagacattctgttggagttccctcagtactattccttacaactggagtgggtagaagccttatgaaaattatactgagaacctgatctcgtttactccatgttaatcacattcctaccaacctaaatttctgccaagtcagttctctttggaggaagcccattactccgtaactgactggatggtccagtgtcattttgatctgcttttcagaatggaaatttataatataaatatatgttttaataccacaaacactgtggggcacttgatatttattagtggtgtatatggtccactggtttcaggccaaatctagaatttagtgatactggctcagaagaatttaagttctattcagccttcctgggtgttagaacctagattcaaaatggcttgtctttgctacttttgttccacattctctctctttacctttgccctaccttctgtttgtaaggatgattttaatattaattccaggaacacatgtttttatttcctctgctggaataggagaaagcttaatatattcccaagctgaatgttcttgaattatatctgcatttaccactgtatatgcatatagtgacagtataacctgtctatactacagtagttccagtcctaactttctgaattatttttaaagatcttctctaacaagctatgggaatttggcttcatactctttctttgcaacagcagtgttctgggtgataattttgaattgatacctgttcctttttctgggttttgttggctttttgaaaaattgtctttccttatcattggtgggaggcttggtagcaaagtaacattttttggaaaagaggacagaaaaattgaactacagcttgagaacgtattctttttttcctactttgttattgcaaattgaggaatcacttttaactgttttaggtgtgtgtgtccagagtgagcaaggattatgtttttggattgtcaaagaggatgcttagtcttaaaataaaaataaatttaaaaatcatcttataattagaaaaaaaaaaaaaaaaaaaaaaaaaaaaaaa

SEQ ID NO: 333285 - DNA, 1425 bp, Artificial Sequence
  derived and/or modified sequence
atgtcatctgaagatagggaagcacaagaggatgaactgctcgcactggcctccatctatgatggggacgagtttagaaaggccgagagcgtgcagggaggcgagacacgcatttacttggatctcccccagaattttaaaatctttgtgtctggtaactccaatgaatgtctccagaactccggtttcgaatacacgatttgctttctccctcccttggtcctgaattttgagttgcctcccgattacccttcaagctccccaccaagcttcacccttagtggaaaatggcttagccctacgcagctgagcgctctgtgtaagcatctagataatctgtgggaggagcatcgcggtagtgtggtcctgtttgcgtggatgcagttcctcaaggaggagacactagcgtatctcaacatcgtatcacccttcgagttaaagattggctctcagaagaaggtacagcgcagaactgcccaggcatccccaaatacagagttagacttcggaggcgcagccggatccgacgttgaccaggaagagatagtcgacgagcgggcagtccaggacgtggaaagcctgtccaatttgatccaagagattctcgacttcgaccaggcccagcagatcaaatgctttaactccaagttgttcctgtgtagcatttgtttctgtgaaaagcttgggagtgaatgcatgtactttttggagtgccgacacgtctactgcaaggcatgcctaaaggactattttgaaatccagatcagagatggacaggtgcaatgtctgaattgccccgagcctaaatgtcccagcgtagcgacaccaggccaagtgaaggaacttgttgaagccgaactgttcgccagatatgacaggcttttgctccagagtagtttggacctgatggcagacgtggtctattgtcctcggccatgctgtcaactccccgtcatgcaggaaccaggatgtaccatgggaatttgttccagttgcaacttcgccttttgtactctgtgccggcttacctatcatggagtgtcaccctgcaaagtaaccgcggagaaattgatggacctacggaacgagtacctgcaggctgacgaagccaacaagcgcctgcttgaccagcgctatggcaagagagttattcagaaagccctggaggagatggagtctaaagaatggctcgagaagaattcaaaaagttgtccatgctgcgggacccctattgagaagctggatggctgtaataagatgacttgtaccggctgtatgcagtatttctgctggatatgcatgggcagtctctctagagcaaacccgtacaagcacttcaacgatccgggcagcccctgtttcaaccggctattctacgctgtagatgttgacgacgacatttgggaagacgaagtggaagactag

SEQ ID NO: 333286 - DNA, 1425 bp, Artificial Sequence
  derived and/or modified sequence
atgtcatctgaggatcgcgaggcacaggaagacgagctcttggccctcgcctcaatttacgatggtgatgagttccggaaggccgaatctgtacagggaggggaaacccgcatttacttggacctgccccagaatttcaaaattttcgtgagcggaaattcaaatgaatgcttacagaactccggatttgagtacacaatctgtttcttacccccgttggtgctgaacttcgaactcccacccgattacccctcctcaagtcccccaagcttcactctgagtgggaaatggttgtctcccactcagctatccgcgctatgtaaacatctggataatctgtgggaggagcaccggggatcagtcgtcctttttgcttggatgcaattcctgaaagaagaaacactggcatatctgaacatcgtctcaccttttgaactgaagattggtagccagaagaaggtccagagacggactgcccaggcctctccgaacactgagctcgacttcggcggggccgcaggtagcgatgtggatcaggaagagattgtggacgaaagggccgtccaggacgtagaatcattgtcaaacctgatccaggaaattttagattttgaccaggcccagcaaataaaatgcttcaatagtaaacttttcctgtgcagtatctgtttttgcgaaaaactcggttccgagtgtatgtacttccttgagtgtcggcacgtgtattgcaaagcttgcttaaaagactatttcgaaatccagattagagacgggcaggtacaatgcctgaactgccccgaacctaaatgtccatcagtggccacacctggccaggtaaaggaattggtagaagccgagctttttgcccgttacgacagactcctgcttcagtcctccctcgatctgatggctgacgtggtctactgtcctaggccctgttgccagctccctgtgatgcaggaacccggatgtacaatgggaatatgcagtagctgtaactttgctttctgcactttatgtcgcctgacatatcacggtgtgtcaccctgtaaagtgacggccgagaaattgatggacctgagaaacgagtacctacaggcagacgaggctaataagcgtctgctcgatcaacggtatgggaagcgcgtgattcagaaagcgctggaagaaatggaatctaaagaatggctggaaaagaactctaagtcttgcccatgctgtgggacacccattgagaaactggacggctgcaacaaaatgacatgtacagggtgcatgcagtacttctgctggatctgcatgggctcactgagtagagccaacccctacaaacacttcaacgaccctggttcaccatgctttaacaggctgttttacgccgtagatgtggatgatgatatatgggaggatgaagtggaagactag

SEQ ID NO: 333287 - DNA, 1425 bp, Artificial Sequence
  derived and/or modified sequence
atgtcatctgaggaccgagaggcacaagaggatgaactgcttgcgttggcatctatctacgacggagacgagttcaggaaggcagaatccgtccaaggcggtgagacacgcatttacttggacctgccacagaatttcaagatcttcgtcagtggcaattctaacgaatgtctgcaaaacagtgggttcgaatacacaatttgttttctaccacctttggtcttaaactttgagttgccaccagactatccttcaagctctccaccctcctttaccctgagcggcaaatggctttctcctactcagttgtcagcactgtgcaagcatctggataatctgtgggaggagcatcgtggctccgtcgtgcttttcgcctggatgcagttcttaaaggaagagacactcgcatacctgaatatagtgtctccgtttgagctgaaaatcggctctcagaaaaaggtacagcggaggacggctcaagcctcccccaataccgagctggatttcgggggagcagctggaagcgacgtggaccaagaggagatcgtcgacgaacgagcagttcaggatgtcgaaagtctgagtaaccttattcaggagatcctggattttgatcaggcccaacagatcaaatgtttcaactctaaactctttctttgttcgatatgcttctgcgaaaaattggggagcgagtgtatgtatttcctcgagtgccgccatgtgtattgcaaggcttgcctcaaagattactttgaaatccaaatccgagacggccaggttcagtgtttgaattgccctgaaccgaagtgcccaagcgtggccacaccaggtcaggtgaaagaactggtagaagccgagctgttcgccagatacgacaggttgttattgcaatcgagcctcgatctcatggcagacgtagtatattgcccacgtccatgttgccagctcccagtaatgcaagaacctgggtgcacaatggggatttgttcttcttgcaacttcgccttttgtacactgtgcagactcacttaccacggagtgtctccttgtaaggtgactgcagaaaagctgatggatttaagaaatgagtaccttcaggctgacgaagccaacaaacgcctgctggaccagcgctacggaaaacgcgtcatccagaaggccttggaggagatggaatccaaggagtggctcgagaagaattccaaatcctgtccgtgttgcggaacccccattgaaaagctcgatggatgcaataagatgacctgtaccgggtgcatgcaatacttttgttggatctgcatggggtctttgtctagggccaacccttacaagcatttcaacgatcctgggtcaccgtgttttaatcgactcttctatgccgtggatgtcgacgatgatatctgggaggacgaggtggaggactag

SEQ ID NO: 333288 - DNA, 1425 bp, Artificial Sequence
  derived and/or modified sequence
atgtcttcagaagatcgcgaggcccaggaggatgagctgctggcactcgctagcatatatgatggggacgagtttagaaaggcggagtctgtccagggcggggaaacacggatttatctggatctcccccagaattttaagatcttcgtgtccggcaatagtaacgaatgtctgcagaacagcggcttcgaatatacgatatgcttcctgccccccctggtgctgaatttcgaattgcccccagattaccccagtagttcgccgccgagctttacgctttcggggaagtggctgtcccctacgcagctgtcagcactctgtaagcacctcgataatctttgggaggagcaccgcggttccgttgtgctgttcgcttggatgcagttcctcaaggaggagactttggcatatctgaacatcgtctccccgtttgagctgaagataggctcacaaaagaaggtgcagcggcgcacggcccaggccagtccgaatacagaactcgacttcgggggggccgccggaagcgatgtagatcaggaagagatcgtggacgaaagagcggtccaagatgtggaatccctatctaatctgattcaggaaatcttggatttcgaccaggcccaacaaatcaaatgcttcaacagcaagcttttcctatgctcgatatgtttttgcgaaaaactcgggtcagaatgcatgtactttttggagtgcaggcatgtgtattgcaaagcttgtctgaaggactattttgagatacagattagggatggacaggtccagtgcttgaattgcccagaaccaaagtgcccatccgttgctactcctggtcaggtaaaagagctggtggaggcggagttgtttgcccgctatgacaggctgctgcttcagtcttcgctcgaccttatggcggacgtggtgtactgtcctcgcccctgctgtcagctgccagtgatgcaggaacctgggtgcaccatgggaatctgttcctcctgtaattttgcattctgcaccctctgccgccttacttatcacggggtttcgccatgtaaggtcacagcagagaaactgatggatctcagaaacgaatacctgcaggccgacgaagctaacaaaagactgctggatcagcgttatggcaaacgggtcattcagaaagcattggaggaaatggaaagcaaagaatggctggaaaagaatagcaagtcttgtccctgttgcgggacccctattgagaagctggatgggtgcaacaagatgacctgtacaggctgcatgcaatacttttgttggatttgtatggggtctctctctcgtgcaaatccgtataaacattttaacgatcctgggtccccatgttttaaccggcttttctacgccgtcgatgtggacgatgatatctgggaagatgaagtcgaagactag

SEQ ID NO: 333289 - DNA, 48 bp, Artificial Sequence
  derived and/or modified sequence
atgagtagcgaggaccgtgaggcacaggaggacgaactgctggcctag

SEQ ID NO: 333290 - DNA, 399 bp, Artificial Sequence
  derived and/or modified sequence
atgagtagcgaggaccgggaggctcaagaagatgaacttctcgccctcgcatccatttacgatggcgacgagttccgaaaagccgaaagtgtgcaggggggcgagactaggatttacttagatctgccccaaaatttcaaaatcttcgtgagtggtaattcaaatgagtgcctccagaacagcggatttgaatataccatctgctttctgcctccgctggtgctgaattttgaattgcctccggactatccgtcatcaagtcctccaagctttacgctgagcgggaaatggctttctcccactcaactgagcgccctctgcaagcatttggacaatctttgggaggaacatcgcgggagcgtcgtactcttcgcctggatgcagttcctcaaggagtag

SEQ ID NO: 333291 - DNA, 516 bp, Artificial Sequence
  derived and/or modified sequence
atgtcttcagaggaccgggaagctcaggaagacgagttactggctcttgcttccatttatgacggggacgaatttagaaaagctgaatcggtgcaagggggggaaactaggatatatctggatcttccgcagaatttcaagatctttgtgagtgggaactctaatgagtgcttgcagaatagtgggtttgaatacactatctgttttttgccccccctggtgctgaatttcgaactccctccagattaccctagtagctcaccaccctccttcaccctgtccggcaagtggctttccccaactcagctttccgccctgtgcaagcatctggataacttgtgggaggaacaccggggttctgttgttctctttgcatggatgcaatttctgaaggaggaaactctcgcatatctcaatatcgtgagtccctttgaactgaaaatcggatcccaaaagaaagtgcagcggagaactgcccaagccagtcctaacacagagctggattttgggggttag

SEQ ID NO: 333292 - DNA, 558 bp, Artificial Sequence
  derived and/or modified sequence
atgagtagcgaggaccgcgaggctcaggaggatgagctcctggccctggcatccatatacgatggcgacgagttccgaaaggctgaaagcgtacagggtggagaaaccagaatctacttagatctacctcagaacttcaagatctttgtgagtggaaacagtaatgagtgtttgcagaacagtggctttgagtataccatatgcttcctgccacccctagtgctgaacttcgagctgccgcctgattaccctagcagcagtcccccctcttttacattgtctgggaaatggctgtctcccactcagctctcagccctgtgtaagcatctggataatctctgggaagaacaccgcggaagcgtggtcctgttcgcatggatgcagtttttgaaagaggaaaccttggcttacctcaacattgtttctcccttcgagctcaaaatcggcagtcaaaagaaagtccagagacgcaccgcacaggctagtcctaacactgaactggactttggtggcgccgcaggctcggatgtcgatcaagaagagatagtggatgagtag

SEQ ID NO: 333293 - DNA, 837 bp, Artificial Sequence
  derived and/or modified sequence
atgagctctgaggatagggaggctcaggaagacgagctgctggctttggccagtatctacgacggggacgaattccggaaagctgaatcagtgcagggaggcgagacccgcatttatctggatttgcctcagaactttaagatttttgtgtcagggaatagtaacgagtgcttgcaaaacagcggcttcgaatacaccatctgcttcttaccaccactggtactgaacttcgagctgccacccgactacccatcgtcttctccaccttctttcaccttgtcagggaagtggctgagccccacgcagctatccgccctgtgcaagcatctggacaatctgtgggaggaacacagaggaagcgtggtgctctttgcatggatgcagttcctcaaagaggagactcttgcctacctcaacatagtgagcccatttgagctgaaaatcggatcccagaagaaagtgcaacggcgtactgcccaggccagccctaataccgaactggactttggcggagctgcaggaagcgacgtcgatcaagaggagattgtggacgagcgtgccgtgcaggacgtagagtctctgagcaacctgatccaagagatactcgactttgatcaggcccagcagatcaagtgtttcaactcgaaactgtttctttgctccatttgtttctgtgagaagctgggctctgaatgcatgtatttccttgagtgtagacacgtttattgtaaggcctgtttaaaagattactttgagatccagatcagggacggtcaggtgcaatgtttaaactgcccggaaccaaagtgcccaagcgttgccacaccgggccagtag

SEQ ID NO: 333294 - DNA, 1425 bp, Artificial Sequence
  derived and/or modified sequence
atgagcagcgaggaccgggaggcccaggaggatgagctgctggccctggccagcatctatgatggagatgagttcaggaaggccgagagcgtgcagggcggggagacccgcatctacctggacctgccccagaacttcaagatctttgtgtctggcaacagcaatgaatgtctgcagaacagcggctttgagtacaccatctgcttcctgccccccctggtgctgaactttgagctgcccccagactaccccagcagcagcccccccagcttcaccctgagcggcaagtggctgagccccacccagctgagcgccctgtgcaagcacctggacaacctgtgggaggagcaccggggctctgtggtgctgtttgcctggatgcagttcctgaaggaggagaccctggcctacctgaacatcgtgagcccctttgagctgaagattggcagccagaagaaggtgcagaggagaacagcccaggccagccccaacacagagctggactttggaggagctgctggcagtgatgtggaccaggaggagatcgtggatgaaagagctgtgcaggatgtggagagcctgagcaacctgatccaggagatcctggactttgaccaggcccagcagatcaagtgcttcaacagcaagctgttcctgtgcagcatctgcttctgtgagaagctgggcagcgagtgcatgtacttcctggagtgccgccacgtgtactgcaaggcctgcctgaaggactactttgagatccagatcagagatggccaggtgcagtgcctgaactgcccagagcccaagtgccccagcgtggccaccccaggccaggtgaaggagctggtggaggccgagctgtttgcccgctatgaccggctgctgctgcagagcagcctggacctgatggctgatgtggtgtactgcccccggccctgctgccagctgcctgtgatgcaggagcccggctgcaccatgggcatctgcagcagctgcaactttgccttctgcaccctgtgccgcctgacctaccatggagtgagcccctgcaaggtgacagctgagaagctgatggacctgagaaatgagtacctgcaggctgatgaggccaacaagaggctgctggaccagagatatggcaagagggtcatccagaaggccctggaggagatggagagcaaggagtggctggagaagaacagcaagagctgcccctgctgcggcacccccatcgagaagctggatggctgcaacaagatgacctgcaccggctgcatgcagtacttctgctggatctgcatgggcagcctgagccgggccaacccctacaagcacttcaatgaccccggcagcccctgcttcaacagactcttctatgctgtggatgtggatgatgacatctgggaggatgaggtggaggactag

SEQ ID NO: 333295 - DNA, 48 bp, Artificial Sequence
  derived and/or modified sequence
atgagcagcgaggaccgggaggcccaggaggatgagctgctggcctag

SEQ ID NO: 333296 - DNA, 399 bp, Artificial Sequence
  derived and/or modified sequence
atgagcagcgaggaccgggaggcccaggaggatgagctgctggccctggccagcatctatgatggagatgagttcaggaaggccgagagcgtgcagggcggggagacccgcatctacctggacctgccccagaacttcaagatctttgtgtctggcaacagcaatgaatgtctgcagaacagcggctttgagtacaccatctgcttcctgccccccctggtgctgaactttgagctgcccccagactaccccagcagcagcccccccagcttcaccctgagcggcaagtggctgagccccacccagctgagcgccctgtgcaagcacctggacaacctgtgggaggagcaccggggctctgtggtgctgtttgcctggatgcagttcctgaaggagtag

SEQ ID NO: 333297 - DNA, 516 bp, Artificial Sequence
  derived and/or modified sequence
atgagcagcgaggaccgggaggcccaggaggatgagctgctggccctggccagcatctatgatggagatgagttcaggaaggccgagagcgtgcagggcggggagacccgcatctacctggacctgccccagaacttcaagatctttgtgtctggcaacagcaatgaatgtctgcagaacagcggctttgagtacaccatctgcttcctgccccccctggtgctgaactttgagctgcccccagactaccccagcagcagcccccccagcttcaccctgagcggcaagtggctgagccccacccagctgagcgccctgtgcaagcacctggacaacctgtgggaggagcaccggggctctgtggtgctgtttgcctggatgcagttcctgaaggaggagaccctggcctacctgaacatcgtgagcccctttgagctgaagattggcagccagaagaaggtgcagaggagaacagcccaggccagccccaacacagagctggactttggaggatag

SEQ ID NO: 333298 - DNA, 558 bp, Artificial Sequence
  derived and/or modified sequence
atgagcagcgaggaccgggaggcccaggaggatgagctgctggccctggccagcatctatgatggagatgagttcaggaaggccgagagcgtgcagggcggggagacccgcatctacctggacctgccccagaacttcaagatctttgtgtctggcaacagcaatgaatgtctgcagaacagcggctttgagtacaccatctgcttcctgccccccctggtgctgaactttgagctgcccccagactaccccagcagcagcccccccagcttcaccctgagcggcaagtggctgagccccacccagctgagcgccctgtgcaagcacctggacaacctgtgggaggagcaccggggctctgtggtgctgtttgcctggatgcagttcctgaaggaggagaccctggcctacctgaacatcgtgagcccctttgagctgaagattggcagccagaagaaggtgcagaggagaacagcccaggccagccccaacacagagctggactttggaggagctgctggcagtgatgtggaccaggaggagatcgtggatgaatag

SEQ ID NO: 333299 - DNA, 837 bp, Artificial Sequence
  derived and/or modified sequence
atgagcagcgaggaccgggaggcccaggaggatgagctgctggccctggccagcatctatgatggagatgagttcaggaaggccgagagcgtgcagggcggggagacccgcatctacctggacctgccccagaacttcaagatctttgtgtctggcaacagcaatgaatgtctgcagaacagcggctttgagtacaccatctgcttcctgccccccctggtgctgaactttgagctgcccccagactaccccagcagcagcccccccagcttcaccctgagcggcaagtggctgagccccacccagctgagcgccctgtgcaagcacctggacaacctgtgggaggagcaccggggctctgtggtgctgtttgcctggatgcagttcctgaaggaggagaccctggcctacctgaacatcgtgagcccctttgagctgaagattggcagccagaagaaggtgcagaggagaacagcccaggccagccccaacacagagctggactttggaggagctgctggcagtgatgtggaccaggaggagatcgtggatgaaagagctgtgcaggatgtggagagcctgagcaacctgatccaggagatcctggactttgaccaggcccagcagatcaagtgcttcaacagcaagctgttcctgtgcagcatctgcttctgtgagaagctgggcagcgagtgcatgtacttcctggagtgccgccacgtgtactgcaaggcctgcctgaaggactactttgagatccagatcagagatggccaggtgcagtgcctgaactgcccagagcccaagtgccccagcgtggccaccccaggccagtag

SEQ ID NO: 333300 - DNA, 1425 bp, Artificial Sequence
  derived and/or modified sequence
atgagcagcgaggaccgggaggcccaggaggacgagctgctggccctagcgtccatctatgatggagatgaattccgtaaggctgagtcggtgcaggggggggagacccggatttacctggacttgccacaaaacttcaaaatcttcgtgtctggtaactcgaatgaatgcttgcaaaatagcgggttcgagtatactatctgctttctgccccctttagtactgaactttgagttaccaccggactacccatcctcatccccgccttctttcacactttccgggaagtggctgtctcctacacagctttccgccttgtgcaaacatttagacaatctatgggaggagcatcgcggcagcgtcgtgctgtttgcttggatgcagttcctgaaggaagagaccttagcgtacctaaacattgtgtcaccgtttgagctcaagattggctcacaaaaaaaggtgcagcgaaggactgcccaggccagcccaaacaccgagctggatttcggtggcgctgcaggctctgacgttgaccaagaagagattgtcgacgagcgagccgtgcaggacgtggagagtcttagcaacctgatccaagagatccttgattttgatcaagcacagcagattaagtgttttaattcaaagctgtttctatgttctatttgcttttgtgaaaaattgggcagcgaatgcatgtattttttggaatgccgacatgtctactgtaaggcttgcctgaaagattattttgagattcagattagagatggccaggttcagtgcctgaactgcccagagcccaagtgcccttctgtggctacccctggtcaagtcaaagaactcgtggaagccgagctgtttgccaggtacgataggcttcttctgcaatcctccctggacttaatggccgacgtggtctattgtcccagaccctgctgccagctgccggtgatgcaagaaccggggtgtactatgggaatttgtagttcttgcaactttgcattttgcacactgtgcagactcacataccacggtgtctctccttgtaaggtgactgctgaaaaattgatggatctcaggaatgagtatttacaggctgacgaggctaacaagagactcctggatcagaggtacggcaaacgcgtgatccaaaaggccttagaggagatggaaagtaaggagtggctagaaaagaatagcaaaagctgtccctgttgcggcactcccattgagaaactggacggctgcaacaagatgacgtgcactggttgtatgcagtatttttgttggatttgtatgggaagcctttctcgggcaaatccttacaaacactttaatgaccccggatcaccttgcttcaaccggttgttctacgcagtggacgtagacgacgacatatgggaggatgaggtcgaggactag

SEQ ID NO: 333301 - DNA, 1425 bp, Artificial Sequence
  derived and/or modified sequence
atgagcagcgaggaccgggaggcccaggaggacgagctgctggccctggcctccatttatgacggcgatgaattcagaaaagctgaatccgtgcaaggcggggagactaggatttacctcgaccttccccagaatttcaagattttcgtctctggtaatagtaacgagtgtctgcaaaatagtggctttgagtacacaatttgctttctgccacccctcgtcttaaactttgaattgcctcccgactacccatcgagttccccacctagctttaccttgtctggcaagtggcttagtcctacccagctcagtgcactgtgcaagcatctggataacctgtgggaagaacacaggggaagcgtcgtgctgtttgcctggatgcagttcctgaaagaggagacccttgcgtatctgaatattgttagcccctttgagctgaagattggttcacagaagaaagtccagagaaggaccgcacaagcttcacctaataccgagctcgacttcggaggcgccgcaggtagtgacgttgatcaggaagagattgtcgatgagagagcagttcaggatgtggaaagcctgagcaacctcatccaagagatactggacttcgaccaggcacagcagatcaaatgttttaacagcaaactcttcctgtgcagcatctgcttctgcgagaagctcgggagcgaatgtatgtacttcctcgaatgcagacatgtttactgtaaggcctgcctcaaagattattttgaaattcagatccgggatggccaggtgcagtgcctaaattgtccagaaccaaagtgcccttcagtggcaacaccgggccaggtaaaggaactggtggaagctgagctgttcgcccggtacgatcggcttctgcttcagtccagcctcgacttgatggccgatgtcgtgtactgtccacgtccttgttgtcagctaccagtgatgcaggaaccagggtgcacaatgggcatttgctcgtcgtgtaacttcgctttttgtactctttgtcgcctcacctaccatggggtctccccctgtaaggtgactgccgaaaaactgatggatctacgtaacgagtacttacaagcggacgaggccaacaagagactgttggaccagcggtacgggaagagagtgatacagaaggccctggaggagatggagtcaaaggaatggcttgagaaaaattccaagtcttgcccttgctgcggtactcctattgaaaaactcgatgggtgcaataagatgacatgtactgggtgcatgcagtacttttgctggatctgcatgggttcgctttcccgcgccaacccctacaaacacttcaacgatccaggcagcccatgctttaacagactgttctacgctgtggacgtagacgacgacatttgggaagatgaggtcgaggactag

SEQ ID NO: 333302 - DNA, 1425 bp, Artificial Sequence
  derived and/or modified sequence
atgagcagcgaggaccgggaggcccaggaggacgagctgctggccctagcttccatatacgacggcgacgagttcaggaaagcagaaagcgtacaaggcggggagacccgcatatacctggaccttccccaaaactttaaaatatttgtttccggcaactccaacgaatgtctgcagaattccggctttgagtacacgatttgctttctgcctccactggtgctgaattttgaacttcctcccgactacccatcctcctcacccccctccttcactttatccgggaagtggctcagccctacacagctctctgccctgtgtaaacacctagacaacctgtgggaagagcatagagggtctgtggtgctgtttgcctggatgcagtttctaaaggaagaaacgctcgcttatttgaatatcgtgtcccccttcgagcttaaaattggaagccagaagaaagtgcaaagaaggaccgcccaggcgagtccgaatactgagttagactttggaggggcagctggttctgacgtcgaccaggaagagatcgtggacgaacgcgcggtgcaggacgtggagtctctcagtaacttaatccaggaaatcctagacttcgatcaggctcagcagatcaaatgctttaattcaaagttgtttttgtgttccatttgtttctgcgaaaagctcggatccgagtgcatgtactttctggaatgtaggcacgtttactgcaaagcttgcctgaaggattatttcgagatccagatccgcgatggacaagtgcagtgtctgaactgtcccgagcctaagtgtccttccgtcgcgaccccagggcaggttaaagaattagtggaagcagaactgtttgctcgttacgaccggctccttttgcagtcctcattggacttaatggctgacgtcgtgtattgtccacgaccctgctgccagctgcctgtgatgcaggaaccgggctgcacgatgggcatctgttcctcgtgcaattttgccttctgtactttatgtcggctcacttaccatggtgtctctccatgcaaggtgacagccgagaagcttatggatctgcggaatgaatatctgcaggctgacgaagctaataaacgattgctagatcaacgatacggaaagcgggtgatccagaaggctctagaggagatggaaagcaaggagtggttggaaaagaacagcaagtcctgtccctgctgcggcactcctatcgaaaagctggacggctgtaataaaatgacgtgcacaggctgtatgcagtacttctgctggatctgcatgggctcactctcaagggcaaatccatataaacattttaatgatcctgggagtccctgctttaaccgcctcttttacgccgtggacgtagacgacgatatatgggaggacgaagtggaagactag

SEQ ID NO: 333303 - DNA, 1425 bp, Artificial Sequence
  derived and/or modified sequence
atgagcagcgaggaccgggaggcccaggaggacgagctgctggccctcgcctctatctacgacggggacgagttcaggaaggctgaaagcgtgcagggcggcgaaacaagaatttacctggatctgcctcagaatttcaagatcttcgtgagtggcaattccaacgaatgtctccagaattctgggttcgagtacactatttgttttctgccaccattagtgctaaatttcgagctgccaccagattatcctagctcttcccccccaagctttaccctctccgggaagtggctttctcccacccaactttcggctctgtgcaagcacctggacaacctctgggaagagcaccgcggttcagtcgtcttgtttgcctggatgcagttcctcaaagaggagacactagcctacctgaacatcgtttcgccatttgagctcaaaataggttcccagaagaaggtgcagcggaggactgctcaggcctcccccaacaccgaactggattttggaggcgctgcaggctccgatgtcgatcaggaggaaatcgtcgacgagcgcgccgtccaggatgttgaaagtctctccaacctgatccaggagattcttgattttgaccaagcacagcagatcaagtgtttcaactctaaactgttcctgtgcagcatctgcttctgtgaaaagctcgggtctgaatgtatgtatttcctggagtgccgacatgtttattgcaaggcgtgcctgaaggattacttcgagattcagattcgagatggccaggtgcaatgcttgaattgcccagagcctaagtgtccgtcagtggccactcctggacaagtgaaggaactggtggaggctgaactatttgcccgctatgacagactcctgttgcagtccagcctcgacctcatggctgacgttgtctactgccccaggccttgttgtcagctcccagtaatgcaagagcccggttgcacgatggggatttgttccagctgcaattttgcattctgcaccctctgccgcctcacttatcacggcgtatcgccctgtaaggtgacagcagagaagttgatggatctccgcaacgaatatctgcaggccgacgaagccaataagagactgctggatcagagatatgggaaaagggtgatccaaaaagcgctcgaggaaatggaatccaaagagtggctcgagaaaaactccaagtcttgtccatgttgtggcacgccaatcgagaaattggatggttgtaataagatgacatgcaccggctgcatgcagtacttttgctggatttgtatggggtccctctccagagcaaacccgtataagcactttaacgatcccggatctccttgctttaatcgtctgttttacgctgtagatgtggacgacgatatctgggaggatgaggtggaggactag

SEQ ID NO: 333304 - DNA, 48 bp, Artificial Sequence
  derived and/or modified sequence
atgagcagcgaggaccgggaggcccaggaggacgagctgctggcctag

SEQ ID NO: 333305 - DNA, 399 bp, Artificial Sequence
  derived and/or modified sequence
atgagcagcgaggaccgggaggcccaggaggacgagctgctggccctcgcaagcatctacgacggtgacgagttcaggaaagccgagagcgtacagggaggagagacccgcatctatttggacttgcctcagaacttcaaaatttttgtctctggaaacagtaatgagtgtttacaaaacagcggctttgagtatacgatttgttttctgccacccctcgtgttgaatttcgagctgcctcctgattacccatcatcatcccccccctcctttactctttctggaaaatggctatctcctactcaattgtcagccctgtgcaagcatcttgacaacctgtgggaggagcaccgtgggtcggttgtgttatttgcatggatgcagttcctgaaggaatag

SEQ ID NO: 333306 - DNA, 516 bp, Artificial Sequence
  derived and/or modified sequence
atgagcagcgaggaccgggaggcccaggaggacgagctgctggcccttgcctcaatctatgatggcgacgagttcagaaaggctgagagtgttcagggcggtgagactagaatttatctcgacttacctcaaaatttcaaaattttcgttagcggtaacagtaacgagtgcctacagaatagcgggttcgaatataccatctgcttcttacctccactggtgttaaattttgaacttccacccgactatccttccagctcacccccctccttcacattaagcggaaagtggctgtcaccaacgcagctatctgcgctctgcaaacatctggataacttgtgggaagagcatcgaggctccgttgtgctctttgcatggatgcagttcctgaaggaggagactttggcttatctcaatatcgtgtcacccttcgagttaaagatcgggagccagaagaaagttcagcggcggactgcgcaggcatctcccaataccgagcttgactttggcggctag

SEQ ID NO: 333307 - DNA, 558 bp, Artificial Sequence
  derived and/or modified sequence
atgagcagcgaggaccgggaggcccaggaggacgagctgctggccttagctagcatctatgacggtgacgagtttaggaaggctgagtccgtgcagggaggggagacccggatctatctggatctgcctcagaattttaagatctttgtgtctggaaattccaatgagtgtcttcagaactctgggttcgaatatactatctgcttcctcccccctctggttctgaattttgagctcccccctgattacccttcatcttccccaccgtcctttaccttgtcagggaaatggttgagcccgacacaactctccgccctttgtaagcatttagacaacctctgggaagaacacaggggatctgtcgtgctttttgcttggatgcagtttctcaaagaagagactctggcctaccttaacatcgtgtctccattcgaactgaaaatcggatcgcagaagaaggttcagcggcgcaccgcacaagcctccccgaacacggaactggattttggcggtgcagcggggtccgacgtcgaccaggaggaaatagttgatgaatag

SEQ ID NO: 333308 - DNA, 837 bp, Artificial Sequence
  derived and/or modified sequence
atgagcagcgaggaccgggaggcccaggaggacgagctgctggccttagcctctatctatgacggcgatgagtttaggaaagccgaaagtgtacagggaggagaaactaggatctaccttgatttaccgcagaacttcaaaatttttgtgtccggcaattcaaatgaatgtctgcaaaacagtggcttcgagtacactatctgtttcctccctccactagtcctaaactttgagttgccacccgactatccatcatcttcacctccaagctttaccctttccgggaaatggctctctcctacccaactgtccgcactctgtaaacacctggataacctgtgggaggagcatagaggatcagttgtgctgttcgcttggatgcaatttctgaaagaagaaacactggcgtacttgaatatcgtttccccattcgagttgaaaatcggctcccaaaagaaggtgcagagacgtacagcgcaggcttcacccaatactgagcttgactttgggggtgcggcagggagcgacgtggaccaggaggaaattgtcgatgagcgggcggtgcaggacgttgaaagcttatccaatttaatccaggaaattctcgactttgatcaggcacagcaaataaaatgcttcaattctaagttgtttctgtgtagtatttgtttctgcgaaaaacttggatccgaatgtatgtattttctcgaatgtcgtcacgtgtactgcaaagcatgtctgaaagattactttgaaattcaaattcgggatgggcaggtgcagtgtctcaattgtcctgaacccaagtgcccttctgttgcaactccaggccagtag

SEQ ID NO: 333309 - DNA, 1425 bp, Artificial Sequence
  derived and/or modified sequence
atgtccagcgaagacagagaggcccaggaagacgaactgctggctttagcatccatctacgacggagatgagttcaggaaggcagagagcgtgcaaggcggagagactaggatctatctggatctgcctcagaacttcaaaatatttgtaagcggcaacagcaacgagtgtcttcagaactccggatttgagtacacaatttgtttcttaccgcctctggtacttaacttcgagcttcctcccgactacccctccagtagtcccccatccttcacactttcaggaaaatggctctcacccactcagctgtctgcgctctgtaagcatctcgataacctctgggaggagcaccgcggtagcgtcgttctcttcgcatggatgcagttcctaaaggaagaaactctggcctacctgaatattgtgagccccttcgagctcaagattggctcccagaagaaggtgcagagacggactgcccaggcatcccccaatacggagctggatttcggcggtgcagcaggcagcgatgtggatcaggaggagatagtggacgagagggctgtccaggacgtggaatctttgagtaatctgattcaggaaatcttggattttgatcaggcccagcagattaagtgtttcaacagcaaactctttctctgcagcatttgtttctgcgagaaactgggctcggagtgcatgtactttctcgagtgccgccacgtatactgcaaagcatgcctgaaagattatttcgagatacaaatccgagacggccaagtgcagtgtctgaattgtccggaacccaagtgccctagcgtggccactcctgggcaggttaaggagctcgtcgaggctgagctgtttgcaagatacgatcgtcttttactgcagtctagtctcgacctgatggcagacgtggtctattgtccgcgtccatgttgccagctcccagtgatgcaggaaccgggttgcaccatgggaatctgttcttcgtgcaactttgccttttgcacattgtgcagactgacataccacggtgtgagcccatgtaaagtgaccgctgaaaaattgatggatctgaggaacgagtacctgcaggctgacgaagccaacaaacgactgctggaccaacgatacggaaaaagggtcattcagaaggcacttgaagagatggaatcaaaggagtggctggagaaaaatagtaaatcctgtccctgctgtggtacacctattgaaaagctcgacggctgcaacaaaatgacctgcactggatgtatgcagtatttttgctggatctgtatgggtagtctgagtagagccaacccttacaagcacttcaacgacccagggtccccatgcttcaatcggcttttttacgccgttgatgtagacgatgatatctgggaagacgaggtggaggactag

SEQ ID NO: 333310 - DNA, 1425 bp, Artificial Sequence
  derived and/or modified sequence
atgtcttctgaggatcgtgaggcacaggaggacgaactgttagctcttgcctcgatctacgacggcgacgagttccgaaaggccgagagcgtacagggaggcgaaaccagaatctacctggatctgcctcagaacttcaagatattcgtgagcggcaacagtaatgaatgtctccagaactctgggttcgagtatacaatatgcttcctcccccctctagtgctcaactttgagctaccgccagattatccttcttcaagtcctccctctttcaccttatctggtaagtggctgagcccgacacagctgagtgcactgtgtaaacacttagataatctttgggaggaacacaggggcagcgtcgttctcttcgcctggatgcagtttctgaaggaagaaacgctggcttatcttaacattgttagcccatttgagctcaagattggatctcaaaaaaaggtgcaacgccgtaccgcacaggcttcccccaatactgaacttgacttcggcggtgcagctggatctgatgttgatcaagaagaaattgtggacgagagggccgtccaggacgtggaaagtcttagcaacctgattcaggagattcttgactttgaccaagcacagcagattaaatgcttcaatagcaaacttttcctgtgttctatctgcttttgcgagaagcttggatctgaatgcatgtattttctcgaatgcaggcatgtgtactgtaaggcctgtctgaaggactactttgagatccagatccgtgacgggcaggtccaatgcctgaattgccccgaacctaagtgtccatcagtggctacacctggccaagtgaaagagctagtggaagcagagctgtttgcgaggtatgatcgtcttttgttgcaatctagcctcgacctgatggccgacgtggtttattgtcccaggccctgttgtcaactgcccgtaatgcaagaacctgggtgcaccatgggaatatgctcttcttgcaactttgctttttgtaccttgtgtcgactcacctaccatggagtgtccccatgtaaggttacagccgaaaaattgatggacctgagaaatgagtacctgcaggccgacgaagcaaacaaaagactcttggaccaaagatatggaaaacgtgtgatacagaaggccctggaggaaatggagagtaaggaatggttagaaaaaaacagcaaaagctgcccctgttgtgggactcccattgagaaacttgatgggtgtaacaagatgacctgcaccggttgtatgcagtacttttgttggatatgtatgggatccctctctcgtgccaacccatacaagcatttcaatgaccccggaagcccatgctttaatcggttattctacgctgtcgacgtcgatgacgatatctgggaggatgaagttgaggactag

SEQ ID NO: 333311 - DNA, 1425 bp, Artificial Sequence
  derived and/or modified sequence
atgtccagtgaggacagggaagcccaggaagacgaactgctggcccttgctagcatctacgacggagacgaattccgcaaggctgagtctgtacagggaggggagacacgcatatacctcgaccttcctcaaaattttaagatcttcgtgtcggggaacagcaacgaatgcctgcagaatagcggcttcgagtacaccatttgttttctccctcccctagtgcttaatttcgagctgcctccggactacccaagctcttcccccccttctttcacactgtccgggaaatggctgtctcctacacagcttagtgcattatgcaagcatctggacaatctttgggaggagcaccgcggaagcgtggtgctgtttgcatggatgcaatttctcaaagaagaaactcttgcttacctaaacattgtctctccctttgaactgaagataggatctcagaaaaaagtccagcgaagaaccgcccaggcatctcccaacaccgaactagatttcggcggtgctgcaggctccgatgtcgaccaggaggagatagtcgacgagcgggctgttcaggatgtggagagcctgagcaatctgatccaggagatcctggacttcgaccaagctcagcagatcaagtgcttcaattcgaaactgtttctgtgttcgatatgcttttgcgagaagcttgggtcagaatgtatgtattttctggagtgtcggcatgtttactgtaaggcatgcttaaaagactattttgagatacaaattcgagacggacaagttcagtgcctgaactgtcctgagcccaagtgtccctcagtggctaccccaggacaagttaaggagctggtagaggccgagttgttcgctcgctatgatcggctgctcctccaaagttcacttgatctgatggccgatgtggtgtattgccctagaccctgctgtcagctgcctgtcatgcaagaacctggctgcacgatgggtatatgctccagttgtaacttcgctttttgcactttgtgccggctaacataccacggtgtctcaccttgtaaggtgacagccgaaaagctgatggatctgcgaaacgagtacttgcaggcagatgaggccaacaagcgtttgcttgaccaaagatacggcaaaagggtaattcagaaagcactggaagagatggaatctaaggagtggttagaaaaaaacagcaagagctgtccctgctgtggtacccctatcgaaaagttagacgggtgtaacaagatgacatgcactgggtgcatgcagtatttctgctggatctgtatgggaagtttgagcagggctaacccttacaagcatttcaatgacccaggcagtccctgctttaatcgccttttctacgccgtggacgtggacgatgatatttgggaagacgaagttgaggattag

SEQ ID NO: 333312 - DNA, 1425 bp, Artificial Sequence
  derived and/or modified sequence
atgtcatcagaagaccgagaggctcaggaagatgagttactggcgctggccagtatttatgatggcgacgagtttcggaaggcagagtctgtccagggaggcgaaacccgtatctaccttgacctaccacagaacttcaaaattttcgtgtcaggaaattcaaatgaatgccttcagaattccggcttcgagtataccatttgcttccttcctcccctcgtgttaaacttcgaattgcccccagattacccctcgtccagccccccatcattcactttgtctggtaaatggctttccccaacgcagctgtctgcgctgtgcaagcatctggataatttatgggaggagcatagaggttccgtggtcctgtttgcatggatgcaattccttaaggaagagacgctggcgtatctgaacatagtctctccgtttgaattaaagattggaagccagaagaaagtgcagaggaggacggcccaggccagtccaaatacggagcttgatttcgggggagccgcaggttcagatgtcgatcaggaagagattgtggacgaacgagccgtccaggatgtcgagagcctctcaaatctgatccaggaaatccttgactttgaccaagcacagcagatcaagtgctttaacagcaagttattcctgtgttcaatctgtttttgtgagaagcttggctcagagtgtatgtatttcttagaatgtagacacgtttactgcaaggcatgcttgaaagactatttcgagattcaaattcgcgacggacaggttcagtgcctgaactgtccggaacccaaatgtccatccgtggccactcctggacaggtgaaggaattggttgaggcagagctgtttgccaggtatgaccgtttactgcttcagtccagcctggatttaatggccgacgttgtctactgtccacgcccttgttgccagctgccagtgatgcaggaaccgggttgcaccatgggaatttgttcctcttgcaacttcgctttttgtactctgtgccgactgacataccacggggtgtctccctgcaaagtgaccgccgagaagctgatggacttgcgaaacgaatacctgcaggctgatgaagctaacaagaggttacttgatcagcgctacggtaaacgggtgatccagaaggccctggaggaaatggagtccaaagagtggcttgaaaagaacagcaagagttgtccctgctgcggaacccctatagagaaactggatggatgcaacaaaatgacctgcaccggctgtatgcagtacttttgttggatatgcatgggaagcctgagcagggccaatccttataagcactttaacgatccaggatccccatgtttcaatcggttgttctacgccgttgatgtagatgacgacatctgggaagatgaagtggaggactag

SEQ ID NO: 333313 - DNA, 48 bp, Artificial Sequence
  derived and/or modified sequence
atgtcgtccgaggatagagaggctcaagaggatgagctgctggcctag

SEQ ID NO: 333314 - DNA, 399 bp, Artificial Sequence
  derived and/or modified sequence
atgtcctccgaggatcgggaggctcaggaggatgagttgttggctctagcctctatttatgacggtgatgaatttcggaaggctgaatctgtgcagggcggagaaactagaatttacctggatctacctcaaaacttcaagatttttgtgtccggcaattccaatgaatgcctccagaactccggcttcgagtacacaatttgcttcctgcctcctttggtactgaattttgaactcccccctgattaccctagttcatccccaccctcatttacacttagcggaaagtggctgtcacctacccaactgtccgccctctgcaagcacttggataatctatgggaagagcatcgaggctcagttgttttgtttgcctggatgcagttcttaaaggaatag

SEQ ID NO: 333315 - DNA, 516 bp, Artificial Sequence
  derived and/or modified sequence
atgagttctgaggatagagaagcccaggaggacgagttgctggctctggcctccatttatgacggcgacgagttccggaaagctgagagcgtgcaaggcggagaaacaaggatttacctcgatctgccccagaatttcaagattttcgtgagcgggaattccaatgagtgccttcagaattctgggtttgagtacaccatctgcttccttccccctcttgtgctgaactttgaactgcctcccgattatcctagttcaagcccgccttcttttaccttgagtgggaaatggctgtcgcccacccaactgagcgccctatgcaaacatctggacaacttgtgggaagagcatcgcggatctgtggtgctattcgcctggatgcaatttctgaaagaggagaccttggcatatctgaatatagtcagcccttttgagcttaagatcggctctcagaaaaaggtgcagaggcgtactgctcaggcatctcccaatacagagctcgatttcggcggttag

SEQ ID NO: 333316 - DNA, 558 bp, Artificial Sequence
  derived and/or modified sequence
atgagcagcgaggatcgtgaagctcaagaagatgagctattagcactcgcatccatctatgacggagatgaatttcgaaaagccgagtctgtgcagggtggagaaactcggatctacctggacctgccccaaaacttcaaaattttcgtgagcggaaatagcaacgagtgtctgcagaactctggcttcgaatatacaatttgctttctgccacctctggtcctcaactttgagttaccacctgattacccatccagctccccgccttcttttacactctccggcaagtggctgtcaccaacccagcttagcgccctctgcaagcaccttgataatctgtgggaggaacacagaggatctgttgtgttgtttgcttggatgcagtttctcaaggaagagaccctggcctacctgaatattgtctcccccttcgaactcaaaattggcagtcagaagaaggtgcagcgcaggaccgcacaagccagtcccaatactgaactcgacttcggcggagcggcaggctccgatgtggatcaggaagagattgtcgatgaatag

SEQ ID NO: 333317 - DNA, 837 bp, Artificial Sequence
  derived and/or modified sequence
atgagttccgaagacagggaagcccaagaggatgagctgctggccttggcgtcaatttatgatggagatgagttccgcaaggccgagtccgtacaggggggagagactcggatataccttgatttaccccagaattttaagatcttcgtaagcgggaattccaacgagtgtctccagaactctggttttgaatacaccatctgcttcttacctccattagtgttaaattttgagctaccaccagactatcccagttccagtcctccctccttcactctgtctggcaagtggttaagtcccactcaactgagtgccctgtgtaaacacctcgataatctgtgggaggagcatcgtggttctgtggtcctgttcgcatggatgcagtttttaaaagaagaaactctggcctatctgaatatcgtgtctcctttcgaactcaagatcggatcccagaagaaagtgcagagaaggaccgcacaagccagccctaacactgaacttgatttcggaggagccgctgggtctgacgttgaccaggaggaaattgtcgatgaacgagccgtccaggacgttgagagcctctcaaacctgattcaggaaatcttggatttcgaccaagcacagcaaataaagtgctttaactccaaacttttcctgtgttcaatctgcttctgcgaaaagctgggcagcgagtgcatgtatttcctcgaatgccggcatgtttactgtaaggcctgtttgaaggattatttcgagatccagatccgggacgggcaggttcagtgtttgaactgtcccgagcctaagtgtccctcagtcgctacacccggtcaatag

SEQ ID NO: 333318 - DNA, 2937 bp, Artificial Sequence
  derived and/or modified sequence
gccggcggtcgcgccagcgggatccgcctggctcagctgacagctcccgagaacggaagaggcggcgcgccggttgagcagggcgtctctaggcctggtcggctggcggcggtccttatgtcgtcagaagatcgagaagctcaggaggatgaattgctggccctggcaagtatttacgatggagatgaatttagaaaagcagagtctgtccaaggtggagaaaccaggatctatttggatttgccacagaatttcaagatatttgtgagcggcaattcaaatgagtgtctccagaatagtggctttgaatacaccatttgctttctgcctccacttgtgctgaactttgaactgccaccagattatccatcctcttccccaccttcattcacacttagtggcaaatggctgtcaccaactcagctatctgctctatgcaagcacttagacaacctatgggaagaacaccgtggcagcgtggtcctgtttgcctggatgcaatttcttaaggaagagaccctagcatacttgaatattgtctctccttttgagctcaagattggttctcagaaaaaagtgcagagaaggacagctcaagcttctcccaacacagagctagattttggaggagctgctggatctgatgtagaccaagaggaaattgtggatgagagagcagtgcaggatgtggaatcactgtcaaatctgatccaggaaatcttggactttgatcaagctcagcagataaaatgctttaatagtaaattgttcctgtgcagtatctgtttctgtgagaagctgggtagtgaatgcatgtacttcttggagtgcaggcatgtgtactgcaaagcctgtctgaaggactactttgaaatccagatcagagatggccaggttcaatgcctcaactgcccagaaccaaagtgcccttcggtggccactcctggtcaggtcaaagagttagtggaagcagagttatttgcccgttatgaccgccttctcctccagtcctccttggacctgatggcagatgtggtgtactgcccccggccgtgctgccagctgcctgtgatgcaggaacctggctgcaccatgggtatctgctccagctgcaattttgccttctgtactttgtgcaggttgacctaccatggggtctccccatgtaaggtgactgcagagaaattaatggacttacgaaatgaatacctgcaagcggatgaggctaataaaagacttttggatcaaaggtatggtaagagagtgattcagaaggcactggaagagatggaaagtaaggagtggctagagaagaactcaaagagctgcccatgttgtggaactcccatagagaaattagacggatgtaacaagatgacatgtactggctgtatgcaatatttctgttggatttgcatgggttctctctctagagcaaacccttacaaacatttcaatgaccctggttcaccatgttttaaccggctgttttatgctgtggatgttgacgacgatatttgggaagatgaggtagaagactagttaactactgctcaagatatggaagtggattgtttttccctaatcttccgtcaagtacacaaagtaactttgcgggatatttagggtactattcattcactcttcctgcgtagaagatatggaagaacgaggtttatattttcatgtggtactactgaagaaggtgcattgatacatttttaaatgtaagttgagaaaaatttataagccaaaggttcagaaaattaaactacagaatattaaatattataatgtgcccaaagctctgaatagttaaaaattaaatatttattttcttccccaagctttaggtaaggagaagaggggtcaagagttaaacttagagaccctttgtctctgagaagcatccttctaagacattctgttggagttccctcagtactattccttacaactggagtgggtagaagccttatgaaaattatactgagaacctgatctcgtttactccatgttaatcacattcctaccaacctaaatttctgccaagtcagttctctttggaggaagcccattactccgtaactgactggatggtccagtgtcattttgatctgcttttcagaatggaaatttataatataaatatatgttttaataccacaaacactgtggggcacttgatatttattagtggtgtatatggtccactggtttcaggccaaatctagaatttagtgatactggctcagaagaatttaagttctattcagccttcctgggtgttagaacctagattcaaaatggcttgtctttgctacttttgttccacattctctctctttacctttgccctaccttctgtttgtaaggatgattttaatattaattccaggaacacatgtttttatttcctctgctggaataggagaaagcttaatatattcccaagctgaatgttcttgaattatatctgcatttaccactgtatatgcatatagtgacagtataacctgtctatactacagtagttccagtcctaactttctgaattatttttaaagatcttctctaacaagctatgggaatttggcttcatactctttctttgcaacagcagtgttctgggtgataattttgaattgatacctgttcctttttctgggttttgttggctttttgaaaaattgtctttccttatcattggtgggaggcttggtagcaaagtaacattttttggaaaagaggacagaaaaattgaactacagcttgagaacgtattctttttttcctactttgttattgcaaattgaggaatcacttttaactgttttaggtgtgtgtgtccagagtgagcaaggattatgtttttggattgtcaaagaggatgcttagtcttaaaataaaaataaatttaaaaatcatcttataatt

SEQ ID NO: 333319 - DNA, 2859 bp, Artificial Sequence
  derived and/or modified sequence
ggtctctggtctcccctctctgagcactctgaggtccttatgtcgtcagaagatcgagaagctcaggaggatgaattgctggccctggcaagtatttacgatggagatgaatttagaaaagcagagtctgtccaaggtggagaaaccaggatctatttggatttgccacagaatttcaagatatttgtgagcggcaattcaaatgagtgtctccagaatagtggctttgaatacaccatttgctttctgcctccacttgtgctgaactttgaactgccaccagattatccatcctcttccccaccttcattcacacttagtggcaaatggctgtcaccaactcagctatctgctctatgcaagcacttagacaacctatgggaagaacaccgtggcagcgtggtcctgtttgcctggatgcaatttcttaaggaagagaccctagcatacttgaatattgtctctccttttgagctcaagattggttctcagaaaaaagtgcagagaaggacagctcaagcttctcccaacacagagctagattttggaggagctgctggatctgatgtagaccaagaggaaattgtggatgagagagcagtgcaggatgtggaatcactgtcaaatctgatccaggaaatcttggactttgatcaagctcagcagataaaatgctttaatagtaaattgttcctgtgcagtatctgtttctgtgagaagctgggtagtgaatgcatgtacttcttggagtgcaggcatgtgtactgcaaagcctgtctgaaggactactttgaaatccagatcagagatggccaggttcaatgcctcaactgcccagaaccaaagtgcccttcggtggccactcctggtcaggtcaaagagttagtggaagcagagttatttgcccgttatgaccgccttctcctccagtcctccttggacctgatggcagatgtggtgtactgcccccggccgtgctgccagctgcctgtgatgcaggaacctggctgcaccatgggtatctgctccagctgcaattttgccttctgtactttgtgcaggttgacctaccatggggtctccccatgtaaggtgactgcagagaaattaatggacttacgaaatgaatacctgcaagcggatgaggctaataaaagacttttggatcaaaggtatggtaagagagtgattcagaaggcactggaagagatggaaagtaaggagtggctagagaagaactcaaagagctgcccatgttgtggaactcccatagagaaattagacggatgtaacaagatgacatgtactggctgtatgcaatatttctgttggatttgcatgggttctctctctagagcaaacccttacaaacatttcaatgaccctggttcaccatgttttaaccggctgttttatgctgtggatgttgacgacgatatttgggaagatgaggtagaagactagttaactactgctcaagatatggaagtggattgtttttccctaatcttccgtcaagtacacaaagtaactttgcgggatatttagggtactattcattcactcttcctgcgtagaagatatggaagaacgaggtttatattttcatgtggtactactgaagaaggtgcattgatacatttttaaatgtaagttgagaaaaatttataagccaaaggttcagaaaattaaactacagaatattaaatattataatgtgcccaaagctctgaatagttaaaaattaaatatttattttcttccccaagctttaggtaaggagaagaggggtcaagagttaaacttagagaccctttgtctctgagaagcatccttctaagacattctgttggagttccctcagtactattccttacaactggagtgggtagaagccttatgaaaattatactgagaacctgatctcgtttactccatgttaatcacattcctaccaacctaaatttctgccaagtcagttctctttggaggaagcccattactccgtaactgactggatggtccagtgtcattttgatctgcttttcagaatggaaatttataatataaatatatgttttaataccacaaacactgtggggcacttgatatttattagtggtgtatatggtccactggtttcaggccaaatctagaatttagtgatactggctcagaagaatttaagttctattcagccttcctgggtgttagaacctagattcaaaatggcttgtctttgctacttttgttccacattctctctctttacctttgccctaccttctgtttgtaaggatgattttaatattaattccaggaacacatgtttttatttcctctgctggaataggagaaagcttaatatattcccaagctgaatgttcttgaattatatctgcatttaccactgtatatgcatatagtgacagtataacctgtctatactacagtagttccagtcctaactttctgaattatttttaaagatcttctctaacaagctatgggaatttggcttcatactctttctttgcaacagcagtgttctgggtgataattttgaattgatacctgttcctttttctgggttttgttggctttttgaaaaattgtctttccttatcattggtgggaggcttggtagcaaagtaacattttttggaaaagaggacagaaaaattgaactacagcttgagaacgtattctttttttcctactttgttattgcaaattgaggaatcacttttaactgttttaggtgtgtgtgtccagagtgagcaaggattatgtttttggattgtcaaagaggatgcttagtcttaaaataaaaataaatttaaaaatcatcttataatt

SEQ ID NO: 333320 - DNA, 2905 bp, Artificial Sequence
  derived and/or modified sequence
ggaagaggcggcgcgccggttgagcagggcgtctctaggcctggtcggctggcggcgatggcaggattttcataatatatgtagtatgagttccacatcttggcctcttacccagcttcagcagtctcagctccaccagttagagaataaatgggatttgcatgaactccactctgagctgaaatacagactgcggtgttaatatccttttcttctgattgttattaacaggtccttatgtcgtcagaagatcgagaagctcaggaggatgaattgctggccctggcaagtatttacgatggagatgaatttagaaaagcagagtctgtccaaggtggagaaaccaggatctatttggatttgccacagaatttcaagatatttgtgagcgctatctgctctatgcaagcacttagacaacctatgggaagaacaccgtggcagcgtggtcctgtttgcctggatgcaatttcttaaggaagagaccctagcatacttgaatattgtctctccttttgagctcaagattggttctcagaaaaaagtgcagagaaggacagctcaagcttctcccaacacagagctagattttggaggagctgctggatctgatgtagaccaagaggaaattgtggatgagagagcagtgcaggatgtggaatcactgtcaaatctgatccaggaaatcttggactttgatcaagctcagcagataaaatgctttaatagtaaattgttcctgtgcagtatctgtttctgtgagaagctgggtagtgaatgcatgtacttcttggagtgcaggcatgtgtactgcaaagcctgtctgaaggactactttgaaatccagatcagagatggccaggttcaatgcctcaactgcccagaaccaaagtgcccttcggtggccactcctggtcaggtcaaagagttagtggaagcagagttatttgcccgttatgaccgccttctcctccagtcctccttggacctgatggcagatgtggtgtactgcccccggccgtgctgccagctgcctgtgatgcaggaacctggctgcaccatgggtatctgctccagctgcaattttgccttctgtactttgtgcaggttgacctaccatggggtctccccatgtaaggtgactgcagagaaattaatggacttacgaaatgaatacctgcaagcggatgaggctaataaaagacttttggatcaaaggtatggtaagagagtgattcagaaggcactggaagagatggaaagtaaggagtggctagagaagaactcaaagagctgcccatgttgtggaactcccatagagaaattagacggatgtaacaagatgacatgtactggctgtatgcaatatttctgttggatttgcatgggttctctctctagagcaaacccttacaaacatttcaatgaccctggttcaccatgttttaaccggctgttttatgctgtggatgttgacgacgatatttgggaagatgaggtagaagactagttaactactgctcaagatatggaagtggattgtttttccctaatcttccgtcaagtacacaaagtaactttgcgggatatttagggtactattcattcactcttcctgcgtagaagatatggaagaacgaggtttatattttcatgtggtactactgaagaaggtgcattgatacatttttaaatgtaagttgagaaaaatttataagccaaaggttcagaaaattaaactacagaatattaaatattataatgtgcccaaagctctgaatagttaaaaattaaatatttattttcttccccaagctttaggtaaggagaagaggggtcaagagttaaacttagagaccctttgtctctgagaagcatccttctaagacattctgttggagttccctcagtactattccttacaactggagtgggtagaagccttatgaaaattatactgagaacctgatctcgtttactccatgttaatcacattcctaccaacctaaatttctgccaagtcagttctctttggaggaagcccattactccgtaactgactggatggtccagtgtcattttgatctgcttttcagaatggaaatttataatataaatatatgttttaataccacaaacactgtggggcacttgatatttattagtggtgtatatggtccactggtttcaggccaaatctagaatttagtgatactggctcagaagaatttaagttctattcagccttcctgggtgttagaacctagattcaaaatggcttgtctttgctacttttgttccacattctctctctttacctttgccctaccttctgtttgtaaggatgattttaatattaattccaggaacacatgtttttatttcctctgctggaataggagaaagcttaatatattcccaagctgaatgttcttgaattatatctgcatttaccactgtatatgcatatagtgacagtataacctgtctatactacagtagttccagtcctaactttctgaattatttttaaagatcttctctaacaagctatgggaatttggcttcatactctttctttgcaacagcagtgttctgggtgataattttgaattgatacctgttcctttttctgggttttgttggctttttgaaaaattgtctttccttatcattggtgggaggcttggtagcaaagtaacattttttggaaaagaggacagaaaaattgaactacagcttgagaacgtattctttttttcctactttgttattgcaaattgaggaatcacttttaactgttttaggtgtgtgtgtccagagtgagcaaggattatgtttttggattgtcaaagaggatgcttagtcttaaaataaaaataaatttaaaaatcatcttataatt

SEQ ID NO: 333321 - DNA, 3067 bp, Artificial Sequence
  derived and/or modified sequence
gtgagtgggccccaggcaagggcggagggcggaactttggggttcggcactgccgggcggccggaagatggcaggattttcataatatatgtagtatgagttccacatcttggcctcttacccagcttcagcagtctcagctccaccagttagagaataaatgggatttgcatgaactccactctgagctgaaatacagactgcggtgttaatatccttttcttctgattgttattaacaggtccttatgtcgtcagaagatcgagaagctcaggaggatgaattgctggccctggcaagtatttacgatggagatgaatttagaaaagcagagtctgtccaaggtggagaaaccaggatctatttggatttgccacagaatttcaagatatttgtgagcggcaattcaaatgagtgtctccagaatagtggctttgaatacaccatttgctttctgcctccacttgtgctgaactttgaactgccaccagattatccatcctcttccccaccttcattcacacttagtggcaaatggctgtcaccaactcagctatctgctctatgcaagcacttagacaacctatgggaagaacaccgtggcagcgtggtcctgtttgcctggatgcaatttcttaaggaagagaccctagcatacttgaatattgtctctccttttgagctcaagattggttctcagaaaaaagtgcagagaaggacagctcaagcttctcccaacacagagctagattttggaggagctgctggatctgatgtagaccaagaggaaattgtggatgagagagcagtgcaggatgtggaatcactgtcaaatctgatccaggaaatcttggactttgatcaagctcagcagataaaatgctttaatagtaaattgttcctgtgcagtatctgtttctgtgagaagctgggtagtgaatgcatgtacttcttggagtgcaggcatgtgtactgcaaagcctgtctgaaggactactttgaaatccagatcagagatggccaggttcaatgcctcaactgcccagaaccaaagtgcccttcggtggccactcctggtcaggtcaaagagttagtggaagcagagttatttgcccgttatgaccgccttctcctccagtcctccttggacctgatggcagatgtggtgtactgcccccggccgtgctgccagctgcctgtgatgcaggaacctggctgcaccatgggtatctgctccagctgcaattttgccttctgtactttgtgcaggttgacctaccatggggtctccccatgtaaggtgactgcagagaaattaatggacttacgaaatgaatacctgcaagcggatgaggctaataaaagacttttggatcaaaggtatggtaagagagtgattcagaaggcactggaagagatggaaagtaaggagtggctagagaagaactcaaagagctgcccatgttgtggaactcccatagagaaattagacggatgtaacaagatgacatgtactggctgtatgcaatatttctgttggatttgcatgggttctctctctagagcaaacccttacaaacatttcaatgaccctggttcaccatgttttaaccggctgttttatgctgtggatgttgacgacgatatttgggaagatgaggtagaagactagttaactactgctcaagatatggaagtggattgtttttccctaatcttccgtcaagtacacaaagtaactttgcgggatatttagggtactattcattcactcttcctgcgtagaagatatggaagaacgaggtttatattttcatgtggtactactgaagaaggtgcattgatacatttttaaatgtaagttgagaaaaatttataagccaaaggttcagaaaattaaactacagaatattaaatattataatgtgcccaaagctctgaatagttaaaaattaaatatttattttcttccccaagctttaggtaaggagaagaggggtcaagagttaaacttagagaccctttgtctctgagaagcatccttctaagacattctgttggagttccctcagtactattccttacaactggagtgggtagaagccttatgaaaattatactgagaacctgatctcgtttactccatgttaatcacattcctaccaacctaaatttctgccaagtcagttctctttggaggaagcccattactccgtaactgactggatggtccagtgtcattttgatctgcttttcagaatggaaatttataatataaatatatgttttaataccacaaacactgtggggcacttgatatttattagtggtgtatatggtccactggtttcaggccaaatctagaatttagtgatactggctcagaagaatttaagttctattcagccttcctgggtgttagaacctagattcaaaatggcttgtctttgctacttttgttccacattctctctctttacctttgccctaccttctgtttgtaaggatgattttaatattaattccaggaacacatgtttttatttcctctgctggaataggagaaagcttaatatattcccaagctgaatgttcttgaattatatctgcatttaccactgtatatgcatatagtgacagtataacctgtctatactacagtagttccagtcctaactttctgaattatttttaaagatcttctctaacaagctatgggaatttggcttcatactctttctttgcaacagcagtgttctgggtgataattttgaattgatacctgttcctttttctgggttttgttggctttttgaaaaattgtctttccttatcattggtgggaggcttggtagcaaagtaacattttttggaaaagaggacagaaaaattgaactacagcttgagaacgtattctttttttcctactttgttattgcaaattgaggaatcacttttaactgttttaggtgtgtgtgtccagagtgagcaaggattatgtttttggattgtcaaagaggatgcttagtcttaaaataaaaataaatttaaaaatcatcttataatt

SEQ ID NO: 333322 - DNA, 4235 bp, Artificial Sequence
  derived and/or modified sequence
gcgcagagtcctccctatgccggcggtcgcgccagcgggatccgcctggctcagctgacagctcccgagaacggaagaggcggcgcgccggttgagcagggcgtctctaggcctggtcggctggcggcgatggcaggattttcataatatatgtagtatgagttccacatcttggcctcttacccagcttcagcagtctcagctccaccagttagagaataaatgggatttgcatgaactccactctgagctgaaatacagactgcggtgttaatatccttttcttctgattgttattaacaggtccttatgtcgtcagaagatcgagaagctcaggaggatgaattgctggccctggcaagtatttacgatggagatgaatttagaaaagcagagtctgtccaaggtggagaaaccaggatctatttggatttgccacagaatttcaagatatttgtgagcggcaattcaaatgagtgtctccagaatagtggctttgaatacaccatttgctttctgcctccacttgtgctgaactttgaactgccaccagattatccatcctcttccccaccttcattcacacttagtggcaaatggctgtcaccaactcagctatctgctctatgcaagcacttagacaacctatgggaagaacaccgtggcagcgtggtcctgtttgcctggatgcaatttcttaaggaagagaccctagcatacttgaatattgtctctccttttgagctcaagattggttctcagaaaaaagtgcagagaaggacagctcaagcttctcccaacacagagctagattttggaggagctgctggatctgatgtagaccaagaggaaattgtggatgagagagcagtgcaggatgtggaatcactgtcaaatctgatccaggaaatcttggactttgatcaagctcagcagataaaatgctttaatagtaaattgttcctgtgcagtatctgtttctgtgagaagctgggtagtgaatgcatgtacttcttggagtgcaggcatgtgtactgcaaagcctgtctgaaggactactttgaaatccagatcagagatggccaggttcaatgcctcaactgcccagaaccaaagtgcccttcggtggccactcctggtcaggtcaaagagttagtggaagcagagttatttgcccgttatgaccgccttctcctccagtcctccttggacctgatggcagatgtggtgtactgcccccggccgtgctgccagctgcctgtgatgcaggaacctggctgcaccatgggtatctgctccagctgcaattttgccttctgtactttgtgcaggttgacctaccatggggtctccccatgtaaggtgactgcagagaaattaatggacttacgaaatgaatacctgcaagcggatgaggctaataaaagacttttggatcaaaggtatggtaagagagtgattcagaaggcactggaagagatggaaagtaaggagtggctagagaagaactcaaagagctgcccatgttgtggaactcccatagagaaattagacggatgtaacaagatgacatgtactggctgtatgcaatatttctgttggatttgcatgggttctctctctagagcaaacccttacaaacatttcaatgaccctggttcaccatgttttaaccggctgttttatgctgtggatgttgacgacgatatttgggaagatgaggtagaagactagttaactactgctcaagatatggaagtggattgtttttccctaatcttccgtcaagtacacaaagtaactttgcgggatatttagggtactattcattcactcttcctgcgtagaagatatggaagaacgaggtttatattttcatgtggtactactgaagaaggtgcattgatacatttttaaatgtaagttgagaaaaatttataagccaaaggttcagaaaattaaactacagaatattaaatattataatgtgcccaaagctctgaatagttaaaaattaaatatttattttcttccccaagctttaggtaaggagaagaggggtcaagagttaaacttagagaccctttgtctctgagaagcatccttctaagacattctgttggagttccctcagtactattccttacaactggagtgggtagaagccttatgaaaattatactgagaacctgatctcgtttactccatgttaatcacattcctaccaacctaaatttctgccaagtcagttctctttggaggaagcccattactccgtaactgactggatggtccagtgtcattttgatctgcttttcagaatggaaatttataatataaatatatgttttaataccacaaacactgtggggcacttgatatttattagtggtgtatatggtccactggtttcaggccaaatctagaatttagtgatactggctcagaagaatttaagttctattcagccttcctgggtgttagaacctagattcaaaatggcttgtctttgctacttttgttccacattctctctctttacctttgccctaccttctgtttgtaaggatgattttaatattaattccaggaacacatgtttttatttcctctgctggaataggagaaagcttaatatattcccaagctgaatgttcttgaattatatctgcatttaccactgtatatgcatatagtgacagtataacctgtctatactacagtagttccagtcctaactttctgaattatttttaaagatcttctctaacaagctatgggaatttggcttcatactctttctttgcaacagcagtgttctgggtgataattttgaattgatacctgttcctttttctgggttttgttggctttttgaaaaattgtctttccttatcattggtgggaggcttggtagcaaagtaacattttttggaaaagaggacagaaaaattgaactacagcttgagaacgtattctttttttcctactttgttattgcaaattgaggaatcacttttaactgttttaggtgtgtgtgtccagagtgagcaaggattatgtttttggattgtcaaagaggatgcttagtcttaaaataaaaataaatttaaaaatcatcttataattagaacagagttgctgctatttgttctgtcaccaaggcaactaatcacattttaaaactgttcggcatataacatattcttaaagtaagaaaaaaaaggtcacagaatagcatctcttttacctgggcttgtgactgagcttaggttttagggcccatattttgtttaaaccagatagtttcatggtcttccattcaggacattttgtgtaaaaattgaggttaatttgctgggcacagtggctcacgcctgtaatcccagcactttgggaggcctaggcgggcggatcacgaggtcaggagttcgagaccatcatggctaacacggtgaaaccccgtctctactaaaaatacaaaaaattagctgggcatggtggcaggcgcctgtagtcccagctactcaggaggctgaggcaggagaatggcatgaacctgggaggtggagcttgcagtgagccgagatagcgccactgcactccagcctgagcgacagagcgagactccttctcaaaaaaaaaaaaaaaaaaaattgaggttaaagaataaattaaagataagaaatggaaattaaaatgatttgttctacagtatatacctgagaagagtgatttctgtgatcaaagagttcaattcagatttattcagaaagagctactcagaagctctatagttcgtgagctacttgatattttctagagatcattttatgttaagctgttatacattgttgatgatgtcatagaagtaggaaagaagcctttataatacagttttatgaaagaaatgggagccttttttcccatttatgatattaaaaacaacacaggtatttggtgtttagtctcaaaaatttgtttggtcaccttagtgattcttaggtacaaagtcttcatcactcaattttaacaaagaaaatagggcttataaagttatacttttgaagcatgagttatgagctaattttaagatgtatagttttggtagagtacttttgtctcagtaaaatgaaagatttgggtaactccccaaatgccctgtaaaacaaatgggtttgtggaaggttgtggtgtcagcaaaatatatgatagaataaagagttttgtaccta

SEQ ID NO: 333323 - DNA, 667 bp, Artificial Sequence
  derived and/or modified sequence
ggccggggctccggggacaggccagatgggaagctgctgtccacgcagcaaggcggctgctgagggaaagggagcctctgcatcaccaaatggcaggattttcataatatatgtagtatgagttccacatcttggcctcttacccagcttcagcagtctcagctccaccagttagagaataaatgggatttgcatgaactccactctgagctgaaatacagactgcggtgttaatatccttttcttctgattgttattaacaggtccttatgtcgtcagaagatcgagaagctcaggaggatgaattgctggccctggcaagtatttacgatggagatgaatttagaaaagcagagtctgtccaaggtggagaaaccaggatctatttggatttgccacagaatttcaagatatttgtgagcggcaattcaaatgagtgtctccagaatagtggctttgaatacaccatttgctttctgcctccacttgtgctgaactttgaactgccaccagattatccatcctcttccccaccttcattcacacttagtggcaaatggctgtcaccaactcagctatctgctctatgcaagcacttagacaacctatgggaagaacaccgtggcagcgtggtcctgtttgcctggatgcaatttcttaaggaaga

SEQ ID NO: 333324 - DNA, 582 bp, Artificial Sequence
  derived and/or modified sequence
gagaacggaagaggcggcgcgccggttgagcagggcgtctctaggcctggtcggctggcggcggtccttatgtcgtcagaagatcgagaagctcaggaggatgaattgctggccctggcaagtatttacgatggagatgaatttagaaaagcagagtctgtccaaggtggagaaaccaggatctatttggatttgccacagaatttcaagatatttgtgagcggcaattcaaatgagtgtctccagaatagtggctttgaatacaccatttgctttctgcctccacttgtgctgaactttgaactgccaccagattatccatcctcttccccaccttcattcacacttagtggcaaatggctgtcaccaactcagctatctgctctatgcaagcacttagacaacctatgggaagaacaccgtggcagcgtggtcctgtttgcctggatgcaatttcttaaggaagagaccctagcatacttgaatattgtctctccttttgagctcaagattggttctcagaaaaaagtgcagagaaggacagctcaagcttctcccaacacagagctagattttggagga

SEQ ID NO: 333325 - DNA, 815 bp, Artificial Sequence
  derived and/or modified sequence
ggctggcggcggtgagtgggccccaggcaagggcggagggcggaactttggggttcggcactgccgggcggccggaagatggcaggattttcataatatatgtagtatgagttccacatcttggcctcttacccagcttcagcagtctcagctccaccagttagagaataaatgggatttgcatgaactccactctgagctgaaatacagactgcggtgttaatatccttttcttctgattgttattaacaggtccttatgtcgtcagaagatcgagaagctcaggaggatgaattgctggccctggcaagtatttacgatggagatgaatttagaaaagcagagtctgtccaaggtggagaaaccaggatctatttggatttgccacagaatttcaagatatttgtgagcggcaattcaaatgagtgtctccagaatagtggctttgaatacaccatttgctttctgcctccacttgtgctgaactttgaactgccaccagattatccatcctcttccccaccttcattcacacttagtggcaaatggctgtcaccaactcagctatctgctctatgcaagcacttagacaacctatgggaagaacaccgtggcagcgtggtcctgtttgcctggatgcaatttcttaaggaagagaccctagcatacttgaatattgtctctccttttgagctcaagattggttctcagaaaaaagtgcagagaaggacagctcaagcttctcccaacacagagctagattttggaggagctgctggatctgatgtagaccaagaggaaattgtggatgagag

SEQ ID NO: 333326 - DNA, 938 bp, Artificial Sequence
  derived and/or modified sequence
ggaggatgaggccggggctccggggacaggccagatgggaagctgctgtccacgcagcaaggcggctgctgagggaaagggagcctctgcatcaccaagtccttatgtcgtcagaagatcgagaagctcaggaggatgaattgctggccctggcaagtatttacgatggagatgaatttagaaaagcagagtctgtccaaggtggagaaaccaggatctatttggatttgccacagaatttcaagatatttgtgagcggcaattcaaatgagtgtctccagaatagtggctttgaatacaccatttgctttctgcctccacttgtgctgaactttgaactgccaccagattatccatcctcttccccaccttcattcacacttagtggcaaatggctgtcaccaactcagctatctgctctatgcaagcacttagacaacctatgggaagaacaccgtggcagcgtggtcctgtttgcctggatgcaatttcttaaggaagagaccctagcatacttgaatattgtctctccttttgagctcaagattggttctcagaaaaaagtgcagagaaggacagctcaagcttctcccaacacagagctagattttggaggagctgctggatctgatgtagaccaagaggaaattgtggatgagagagcagtgcaggatgtggaatcactgtcaaatctgatccaggaaatcttggactttgatcaagctcagcagataaaatgctttaatagtaaattgttcctgtgcagtatctgtttctgtgagaagctgggtagtgaatgcatgtacttcttggagtgcaggcatgtgtactgcaaagcctgtctgaaggactactttgaaatccagatcagagatggccaggttcaatgcctcaactgcccagaaccaaagtgcccttcggtggccactcctggtcag

SEQ ID NO: 333327 - DNA, 1425 bp, Artificial Sequence
  derived and/or modified sequence
atgagcagcgaggacagagaggcccaggaggacgagctgctggccctggccagcatctacgacggcgacgagttcagaaaggccgagagcgtgcagggcggcgagaccagaatctacctggacctgccccagaacttcaagatcttcgtgagcggcaacagcaacgagtgcctgcagaacagcggcttcgagtacaccatctgcttcctgccccccctggtgctgaacttcgagctgccccccgactaccccagcagcagcccccccagcttcaccctgagcggcaagtggctgagccccacccagctgagcgccctgtgcaagcacctggacaacctgtgggaggagcacagaggcagcgtggtgctgttcgcctggatgcagttcctgaaggaggagaccctggcctacctgaacatcgtgagccccttcgagctgaagatcggcagccagaagaaggtgcagagaagaaccgcccaggccagccccaacaccgagctggacttcggcggcgccgccggcagcgacgtggaccaggaggagatcgtggacgagagagccgtgcaggacgtggagagcctgagcaacctgatccaggagatcctggacttcgaccaggcccagcagatcaagtgcttcaacagcaagctgttcctgtgcagcatctgcttctgcgagaagctgggcagcgagtgcatgtacttcctggagtgcagacacgtgtactgcaaggcctgcctgaaggactacttcgagatccagatcagagacggccaggtgcagtgcctgaactgccccgagcccaagtgccccagcgtggccacccccggccaggtgaaggagctggtggaggccgagctgttcgccagatacgacagactgctgctgcagagcagcctggacctgatggccgacgtggtgtactgccccagaccctgctgccagctgcccgtgatgcaggagcccggctgcaccatgggcatctgcagcagctgcaacttcgccttctgcaccctgtgcagactgacctaccacggcgtgagcccctgcaaggtgaccgccgagaagctgatggacctgagaaacgagtacctgcaggccgacgaggccaacaagagactgctggaccagagatacggcaagagagtgatccagaaggccctggaggagatggagagcaaggagtggctggagaagaacagcaagagctgcccctgctgcggcacccccatcgagaagctggacggctgcaacaagatgacctgcaccggctgcatgcagtacttctgctggatctgcatgggcagcctgagcagagccaacccctacaagcacttcaacgaccccggcagcccctgcttcaacagactgttctacgccgtggacgtggacgacgacatctgggaggacgaggtggaggactag

SEQ ID NO: 333328 - DNA, 48 bp, Artificial Sequence
  derived and/or modified sequence
atgagcagcgaggacagagaggcccaggaggacgagctgctggcctag

SEQ ID NO: 333329 - DNA, 399 bp, Artificial Sequence
  derived and/or modified sequence
atgagcagcgaggacagagaggcccaggaggacgagctgctggccctggccagcatctacgacggcgacgagttcagaaaggccgagagcgtgcagggcggcgagaccagaatctacctggacctgccccagaacttcaagatcttcgtgagcggcaacagcaacgagtgcctgcagaacagcggcttcgagtacaccatctgcttcctgccccccctggtgctgaacttcgagctgccccccgactaccccagcagcagcccccccagcttcaccctgagcggcaagtggctgagccccacccagctgagcgccctgtgcaagcacctggacaacctgtgggaggagcacagaggcagcgtggtgctgttcgcctggatgcagttcctgaaggagtag

SEQ ID NO: 333330 - DNA, 516 bp, Artificial Sequence
  derived and/or modified sequence
atgagcagcgaggacagagaggcccaggaggacgagctgctggccctggccagcatctacgacggcgacgagttcagaaaggccgagagcgtgcagggcggcgagaccagaatctacctggacctgccccagaacttcaagatcttcgtgagcggcaacagcaacgagtgcctgcagaacagcggcttcgagtacaccatctgcttcctgccccccctggtgctgaacttcgagctgccccccgactaccccagcagcagcccccccagcttcaccctgagcggcaagtggctgagccccacccagctgagcgccctgtgcaagcacctggacaacctgtgggaggagcacagaggcagcgtggtgctgttcgcctggatgcagttcctgaaggaggagaccctggcctacctgaacatcgtgagccccttcgagctgaagatcggcagccagaagaaggtgcagagaagaaccgcccaggccagccccaacaccgagctggacttcggcggctag

SEQ ID NO: 333331 - DNA, 558 bp, Artificial Sequence
  derived and/or modified sequence
atgagcagcgaggacagagaggcccaggaggacgagctgctggccctggccagcatctacgacggcgacgagttcagaaaggccgagagcgtgcagggcggcgagaccagaatctacctggacctgccccagaacttcaagatcttcgtgagcggcaacagcaacgagtgcctgcagaacagcggcttcgagtacaccatctgcttcctgccccccctggtgctgaacttcgagctgccccccgactaccccagcagcagcccccccagcttcaccctgagcggcaagtggctgagccccacccagctgagcgccctgtgcaagcacctggacaacctgtgggaggagcacagaggcagcgtggtgctgttcgcctggatgcagttcctgaaggaggagaccctggcctacctgaacatcgtgagccccttcgagctgaagatcggcagccagaagaaggtgcagagaagaaccgcccaggccagccccaacaccgagctggacttcggcggcgccgccggcagcgacgtggaccaggaggagatcgtggacgagtag

SEQ ID NO: 333332 - DNA, 837 bp, Artificial Sequence
  derived and/or modified sequence
atgagcagcgaggacagagaggcccaggaggacgagctgctggccctggccagcatctacgacggcgacgagttcagaaaggccgagagcgtgcagggcggcgagaccagaatctacctggacctgccccagaacttcaagatcttcgtgagcggcaacagcaacgagtgcctgcagaacagcggcttcgagtacaccatctgcttcctgccccccctggtgctgaacttcgagctgccccccgactaccccagcagcagcccccccagcttcaccctgagcggcaagtggctgagccccacccagctgagcgccctgtgcaagcacctggacaacctgtgggaggagcacagaggcagcgtggtgctgttcgcctggatgcagttcctgaaggaggagaccctggcctacctgaacatcgtgagccccttcgagctgaagatcggcagccagaagaaggtgcagagaagaaccgcccaggccagccccaacaccgagctggacttcggcggcgccgccggcagcgacgtggaccaggaggagatcgtggacgagagagccgtgcaggacgtggagagcctgagcaacctgatccaggagatcctggacttcgaccaggcccagcagatcaagtgcttcaacagcaagctgttcctgtgcagcatctgcttctgcgagaagctgggcagcgagtgcatgtacttcctggagtgcagacacgtgtactgcaaggcctgcctgaaggactacttcgagatccagatcagagacggccaggtgcagtgcctgaactgccccgagcccaagtgccccagcgtggccacccccggccagtag

SEQ ID NO: 333333 - protein, 246 aa, Artificial Sequence
  derived and/or modified sequence
MRNMLSKLQIACDNAVFGCSAVVRLDNLMSHLSDCEHNPKRPVTCEQGCGLEMPKDELPNHNCIKHLRSVVQQQQTRIAELEKTSAEHKHQLAEQKRDIQLLKAYMRAIRSVNPNLQNLEETIEYNEILEWVNSLQPARVTRWGGMISTPDAVLQAVIKRSLVESGCPASIVNELIENAHERSWPQGLATLETRQMNRRYYENYVAKRIPGKQAVVVMACENQHMGDDMVQEPGLVMIFAHGVEEI

SEQ ID NO: 333334 - protein, 146 aa, Artificial Sequence
  derived and/or modified sequence
MRNMLSKLQIACDNAVFGCSAVVRLDNLMSHLSDCEHNPKRPVTCEQGCGLEMPKDELPNHNCIKHLRSVVQQQQTRIAELEKTSAEHKHQLAEQKRDIQLLKAYMRAIRSVNPNLQNLEETIEYNEILEWVNSLQPARVTRWGGM

SEQ ID NO: 333335 - DNA, 741 bp, Artificial Sequence
  derived and/or modified sequence
atgagaaacatgctgagcaagctgcagatcgcctgcgacaacgccgtgttcggctgcagcgccgtggtgagactggacaacctgatgagccacctgagcgactgcgagcacaaccccaagagacccgtgacctgcgagcagggctgcggcctggagatgcccaaggacgagctgcccaaccacaactgcatcaagcacctgagaagcgtggtgcagcagcagcagaccagaatcgccgagctggagaagaccagcgccgagcacaagcaccagctggccgagcagaagagagacatccagctgctgaaggcctacatgagagccatcagaagcgtgaaccccaacctgcagaacctggaggagaccatcgagtacaacgagatcctggagtgggtgaacagcctgcagcccgccagagtgaccagatggggcggcatgatcagcacccccgacgccgtgctgcaggccgtgatcaagagaagcctggtggagagcggctgccccgccagcatcgtgaacgagctgatcgagaacgcccacgagagaagctggccccagggcctggccaccctggagaccagacagatgaacagaagatactacgagaactacgtggccaagagaatccccggcaagcaggccgtggtggtgatggcctgcgagaaccagcacatgggcgacgacatggtgcaggagcccggcctggtgatgatcttcgcccacggcgtggaggagatctag

SEQ ID NO: 333336 - DNA, 441 bp, Artificial Sequence
  derived and/or modified sequence
atgagaaacatgctgagcaagctgcagatcgcctgcgacaacgccgtgttcggctgcagcgccgtggtgagactggacaacctgatgagccacctgagcgactgcgagcacaaccccaagagacccgtgacctgcgagcagggctgcggcctggagatgcccaaggacgagctgcccaaccacaactgcatcaagcacctgagaagcgtggtgcagcagcagcagaccagaatcgccgagctggagaagaccagcgccgagcacaagcaccagctggccgagcagaagagagacatccagctgctgaaggcctacatgagagccatcagaagcgtgaaccccaacctgcagaacctggaggagaccatcgagtacaacgagatcctggagtgggtgaacagcctgcagcccgccagagtgaccagatggggcggcatgtag

SEQ ID NO: 333337 - DNA, 741 bp, Artificial Sequence
  derived and/or modified sequence
atgaggaacatgctgtcaaagctacagattgcatgcgacaacgcagttttcggctgttcagccgtggtacgcctcgacaatctcatgtctcacctgagtgattgtgagcataacccaaaaaggccggttacatgtgaacagggttgcggcttagagatgccgaaggacgaactgcccaaccacaactgtattaaacacctcagatctgtggtgcaacagcagcagacacggattgccgagctggaaaaaacgagcgcagaacataagcatcagttggccgagcagaagcgggacattcagcttcttaaagcatacatgcgcgccatccggtcggtgaatcccaacctgcagaaccttgaggagactattgagtataacgagatccttgaatgggttaacagtctgcagcctgctcgggtcactcggtggggggggatgattagtactcccgacgctgttctacaggccgttatcaagagatccctggttgaatcaggatgccctgctagcatagttaacgagttgatcgaaaacgcgcatgaacggtcgtggccacagggcctggctacactggagacccggcagatgaacagaagatattatgaaaattatgtcgccaagcggatccctggcaaacaggcggttgtggttatggcctgcgaaaaccagcacatgggggacgacatggtgcaagagcccggactggtgatgatctttgcacacggggttgaagagatctag

SEQ ID NO: 333338 - DNA, 441 bp, Artificial Sequence
  derived and/or modified sequence
atgaggaatatgctgtcaaaactgcaaatcgcctgtgacaatgctgtgtttggatgctccgccgtggtaaggctagataaccttatgtcacatctaagtgattgtgagcataatccaaagaggccagtaacatgtgagcagggctgcgggctcgagatgccaaaggacgaactaccaaatcacaactgcattaaacatttaaggtcagtggtgcagcagcagcagacccgcatcgcggagctcgaaaaaacaagtgccgagcataagcatcagttagccgaacaaaagagagatattcagctgttaaaggcctacatgagagctatccgaagtgtaaacccgaatcttcagaacttggaggagactattgaatacaatgaaatcctggaatgggtcaactccctccagccggcccgggtgacccgatgggggggcatgtag

SEQ ID NO: 333339 - DNA, 741 bp, Artificial Sequence
  derived and/or modified sequence
atgaggaacatgctgagcaagctgcagatcgcctgtgacaatgctgtgtttggctgcagcgctgtggtgcggctggacaacctgatgagccacctgagtgactgtgagcacaaccccaagaggcctgtgacctgtgagcagggctgcggcctggagatgcccaaggatgagctgcccaaccacaactgcatcaagcacctgcggtctgtggtgcagcagcagcagaccagaattgctgagctggagaagaccagcgctgagcacaagcaccagctggccgagcagaagagggacatccagctgctgaaggcctacatgagggccatccgctctgtgaaccccaacctgcagaacctggaggagaccatcgagtacaatgagatcctggagtgggtgaacagcctgcagcctgcccgggtgacccgctggggcggcatgatcagcaccccagatgctgtgctgcaggccgtcatcaagaggagcctggtggagagcggctgcccagccagcatcgtgaatgagctgattgaaaatgcccacgagaggtcctggccccagggcctggccaccctggagacccggcagatgaacagacgctactatgagaactacgtggccaagagaattcctgggaagcaggccgtggtggtgatggcctgtgagaaccagcacatgggagatgacatggtgcaggagcccggcctggtgatgatctttgcccatggagtggaggagatctag

SEQ ID NO: 333340 - DNA, 441 bp, Artificial Sequence
  derived and/or modified sequence
atgaggaacatgctgagcaagctgcagatcgcctgtgacaatgctgtgtttggctgcagcgctgtggtgcggctggacaacctgatgagccacctgagtgactgtgagcacaaccccaagaggcctgtgacctgtgagcagggctgcggcctggagatgcccaaggatgagctgcccaaccacaactgcatcaagcacctgcggtctgtggtgcagcagcagcagaccagaattgctgagctggagaagaccagcgctgagcacaagcaccagctggccgagcagaagagggacatccagctgctgaaggcctacatgagggccatccgctctgtgaaccccaacctgcagaacctggaggagaccatcgagtacaatgagatcctggagtgggtgaacagcctgcagcctgcccgggtgacccgctggggcggcatgtag

SEQ ID NO: 333341 - DNA, 741 bp, Artificial Sequence
  derived and/or modified sequence
atgcggaacatgctgagcaagctgcagatcgcctgcgacaacgccgtcttcggatgtagcgctgtggttcggctggacaacttgatgagccacttgtccgactgcgaacataaccccaagagaccagtcacttgcgagcaggggtgtggtctcgaaatgccaaaggatgaactccctaaccacaattgtatcaagcacctcaggtcagtggtgcagcaacagcagacccggattgctgaacttgaaaagacctccgccgaacataagcatcagctggccgaacagaaacgtgacatccaacttcttaaagcctatatgcgtgcaattaggagtgtcaaccccaacctgcagaacctggaagaaaccatcgaatacaacgagattctcgagtgggtcaacagtctgcagcccgcgagagtcacaagatggggcggcatgattagcacgcccgatgctgtactccaggccgtgataaaaagatcactggtggaaagcggatgccccgcgagcatagtcaatgaactaatagagaacgcacatgagaggtcctggccacaggggctggctactttggagactcgccagatgaacaggagatattacgagaactatgtagcaaagaggattccaggcaaacaagccgtcgtcgtaatggcttgcgaaaatcagcacatgggagatgatatggtgcaggagcccggccttgtcatgatcttcgctcatggtgtcgaagaaatctag

SEQ ID NO: 333342 - DNA, 441 bp, Artificial Sequence
  derived and/or modified sequence
atgcggaacatgctgagcaagctgcagatcgcctgcgacaacgccgtgttcggctgcagcgctgtagtgaggctggataacctgatgagccacctcagcgattgtgaacacaacccaaaaagaccagtaacctgcgagcaggggtgcggtcttgagatgccgaaggatgagctgcccaatcacaattgtataaaacatctccgaagtgtagtgcaacagcagcagaccaggatcgccgagctggagaaaactagtgcggagcacaagcatcagctggcggaacagaagcgagacatacagctgctcaaggcctacatgagggcaattcgctcggtcaaccctaatctgcagaatctcgaggaaaccatcgagtacaacgaaatcttggaatgggtaaacagcttacagcctgctcgcgtgactcgatggggaggcatgtag

SEQ ID NO: 333343 - DNA, 741 bp, Artificial Sequence
  derived and/or modified sequence
atgcgcaatatgctcagtaagctccagattgcctgtgataatgcggtcttcggatgctcagccgtggtgaggctcgacaaccttatgagtcacctgtcggactgtgagcataacccgaaacggccagtaacctgtgaacaaggctgcggccttgagatgcccaaggatgaactgccaaaccacaattgcatcaaacacttgagatctgtcgtacaacagcaacagacaaggatcgccgagctggagaaaacaagcgcggaacataaacaccaactagccgaacagaaacgggacatacaactgttgaaagcttacatgcgtgccatccgaagcgttaatccaaacctacagaacctagaagagacgattgaatataacgagatcctagagtgggttaacagcttgcagcccgctcgagttacacggtgggggggtatgatttccactcctgacgcggtactccaagcggtaattaagcgcagtctcgtggagtcaggctgtcccgcaagcatagtcaacgaactgatcgaaaacgcccatgaaagaagctggccacagggactggccacactcgagactagacagatgaatcgccgttactacgaaaactacgtggcaaaacggattcccggtaaacaggcggtggttgtgatggcctgcgagaaccagcatatgggggacgacatggtgcaagaacccggactggttatgatttttgctcatggggtggaagaaatttag

SEQ ID NO: 333344 - DNA, 441 bp, Artificial Sequence
  derived and/or modified sequence
atgagaaatatgctgagcaaactgcagatcgcctgtgacaacgccgtgtttggttgctccgccgtcgtcagactcgacaacctgatgtctcacctgagcgactgtgaacataatcctaaaagaccagtgacctgcgagcaagggtgcgggttagaaatgccgaaggatgagcttccaaaccataattgcattaagcatctccggtccgtcgtacagcagcagcagaccagaattgccgaactggagaagacatcagccgaacacaagcaccagctcgcagagcaaaagagagatattcagcttcttaaagcatatatgagagccatcagatccgtgaatccaaatctgcagaatctggaagagacgatagagtataacgagatcctcgagtgggtcaatagtctgcagcctgccagggtcacccgatggggcggtatgtag

SEQ ID NO: 333345 - protein, 1028 aa, Artificial Sequence
  derived and/or modified sequence
MGFFSLSSERNESVIHYPESTEPEIQQEMSTSQPDCNVDSCSVSSGYGTFCISELNLYKSKDPKEFMEHIDVPKGQYVAPAVPAESLVDGVKNENFYIQTPEECHVSLKEDVSISPGEFEHNFLGENKVSEVYSGKTNSNAITSWAQKLKQNQPKRAHVEDGGSRSKQGNEQSKKTPIEKSDFAAATHPRAFYLSKPDETPNAWMSDSGTGLTYWKLEEKDMHHSLPETLEKTFISLSSTDVSPNQSNTSNEMKLPSLKDIYYKKQRENKQLPERNLTSASNPNHPPEVLTLDPTLHMKPKQQISGIQPHGLPNALDDRISFSPDSVLEPSMSSPSDIDSFSQASNVTSQLPGFPKYPSHTKASPVDSWKNQTFQNESRTSSTFPSVYTITSNDISVNTVDEENTVMVASASVSQSQLPGTANSVPECISLTSLEDPVILSKIRQNLKEKHARHIADLRAYYESEINSLKQKLEAKEISGVEDWKITNQILVDRCGQLDSALHEATSRVRTLENKNNLLEIEVNDLRERFSAASSASKILQERIEEMRTSSKEKDNTIIRLKSRLQDLEEAFENAYKLSDDKEAQLKQENKMFQDLLGEYESLGKEHRRVKDALNTTENKLLDAYTQISDLKRMISKLEAQVKQVEHENMLSLRHNSRIHVRPSRANTLATSDVSRRKWLIPGAEYSIFTGQPLDTQDSNVDNQLEETCSLGHRSPLEKDSSPGSSSTSLLIKKQRETSDTPIMRALKELDEGKIFKNWGTQTEKEDTSNINPRQTETSVNASRSPEKCAQQRQKRLNSASQRSSSLPPSNRKSSTPTKREIMLTPVTVAYSPKRSPKENLSPGFSHLLSKNESSPIRFDILLDDLDTVPVSTLQRTNPRKQLQFLPLDDSEEKTYSEKATDNHVNHSSCPEPVPNGVKKVSVRTAWEKNKSVSYEQCKPVSVTPQGNDFEYTAKIRTLAETERFFDELTKEKDQIEAALSRMPSPGGRITLQTRLNQTPQICEESSHKCAFAGHYVPCHLYDYRFQG

SEQ ID NO: 333346 - DNA, 3087 bp, Artificial Sequence
  derived and/or modified sequence
atgggctttttcagcctgagttctgaaagaaatgagagcgttattcactaccccgaaagcaccgagccagaaatacagcaggagatgagcacatctcagcccgattgtaacgtggactcctgttcagtgtcgagcggatacggcacattctgcatttctgaactgaatttatacaagtcgaaggacccgaaggagtttatggaacatattgacgtgcctaagggtcaatatgttgcccccgctgttccagccgagagcctggtcgatggcgttaaaaatgagaatttttatattcagacccctgaagaatgtcatgtctccctgaaagaggacgtcagtatatcacccggcgagtttgaacacaacttcctgggagagaacaaggtttcagaggtttactctggtaaaaccaacagcaacgccataacaagttgggctcagaagctgaagcagaatcagccgaaaagggcgcacgtggaggacggcggcagccgctctaaacagggaaacgaacagagcaagaagacacccatagagaagtctgactttgccgccgcgactcaccccagagcattttacctatccaaacccgatgaaacacccaatgcctggatgtctgacagcggcacggggctgacatattggaaacttgaggagaaagatatgcaccactcactgcctgagactctcgagaaaacattcatatccctgagctcaaccgacgtctcaccaaaccagagcaacacgtctaatgagatgaagctcccctcgctgaaggatatttattacaaaaaacagcgggagaataagcagctccctgagcggaatttgacgtcagccagtaaccccaatcatccgcccgaggtgctgactcttgaccccacactgcacatgaagcccaaacagcagatttcaggcattcagccacatggactgccaaacgctctggacgacagaatctctttctcacctgactcagttttggaaccgagtatgtcttctccatcagatattgattcctttagccaggcctccaatgtgacctctcagttacccggctttcccaagtacccttctcataccaaggcctcgcccgtcgacagctggaaaaaccagacgtttcaaaatgagtcacgcacaagcagcaccttcccctccgtgtacacaataacatccaatgatatctcagttaacaccgtcgacgaggaaaatacagtcatggtcgcatcagccagcgtttcccagtctcagttgccaggcacggccaacagcgtacccgaatgtatttctctcacctcactcgaggatccggtgatcctgtcaaagattcgacagaacctgaaagaaaagcacgccagacacatcgctgatcttcgagcctattatgaatccgagatcaatagcctgaaacagaagctggaggccaaggaaatttctggagtggaagactggaagatcactaaccagatactagttgaccggtgtggccagctcgatagcgccctgcacgaggctacatcgcgagtgaggacactggagaataagaacaatctcttggaaatagaggttaatgaccttagggaacggttctccgccgcatcttctgcttccaaaatactgcaggaaaggattgaggaaatgcggacaagctcaaaagagaaggataacactatcataaggctgaaatcacggctccaggacctggaagaagcctttgagaacgcttataaactctccgacgacaaggaggcacagcttaaacaggagaataaaatgttccaagatctgctgggggaatacgaatctctgggcaaggaacatcggagagtgaaggacgccctgaataccacggagaataagctcttggacgcctacactcagatttctgatctcaaaagaatgataagcaagctggaggcccaggtgaaacaggttgagcatgagaatatgttatctctgcgacacaatagtaggattcacgttcgaccgtctcgagccaacacactggccacctctgatgtgtcccgcagaaagtggctcatacctggagcggagtactccattttcacaggccagcctcttgacacccaggattccaacgtagataatcagctggaggagacctgctcactggggcatagatctccgctcgagaaggacagttccccagggtcctcttctacatccctgctgatcaagaagcaacgggagacatctgacacccccatcatgagggctctcaaagagcttgacgaaggcaagatcttcaagaattgggggacacagacggagaaagaggacaccagcaatatcaaccctcgacagactgaaaccagtgtgaatgctagcagaagcccggagaaatgcgcacagcagagacagaagcggttgaatagcgcatcgcaacggagttccagccttcccccttccaacaggaagtccagcactcccaccaaaagggagattatgttaacccctgtcacagtggcctattcaccgaagaggtctccaaaagagaatctttcccccggctttagtcacctgttgagtaagaatgagtccagcccaatcagatttgacatcttgttagacgacctggacactgttcccgtgagcactctccagcggaccaacccccggaagcagctgcaattcctgcccctggatgactccgaagaaaaaacctattccgaaaaagccacagataatcacgttaatcattcttcttgccctgaacccgtccctaacggcgttaaaaaggtgtctgtgaggaccgcctgggagaaaaacaaaagcgtgtcgtatgagcagtgtaaaccagtcagtgttacgccacagggtaacgattttgagtacaccgcaaaaatccgcacactggcggagacagaacgctttttcgatgagttgactaaagagaaggatcaaatagaagccgccctatcccgcatgccatcacccggtggaaggatcacacttcagacccgactgaaccagacacctcagatttgtgaagagagttcccacaagtgcgcctttgccgggcattatgtgccgtgccatctgtacgattacaggttccagggctag

SEQ ID NO: 333347 - DNA, 3087 bp, Artificial Sequence
  derived and/or modified sequence
atgggcttcttcagcctgagcagcgagagaaatgaatctgtcatccactacccagagagcacagagcctgagatccagcaggagatgagcaccagccagcctgactgcaatgtggacagctgcagcgtgagcagcggctacggcaccttctgcatcagcgagctgaacctgtacaagagcaaggaccccaaggagttcatggagcacattgatgtgcccaagggccagtatgtggccccagctgtgcctgctgagagcctggtggatggagtgaagaatgaaaacttctacatccagaccccagaagaatgtcatgtgtccctgaaggaggatgtgtccatcagccctggagaatttgagcacaacttcctgggggagaacaaggtgtctgaggtgtacagcggcaagaccaacagcaatgccatcacctcctgggcccagaagctgaagcagaaccagcccaagagggcccacgtggaggatggcggcagccgcagcaagcagggcaatgagcagagcaagaagacccccatcgagaagagtgactttgctgctgccacccacccccgggccttctacctgagcaagccagatgagaccccaaatgcctggatgtctgacagcggcaccggcctgacctactggaagctggaggagaaggacatgcaccacagcctgcctgagaccctggagaagaccttcatcagcctgagcagcacagatgtgagccccaaccagagcaacaccagcaatgagatgaagctgcccagcctgaaggacatctactacaagaagcagcgggagaacaagcagctgcctgagaggaacctgaccagcgccagcaaccccaaccaccccccagaggtgctgaccctggaccccaccctgcacatgaagcccaagcagcagatcagcggcatccagccccacggcctgcccaatgccctggatgaccgcatctccttctccccagacagcgtgctggagcccagcatgagcagccccagcgacatcgacagcttcagccaggccagcaatgtgaccagccagctgcccggcttccccaagtaccccagccacaccaaggccagccctgtggacagctggaagaaccagaccttccagaatgaaagcaggaccagcagcaccttccccagcgtgtacaccatcaccagcaatgacatctctgtgaacacagtggatgaagaaaatacagtgatggtggccagcgcctctgtgtcccagagccagctgcctggaacagccaacagcgtgcctgagtgcatcagcctgaccagcctggaggaccctgtgatcctgagcaagatccggcagaacctgaaggagaagcacgcccggcacatcgctgacctgcgggcctactatgagagcgagatcaacagcctgaagcagaagctggaggccaaggagatctctggagtggaggactggaagatcaccaaccagatcctggtggacagatgtggccagctggacagcgccctgcacgaggccaccagccgggtgaggaccctggagaacaagaacaacctgctggagattgaggtgaatgacctgcgggagcgcttctctgctgccagcagcgccagcaagatcctgcaggagcgcatcgaggagatgaggaccagcagcaaggagaaggacaacaccatcatccggctgaagagccggctgcaggacctggaggaggcctttgaaaatgcctacaagctgagtgatgacaaggaggcccagctgaagcaggagaacaagatgttccaggacctgctgggggagtatgagagcctgggcaaggagcaccggcgggtgaaggatgccctgaacaccacagagaacaagctgctggatgcctacacccagatcagtgacctgaagaggatgatcagcaagctggaggcccaggtgaagcaggtggagcacgagaacatgctgagcctgcggcacaacagccgcatccacgtgcggcccagccgggccaacaccctggccaccagtgatgtgtccaggaggaagtggctgatccctggagctgagtacagcatcttcaccggccagcccctggacacccaggacagcaatgtggacaaccagctggaggagacctgcagcctgggccacaggagccccctggagaaggacagcagccctggcagcagcagcaccagcctgctgatcaagaagcagcgggagaccagtgacacccccatcatgagggccctgaaggagctggatgagggcaagatcttcaagaactggggcacccagacagagaaggaggacaccagcaacatcaacccccggcagacagagacctctgtgaatgccagccgcagccctgagaagtgtgcccagcagaggcagaagaggctgaacagcgccagccagaggagcagcagcctgccccccagcaacaggaagagcagcacccccaccaagcgggagatcatgctgacccctgtgacagtggcctacagccccaagaggagccccaaggagaacctgagccctggcttcagccacctgctgagcaagaatgaaagcagccccatccgctttgacatcctgctggatgacctggacacagtgcctgtgtccaccctgcagaggaccaaccccaggaagcagctgcagttcctgcccctggatgattctgaggagaagacctacagcgagaaggccacagacaaccacgtgaaccacagcagctgcccagagcctgtgcccaacggggtgaagaaggtgtctgtgaggacagcctgggagaagaacaagtctgtgtcctatgagcagtgcaagcctgtgtctgtgaccccccagggcaatgactttgagtacacagccaagatccgcaccctggccgagacagagcgcttctttgatgagctgaccaaggagaaggaccagatcgaggccgccctgagcaggatgcccagccctgggggccgcatcaccctgcagacccggctgaaccagaccccccagatctgtgaggagagcagccacaagtgtgcctttgctggccactacgtgccctgccacctgtatgactaccgcttccagggctag

SEQ ID NO: 333348 - DNA, 3194 bp, Artificial Sequence
  derived and/or modified sequence
atatacaggaggagataaaaaatttagtcaaattacagactagtagtgcttccttagcttcctgtgaaggaaattcttcaaacaaacaagtatcttcggaaagtcaaatgggttttttttctctaagcagtgagagaaatgaatctgttatccattatcctgaatccacagaacctgaaatacagcaagaaatgtccacgtcacaaccagactgcaatgtggatagttgctcagtaagcagtggatatggcaccttttgtatctcagaattaaatctgtacaaatctaaagaccctaaggagttcatggagcacatagatgttcccaaaggacagtatgtagcacctgcggtgccggctgagtcacttgtagatggtgtgaaaaatgagaatttttatatacagactcctgaagagtgtcatgtgtctttaaaggaagatgtatccatttctcctggtgaatttgaacataattttcttggtgaaaataaggtttctgaagtatacagtgggaaaacaaatagtaatgctataacatcatgggcacaaaaactgaagcagaaccaaccaaagagagcacatgtagaagatggaggttcaagatctaaacaaggaaatgagcaaagtaagaagacaccaattgagaaatctgattttgctgctgctacacatcctcgtgctttttacctcagtaaaccagatgaaactccaaatgcttggatgtctgattcaggaacaggattgacttactggaaactagaggaaaaggatatgcaccactctttgcctgaaactttagagaagacgttcatatcattgtcttccacagatgtgtcaccaaaccagtctaatactagtaatgagatgaagctaccgtcactgaaggatatttattataaaaaacaaagggaaaacaagcagttacctgagaggaatctcacttctgcttccaacccaaatcatccaccagaggtcctgactctagatcctacgttacacatgaagccaaagcagcagatttcagggattcaacctcacggccttccgaatgcccttgatgacagaatatccttttccccggactctgttctagagcctagtatgtctagtccctctgacatagactcattttcacaagcaagtaatgtcacttctcagttacctggatttccaaaatatccctcacacacaaaagcttctccggtggactcttggaaaaatcagacattccaaaacgaaagtaggaccagttccacgtttccgtcagtatataccattactagtaatgatatctcggtcaacactgtagatgaagaaaacactgtcatggttgcttcggcctcagtcagtcagtcccagcttccaggtacagccaacagtgtcccagaatgcatttcattgacttccttggaagatcctgtgatattgtctaagattaggcagaatctgaaggaaaagcatgctcgacacatagcagatcttcgagcttattatgaatcagaaataaatagtttgaaacagaagctggaggcaaaagaaatctctggagttgaagattggaagataaccaatcaaattcttgtagacagatgtggccaattagatagtgctttgcatgaagctactagtcgcgtgagaacacttgaaaataagaataacttactggaaattgaagtgaatgatttgagagaacgcttcagtgcagccagcagtgcttccaaaattttgcaggaacgaattgaagaaatgagaacaagcagtaaagaaaaagacaataccatcattcgactaaaatctagactgcaagatttagaagaagcatttgagaatgcttacaaactctcagatgataaagaagctcaactaaaacaagagaacaaaatgtttcaagatcttttaggagagtatgagtcccttggaaaagaacacaggagagtaaaggatgcattaaatacaactgagaacaaattgcttgatgcatatactcagatttctgatttgaaaagaatgatttcaaaacttgaagctcaggtcaagcaagtagaacatgaaaatatgttaagccttcgtcataattctagaattcacgtgagaccctcgcgtgccaacacactagcaacttcagacgtcagcaggcggaaatggctgattccaggtgcagagtattccatctttactggccagcctctggacacccaggacagtaacgtggataaccagctggaggaaacctgtagcctagggcaccgttcacctctggaaaaggattcttcacctggaagttcatcaacaagcttgttgataaaaaagcaaagagagacttcagacacgccgatcatgagagctttaaaagaacttgatgagggaaaaatatttaaaaattgggggacacagacagagaaagaggacacctcaaatataaatcctcggcaaactgaaacttcagttaatgcaagtcgttctccagaaaagtgtgcccaacagagacaaaagagacttaattcggcctcacagagatcatcatctttaccaccttcaaatcgtaaatcaagtactccaacaaaaagagagattatgctaacaccagtgactgtggcttatagtccaaagcgatcccctaaagaaaacttgtccccaggatttagtcatctgcttagcaaaaatgagagcagtccaattcgatttgatatacttttggatgatttagatactgttcctgtgtctacattacaacgtaccaatccaagaaagcaactccagtttcttcctctagatgactcggaagaaaaaacttattctgagaaagccaccgataaccatgttaatcatagctcttgccctgaaccggtgccaaatggagtgaagaaagtatctgtgagaacagcctgggagaagaataaatcagttagctacgaacagtgtaagccggtttcagtcactccacaggggaatgattttgaatatacagcaaaaattcggaccctagctgaaacagaacgattttttgatgaacttacaaaagaaaaggaccagattgaggcagcactaagcaggatgccttctcctggaggacgaatcactttacagacaagattaaatcagacccctcagatatgtgaggaatcaagccataaatgtgcatttgctggacattatgtaccatgtcatctctatgactacagatttcaaggataa

SEQ ID NO: 333349 - DNA, 3087 bp, Artificial Sequence
  derived and/or modified sequence
atgggcttcttcagcctgagcagcgagcggaacgagagcgtgatccactatccagagtccacagagcccgaaattcaacaggaaatgagcacttcgcagcctgattgcaatgtcgattcttgctccgtgtcctctggttacgggactttttgcatctccgagctaaacctctataaatctaaggatccaaaagagttcatggagcacatcgacgtcccaaaagggcagtatgtcgccccagctgtacccgcagaaagcctagtggatggagtgaagaatgagaatttctacatccagacccccgaagagtgtcatgtttctctcaaggaggacgtgagcatttctcccggcgaatttgagcataactttttaggagaaaataaagttagtgaagtgtattccggcaaaacaaactcaaatgccattacaagttgggcccagaaacttaaacagaaccagcccaagcgggcacatgttgaagacggaggctctcgctccaaacagggcaacgagcagtccaagaaaacaccaattgagaagagtgatttcgccgccgccacacatccaagggctttctacctaagtaagcctgatgaaactcctaatgcatggatgtctgacagtgggaccgggttgacatattggaagctggaagaaaaggacatgcatcactcactgcctgagactctggaaaaaacctttatcagtttaagttccacagacgtgtccccaaatcagagcaatacgagcaacgagatgaagctgccaagcctgaaagatatttactataagaagcaaagggaaaataagcagctgcctgagcgcaacctcacctcagcctctaatccaaatcatcctcctgaggtgctcaccctggacccaaccctacacatgaagcctaagcagcaaatatcaggaatccagccccacgggctgccaaatgcacttgatgatcgcatcagtttttcccccgattctgtgttggaacccagcatgtccagcccatcagacatcgactccttcagccaggcttccaatgtgacctcacagttgcccggttttcctaaatatccgtcacacaccaaagctagtccagttgattcgtggaagaatcagacttttcagaatgagagtcggacaagtagcacattcccaagcgtttacacgattacgtctaacgatatcagcgtaaatactgtcgacgaggagaatacagtcatggtcgcctctgcctctgtgtcacagagtcagctccctgggacagccaattctgttcccgaatgcattagcctgacatcgttagaagatcccgtgatcctttctaaaataagacagaacctgaaagaaaaacatgcaaggcacatcgctgatctgcgggcctattatgaaagcgaaattaattctttgaaacagaagctggaggccaaagaaatcagcggcgtagaagattggaagattactaaccagatccttgtggatcgatgcggacaactcgatagcgctcttcatgaggcgacttccagagtgagaacactggagaataagaataacttgctggaaatcgaagtaaacgacctgcgcgagaggttctccgcagcctcctccgcatccaagattctgcaggagcgtatagaggaaatgagaaccagttccaaggaaaaagacaacactattatacgccttaagagtcgtctgcaggaccttgaggaggcttttgagaatgcctacaagctgtctgacgacaaagaagcccagctgaaacaggagaacaaaatgtttcaagatttgcttggagagtatgagtcactcggcaaggagcaccgaagggtgaaagatgccctcaacaccacagagaataaattgcttgacgcatatacccagattagcgacctgaaacggatgatatccaaattagaggcccaagttaagcaggttgagcacgagaatatgctgtctctgcggcataattcccgcattcatgttcgccccagtagggcgaacacactggccacgtccgatgtctctcgtcgaaaatggcttattccaggtgccgagtactcaattttcaccggtcaaccacttgatacacaggactctaatgtggacaaccaactggaagagacatgcagcttgggccataggtctcctctggaaaaggactcctcccctgggtcatccagcacaagtctgctgattaagaaacagcgggagaccagtgacactcccattatgagagctctcaaggagctggatgaggggaagattttcaagaattggggcacccaaactgaaaaggaggacacctctaacatcaatccgcggcagacagagacatccgtgaatgcctctcgtagccccgagaagtgtgcacagcagcgccagaagcgattaaactcggccagccaaagatcgtcgtcgttgcctccatccaacagaaagagcagtacgcctaccaaacgcgaaatcatgttaactccagttaccgtggcttactccccaaagcggagccccaaagaaaatctgagtcccgggttttcccacctcttatctaaaaacgaaagtagtcccattagattcgatatcctgttagacgatctcgacaccgtgccagtgtccactctgcagcggacaaacccgaggaaacagttgcagtttcttccactagatgattctgaggagaaaacctactcagaaaaggctacagataaccacgtgaatcatagttcatgtcctgaaccggttcctaacggagttaaaaaggtttctgtgaggacagcctgggagaaaaataaatcggtaagctatgaacaatgcaaacctgtttctgtcactccccagggaaatgatttcgagtatacagccaagatccggaccctggccgagaccgaacgcttctttgatgaactgaccaaggaaaaagatcaaatagaggccgccttatccagaatgccctcacccggcggccgcatcacgctccaaactaggctgaatcaaaccccgcagatctgcgaggagtccagtcataagtgtgcgttcgcgggacattatgtgccatgccatctgtacgattatcgcttccaaggctag

SEQ ID NO: 333350 - DNA, 3087 bp, Artificial Sequence
  derived and/or modified sequence
atgggcttcttttcactttcgtcagagcgaaacgaatccgtaatccactacccggagtcgacagaaccggaaattcaacaagagatgtcgacatcccaaccagattgcaacgttgattcctgttctgtttcctctggctatgggaccttctgcattagtgaactgaatctgtacaagagcaaggatcctaaagagtttatggagcacatcgatgtccctaagggccagtacgtggctcccgcagttccagccgaatccctggtggacggcgtcaagaatgaaaacttttacatccagacgcctgaggagtgtcatgtgtcgttgaaggaagacgtgtcgatatctcctggtgaatttgaacacaatttcctgggcgagaataaagtgtccgaagtctactctggaaagaccaattccaatgccatcaccagttgggcgcaaaagctgaagcagaatcagcctaaaagggcccatgttgaagacggcggaagtaggtctaaacaaggtaatgaacagagtaaaaagactcctattgagaagagcgatttcgctgccgcaacacatccaagagccttttacctatccaagccagatgaaacaccgaatgcctggatgagcgatagcggaaccggtctgacatactggaaactggaggagaaggacatgcaccactcattgcccgaaacactggaaaagacttttatttcattgtcttcaaccgacgtgtctccaaatcaatctaatacttcaaatgagatgaagctgcccagtttaaaagatatttactataagaaacaacgggagaataaacagcttccagagcggaacctaacctcggcgagcaatcctaaccatcccccagaagtgcttacactggaccctacattgcatatgaaaccaaaacagcagatcagtggcattcagccacatggcttgccaaatgcccttgatgaccgcatctcgttttcccctgactccgtgttggagccttcgatgagctccccttcagacattgatagctttagccaggctagtaatgtgacttcccaactccctgggttcccgaagtatccctctcatacaaaagcatcacccgtggatagctggaagaatcagacgtttcagaacgagtcaaggacatcttcgacctttccttctgtttacacaataaccagtaacgacatctcagtaaatacagtggacgaggagaacacagtgatggtggccagtgcgtcagtatcccaatctcagcttccagggaccgccaatagcgttcctgagtgtataagtttaacatccttggaggacccagtgatactgagcaaaatcagacaaaacttaaaggaaaagcatgccagacacattgccgaccttcgggcatactatgagtcggaaatcaattcgcttaagcagaagctggaggccaaagagatttccggggtggaggattggaagattactaaccagattttggtcgatcggtgcgggcagcttgatagtgctctgcatgaggcaactagtcgggtgaggactctggagaataaaaacaatctgctggaaattgaagttaatgacctcagggagagatttagcgcagcgtccagcgccagtaagattctgcaggaacgcatcgaagagatgagaacgtcgtcaaaggagaaagacaatacgatcattcggctgaagagtcggctccaggacttggaggaagcctttgaaaatgcatataagcttagcgacgacaaagaggcgcaactcaaacaggagaataagatgttccaggatttgctgggggaatatgagtccctaggcaaggaacaccggagagtgaaggatgccctgaacactaccgaaaataagctgctcgacgcatacacacagatctctgatcttaaacggatgatttctaaacttgaggcacaagtgaagcaggtcgaacatgagaatatgctttcactgcgtcataattcccggattcacgtgcgcccttcaagggccaacacgctcgctaccagtgatgtttcccgcaggaagtggctgatccctggcgcagagtactcgatatttacggggcaacctctggatacccaagatagcaacgtggataatcaattagaagagacgtgtagcctcggacaccgatccccactggagaaggatagctcacctgggtcctcttccacctccctgctgatcaagaagcagagagagactagcgacacccccataatgagggccctgaaggaactggatgaggggaagatcttcaagaactggggtactcagaccgagaaggaagacacaagtaacattaacccgaggcagaccgagacttccgttaatgcctcacggtccccagagaaatgcgcccagcagcgacaaaagcgcctgaactcagcctcccagcggagttcttcccttccgcctagcaaccggaaatcatccaccccaaccaaacgcgaaataatgctgactcccgttaccgtggcgtattctccgaagcggagccctaaggaaaatctctctcccggtttttcccacctgctgagtaagaacgagtcttcccctattagattcgatatactcctcgacgaccttgataccgtgcccgtatcaactctccagcgtaccaacccaaggaagcaactgcaatttttgccactagacgactcagaggagaagacctatagcgagaaggctactgacaatcacgtgaatcactcttcctgcccggagcccgttcctaacggagtcaagaaggtgtcagtcaggacagcatgggagaaaaacaaaagcgttagttacgaacagtgtaaacccgtgagtgtcaccccccaaggaaatgacttcgaatatacagctaaaattcggactctggctgagaccgagagatttttcgatgagcttaccaaagagaaggatcagatcgaagccgcactcagccgtatgccctctcctgggggtcgaatcacccttcagacccggctcaatcagacaccccaaatatgtgaggaatcctcacacaagtgtgcttttgcgggtcattacgtgccttgccatttgtacgattacaggttccaaggctag

SEQ ID NO: 333351 - DNA, 3087 bp, Artificial Sequence
  derived and/or modified sequence
atgggcttcttcagcctgagcagcgagagaaacgagagcgtgatccactaccccgagagcaccgagcccgagatccagcaggagatgagcaccagccagcccgactgcaacgtggacagctgcagcgtgagcagcggctacggcaccttctgcatcagcgagctgaacctgtacaagagcaaggaccccaaggagttcatggagcacatcgacgtgcccaagggccagtacgtggcccccgccgtgcccgccgagagcctggtggacggcgtgaagaacgagaacttctacatccagacccccgaggagtgccacgtgagcctgaaggaggacgtgagcatcagccccggcgagttcgagcacaacttcctgggcgagaacaaggtgagcgaggtgtacagcggcaagaccaacagcaacgccatcaccagctgggcccagaagctgaagcagaaccagcccaagagagcccacgtggaggacggcggcagcagaagcaagcagggcaacgagcagagcaagaagacccccatcgagaagagcgacttcgccgccgccacccaccccagagccttctacctgagcaagcccgacgagacccccaacgcctggatgagcgacagcggcaccggcctgacctactggaagctggaggagaaggacatgcaccacagcctgcccgagaccctggagaagaccttcatcagcctgagcagcaccgacgtgagccccaaccagagcaacaccagcaacgagatgaagctgcccagcctgaaggacatctactacaagaagcagagagagaacaagcagctgcccgagagaaacctgaccagcgccagcaaccccaaccacccccccgaggtgctgaccctggaccccaccctgcacatgaagcccaagcagcagatcagcggcatccagccccacggcctgcccaacgccctggacgacagaatcagcttcagccccgacagcgtgctggagcccagcatgagcagccccagcgacatcgacagcttcagccaggccagcaacgtgaccagccagctgcccggcttccccaagtaccccagccacaccaaggccagccccgtggacagctggaagaaccagaccttccagaacgagagcagaaccagcagcaccttccccagcgtgtacaccatcaccagcaacgacatcagcgtgaacaccgtggacgaggagaacaccgtgatggtggccagcgccagcgtgagccagagccagctgcccggcaccgccaacagcgtgcccgagtgcatcagcctgaccagcctggaggaccccgtgatcctgagcaagatcagacagaacctgaaggagaagcacgccagacacatcgccgacctgagagcctactacgagagcgagatcaacagcctgaagcagaagctggaggccaaggagatcagcggcgtggaggactggaagatcaccaaccagatcctggtggacagatgcggccagctggacagcgccctgcacgaggccaccagcagagtgagaaccctggagaacaagaacaacctgctggagatcgaggtgaacgacctgagagagagattcagcgccgccagcagcgccagcaagatcctgcaggagagaatcgaggagatgagaaccagcagcaaggagaaggacaacaccatcatcagactgaagagcagactgcaggacctggaggaggccttcgagaacgcctacaagctgagcgacgacaaggaggcccagctgaagcaggagaacaagatgttccaggacctgctgggcgagtacgagagcctgggcaaggagcacagaagagtgaaggacgccctgaacaccaccgagaacaagctgctggacgcctacacccagatcagcgacctgaagagaatgatcagcaagctggaggcccaggtgaagcaggtggagcacgagaacatgctgagcctgagacacaacagcagaatccacgtgagacccagcagagccaacaccctggccaccagcgacgtgagcagaagaaagtggctgatccccggcgccgagtacagcatcttcaccggccagcccctggacacccaggacagcaacgtggacaaccagctggaggagacctgcagcctgggccacagaagccccctggagaaggacagcagccccggcagcagcagcaccagcctgctgatcaagaagcagagagagaccagcgacacccccatcatgagagccctgaaggagctggacgagggcaagatcttcaagaactggggcacccagaccgagaaggaggacaccagcaacatcaaccccagacagaccgagaccagcgtgaacgccagcagaagccccgagaagtgcgcccagcagagacagaagagactgaacagcgccagccagagaagcagcagcctgccccccagcaacagaaagagcagcacccccaccaagagagagatcatgctgacccccgtgaccgtggcctacagccccaagagaagccccaaggagaacctgagccccggcttcagccacctgctgagcaagaacgagagcagccccatcagattcgacatcctgctggacgacctggacaccgtgcccgtgagcaccctgcagagaaccaaccccagaaagcagctgcagttcctgcccctggacgacagcgaggagaagacctacagcgagaaggccaccgacaaccacgtgaaccacagcagctgccccgagcccgtgcccaacggcgtgaagaaggtgagcgtgagaaccgcctgggagaagaacaagagcgtgagctacgagcagtgcaagcccgtgagcgtgaccccccagggcaacgacttcgagtacaccgccaagatcagaaccctggccgagaccgagagattcttcgacgagctgaccaaggagaaggaccagatcgaggccgccctgagcagaatgcccagccccggcggcagaatcaccctgcagaccagactgaaccagaccccccagatctgcgaggagagcagccacaagtgcgccttcgccggccactacgtgccctgccacctgtacgactacagattccagggctag

SEQ ID NO: 333352 - protein, 223 aa, Artificial Sequence
  derived and/or modified sequence
MVLRRMHRPRSCSYQLLLEHQRPSCIQGLRWTPLTNSEESLDFSESLEQASTERVLRAGRQLHRHLLATCPNLIRDRKYHLRLYRQCCSGRELVDGILALGLGVHSRSQVVGICQVLLDEGALCHVKHDWAFQDRDAQFYRFPGPEPEPVRTHEMEEELAEAVALLSQRGPDALLTVALRKPPGQRTDEELDLIFEELLHIKAVAHLSNSVKRELAAVLLFEP

SEQ ID NO: 333353 - DNA, 2646 bp, Artificial Sequence
  derived and/or modified sequence
atggtgctgagaagaatgcacagacccagaagctgcagctaccagctgctgctggagcaccagagacccagctgcatccagggcctgagatggacccccctgaccaacagcgaggagagcctggacttcagcgagagcctggagcaggccagcaccgagagagtgctgagagccggcagacagctgcacagacacctgctggccacctgccccaacctgatcagagacagaaagtaccacctgagactgtacagacagtgctgcagcggcagagagctggtggacggcatcctggccctgggcctgggcgtgcacagcagaagccaggtggtgggcatctgccaggtgctgctggacgagggcgccctgtgccacgtgaagcacgactgggccttccaggacagagacgcccagttctacagattccccggccccgagcccgagcccgtgagaacccacgagatggaggaggagctggccgaggccgtggccctgctgagccagagaggccccgacgccctgctgaccgtggccctgagaaagccccccggccagagaaccgacgaggagctggacctgatcttcgaggagctgctgcacatcaaggccgtggcccacctgagcaacagcgtgaagagagagctggccgccgtgctgctgttcgagccccacagcaaggccggcaccgtgctgttcagccagggcgacaagggcaccagctggtacatcatctggaagggcagcgtgaacgtggtgacccacggcaagggcctggtgaccaccctgcacgagggcgacgacttcggccagctggccctggtgaacgacgcccccagagccgccaccatcatcctgagagaggacaactgccacttcctgagagtggacaagcaggacttcaacagaatcatcaaggacgtggaggccaagaccatgagactggaggagcacggcaaggtggtgctggtgctggagagagccagccagggcgccggccccagcagaccccccacccccggcagaaacagatacaccgtgatgagcggcacccccgagaagatcctggagctgctgctggaggccatgggccccgacagcagcgcccacgaccccaccgagaccttcctgagcgacttcctgctgacccacagagtgttcatgcccagcgcccagctgtgcgccgccctgctgcaccacttccacgtggagcccgccggcggcagcgagcaggagagaagcacctacgtgtgcaacaagagacagcagatcctgagactggtgagccagtgggtggccctgtacggcagcatgctgcacaccgaccccgtggccaccagcttcctgcagaagctgagcgacctggtgggcagagacaccagactgagcaacctgctgagagagcagtggcccgagagaagaagatgccacagactggagaacggctgcggcaacgccagcccccagatgaaggccagaaacctgcccgtgtggctgcccaaccaggacgagcccctgcccggcagcagctgcgccatccaggtgggcgacaaggtgccctacgacatctgcagacccgaccacagcgtgctgaccctgcagctgcccgtgaccgccagcgtgagagaggtgatggccgccctggcccaggaggacggctggaccaagggccaggtgctggtgaaggtgaacagcgccggcgacgccatcggcctgcagcccgacgccagaggcgtggccaccagcctgggcctgaacgagagactgttcgtggtgaacccccaggaggtgcacgagctgatcccccaccccgaccagctgggccccaccgtgggcagcgccgagggcctggacctggtgagcgccaaggacctggccggccagctgaccgaccacgactggagcctgttcaacagcatccaccaggtggagctgatccactacgtgctgggcccccagcacctgagagacgtgaccaccgccaacctggagagattcatgagaagattcaacgagctgcagtactgggtggccaccgagctgtgcctgtgccccgtgcccggccccagagcccagctgctgagaaagttcatcaagctggccgcccacctgaaggagcagaagaacctgaacagcttcttcgccgtgatgttcggcctgagcaacagcgccatcagcagactggcccacacctgggagagactgccccacaaggtgagaaagctgtacagcgccctggagagactgctggaccccagctggaaccacagagtgtacagactggccctggccaagctgagcccccccgtgatccccttcatgcccctgctgctgaaggacatgaccttcatccacgagggcaaccacaccctggtggagaacctgatcaacttcgagaagatgagaatgatggccagagccgccagaatgctgcaccactgcagaagccacaaccccgtgcccctgagccccctgagaagcagagtgagccacctgcacgaggacagccaggtggccagaatcagcacctgcagcgagcagagcctgagcaccagaagccccgccagcacctgggcctacgtgcagcagctgaaggtgatcgacaaccagagagagctgagcagactgagcagagagctggagccctag

SEQ ID NO: 333354 - DNA, 2646 bp, Artificial Sequence
  derived and/or modified sequence
atggtactcaggaggatgcaccgccctcggtcctgctcatatcagctcctgcttgagcaccaacggccgtcatgcatacagggcttgagatggacccctctcactaacagtgaggagtcattagacttctcagagagcctggagcaagcatccaccgagagggttctgagggccggccggcaactacacaggcaccttctggccacctgccctaacctgattagggatagaaagtaccacctcaggctatataggcagtgctgtagtgggcgggaactggtagatggaattctggcactcggtcttggcgtgcattcacgcagtcaagtggtcggaatctgccaggtgttgttggacgaaggggctctgtgccatgtgaaacatgattgggccttccaggaccgagatgcccaattctatcgattccccggacctgagcccgagcccgtgcgcactcatgagatggaggaggagctggctgaagccgtcgccctcctctctcagcggggaccggatgccctcctcaccgttgccctacgtaaacctccaggccagagaaccgatgaggagttggacctgatattcgaagaactcctgcatattaaggcagtggcgcatctctcaaactcagttaagagggagcttgccgctgtcttactttttgagccgcactccaaagctggcacggtactatttagtcagggtgacaaaggaacaagttggtatatcatatggaagggatccgtcaatgtggtgactcacgggaaaggcctggtcacaaccctgcatgaaggggacgacttcggccagctggcactggtaaatgacgctccccgcgctgccactataatcctcagagaggataattgtcactttctgcgcgtcgacaagcaagattttaaccgtattattaaggacgttgaggccaagaccatgaggttagaggaacatggaaaggtggtgctggttcttgagcgggcttctcagggcgccggaccatctcgaccccccaccccaggacggaatcgctacactgtcatgtccggtaccccggaaaagatcctcgaactgcttctggaagcaatgggcccagactcaagcgctcatgatccgaccgaaacatttctgagcgactttctgctgacacatcgcgtgtttatgccaagtgcccaattgtgtgcggctctgctccatcactttcatgtggagcctgccggcgggtcagaacaagagcgatcgacatacgtttgtaacaagagacagcagatcctgcgtctcgtgtcacagtgggttgccctgtatggaagtatgctgcacacggatcccgtggctacgtccttcctgcagaagttgtcggatcttgtgggccgcgacactcgtctgtcaaacctgctgagagaacagtggcccgagcggagacggtgtcatcggcttgagaatggctgcggtaatgcgtcccctcagatgaaggcccgtaatctgcctgtctggctgccgaatcaggacgaaccactcccaggctcatcatgcgccatccaagtgggtgacaaggtcccttacgacatctgtcgtccggatcactccgtccttaccctccagctcccagtgaccgccagcgtgcgggaggtaatggctgcactcgcacaggaggatggctggaccaaggggcaggtcttggttaaagtgaattctgcaggcgatgctataggtcttcaacccgatgcgcgcggagtggctacttctctcggactgaacgaaagacttttcgtggttaacccgcaggaggtccacgagctcatcccccaccccgaccagctgggtcccaccgtcggaagtgccgaaggacttgacctggtgtctgcgaaggacctggcgggccagctgactgaccacgattggtcgttatttaacagtatacatcaagttgagctgatccactatgttctgggtccacagcatttgcgggatgtcactacagccaatctagaacggttcatgcgacgctttaatgagctccagtactgggtcgccacggaactctgcctctgccccgtcccgggtccccgggctcaactgttgcggaagttcatcaagctggccgcgcatctgaaggagcagaagaacctgaactcgttttttgccgtcatgttcggcctgtcgaattcagctatcagtaggctggcccatacctgggagaggctccctcacaaagtgagaaagctctactcggctttagagcggttgctggacccttcttggaatcacagagtctatcgtttggctctggctaaactgagtccccctgtcattcctttcatgcccctcctcctgaaagatatgacttttatccacgagggcaatcataccctggtggaaaatctgataaactttgagaaaatgcgaatgatggctagagcggctaggatgctgcatcactgccggagccacaaccctgttccactaagcccccttcgcagcagagtctcccatcttcatgaagactctcaggttgcgcgaatatcaacctgtagcgagcagtctctgtccactagaagccccgcgtctacttgggcgtacgtccaacagcttaaggtcatagataatcaacgcgaactgtcccggctgtctcgagagctcgagccctag

SEQ ID NO: 333355 - DNA, 2646 bp, Artificial Sequence
  derived and/or modified sequence
atggtacttaggcgcatgcaccgaccaagaagttgcagctatcaactattattagagcaccagcgcccttcgtgtatccagggtctgcgatggacaccgctcacgaattccgaggaaagcctggacttttcagagagcctggaacaggcttctacagagcgagtattgagagctggaagacagctgcaccggcatctgctcgcaacctgcccaaatctcataagagaccgaaagtaccatctccgcctgtacagacagtgctgttccggtcgggagctagtggatgggatcctggcattgggtctcggcgtgcacagcagatcacaggttgttgggatctgccaggtgctgctggacgaaggggcactctgccatgtaaagcatgactgggcctttcaggaccgcgatgcacagttctatcggttcccgggccctgaacctgagcctgtgaggacgcatgagatggaggaagagttggctgaagccgttgcactactttcacagaggggtcctgacgctctgctgactgtcgccttgcgcaagccacctggccaaagaacagatgaagagctggatctcatattcgaggaactgttacacattaaagcggttgcacacctgagcaactcagtgaaacgggagttagccgcagtcttgctgttcgagccccactcgaaggcggggacggttctcttttcacagggcgacaaagggacttcctggtatattatatggaagggcagcgtgaatgttgtgactcatgggaaggggttagtgacaacattgcacgagggagacgattttggtcagttagcacttgtcaacgatgctcctcgggcagcaaccatcatccttcgtgaagacaattgccattttctccgggtggataaacaagattttaaccgcattatcaaggatgtcgaggccaaaaccatgcggctcgaggagcatggcaaggttgtgctcgttctcgagcgcgcctctcagggggccggtccttcgaggcctccaacacctgggaggaatcggtatacggtgatgtccggtaccccagaaaagatacttgagcttctgctggaggccatgggtccggattcttctgcccatgaccctacggaaacattcttatccgatttcttactgacccatcgcgtttttatgcctagtgcccagctgtgtgctgcactcttgcatcacttccacgtcgagccggcgggcggctccgaacaggagagatcaacatatgtttgcaataagcggcagcagatacttcggctggtctcgcagtgggtggctttatatggcagtatgcttcacactgacccagtcgcaacatcttttttgcagaaactgagcgatcttgtgggccgggacacacggctgtccaatctgctaagggaacagtggccagagaggcgacgctgccacaggttggagaatggttgcggaaacgcatcacctcagatgaaggcacggaacttacccgtctggttaccaaatcaagatgaaccattgccagggagcagttgcgctatccaggtgggagacaaggttccctatgatatttgcaggcccgaccactctgtcctcaccctgcaactgcccgtcacggcatcagtgcgggaagtcatggccgccctggcccaggaagatgggtggacaaaaggacaggttcttgtgaaggtgaattctgccggagatgctatcggcttacagccagatgctcgtggggtcgctacaagcctgggactgaatgaaagacttttcgtggtgaacccacaagaggtacacgagctcattccgcacccagaccagctaggccccactgtgggctcagctgaagggttggatctggttagcgctaaggacctcgccgggcagctcacggaccatgattggtccctgtttaattccattcaccaggtggaactcatccattatgtgctcggtccccagcacctgcgggacgtgaccaccgctaacctggagcggttcatgcgaaggtttaacgaattgcagtattgggttgctacagaattatgcctgtgtcctgtccctgggcccagggctcaactgctgcgaaaattcatcaagctggcggcacaccttaaagagcagaagaacctgaacagcttcttcgcggtcatgtttggattatcgaattcagcaatttccagactggcccatacgtgggaacgacttccacataaagtcagaaaactctactcagcactcgagcggctcctggatcccagctggaatcaccgggtgtacagactggcactggccaagctgagtccgcccgtgataccattcatgcccttgttactgaaagacatgactttcatacatgagggtaaccacactctggtcgaaaacctcataaatttcgaaaagatgcgaatgatggccagggcagcaaggatgctgcaccattgtagaagccacaaccctgtgcccctcagcccactgcgctcaagggtaagtcacctgcacgaagacagccaggtcgccaggatttctacatgctcagaacaatctttgagtacaaggtccccagccagcacttgggcctacgtccaacagctcaaagtcattgacaaccagagagagctttctagactttcgagggaactggagccttag

SEQ ID NO: 333356 - DNA, 2646 bp, Artificial Sequence
  derived and/or modified sequence
atggtactgagacgcatgcaccggccaaggtcctgcagttaccaactgctgctggagcaccagagaccaagttgcattcagggactaagatggacacctctaacaaatagcgaagaatccttggatttttccgaaagtctggaacaagccagcacggagcgagttctcagggctgggcggcagctgcacagacacttactggctacgtgccccaacttgatccgagaccgcaagtatcacctcagattgtacaggcaatgctgcagcgggcgcgaactggtggacggaatcctcgcactcggactaggtgtccattcacgctctcaagtcgtcggaatttgccaagttttgctggacgaaggcgcattatgtcatgtcaaacatgattgggcttttcaagacagggacgcccagttctaccgcttcccgggacctgagccagaacctgtgagaacccatgaaatggaagaagagctagctgaggcagtcgccctgctgtcccagcgcggaccagatgcccttcttacggttgctctgcgcaaaccacctggtcaaaggaccgatgaggaattggatctgatcttcgaagaactgctgcacattaaagcagtggcacatctgagcaattccgtgaaaagagaactggcggctgtgctcctctttgagccccattccaaggcgggcactgttcttttcagccagggagataaaggcacgtcatggtatatcatatggaaaggtagcgtgaatgtggtgactcacggcaaggggctcgtgactactctccacgaaggcgatgattttgggcaattggctctggtgaacgatgcacctcgcgcagccaccataatcctccgtgaggataattgtcacttcttgagggtggataaacaggattttaacagaataatcaaagatgtggaggccaaaacaatgagactagaggagcacggcaaggttgtactcgtgctggaaagggccagtcagggcgcaggaccgagcagacctccaaccccagggcgtaaccgctatactgtgatgagcggaactcctgagaagatactcgaattactgctcgaggctatgggtcccgattcttccgctcatgaccctacggaaactttcctctctgattttctgctcacacatagagtctttatgccaagtgcccagctgtgtgccgccctcctgcaccatttccatgtagaaccagctggcggatctgaacaagagcgaagtacgtacgtatgtaacaagcggcaacaaatcctccggcttgtttctcagtgggtggccctttacgggtctatgttacacaccgaccccgtcgctacctcattcctgcagaagctttcagaccttgtaggccgggatacaagattgagtaacctgctccgcgaacagtggcctgaaaggaggagatgccaccgactcgaaaatggttgtggcaacgcttctcctcagatgaaagctcgcaatttgcccgtgtggctgccgaaccaggatgagcccctaccaggtagttcctgcgccattcaggttggcgacaaggtgccttatgacatttgtaggccagatcacagcgtgctgacactgcagttacccgtgaccgctagtgtgcgggaggttatggccgctctggcccaggaggatggctggacaaaaggtcaggttttggtcaaagtcaactccgctggcgatgcgatcgggctgcaaccagatgcccggggagtggccacgtcccttggtttgaatgagcggttgtttgtagtgaatccccaagaggtgcatgagctgattcctcatcccgaccagctggggccaacagttgggtcagcagaagggttagaccttgtctctgctaaggatctggccgggcaattgacggaccacgactggtccctctttaacagcattcatcaggttgaactgatccattatgtgctaggcccccaacatttaagggatgttacaacagccaatctggagcggttcatgagaaggttcaacgagctgcaatattgggtagcgactgaactctgcttgtgcccagtgcccggacccagggcacagttgcttaggaaatttataaaacttgcagctcacctgaaagaacagaagaacctcaactcattcttcgccgttatgtttggcctctccaactctgccatttctaggttggcccacacctgggaacggttgcctcacaaagtcaggaaattatattccgctctcgagcgcctccttgacccatcctggaatcaccgcgtgtatagactggctctggccaaattgagccctccagtcataccatttatgcccctactgctcaaagatatgactttcattcacgagggcaaccacactctcgtggaaaatctcatcaatttcgagaaaatgcgcatgatggccagagccgcccgcatgctgcaccattgtcgctcccacaatcctgttcctcttagtcccctcaggagtcgggtcagtcaccttcacgaggactctcaggtagcccgcatcagcacttgctccgaacaatccttaagtacacgctcccctgcatctacctgggcttatgtgcagcagttgaaagtgattgataaccagagagagctctcacgcctgagcagagagttggagccctag

SEQ ID NO: 333357 - DNA, 2646 bp, Artificial Sequence
  derived and/or modified sequence
atggtgctgcgccgcatgcatcgacccaggtcttgcagctaccagctgctgcttgagcaccagcgcccgagctgtatccagggactgaggtggactcctctcacaaacagcgaggaatctctcgacttcagtgagagtctggagcaggctagcacagagcgggtgctgcgcgcgggccgtcagctgcatcgtcatctccttgcgacatgccctaatttgattcgcgaccgtaaataccaccttcggctctaccgacagtgttgcagtggacgcgagcttgtggacggaatcttggctctagggctcggagtgcattcaaggtctcaggtcgtcggtatctgtcaggtactactggatgagggggccctgtgtcatgtcaaacacgattgggctttccaggatcgggatgcacagttctataggttccccggacctgaaccggaaccagtgaggacccatgaaatggaagaggaactcgctgaggccgttgcgctcctatctcagcgtgggcctgatgccctcctcacagtggccttgcggaaaccccctgggcagcgcaccgacgaggagctcgatctgatctttgaggagttactgcacatcaaggcagtagcacacctgagtaactccgtgaagagggaactggctgcggtattgctctttgagccacattctaaggcaggcacagtgctgttttcacagggagacaagggaacctcatggtacatcatctggaagggaagcgttaacgtggtcacccacggaaaggggctggtaacaaccctccacgagggggatgacttcggccagctcgcactggtgaacgacgctccacgggctgctacaattatcctcagggaggacaactgccacttccttagagtagacaaacaggactttaaccggattatcaaggacgtggaggctaaaaccatgcggctcgaggaacatggtaaagtggtcctggttctcgagcgcgcctcccagggtgctgggccctctaggccccctacaccagggagaaaccgttatacagttatgtcgggaactcccgaaaaaatcctggagctgcttcttgaggcaatgggccctgactcttccgcacatgatccgacagaaaccttcttgagcgatttcctgctgactcaccgggtgttcatgccttctgcccagctttgcgcagcattgctgcatcacttccacgttgaacccgcaggggggtcagaacaggaacggagcacatatgtttgcaacaaaaggcagcaaatcctgaggttggtttctcaatgggttgccctatacgggagcatgctgcacacagatcctgttgctaccagttttctgcagaagttgtcagatttggtggggagagacacccggcttagcaacctcctgcgagagcaatggccagaacgtagacggtgtcaccgccttgagaatggatgcggcaacgcctccccccagatgaaggccaggaacctccccgtatggctgcctaaccaggacgagcctcttccaggttccagctgtgcaatccaggtgggcgacaaagtgccttatgatatctgtcgcccagatcattccgtgcttacactccagctccccgtgacagcgagtgtgagggaggtcatggctgccctggcgcaggaggatggctggacaaaagggcaggttcttgttaaggtcaatagtgccggtgatgctatcggcctgcagcctgatgcgagaggcgtggctaccagcctgggcctaaatgaaagacttttcgtcgtcaatcctcaggaagtacacgagctgattcctcatccagaccaactgggacccactgtgggcagcgcagaaggtctggatttggttagcgcaaaggatctggccggccagctcacagatcacgattggtctcttttcaattctattcaccaggtagagctcatccactatgtgcttggaccccagcaccttcgcgatgtcactaccgctaatcttgagaggtttatgagaaggttcaatgaacttcagtactgggtggccacagagttatgcctctgtccagttcctggcccacgggcgcagctgctacgcaagttcatcaaactggctgcacatctcaaagagcaaaaaaacctgaactcatttttcgccgttatgtttggcctttctaattctgcaatcagtcgattagcacatacatgggagagacttccccacaaagttcgaaagctgtattctgcgttagaaagactcttagacccatcatggaaccatcgcgtgtaccgcttagccctggcaaaactgagccctccagtgatcccctttatgcccttgttgctcaaagacatgactttcatccacgaggggaatcacacattagtggaaaatctgatcaattttgagaagatgcggatgatggcacgagcagctcgcatgctgcaccattgtagaagccacaacccggtacccctttctccacttcgttccagagtgtctcacctccacgaagatagtcaagtggccaggatcagtacatgttcagaacagagcctaagtacccggtccccagcaagcacctgggcgtacgttcaacagctcaaagtcatcgataatcaaagagaactgtctagactgagccgggagctcgagccttag

SEQ ID NO: 333358 - DNA, 2646 bp, Artificial Sequence
  derived and/or modified sequence
atggtgctgcggaggatgcaccggcccaggagctgcagctaccagctgctgctggagcaccagaggcccagctgcatccagggcctgcgctggacccccctgaccaacagcgaggagagcctggacttcagcgagagcctggagcaggccagcacagagcgggtgctgcgggccggccggcagctgcaccgccacctgctggccacctgccccaacctgatccgggacaggaagtaccacctgcggctgtaccggcagtgctgcagcggccgggagctggtggatggcatcctggccctgggcctgggcgtgcacagccgcagccaggtggtgggcatctgccaggtgctgctggatgaaggagccctgtgccacgtgaagcatgactgggccttccaggacagagatgcccagttctaccgcttccctggccctgagcctgagcctgtgaggacccatgagatggaggaggagctggccgaggccgtggccctgctgagccagaggggcccagatgccctgctgactgtggccctgaggaagcccccaggccagaggacagatgaggagctggacctgatctttgaggagctgctgcacatcaaggctgtggcccacctgagcaacagcgtgaagcgggagctggccgctgtgctgctgtttgagccccacagcaaggccggcaccgtgctcttcagccagggcgacaagggcacctcctggtacatcatctggaagggctctgtgaatgtggtgacccacggcaagggcctggtgaccaccctgcatgaaggagatgactttggccagctggccctggtgaatgatgccccccgggccgccaccatcatcctgcgggaggacaactgccacttcctgcgggtggacaagcaggacttcaaccgcatcatcaaggatgtggaggccaagaccatgaggctggaggagcacggcaaggtggtgctggtgctggagcgggccagccagggcgccggccccagccggccccccaccccaggaagaaaccgctacacagtgatgagcggcaccccagagaagatcctggagctgctgctggaggccatgggccctgacagcagcgcccatgaccccacagagaccttcctgagtgacttcctgctgacccacagggtcttcatgcccagcgcccagctgtgtgccgccctgctgcaccacttccacgtggagcctgctgggggcagcgagcaggagaggagcacctacgtgtgcaacaagaggcagcagatcctgcggctggtgtcccagtgggtggccctgtatggctccatgctgcacacagatcctgtggccaccagcttcctgcagaagctgagtgacctggtgggccgggacacccggctgagcaacctgctgcgggagcagtggccagagcggcggcgctgccaccggctggagaatggctgtggaaatgccagcccccagatgaaggccaggaacctgcctgtgtggctgcccaaccaggatgagcccctgcccggcagcagctgtgccatccaggtgggggacaaggtgccctatgacatctgcaggccagaccacagcgtgctgaccctgcagctgcctgtgacagcctctgtgcgggaggtgatggccgccctggcccaggaggatggctggaccaagggccaggtgctggtgaaggtgaacagcgctggagatgccatcggcctgcagccagatgcccggggcgtggccaccagcctgggcctgaatgaaaggctgtttgtggtgaacccccaggaggtgcatgagctgatcccccacccagaccagctgggccccaccgtgggcagcgctgagggcctggacctggtgtctgccaaggacctggccggccagctgacagaccatgactggagcctcttcaacagcatccaccaggtggagctgatccactacgtgctgggcccccagcacctgagagatgtgaccacagccaacctggagcgcttcatgaggcgcttcaatgagctgcagtactgggtggccacagagctgtgcctgtgccctgtgcccggcccccgggcccagctgctgaggaagttcatcaagctggccgcccacctgaaggagcagaagaacctgaacagcttctttgctgtgatgtttggcctgagcaacagcgccatcagccggctggcccacacctgggagcggctgccccacaaggtgaggaagctgtacagcgccctggagcggctgctggaccccagctggaaccaccgggtgtaccgcctggccctggccaagctgagcccccctgtgatccccttcatgcccctgctgctgaaggacatgaccttcatccacgagggcaaccacaccctggtggagaacctgatcaactttgagaagatgaggatgatggcccgggccgccaggatgctgcaccactgccgcagccacaaccctgtgcccctgagccccctgcggagccgggtgagccacctgcacgaggacagccaggtggcccgcatcagcacctgcagcgagcagagcctgagcaccaggagccctgccagcacctgggcctacgtgcagcagctgaaggtgattgacaaccagcgggagctgagccggctgagccgggagctggagccctag

SEQ ID NO: 333359 - DNA, 2646 bp, Artificial Sequence
  derived and/or modified sequence
atggtgctgcggcggatgcaccggccccggagctgcagctaccagcttctcctagaacatcagagaccttcttgcattcagggacttcggtggacgccactcaccaattctgaggagagcctggatttcagcgagtccctggagcaggctagcacggagcgagtgctgcgtgccgggagacagctgcatagacacctgcttgctacctgccccaacctgatcagggatagaaaataccatctccgcctgtatagacagtgttgctctggcagagagcttgtagacggtatcctggcacttggcttgggcgtgcattcacgctcccaggtggtcggcatctgtcaagtccttcttgatgaaggagctctgtgccatgtgaagcatgattgggccttccaggatagagatgcccagttctatcgatttcccggccccgaacccgagcccgtgcggacacacgagatggaagaggagcttgccgaagccgtagcactgctttcccagcggggtcccgatgcactgcttaccgtggctctgagaaaaccacccgggcagcggacagacgaagagttggaccttatcttcgaagaactactgcacatcaaagctgttgcccacctatcgaattccgtgaagcgcgaacttgcagccgtgctcctgtttgaacctcacagtaaagccgggaccgtgctgttttctcagggggataaagggacctcttggtacatcatttggaagggatccgtgaacgtcgttacccacgggaaaggcttagtcactacattgcacgagggggacgattttgggcaactggctttagtaaacgatgcccctcgcgccgccacaatcattctgcgtgaggacaactgtcatttccttcgggtcgacaagcaagattttaacaggattatcaaagacgtggaggccaagacaatgagactagaggagcatggtaaagtggtgctagtccttgagagagccagtcagggtgcgggtccatcaaggcctcccacacccgggcgcaatcgatacacagttatgagtggcactcctgagaagattttggagctcctcctggaagcgatgggaccagactcaagtgcacacgatccgaccgagaccttcttaagtgacttcctgcttactcatcgcgtgttcatgccttccgcccagctctgtgctgcactccttcatcatttccatgtcgaacctgcggggggatcggagcaggaacgatccacgtacgtgtgcaacaagcggcaacagatcctcaggctcgtaagccagtgggtcgctttgtacggtagcatgctccacaccgatccggtagccactagcttcctgcagaagttatccgaccttgtggggagggacacaagactttccaacttgcttcgggagcagtggcctgagaggcgaagatgccatcgccttgagaatggctgtgggaacgcgtcccctcaaatgaaagccagaaacctgcccgtgtggctgcctaatcaggatgaaccactgccgggtagctcctgtgccattcaggtcggagacaaagtgccctacgacatctgccggcctgatcatagtgtgctgacactccagttgcccgtaaccgcctcagtgcgcgaagtgatggctgcattagcccaggaagatggatggacaaaaggacaggtgctggttaaggtgaactccgctggagatgccattggattacagcccgatgcaagaggcgtggccacttctctggggctgaatgaaaggctatttgttgtgaaccctcaggaggtgcacgagctgatcccccacccggaccagcttggtccgactgtgggctcagccgaaggtctcgacttggttagcgctaaggatctcgccgggcaactgaccgaccacgattggtctctgttcaactcgattcatcaggtcgagctgatacactacgtgttggggcctcaacatttgcgggacgtgaccaccgcgaatctcgagaggtttatgagacgctttaacgagcttcaatactgggtcgcaaccgagctgtgtctgtgtcccgtacctgggccacgtgctcagttgctccgaaaattcattaaactggccgctcatctcaaggagcagaaaaacctgaactctttcttcgctgtgatgtttggattaagtaactccgcaataagtcgcctcgcacacacatgggagcgattgcctcacaaagtgcgtaagctttacagcgcccttgaaagactgttagacccctcctggaatcaccgagtctatagactcgccctcgcaaaattatcaccccctgtaattcccttcatgcctctcttgttgaaagacatgactttcatccatgaagggaatcacaccctcgtggaaaatttgataaatttcgaaaagatgagaatgatggctcgggccgctagaatgctccatcactgcagatcccacaatcccgtgccactctcccccctgaggagccgggtctcccacctgcacgaggacagccaagtcgcccgaataagcacctgttcagagcagagcctttctacccggtctccggcgagcacctgggcctacgtgcaacagttgaaggtgattgacaaccaacgggagctgagccggctttcaagagagcttgagccttag

SEQ ID NO: 333360 - DNA, 2646 bp, Artificial Sequence
  derived and/or modified sequence
atggtgctgcggcggatgcaccggccccggagctgcagctaccagctgctgctcgagcatcaaagaccttcgtgcatacagggactgcgatggacccctcttactaattcagaggaatctctggattttagtgaatccctcgaacaggccagcacagagcgtgttctccgggcgggccggcagctccaccgccaccttctcgccacgtgccctaacctcatccgcgacagaaaataccacctccgcctgtaccgacaatgttgctcgggacgcgagctagtagacgggatcctggctctgggcctgggtgtccattcccgatctcaggtcgtcggtatttgtcaggtgctgcttgacgagggggccttatgtcatgtgaagcacgactgggcctttcaggatcgtgacgcccagttttatagatttcccggtcccgaacccgagccagtgcgtacccacgagatggaagaagagcttgcggaagcagtggctctgctctctcagagaggaccggatgctcttcttaccgtggccctgaggaaacccccaggacaaaggacagacgaagaattggacctgattttcgaagaactgttgcatatcaaggcggttgctcatctctccaacagcgttaaaagagagctcgcggccgtgctcctgtttgaaccccattctaaagcgggcactgttctcttttcacagggggacaaggggacaagctggtatattatctggaagggctcagttaacgtagtcactcacggaaaggggttggtcaccacactgcatgagggggatgatttcggccagctcgcactggtgaacgatgctcctcgggctgctacaattattctgcgtgaggacaattgtcactttctgcgggtggataagcaggacttcaaccggatcataaaggatgtggaggccaaaactatgagactggaagagcacggtaaggtcgtgctcgttctcgaaagagcgtcccagggtgccggcccatcgcggcctcccacccctgggcggaatcggtacaccgtgatgtcaggcactccagaaaaaattctagagctgttgctggaagccatgggacctgactctagtgcgcacgatcctactgagacatttctgtcggattttcttctcactcatcgggtcttcatgccttcagcgcagctctgcgccgccctgctgcaccatttccatgtggaaccagcaggtggatcagaacaggaacggtcaacgtacgtctgcaacaagagacaacagattctgaggctcgtgagccagtgggttgccttatacggtagcatgctgcacacagatccagtcgcaacaagcttcctccagaagctgtccgacctggtcggaagagacaccaggctatctaacctgttacgtgaacagtggcccgaaagaagacggtgtcataggctagaaaacggatgtgggaacgcttccccccaaatgaaagcacgcaacctccctgtgtggctgcccaatcaagatgagccactgcccggatcttcttgcgcaattcaggtcggtgacaaagtaccttacgatatctgtaggccagatcattcagtcctgaccctgcagttgccggtgacagcaagtgttcgcgaggtgatggccgcactggctcaggaggacggatggactaaaggccaagtcttggttaaagtcaacagcgcaggggatgcgattgggttacaacccgacgcgcgaggcgttgccacctccctgggcctcaatgaaaggttgttcgtggtgaatccacaggaagtgcacgagctgattccccatccagaccaactggggcccacggtgggcagtgcagaaggactggatcttgtttcagcaaaagacctggccggacaactaaccgaccatgactggtctctctttaactccatccatcaagtcgagcttattcattatgttctcggtcctcagcatctgcgggacgtgacaaccgcgaacctggagcgctttatgcgccgattcaacgagttgcagtactgggtcgccaccgagctctgtctctgtcctgtgcctggccctagggcgcagctcctgaggaagttcattaaactcgccgcccacttgaaagagcagaaaaatctcaacagttttttcgcagtcatgtttggtctgtccaactccgcaatctcgaggctcgcgcatacttgggagagactgccccacaaagtcagaaaattgtactcggccttagagaggctcctagatccctcctggaaccaccgggtatatagactagcactggccaagctttcacctccagtgatccctttcatgccactgctgctcaaagatatgactttcatccacgaggggaaccatacactcgtcgagaatctaataaactttgaaaaaatgcggatgatggctcgggcggctagaatgctgcatcactgtagatctcataatcccgtacccctcagcccactgcgatccagggtgagtcatttgcatgaagattcccaggtggcacgcatttctacttgttccgagcaatctctcagcactagaagtcccgcttctacctgggcttacgtccagcagctcaaggtgatcgacaatcaacgagagttgtcaaggctttctcgcgaattagagccttag

SEQ ID NO: 333361 - DNA, 2646 bp, Artificial Sequence
  derived and/or modified sequence
atggtgctgcggcggatgcaccggccccggagctgcagctaccagcttctgcttgagcatcaacggccatcttgtatccagggtctcagatggacacccctcacgaattctgaggaaagcttagacttcagcgaatccctcgagcaggcctctaccgaaagagtcctgagagccgggcgtcaactacacaggcaccttctggcaacctgtcccaacctaattcgggaccggaagtaccacttacgcctgtataggcagtgctgtagcgggcgagagctggttgacggcatccttgcccttggtctgggagtgcactccagatcccaggtggtagggatatgtcaagtgctactcgacgagggtgctctgtgtcatgtgaagcacgactgggccttccaagacagggacgcccagttctaccgcttccccggtcctgagcccgaacccgtgcgcactcatgagatggaggaggaactggcagaggccgttgccttgctgagtcagcgaggaccggacgccctgctcaccgtcgccttgagaaagccaccaggccagcggacggacgaggagcttgatctcattttcgaggaactgctgcatattaaagccgtggcccatctgagcaactcggtaaaacgtgagctggcagctgtgctgctgttcgaaccacactctaaggccggcaccgtacttttctcacagggcgacaaaggaacatcctggtacattatttggaagggaagtgtcaatgtagtcacccacggcaaaggcctcgtaaccactttacatgagggtgatgactttgggcagctcgccctggtgaatgatgcacctcgcgccgccactataatactccgggaagacaactgccatttcctacgggtggataagcaagacttcaataggataattaaagatgttgaggcaaagacaatgcgtctggaggagcacggtaaggtagtgcttgtcctggaaagggcttcccagggcgctggcccttcccgcccgccaactccgggtcgtaaccgctatactgtgatgtctgggaccccagagaaaatcctcgaactcctattagaggccatgggacccgactcttccgcgcatgacccgaccgagacttttctgtctgatttccttctgactcacagagtgttcatgccttcagcccagctctgcgccgcactgctccaccacttccacgtcgagcccgcggggggcagcgaacaggagcgaagtacatacgtctgtaacaaaaggcagcagatcctaagactcgtttcgcagtgggtagcattatacggctctatgctgcacaccgaccctgtcgctacctctttcttacagaaactcagcgatcttgtcggacgagacactaggctgtccaatttactgcgggagcagtggcctgaaagacggcgatgccatagattggagaacggctgtggcaatgcctcacctcagatgaaagctcgcaacctcccagtctggcttcctaatcaggacgaaccgttacccggatcaagctgcgccatccaggtaggcgataaagtcccctacgacatctgcagacccgaccattctgttcttacattgcagcttcctgtgacagctagtgtgcgggaagtaatggcagctctcgcacaggaggatggctggactaagggtcaggtcctggttaaagtcaattcagcaggtgacgctatcggcctgcaaccagacgcccgtggtgtggctacatcactgggactgaacgaacggttgtttgtcgtgaaccctcaggaggtgcatgagctcatcccacatccagatcagttgggacctaccgtgggatctgcagaaggactggatctcgtcagcgccaaggatctggctggtcagctgactgaccacgactggtctctgttcaattccattcaccaagtggaactgattcactatgtgctcgggcctcaacacctgcgtgacgttactaccgctaaccttgagagattcatgcgaaggttcaacgagcttcagtactgggtcgctacagagctttgcctatgccccgtgcccggacctcgcgcccagttactcagaaaattcattaagttagctgcccatttgaaggaacaaaaaaacctgaattcctttttcgccgtcatgttcggcctcagcaactcggcgatctcgagattggcacacacgtgggagaggctcccccataaggtacgaaaattgtacagcgcgctggagcggctgttggatccaagctggaaccatagggtgtaccggctggcattggccaagctcagtccccccgtgataccatttatgccactgcttctcaaggatatgactttcatccatgaagggaaccacacattggtagagaatttgatcaactttgaaaaaatgagaatgatggctcgggcagcgaggatgctacaccactgcaggagccacaaccccgttccgttaagccctctacggtccagggtgtctcatctccatgaagattctcaggtggcccgcattagtacctgcagtgaacaaagcctgagcactcgcagtccagccagtacatgggcttacgtgcagcaactcaaagtaatagacaaccaacgggagctgtcacgcctgagtagagagctggagccatag

SEQ ID NO: 333362 - DNA, 2646 bp, Artificial Sequence
  derived and/or modified sequence
atggtgctgcggcggatgcaccggccccggagctgcagctaccagctgctgctggaacaccagcggccgagctgcattcaaggcctgcgctggactcccctgactaatagtgaagaaagcttggacttttcagagagtctggagcaggcctccactgaaagggtgcttagggccggtcggcaactgcaccggcatctcttagccacatgcccaaacctgatcagagatcggaagtatcatcttaggctgtatagacagtgttgctctggcagggaactggttgacgggatcttggctctgggtctcggcgtgcacagcagaagtcaggttgtaggaatatgccaagtgctcctcgatgaaggggccctatgtcatgttaagcatgactgggcgtttcaggacagagacgcacaattctatcgttttcccggacccgaaccagagccggtgagaacccacgaaatggaggaggagctggctgaagcggtggccctgctgtcacagcgggggcccgatgcccttttgactgtggctctccgcaagcccccaggccagaggacagatgaagaactggaccttattttcgaagagttactccatattaaagcagtggctcacctgtccaatagcgtcaagcgggagctggctgcggtgttactgttcgaacctcactctaaggctggaaccgtgctgttttctcaaggagacaagggcacctcatggtacatcatttggaaggggagcgtcaacgtcgtcacccacggcaagggactcgtgacaaccttgcatgaaggcgacgacttcgggcagctggctctggtcaatgacgcgcctcgggcggccacgattattctgcgcgaagacaactgccactttctgagggtggacaagcaggactttaataggataatcaaagatgtggaggccaagaccatgcgcctagaggagcacggtaaagtggtgctggtgctcgagcgggccagtcagggcgccggtccatcaaggccccctaccccaggaagaaatcgatataccgtgatgtccggaacaccagaaaaaattctggagttactgctggaggccatgggacctgattcttccgctcatgatccgacagaaacattcctgtccgattttttactcacgcatagagtatttatgccgtctgctcagctctgcgctgccttattacaccactttcacgtggagcctgccggcggcagtgagcaagaacgtagtacgtacgtctgcaataaaagacagcagatcctgcgcctggttagtcagtgggttgccctgtacggaagtatgctgcatacagatcctgttgccacgagcttcctgcagaagctgagcgacctggtcgggcgagatacacggttgtccaatctgctccgtgagcagtggccagaacgtcgcagatgtcaccgactggagaacggctgcggcaatgcctcacctcagatgaaggcacgcaacttaccggtgtggcttcccaaccaggatgagccactccctggatccagctgcgccatccaggtgggcgacaaggtgccctatgacatttgccgcccagaccacagcgtcctcaccttgcagctccccgtgacggcatcagtgcgagaggtaatggccgcacttgcacaggaggatggatggacaaaaggccaggtcctggtgaaggtgaattcggcaggggatgctatcggtctgcagcccgatgcgcgcggcgtggcaacgagtctcggtctaaatgagcggctctttgtggtgaacccgcaggaggtccacgagctaattccccacccagaccaactcgggccaacggtagggagtgccgagggactagacctcgtatcagctaaagacctggccggtcagctgactgatcatgattggtccctgttcaattcgatacaccaggtcgagctcatccattacgtgctcggccctcagcacctgagagacgtaactacagccaatctggagcggtttatgagacgctttaacgaattgcagtactgggtcgctacagagctttgtctctgcccggtcccaggccctcgggctcagctccttaggaagttcattaaactagctgcacatctgaaggaacagaaaaacctgaacagctttttcgccgttatgttcggcctctctaactctgcgatctcaagactcgctcatacctgggagagactgccacacaaggttcgcaagctgtactccgcactagaaaggctgctggatccctcttggaaccaccgcgtgtatcggctggctcttgctaaattaagtccgcctgtcatcccatttatgcctctgctgttaaaagacatgaccttcatccatgaagggaaccataccttagtagaaaacctcattaattttgagaaaatgaggatgatggcccgagccgcccgcatgctgcaccactgtcggtcgcataacccggtccctttgtcccctctgaggtcacgagtgagtcacttgcacgaagatagccaagttgcaaggatatcaacctgctctgagcaatcactgtccactaggagccccgcaagtacctgggcctatgtgcagcagcttaaggtaatcgataaccagagggaactaagccgtctttcccgagagctagagccatag

SEQ ID NO: 333363 - DNA, 2646 bp, Artificial Sequence
  derived and/or modified sequence
atggtgttgcgccgaatgcatcgacctcgctcttgttcttaccagctccttctggagcaccagcgtccttcctgcatccaaggtctgcggtggacaccacttactaactccgaagaatccctggatttcagcgaatccctggagcaagcatcgactgagcgagtcctgagggctggcaggcagctccataggcacctgctcgccacctgccctaatctcataagagataggaagtaccatctgagattatataggcagtgctgcagcggcagggaactcgtggacgggatccttgccctcgggcttggagttcacagtcggtcccaggtggtggggatttgccaggtgctgctcgatgagggggcattatgtcacgtaaaacacgactgggcctttcaggaccgcgacgcacagttttacagatttcctgggcctgaacctgaaccagtcaggacccacgagatggaagaggaactggctgaggccgtggccctgctgtctcagcggggtcccgacgccctcctgacagtagcccttaggaaaccacccggtcaaagaacagatgaggaactggatttgattttcgaagagttgttgcatattaaggcagtagcccacctctcgaattccgtgaagagagagctagcggctgtgctcctcttcgagcctcatagcaaagccggaactgtgttattctcacaaggagataagggaaccagttggtacatcatttggaagggctcagtaaatgtagtgacacacgggaaagggctggtcacgacacttcatgagggagatgatttcgggcagctcgccctggtaaatgacgctccccgagccgctaccattatcctgagggaggataactgtcactttctccgggtggacaagcaggattttaataggattattaaagacgtcgaggcaaagactatgcggctggaggagcacggtaaagtcgtgttggtactggaacgcgcatcccagggagcaggtccaagtaggccaccaacccccggtaggaaccggtacaccgtcatgagtggcacaccagagaaaatccttgagctgctgctggaggcaatggggcctgattcaagtgctcatgaccctacagaaacatttttatctgacttcctgctcacacaccgggtcttcatgccctctgcgcaactttgcgcagccctattgcaccactttcacgtagagcctgccggaggtagcgagcaggagaggtcgacttatgtctgcaataaacgacagcagatcctccgactggtcagccagtgggtggccctgtatggttcaatgctgcacacagatcctgtcgctaccagtttccttcagaagctctcggatctcgtgggacgcgacaccaggctctcaaatctcctccgggagcaatggcctgagaggaggcggtgccatcgcttggaaaacggttgtgggaatgcgtccccccagatgaaagctcgcaacctgcctgtctggctgcctaaccaggatgagcccctgcccggttccagctgtgccatacaagtgggggacaaagtgccatatgatatatgtagacctgatcactctgtccttacactccagttgcccgtaaccgcgtcagtgcgcgaagtcatggctgctctggcccaggaggacggatggaccaaagggcaagttctcgtgaaggtcaactccgctggtgacgccatcgggttacagccagatgccagaggagtggccacctcattgggcctgaatgagcgattgttcgttgtgaatccccaggaggttcatgagctgattcctcacccggatcagttggggcctaccgtgggaagtgccgagggactggatctcgtcagcgccaaagatctggctggccaactgaccgatcatgactggagcttgtttaacagtatccaccaggtggaactaatccactatgtccttggccctcagcacctgcgggatgtgacaaccgctaatctggaacggtttatgaggagattcaacgagcttcagtactgggtggctaccgaattgtgcctgtgtcctgttcccggtccgagagcccaattactccggaaattcataaagctcgcagcccatctgaaggagcagaagaatctgaactcctttttcgctgtgatgttcggactgtcaaatagtgctatctcaagactggcccacacctgggaacgcctcccacacaaggtccgcaagctgtacagtgccctggagcgtctgctggacccatcatggaaccacagggtgtacaggcttgctctagccaaactgagcccccctgtgattcccttcatgccacttctcctgaaagatatgacctttatacacgaggggaaccacaccctggttgaaaacctcatcaattttgagaaaatgcgtatgatggcaagagcagccaggatgctgcaccattgcaggtcccataacccagtccccctttcacctttgcgttcacgggtgagtcacctacacgaggactcccaagttgccaggataagcacatgctccgagcagagtttgtccacccggagcccggcatctacttgggcatatgtccagcagctgaaggtgattgacaaccaacgtgaactaagccgtcttagcagggaactagaaccatag

SEQ ID NO: 333364 - DNA, 2646 bp, Artificial Sequence
  derived and/or modified sequence
atggtgctccgcaggatgcatagaccgagaagctgctcttaccagctgctcctcgaacatcagcgccctagctgtattcaggggctacggtggacccctcttactaactcggaggagtcgctggatttctcagaaagcttggaacaggcatcaacagaacgcgtcctgcgcgcagggcgacagttgcaccgacatcttctggctacatgcccaaacctgatcagagaccgaaaataccatttgcgcctgtatcggcagtgctgcagtgggagagagctcgtcgacggcatcctcgctctcgggctcggtgtgcattccaggagccaggtggttggaatttgccaggtgctgctcgacgagggggcactctgtcatgtgaagcacgactgggcctttcaggatcgtgacgcgcagttctaccgcttccctgggcctgagcccgagcccgtgcggacacatgagatggaggaagaattggctgaagctgttgctttattatctcagagaggtcccgatgccctgctgactgtggctctgcggaagcctccagggcagcgaacagacgaggaattggatcttatctttgaggaactgctgcatattaaagccgtcgcacatctgtccaattcagtcaagagggaattagcagctgtgttgctgtttgaaccgcactccaaagccggtaccgtgctgttctcacagggtgacaaaggcacgtcttggtatattatttggaagggctctgtgaacgtggtgacccacggcaaaggtttggtcacaactctacacgaaggtgacgatttcgggcagttagctctcgtaaacgatgctcccagagccgctacaattattttgagagaagacaactgccacttcctgcgtgtggataagcaggacttcaaccggatcattaaggacgtcgaggccaagacaatgcgactggaggaacatggaaaggtcgtgctcgtactggagcgcgcttcgcagggtgcaggcccttctagacccccaacaccaggtagaaatcggtacaccgtcatgtccggaacccctgagaagatcctggagctcctgctggaggccatgggaccagacagcagcgcacatgatcccaccgagacatttttatctgacttcctgctgactcaccgcgtgttcatgccttcagctcagctatgcgctgccctgctccaccatttccatgtagagcccgctgggggaagcgagcaagagcggtcaacatatgtatgcaataagcggcagcagatcttgagactggtgtctcaatgggtggctttgtacgggtccatgttacatacagatccagtggcgacttcattcctgcagaaactctctgatctagtggggagagataccagactctctaacctgctgagggagcaatggcccgaacgaaggcgatgtcataggcttgagaatggatgcggaaacgcctcgcctcagatgaaggccagaaatctacccgtttggctgcctaaccaggatgagcctcttcccggatccagctgtgccatccaggtaggggataaagtaccctacgacatttgtcggccagaccattctgtgctgaccctgcagttgcctgtgaccgcaagtgtccgcgaagtgatggccgctctggcacaggaggatgggtggacaaagggccaagtgctggtgaaagtcaattcggccggtgacgccatcggtctccagcctgacgctaggggagtagctacttcgttgggattgaatgaacgtctgttcgtggttaacccacaggaggtgcatgagctgatcccccatcccgatcagttaggacccactgtcgggtccgccgagggtctggatctggtgagcgccaaggacctggctgggcagctgactgaccacgactggagtctttttaactcaattcaccaggttgagcttattcactacgtgctcggtccccagcatttgagagatgtcaccaccgcaaatctggagcgctttatgcgcagatttaacgaactgcagtattgggtggcgactgagttgtgcctgtgtcccgtccccggaccccgtgctcaactcttgcgaaaattcattaaacttgctgcccacctcaaggagcagaagaatctgaattcttttttcgcagtcatgtttggattgagcaacagcgcgatttcacgcctcgctcatacatgggaacgattgccacacaaagttaggaaactgtatagcgcactcgaacgactgctggatccatcctggaaccaccgcgtatatcgcctagcattagccaaactttctcctccagtgattcccttcatgcctctgctcctgaaagacatgaccttcattcacgagggcaaccacactctggtggagaatcttattaatttcgagaaaatgagaatgatggctagggccgctagaatgcttcatcactgtagatctcacaaccctgtgcctctgtccccccttcgctcgcgggtctcccacctgcacgaggattcccaggtggcaaggatatccacatgttcggaacagtccctgtcaacccgcagtcccgcttccacctgggcctatgttcagcagctcaaggtcatcgataaccagcgtgaactgagcaggctgagtcgggagctggaaccctag

SEQ ID NO: 333365 - DNA, 2646 bp, Artificial Sequence
  derived and/or modified sequence
atggtccttagaaggatgcaccgcccacgctcttgttcctatcagcttctcctagaacaccaaaggccttcttgtatccagggactgcgttggacaccactgaccaactctgaggaaagtctggattttagtgaatcgctggagcaggccagtacagagcgggttctgcgcgctgggaggcagcttcatagacatctgctggccacttgccctaaccttatacgagataggaagtatcacctccgtctctatcgccaatgctgctcgggccgtgagctcgtggatggcatactcgctttggggttaggggtgcactccaggtcccaggtggtcggaatatgtcaggttttattggatgaaggtgccctatgtcatgtcaagcatgactgggcattccaagatagagatgctcaattttacaggttcccaggcccagagccggagcccgtgaggacccacgagatggaagaggaactggctgaggctgttgcgctgctttcccaacgcggaccagacgcccttttgactgttgccttacgtaagcctcctggccagagaaccgacgaggagctggacctcatttttgaggagcttctgcatatcaaagcggttgctcaccttagcaattccgtaaagagggagttggccgctgttcttctcttcgagccccactccaaggctgggaccgttttatttagccaaggcgacaagggcacaagctggtatatcatctggaaaggctccgtgaacgtagttacccacggcaagggcctggtgaccacgctgcatgaaggcgatgacttcggacagctagccctggtgaatgacgcccctcgagccgctaccattattctccgcgaggataattgccacttcttgcgagtcgataaacaggactttaatcgaatcattaaagacgtcgaggccaagacaatgcggctcgaggaacatggaaaggtggtgctcgtcttggaaagggccagccaaggcgcaggccctagccgacctcccacaccaggaagaaaccggtacactgtaatgagcggcaccccagagaaaatcctggaactcttgctcgaggccatgggacctgattcctcggcgcatgatcccaccgaaaccttcctaagtgatttcctcctgacacaccgcgtgtttatgccctcagcacagttgtgtgccgcactgctgcaccacttccacgtggagccggctggaggttccgagcaggaaagaagcacctatgtgtgcaataagcgacagcagatccttcgcctggtgtctcagtgggtagccctctacggatctatgttgcacacagatcccgtcgcaacatccttccttcagaaactctctgacttggtaggcagggatacaaggctgtctaatctactgagagaacaatggcctgaacgcaggagatgtcacagattggaaaatggttgtggaaacgcgtccccccagatgaaagctagaaacctgccagtctggctgcccaaccaggatgagcctttacccggtagttcctgcgcaatacaagtgggtgacaaggtgccctatgatatctgcaggccagaccacagcgtgttaactttacagctgcccgtcaccgcgtccgtgagggaggtgatggccgctctggcccaggaagacggatggacgaaagggcaggtgctcgtgaaggttaattcagcaggagacgccatcggtctccagcccgacgcgcgaggcgtggctacttccttgggactcaacgaacgactctttgtcgtgaaccctcaggaagtacatgagctaattcctcacccagaccaacttgggcctactgtcggtagtgctgaggggctggatctcgtgagtgcaaaggatcttgctggacagcttacagatcatgactggtctctctttaattcgatccatcaggtggagctcatccattatgtgttgggaccccaacacttacgggacgttactacagccaacctcgagcggttcatgagacggtttaatgagctccaatactgggtggctactgaactgtgtctctgccctgtgcctgggccacgcgctcagctgctgaggaaatttatcaaactggctgcccacttaaaggaacagaagaatttgaactcctttttcgctgttatgttcggcctgagtaattcagccatatcccggttggcccacacctgggagcgcttaccgcataaggtgaggaagctatatagtgcattagaacggcttcttgaccccagctggaatcaccgagtgtatcggctggccctggccaaactatctcccccagtgatcccctttatgcccctgctcctgaaagatatgaccttcatacatgaaggtaaccacacgctggtagagaacttgatcaacttcgagaaaatgcgcatgatggccagggctgcacgtatgctacaccactgtcggagtcacaaccccgtcccattatctcctcttagatccagggtgagccatttgcacgaggatagtcaagtggctaggatcagtacttgcagtgagcagagcctctcaaccagatcacctgcgtctacatgggcttacgtccagcagctaaaagtaattgataaccaaagagaattgagcagactctcccgggaactggagccatag

SEQ ID NO: 333366 - DNA, 2646 bp, Artificial Sequence
  derived and/or modified sequence
atggttttgcgtcggatgcatcgacctcgcagttgcagttatcagctgctcctagagcatcaacgcccaagttgcatccagggcctgagatggacgcctctgaccaacagtgaggagtctcttgacttttctgagtccttggagcaggcctccaccgagcgggttctcagggccggaaggcagcttcaccgacacctgttggcaacctgtcccaacctgatccgagaccgaaaataccatctgagattgtaccgtcaatgttgcagtggtcgcgaactagtggatggaattcttgcactgggcctgggcgtccacagtagaagccaagtggtaggcatttgtcaggtgctgctggacgagggtgccctctgtcacgtgaaacatgattgggcctttcaagaccgagatgcacagttctacaggtttccaggaccagagcccgagcccgtccgaacacacgagatggaggaggagctggcagaagctgtggccctgctgtcccagcgagggccagatgctctgctgaccgtcgcactgaggaagccacccggacagcggaccgacgaggaacttgatttgatttttgaagagctccttcacatcaaggcggtggcccatctgtccaattctgtgaaaagagaactcgccgcagtgctcctgtttgaaccacattctaaagcaggaacagtccttttcagccagggggacaaaggcacttcatggtacataatctggaagggcagtgtcaatgttgtgacgcatgggaaaggactcgtcactactctacacgagggcgacgatttcggccagttggccttggtcaacgatgcacctagggctgcaaccatcattctgagggaggacaactgccacttcctccgcgtggacaagcaggactttaataggatcatcaaggatgtggaggccaagaccatgcgcttggaagaacacggaaaggtggtgctggtgctggaaagggccagtcagggggcaggtcccagccggcctccaacaccaggcagaaatagatatacagtcatgtcaggaactcccgagaagatcctggagctcttgctggaggctatggggcctgactcaagcgcccacgaccccacagagaccttcctcagtgacttcctacttactcatcgagtgttcatgcccagcgctcagctgtgtgctgctctactgcaccacttccatgtggaacctgcaggcggaagtgaacaggagcgatcaacgtacgtgtgtaacaagcgccagcagattctcaggttagtgtcccagtgggtggctctttatggatccatgttgcacaccgaccctgtggcgacaagctttttgcagaaactctctgatcttgtaggacgagacaccagactctctaatctgctgcgggaacagtggcctgagagacggagatgccatcgactcgagaacggctgcggcaatgcctctccccagatgaaggctagaaatctgcctgtgtggctacccaatcaggacgaacctctcccgggtagctcatgtgctattcaggtgggagacaaagtgccatacgatatctgcaggcccgatcactcagtcctgactctacaactgccagttaccgcctctgtccgggaggttatggcagcgttagcacaggaggacggttggaccaaaggacaggtgctggtgaaggtgaatagtgccggagacgccattgggctccaacctgacgctcggggtgtggccacatcactcggcttaaatgaacgcctattcgtggtgaacccacaggaagtgcacgagctcattccgcacccagatcaacttggcccaaccgtcgggagcgccgagggcctggatctggtgtccgccaaagacctcgcaggccagctgacggaccacgattggagcctctttaatagtattcaccaggtcgaacttattcactatgttctgggaccacaacacctcagagacgtcacgactgctaatttggagaggttcatgagacggtttaacgagttgcagtactgggttgccactgagctttgcctgtgtcctgtcccagggcctcgcgcacagctacttcggaagtttattaaactcgccgctcacttgaaggagcagaagaacctgaactccttctttgcagttatgttcggactctccaatagtgcaatcagtcggctggcccacacttgggagcgccttccacacaaggtgcggaagctttatagcgccctcgagcgcttactggacccatcctggaaccacagagtgtacagacttgccctggccaagctctcccctccagtgatcccctttatgcccctgcttctcaaggatatgacattcatacacgaggggaatcacacactggttgagaacctcatcaatttcgagaaaatgagaatgatggctcgcgctgctcggatgttgcaccattgtcggtctcataaccctgtccccctgtcgccactgagatctagagtcagtcatctgcacgaagactcacaggtggccaggataagtacctgtagcgaacagtctctttctacaaggtcccccgcatccacttgggcatacgtacaacagctcaaggtcatcgacaatcagagagaactctcacgcctgagtcgtgagctggagccatag

SEQ ID NO: 333367 - DNA, 5751 bp, Artificial Sequence
  derived and/or modified sequence
gttagtcagggctgaggaggagaggagaagggtttaagccgaagctgcatttctgggagacctagtgaatctatagcttcatactgggaggtgggctggccaggtgagagctgctggcaggtgggcctggctgtggaggatagcccagctctgggagcaccgcgggtgggagccctccctgacgtggtgccggaggggacactactcaacatggtgttgagaaggatgcaccggccccgaagctgctcctaccagctgctgctggagcaccagcgtccgagctgcatccaggggctgcgctggacaccactcaccaacagcgaggagtccctggatttcagcgagagcctggagcaggcctccacagagcgggtgctcagggctgggaggcagctgcatcggcatctgctggccacctgcccaaacctcatccgagaccggaagtaccaccttaggctctatcggcagtgctgctctggccgggagctggtggatgggatcttggccctgggacttggggtccattcccggagccaagttgtgggaatctgccaggtgctgctggatgaaggtgccctctgccatgtgaaacacgactgggccttccaggaccgagatgcccaattctaccggttccccgggcccgagcccgagcccgtgagaactcatgagatggaggaggagttggccgaagctgtggccctgctctcccagcgggggcctgacgccctgctcactgtggcacttcgaaagcccccaggtcagcgcacggatgaagagctggacctcatctttgaggagctgctgcacatcaaggctgtggcccacctctccaactcggtgaagcgagaattagcggctgttctgctctttgaaccacacagcaaggcagggaccgtgttgttcagccagggggacaagggcacttcgtggtacattatctggaagggatctgtcaacgtggtgacccatggcaaggggctggtgaccaccctgcatgagggagatgattttggacagctggctctggtgaatgatgcaccccgggcagccaccatcatcctgcgagaagacaactgtcatttcctgcgtgtggacaagcaggacttcaaccgtatcatcaaggatgtggaggcaaagaccatgcggctggaagaacatggcaaagtggtgctggtgctggagagagcctctcagggcgccggcccttcccgacccccaaccccaggcaggaaccggtatacagtgatgtctggcaccccagagaagatcctagagcttctgttggaggccatgggaccagattccagtgctcatgacccaacagagacattcctcagcgacttcctcctgacccacagggtcttcatgcccagcgcccaactctgcgctgcccttctgcaccacttccatgtggagcctgcgggtggcagcgagcaggagcgcagcacctacgtctgcaacaagaggcagcagatcttgcggctggtcagccagtgggtggccctgtatggctccatgctccacactgaccctgtggccaccagcttcctccagaaactctcagacctggtgggcagggacacccgactcagcaacctgctgagggagcagtggccagagaggcggcgatgccacaggttggagaatggctgtgggaatgcatctcctcagatgaaggcccggaacttgcctgtttggctccccaaccaggacgagccccttcctggcagcagctgtgccatccaagttggggataaagtcccctatgacatctgccggccagaccactcagtgttgaccctgcagctgcctgtgacagcctccgtgagagaggtgatggcagcgttggcccaggaggatggctggaccaaggggcaggtgctggtgaaggtcaattctgcaggtgatgccattggcctgcagccagatgcccgtggtgtggccacatctctggggctcaatgagcgtctctttgttgtcaacccacaggaagtgcatgagctgatcccacaccctgaccagctggggcccactgtgggctctgctgaggggctggacctggtgagtgccaaggacctggcaggccagctgacggaccacgactggagcctcttcaacagtatccaccaggtggagctgatccactatgtgctgggcccccagcatctgcgggatgtcaccaccgccaacctggagcgcttcatgcgccgcttcaatgagctgcagtactgggtggccaccgagctgtgtctctgccccgtgcccggcccccgggcccagctgctcaggaagttcattaagctggcggcccacctcaaggagcagaagaatctcaattccttctttgccgtcatgtttggcctcagcaactcggccatcagccgcctagcccacacctgggagcggctgcctcacaaagtccggaagctgtactccgccctcgagaggctgctggatccctcatggaaccaccgggtataccgactggccctcgccaagctctcccctcctgtcatccccttcatgccccttcttctcaaagacatgaccttcattcatgagggaaaccacacactagtggagaatctcatcaactttgagaagatgagaatgatggccagagccgcgcggatgctgcaccactgccgaagccacaaccctgtgcctctctcaccactcagaagccgagtttcccacctccacgaggacagccaggtggcgaggatttccacatgctcggagcagtccctgagcacccggagtccagccagcacctgggcttatgtccagcagctgaaggtcattgacaaccagcgggaactctcccgcctctcccgagagctggagccatgaggaggggctgggactggagctggagcaggcacttgcagccgggaaagccagggtgtgccgggccaagatactcacaggctggccacagctgggcaaggctctccgtggagtggactcgagtccctggagcaggcagtgtggaggcagccatcccctgtgatgactggcagctaaggaggacctcggagtggacccgagccaggaataacgaatgacccaaggccaaggaagggaggacagagaggccccaggagtgggtggagagtggagtgcgctgggacgttgtgtgcaatagagaggtctccacaccagatgtcttccagattctgtgcctctggctttgttgtccagccaggcctgcagtttattttcacagtggacagagagagagagagaggctgcatgtgtgtaccgtgtgtggcaagggcagggccttggcctggggcaggggccccctgctttctttccacagctttcttccaacagcaggcagtggggctgcgggcctgtgcggtggtccctgaggagctttattgttactgtcaacatagtagtatgttccaggccagcccagagtgggcgtggcagggaggctgaggccccgccctctgggaaggagctgtggaggagaagcagccccatgctgggcacgggccagactgggtccaagatcctgatgccacccagatgtgcctccagggctctggccaaagggcgggctggagcctggagcccctgtcagcagccagccagggtgaccatcagctccccgtggtggtccaataggactttacagtccagatgcaactgacagcttcttcccaactgcaatccccgcttttccacacttgagctcgtcctggcctgttgggccaggcttctggggtcttctgggggtggcttgtgatagaaacaatgctgaagcttccgcggagagcccgtcgcttgttgaggcccaacagacttccaggaaatcagggtttatcatcagtgttgagaatggtcccagcaagctctggtcatacgaagtcctctcttccctgccccttcagcacttcccctaggaaccagctactgccaggacgcctcttgcgaggcagagctcacccaggaagctccagggactccaccctcttgccttgctattgccctgagtcctggcagcaggaggcacttgtctggccagagagagaactcatggcccctggcatgactcctgagtaggtattgaggctgcagggccttgggcgtccagaggcagctggtatggcccctctgcacttcagccccatggatgtggatacacaggcctgctgcttccagaaagggtcagagcctttagcagggaggcagcacagctgggcttagacctcaggtcactaagtgaatctgagcaagtcagtgaacagttctcttccttcatttctccacctgtaagccaggtatgataaacgccatacagcgcttagtgacaaacacataaaactgtagctcctgcctctgtagcagaggtgacagccaagggcagtcctgtgctatccaggcctggtaggggggcagcctcgcctcagttgagggctgagggagagactgaggtgcagcagatggcagtggtaaccaaaccagttcccttgccgtgggtggggacacaggagaagcacggaagcatctggaactgagcaatcaggacaggaggctcaagcctgggtgagtcaggagtccgggggctttcttttcatccaacccattgtctgctggtgtctcggcaaaagccagccagccagccgtggcccttcaccgttcttcagactctagggtgagcccagcccagcgacacaacagaaaccaagtgccacgggggccggtgtcctccaccagcatttctcctctggtcacatctacgtcctgatgggacttctccctcctccttggaccatcagctttacagtccagaccaccctgcagccacccggtggtctcccagctgccccagtctcgggcaggatggcttttgagcctgttgggagagaccttgccaggagaatggtgcccagggcaggcaagaggacacagactctgggagctagaagagttgcggcccagggggccaggccactcccagaggacaggaggcccaaaagcggggaaaggctccatgttacggtggccccatgctgggagtttgtgctgccttctgtctccctgactgcccaagcgtggggtggtgtggggcaggaggcatcctctggtgttccctagcagcccaggctgtgtgcaggggctcccattttgtgtctcagctgcaagaaggccacaaagggaggaggggctcatgggactgctgagaagaaggtgtgcagaaagggagtgtggccctagatcagtcctttaaaaagcctctgttacctgaaaggaggtcaagcagagaggaatggctgcgtgtgtgtcctaccgggcaggacaggacagagggaggtcattgttacacacacatcccccctcctttcctccttcccctccacttccctgtgaaggcctgaggcaggctgtggccaggctcaggccctgactgtggggtacacaccagggagggccacgcctccccacagacggggtggagtggtcagtggagccagcaccctctgctgcttcagcatctccgcctggagccagctgtcccctctctctcaggctccatccgaacaaaaggaaggcagagcctgagatccggcaccccatccccctccactcagcactgagttagagctgggtgggggcatgtctgccttcacacgctgccttatggcttctgtgtctccaacagccctcagcctctggctgctctccttcccaatagtcacaagatttaccatgataataataggttaagacttg

SEQ ID NO: 333368 - DNA, 3265 bp, Artificial Sequence
  derived and/or modified sequence
aggagctgccggtggagagtgagtgctggtcctgtggaggagggagcaagccccgtggtccggagtgcatttccatggatggcttcagagctggccaggatggacagtactccaggcagtgggaaccgcacgtgtgatggcgcagagggaagaaataaagcggccgctttgggaaactgtgggctggccaggtgagagctgctggcaggtgggcctggctgtggaggatagcccagctctgggagcaccgcgggtgggagccctccctgacgtggtgccggaggggacactactcaacatggtgttgagaaggatgcaccggccccgaagctgctcctaccagctgctgctggagcaccagcgtccgagctgcatccaggggctgcgctggacaccactcaccaacagcgaggagtccctggatttcagcgagagcctggagcaggcctccacagagcgggtgctcagggctgggaggcagctgcatcggcatctgctggccacctgcccaaacctcatccgagaccggaagtaccaccttaggctctatcggcagtgctgctctggccgggagctggtggatgggatcttggccctgggacttggggtccattcccggagccaagttgtgggaatctgccaggtgctgctggatgaaggtgccctctgccatgtgaaacacgactgggccttccaggaccgagatgcccaattctaccggttccccgggcccgagcccgagcccgtgagaactcatgagatggaggaggagttggccgaagctgtggccctgctctcccagcgggggcctgacgccctgctcactgtggcacttcgaaagcccccaggtcagcgcacggatgaagagctggacctcatctttgaggagctgctgcacatcaaggctgtggcccacctctccaactcggtgaagcgagaattagcggctgttctgctctttgaaccacacagcaaggcagggaccgtgttgttcagccagggggacaagggcacttcgtggtacattatctggaagggatctgtcaacgtggtgacccatggcaaggggctggtgaccaccctgcatgagggagatgattttggacagctggctctggtgaatgatgcaccccgggcagccaccatcatcctgcgagaagacaactgtcatttcctgcgtgtggacaagcaggacttcaaccgtatcatcaaggatgtggaggcaaagaccatgcggctggaagaacatggcaaagtggtgctggtgctggagagagcctctcagggcgccggcccttcccgacccccaaccccaggcaggaaccggtatacagtgatgtctggcaccccagagaagatcctagagcttctgttggaggccatgggaccagattccagtgctcatgacccaacagagacattcctcagcgacttcctcctgacccacagggtcttcatgcccagcgcccaactctgcgctgcccttctgcaccacttccatgtggagcctgcgggtggcagcgagcaggagcgcagcacctacgtctgcaacaagaggcagcagatcttgcggctggtcagccagtgggtggccctgtatggctccatgctccacactgaccctgtggccaccagcttcctccagaaactctcagacctggtgggcagggacacccgactcagcaacctgctgagggagcagtggccagagaggcggcgatgccacaggttggagaatggctgtgggaatgcatctcctcagatgaaggcccggaacttgcctgtttggctccccaaccaggacgagccccttcctggcagcagctgtgccatccaagttggggataaagtcccctatgacatctgccggccagaccactcagtgttgaccctgcagctgcctgtgacagcctccgtgagagaggtgatggcagcgttggcccaggaggatggctggaccaaggggcaggtgctggtgaaggtcaattctgcaggtgatgccattggcctgcagccagatgcccgtggtgtggccacatctctggggctcaatgagcgtctctttgttgtcaacccacaggaagtgcatgagctgatcccacaccctgaccagctggggcccactgtgggctctgctgaggggctggacctggtgagtgccaaggacctggcaggccagctgacggaccacgactggagcctcttcaacagtatccaccaggtggagctgatccactatgtgctgggcccccagcatctgcgggatgtcaccaccgccaacctggagcgcttcatgcgccgcttcaatgagctgcagtactgggtggccaccgagctgtgtctctgccccgtgcccggcccccgggcccagctgctcaggaagttcattaagctggcggcccacctcaaggagcagaagaatctcaattccttctttgccgtcatgtttggcctcagcaactcggccatcagccgcctagcccacacctgggagcggctgcctcacaaagtccggaagctgtactccgccctcgagaggctgctggatccctcatggaaccaccgggtataccgactggccctcgccaagctctcccctcctgtcatccccttcatgccccttcttctcaaagacatgaccttcattcatgagggaaaccacacactagtggagaatctcatcaactttgagaagatgagaatgatggccagagccgcgcggatgctgcaccactgccgaagccacaaccctgtgcctctctcaccactcagaagccgagtttcccacctccacgaggacagccaggtggcgaggatttccacatgctcggagcagtccctgagcacccggagtccagccagcacctgggcttatgtccagcagctgaaggtcattgacaaccagcgggaactctcccgcctctcccgagagctggagccatgaggaggggctgggactggagctggagcaggcacttgcagccgggaaagccagggtgtgccgggccaagatactcacaggctggccacagctgggcaaggctctccgtggagtggactcgagtccctggagcaggcagtgtggaggcagccatcccctgtgatgactggcagctaaggaggacctcggagtggacccgagccaggaataacgaatgacccaaggccaaggaagggaggacagagaggccccaggagtgggtggagagtggagtgcgctgggacgttgtgtgcaatagagaggtctccacaccagatgtcttcc

SEQ ID NO: 333369 - protein, 868 aa, Artificial Sequence
  derived and/or modified sequence
MAQREEIKRPLWETVGWPGESCWQVGLAVEDSPALGAPRVGALPDVVPEGTLLNMVLRRMHRPRSCSYQLLLEHQRPSCIQGLRWTPLTNSEESLDFSESLEQASTERVLRAGRQLHRHLLATCPNLIRDRKYHLRLYRQCCSGRELVDGILALGLGVHSRSQVVGICQVLLDEGALCHVKHDWAFQDRDAQFYRFPGPEPEPVRTHEMEEELAEAVALLSQRGPDALLTVALRKPPGQRTDEELDLIFEELLHIKAVAHLSNSVKRELAAVLLFEPHSKAGTVLFSQGDKGTSWYIIWKGSVNVVTHGKGLVTTLHEGDDFGQLALVNDAPRAATIILREDNCHFLRVDKQDFNRIIKDVEAKTMRLEEHGKVVLVLERASQGAGPSRPPTPGRNRYTVMSGTPEKILELLLEAMGPDSSAHDPTETFLSDFLLTHRVFMPSAQLCAALLHHFHVEPAGGSEQERSTYVCNKRQQILRLVSQWVALYGSMLHTDPVATSFLQKLSDLVGRDTRLSNLLREQWPERRRCHRLENGCGNASPQMKARNLPVWLPNQDEPLPGSSCAIQVGDKDAIGLQPDARGVATSLGLNERLFVVNPQEVHELIPHPDQLGPTVGSAEGLDLVSAKDLAGQLTDHDWSLFNSIHQVELIHYVLGPQHLRDVTTANLERFMRRFNELQYWVATELCLCPVPGPRAQLLRKFIKLAAHNSAISRLAHTWERLPHKVRKLYSALERLLDPSWNHRVYRLALAKLSPPVIPFMPLLLKDMTFIHEGNHTLVENLINFEKMRMMARAARMLHHCRSHNPVPLSPLRSRVSHLHEDSQVARISTCSEQSLSTRSPASTWAYVQQLKVIDNQRELSRLSRELEP

SEQ ID NO: 333370 - DNA, 2607 bp, Artificial Sequence
  derived and/or modified sequence
atggcccagagagaggagatcaagagacccctgtgggagaccgtgggctggcccggcgagagctgctggcaggtgggcctggccgtggaggacagccccgccctgggcgcccccagagtgggcgccctgcccgacgtggtgcccgagggcaccctgctgaacatggtgctgagaagaatgcacagacccagaagctgcagctaccagctgctgctggagcaccagagacccagctgcatccagggcctgagatggacccccctgaccaacagcgaggagagcctggacttcagcgagagcctggagcaggccagcaccgagagagtgctgagagccggcagacagctgcacagacacctgctggccacctgccccaacctgatcagagacagaaagtaccacctgagactgtacagacagtgctgcagcggcagagagctggtggacggcatcctggccctgggcctgggcgtgcacagcagaagccaggtggtgggcatctgccaggtgctgctggacgagggcgccctgtgccacgtgaagcacgactgggccttccaggacagagacgcccagttctacagattccccggccccgagcccgagcccgtgagaacccacgagatggaggaggagctggccgaggccgtggccctgctgagccagagaggccccgacgccctgctgaccgtggccctgagaaagccccccggccagagaaccgacgaggagctggacctgatcttcgaggagctgctgcacatcaaggccgtggcccacctgagcaacagcgtgaagagagagctggccgccgtgctgctgttcgagccccacagcaaggccggcaccgtgctgttcagccagggcgacaagggcaccagctggtacatcatctggaagggcagcgtgaacgtggtgacccacggcaagggcctggtgaccaccctgcacgagggcgacgacttcggccagctggccctggtgaacgacgcccccagagccgccaccatcatcctgagagaggacaactgccacttcctgagagtggacaagcaggacttcaacagaatcatcaaggacgtggaggccaagaccatgagactggaggagcacggcaaggtggtgctggtgctggagagagccagccagggcgccggccccagcagaccccccacccccggcagaaacagatacaccgtgatgagcggcacccccgagaagatcctggagctgctgctggaggccatgggccccgacagcagcgcccacgaccccaccgagaccttcctgagcgacttcctgctgacccacagagtgttcatgcccagcgcccagctgtgcgccgccctgctgcaccacttccacgtggagcccgccggcggcagcgagcaggagagaagcacctacgtgtgcaacaagagacagcagatcctgagactggtgagccagtgggtggccctgtacggcagcatgctgcacaccgaccccgtggccaccagcttcctgcagaagctgagcgacctggtgggcagagacaccagactgagcaacctgctgagagagcagtggcccgagagaagaagatgccacagactggagaacggctgcggcaacgccagcccccagatgaaggccagaaacctgcccgtgtggctgcccaaccaggacgagcccctgcccggcagcagctgcgccatccaggtgggcgacaaggacgccatcggcctgcagcccgacgccagaggcgtggccaccagcctgggcctgaacgagagactgttcgtggtgaacccccaggaggtgcacgagctgatcccccaccccgaccagctgggccccaccgtgggcagcgccgagggcctggacctggtgagcgccaaggacctggccggccagctgaccgaccacgactggagcctgttcaacagcatccaccaggtggagctgatccactacgtgctgggcccccagcacctgagagacgtgaccaccgccaacctggagagattcatgagaagattcaacgagctgcagtactgggtggccaccgagctgtgcctgtgccccgtgcccggccccagagcccagctgctgagaaagttcatcaagctggccgcccacaacagcgccatcagcagactggcccacacctgggagagactgccccacaaggtgagaaagctgtacagcgccctggagagactgctggaccccagctggaaccacagagtgtacagactggccctggccaagctgagcccccccgtgatccccttcatgcccctgctgctgaaggacatgaccttcatccacgagggcaaccacaccctggtggagaacctgatcaacttcgagaagatgagaatgatggccagagccgccagaatgctgcaccactgcagaagccacaaccccgtgcccctgagccccctgagaagcagagtgagccacctgcacgaggacagccaggtggccagaatcagcacctgcagcgagcagagcctgagcaccagaagccccgccagcacctgggcctacgtgcagcagctgaaggtgatcgacaaccagagagagctgagcagactgagcagagagctggagccctag

SEQ ID NO: 333371 - DNA, 2607 bp, Artificial Sequence
  derived and/or modified sequence
atggctcagcgggaggagatcaaacggccgttgtgggagactgtcggatggcccggtgagagttgctggcaggtgggtctcgctgtcgaggacagtccagccctgggggcaccaagggtaggtgctttgccagacgtggtgcctgaagggaccttgctgaatatggttttaagacgaatgcaccggcctcggtcctgttcatatcagcttctcctggaacaccagaggcccagctgtatccagggtcttagatggactcctcttaccaacagcgaggagtctttagatttctccgagagtctggagcaggcgtcgacagagagggttttacgtgccggtcggcagcttcatcgacatctgctggcaacctgccctaacttaattcgcgacagaaaatatcatttgagattgtacaggcagtgctgttccggtcgcgaattggtcgatggaatcctggccctcggcctcggtgtacactcgagatcccaggtagtgggcatttgtcaggttctgctggatgagggtgccctttgtcacgtgaagcatgattgggcctttcaggaccgagacgcccagttctatagatttcccggtcctgaaccagagcctgtacggacccatgagatggaagaggagctggccgaagctgtcgcattactgagccagcgtggtcccgatgccctgttaacagtcgcccttcgcaagccacctggccagcgtactgacgaggaactcgacctcatctttgaggaactgctgcacataaaggccgtggcccatttgtccaattccgtgaagcgcgagcttgccgcagtacttttgttcgaaccacatagcaaggccgggacggtcttgttttctcagggcgacaaagggacatcgtggtatatcatttggaagggatccgtgaacgttgtcacacacggcaaaggtctcgtgacgacactgcacgagggcgatgactttggacaactggcgctagttaacgacgctccccgcgcagccaccataatccttagagaggacaactgtcattttctaagggttgacaagcaggacttcaatcggattataaaagacgtggaggcaaaaacgatgaggctcgaagagcatggaaaagtcgtgctggttctggagagagccagtcaaggcgccggcccctcaagacctcccaccccggggcgtaaccgatacaccgtgatgagcgggactcccgaaaaaattctggagttattgttggaagcaatgggtccggatagttctgcccacgatcccacagaaaccttccttagcgacttcttgctcacgcacagagtgtttatgccatcagcccagctgtgtgccgcgctactccaccactttcatgttgaacccgctggcggatccgagcaggagaggagcacttatgtgtgtaacaagaggcaacagattcttaggttggtgtctcaatgggtggccctttatggctccatgctacacactgaccctgtagcaacgtcattcctccagaaattatcggatctggttggccgagatacccgactgtcaaatctgctgcgcgagcaatggccagaacgtcgacgatgtcacaggctggagaatggatgtgggaatgcctctccccaaatgaaggcacgaaatttacccgtgtggctccccaatcaggatgaaccattgcctggctccagttgcgccatacaggtgggtgataaagatgccattgggctccagcccgacgctcggggggtggcaacgtcactgggtctgaatgagcgtcttttcgtagtgaacccccaggaagtacacgaactcattccccatcctgatcagcttgggccaaccgtggggagcgccgaagggctggatctcgtgtcagcgaaggacctagcgggccagttgaccgatcatgattggtctctcttcaatagcattcaccaagtagagctaatacattatgtgctgggcccacagcacctacgcgatgtcaccacagccaacttagaacggtttatgagaagatttaatgagttacagtattgggtggcaaccgaactctgcctatgtcccgtgccggggcctcgggctcagctgctgaggaagttcatcaaacttgcggcacacaattctgctattagcagattggctcatacgtgggaacgcctacctcataaggtgcgaaagctctattccgccctcgagcgactacttgacccttcctggaatcacagagtgtacagactggccctggcaaagctgtccccccccgtgatccccttcatgcctcttcttctgaaggatatgaccttcatacatgagggaaatcacacattggtggagaacctgatcaacttcgagaagatgagaatgatggctcgcgctgcacggatgttgcatcactgccgctctcataacccagtcccgttatcgcccttgcgaagccgtgtctctcatttgcacgaggactcacaggttgctcggatctccacatgctctgaacagtccttaagtacacgcagcccagcctccacttgggcttacgtgcagcaactcaaggtgatcgataaccagcgggagctgagcagattgtcgcgagaactggagccctag

SEQ ID NO: 333372 - DNA, 2607 bp, Artificial Sequence
  derived and/or modified sequence
atggcccagcgggaggagatcaagaggcccctgtgggagaccgtgggctggccaggagagagctgctggcaggtgggcctggccgtggaggacagccctgccctgggcgccccccgggtgggcgccctgcctgatgtggtgcctgagggcaccctgctgaacatggtgctgcggaggatgcaccggcccaggagctgcagctaccagctgctgctggagcaccagaggcccagctgcatccagggcctgcgctggacccccctgaccaacagcgaggagagcctggacttcagcgagagcctggagcaggccagcacagagcgggtgctgcgggccggccggcagctgcaccgccacctgctggccacctgccccaacctgatccgggacaggaagtaccacctgcggctgtaccggcagtgctgcagcggccgggagctggtggatggcatcctggccctgggcctgggcgtgcacagccgcagccaggtggtgggcatctgccaggtgctgctggatgaaggagccctgtgccacgtgaagcatgactgggccttccaggacagagatgcccagttctaccgcttccctggccctgagcctgagcctgtgaggacccatgagatggaggaggagctggccgaggccgtggccctgctgagccagaggggcccagatgccctgctgactgtggccctgaggaagcccccaggccagaggacagatgaggagctggacctgatctttgaggagctgctgcacatcaaggctgtggcccacctgagcaacagcgtgaagcgggagctggccgctgtgctgctgtttgagccccacagcaaggccggcaccgtgctcttcagccagggcgacaagggcacctcctggtacatcatctggaagggctctgtgaatgtggtgacccacggcaagggcctggtgaccaccctgcatgaaggagatgactttggccagctggccctggtgaatgatgccccccgggccgccaccatcatcctgcgggaggacaactgccacttcctgcgggtggacaagcaggacttcaaccgcatcatcaaggatgtggaggccaagaccatgaggctggaggagcacggcaaggtggtgctggtgctggagcgggccagccagggcgccggccccagccggccccccaccccaggaagaaaccgctacacagtgatgagcggcaccccagagaagatcctggagctgctgctggaggccatgggccctgacagcagcgcccatgaccccacagagaccttcctgagtgacttcctgctgacccacagggtcttcatgcccagcgcccagctgtgtgccgccctgctgcaccacttccacgtggagcctgctgggggcagcgagcaggagaggagcacctacgtgtgcaacaagaggcagcagatcctgcggctggtgtcccagtgggtggccctgtatggctccatgctgcacacagatcctgtggccaccagcttcctgcagaagctgagtgacctggtgggccgggacacccggctgagcaacctgctgcgggagcagtggccagagcggcggcgctgccaccggctggagaatggctgtggaaatgccagcccccagatgaaggccaggaacctgcctgtgtggctgcccaaccaggatgagcccctgcccggcagcagctgtgccatccaggtgggggacaaggatgccatcggcctgcagccagatgcccggggcgtggccaccagcctgggcctgaatgaaagactctttgtggtgaacccccaggaggtgcatgagctgatcccccacccagaccagctgggccccaccgtgggcagcgctgagggcctggacctggtgtctgccaaggacctggccggccagctgacagaccatgactggagcctcttcaacagcatccaccaggtggagctgatccactacgtgctgggcccccagcacctgagagatgtgaccacagccaacctggagcgcttcatgaggcgcttcaatgagctgcagtactgggtggccacagagctgtgcctgtgccctgtgcccggcccccgggcccagctgctgaggaagttcatcaagctggccgcccacaacagcgccatcagccggctggcccacacctgggagcggctgccccacaaggtgaggaagctgtacagcgccctggagcggctgctggaccccagctggaaccaccgggtgtaccgcctggccctggccaagctgagcccccctgtgatccccttcatgcccctgctgctgaaggacatgaccttcatccacgagggcaaccacaccctggtggagaacctgatcaactttgagaagatgaggatgatggcccgggccgccaggatgctgcaccactgccgcagccacaaccctgtgcccctgagccccctgcggagccgggtgagccacctgcacgaggacagccaggtggcccgcatcagcacctgcagcgagcagagcctgagcaccaggagccctgccagcacctgggcctacgtgcagcagctgaaggtgattgacaaccagcgggagctgagccggctgagccgggagctggagccctag

SEQ ID NO: 333373 - DNA, 2607 bp, Artificial Sequence
  derived and/or modified sequence
atggcccagcgggaggagatcaagcggcccctgtgggagaccgtggggtggcccggggagtcatgttggcaggtcggactcgccgtcgaagacagccccgccctgggcgcccctagggttggagctctgcctgatgtggttcccgaagggactcttctgaatatggttctgcgcagaatgcatcggcccagaagttgttcttaccagctactcctggagcaccaacgcccttcttgcattcagggtctgaggtggacgccactgacaaattccgaggagtcattggactttagtgagtcactggagcaggctagcactgagagggtgcttcgcgcgggccgccagctccacagacatctacttgccacgtgtcccaacttaatcagagatcgtaagtatcatttgcggttgtataggcagtgctgtagtgggcgcgaactcgtcgacggaatccttgcactgggtctcggcgttcacagtcgctcccaggtggtgggaatttgtcaggttttactggatgaaggggccctgtgccatgtaaaacatgattgggcttttcaggatagagatgctcagttttatcggtttcccggacccgagccagagccagtacgaacgcatgagatggaagaagagctcgcagaggccgtggcacttctgagccagaggggtccagacgctctgctgacagtcgcactgagaaagccacctgggcaaaggactgatgaagaacttgatctcattttcgaggagcttctgcacattaaggctgtggcccatctgtcaaattctgtgaaaagggagttggccgccgttcttctcttcgagccccactctaaagccggaacggtgcttttttctcagggggataaaggcacatcctggtacatcatatggaaagggtcggtgaacgtggtgacgcatggtaagggactagtaaccaccctccacgagggagacgattttggacagcttgccctagtgaacgacgctccgcgcgccgccaccatcattttgcgcgaagacaattgccatttcctgagggtcgacaagcaggactttaacagaatcatcaaagatgtcgaagcaaaaacgatgaggctggaggagcacggaaaagtggtgttagttttagagagggcttcacagggagccggtcctagtcggccgcctactccgggcagaaaccggtataccgtcatgtctgggacaccagagaagatcctcgagctgctgctggaagcgatggggccagacagcagtgcgcacgacccaaccgaaacctttctgtccgacttcctactaacccatcgggtttttatgccatctgcgcagctctgtgcggctctcctccatcattttcacgttgagccagccggcggcagtgaacaggaacgcagcacctacgtgtgcaacaaaagacagcaaatcctcaggctggtgtcacaatgggtcgcactctacggttcaatgcttcacaccgacccggttgctacctcatttcttcaaaagctaagtgacctcgtcggaagagatactaggctcagcaacctgctcagagagcagtggcccgaaagaagaaggtgccaccgcctcgaaaacgggtgcggtaatgcttcaccccagatgaaagcccggaatctaccggtttggcttcctaaccaggacgagccacttccagggtcctcgtgtgcaatccaggtgggggacaaagacgccatcggattacagcctgacgctcggggcgtggccacaagcctgggcttgaacgagaggctgtttgtggttaacccacaagaggttcacgaacttataccgcatcccgaccagctcggtcccaccgtgggcagcgccgaaggcctggacctggtttcagctaaggacctcgctggacagctaactgaccacgattggtccctgttcaactcaatacaccaagtggaactcattcactatgtgctggggccccagcacctgcgcgatgtgactactgccaacctggaacgattcatgcgtaggtttaacgaactgcagtactgggtggctactgaactgtgtctctgcccagttcccgggcctagagcccagctgctgcgcaagttcattaaacttgccgcacacaactctgcgattagccggctggcccacacctgggagcgcctgccacacaaggtgcggaaactttatagtgctcttgagcgcctgttggatccatcttggaaccaccgcgtgtaccggctcgccctggcaaagctctcgcctcccgtgatccctttcatgcccctgctattaaaggacatgacgttcatccatgaagggaatcatactctggtcgagaacttaattaacttcgaaaagatgagaatgatggctagggctgcccgaatgctccatcactgtcggtcccacaaccctgtgcctttgagccctttgcgtagccgcgtgtcacatttgcatgaggactcccaggttgcccgaatatcaacatgtagtgaacagtctctgtccactaggagccctgcatccacctgggcttacgtccagcagctgaaagtgatcgacaatcagagggagctatcccgcctttctcgggagcttgaaccttag

SEQ ID NO: 333374 - DNA, 2607 bp, Artificial Sequence
  derived and/or modified sequence
atggcccagagggaggaaatcaaaagacctctgtgggagaccgtaggctggcccggagagtcatgctggcaagtgggacttgccgtggaggattctcctgcgctaggcgctccaagggtcggggcactgcccgacgtggtgcctgaaggcacattactcaatatggttctgcggcgtatgcacaggccacgttcttgttcctatcagctcctgctggagcaccagaggcctagttgtattcagggacttagatggacacccctgactaactccgaagagagtctcgacttctccgaatcactggagcaggcctcaactgaacgcgtcctgcgcgcaggcaggcagctccacaggcatttgcttgcaacgtgtcctaaccttattagagacagaaaataccacttgagattgtatcgtcagtgttgcagtggaagggagctcgtggatggaattcttgccctgggcttgggcgtccattctcgctctcaggtggtcggcatctgccaggtcctcctggacgaaggagctctctgccacgtcaaacatgactgggcttttcaggaccgcgatgcccaattttaccgattccccggacctgaacctgaacccgtgcgaacccacgagatggaagaagagctggccgaggccgttgcgctactatcacagagaggtccggacgctctgctcaccgtggctcttaggaagcctcctggacagagaaccgacgaggagctggacctgattttcgaagagctccttcatataaaggccgtggcccacttgagcaatagcgtcaagcgagagctagccgctgtcctcttatttgaaccacattctaaggccggtaccgtgctcttcagtcagggagataagggaacctcctggtacatcatctggaaaggcagcgtgaacgtggtcacccatggcaaaggactggtgacgactttgcacgagggggacgatttcggtcagttggccttagttaacgacgctccacgcgctgccacaatcatcctgagagaggataattgccacttcctgagggtcgataagcaagattttaaccgaattatcaaagatgtggaggctaaaaccatgaggctggaggagcacggcaaggtcgtccttgtgctggagcgcgcttcccagggggctggccctagtcggccaccaacacctggcaggaacaggtataccgtaatgagtggaactcccgaaaagatactggagcttctcctcgaagctatgggtcctgattcctctgcccacgaccccacagaaaccttcttaagcgactttctgctgactcacagggtgttcatgccctctgctcagctgtgcgcagctctattgcaccactttcacgtagaaccagccggagggtccgaacaggagagatccacttatgtctgtaacaagcggcagcagatactccggctggtaagccagtgggttgccttgtatggtagcatgcttcacactgatccagtggcaactagtttcctgcagaagctttctgatctggtcggtagagatacacggctgtcgaatctactccgggagcaatggcctgagcgcagaaggtgccacaggctggaaaatggctgtggcaacgcaagccctcaaatgaaggccaggaacctccccgtgtggctcccgaaccaggacgagcctcttcccggttcctcctgtgccatccaggtgggggacaaagacgcgattggcttacagccagatgccagaggcgtggcgacttccttggggctgaacgagcgcctgtttgtggtcaacccacaggaggtgcatgaattaattccccatcctgaccaattagggcctactgttgggtcagctgaaggactcgatctcgtctcagccaaggacctcgctggacagcttactgaccatgactggagtttattcaactctatccaccaggtggaactgatccactacgtcttgggaccacagcacctaagggacgtcacaacagccaatcttgagagattcatgagaagattcaacgagctgcaatactgggtggctacagaattgtgtctttgtcctgtccctggtccaagagcccaattgttgagaaagttcattaagttagctgctcataacagcgcaattagccgccttgctcacacctgggagcgactccctcataaagttcgaaaactgtatagcgccctggagcggctgttggatcccagctggaaccatcgtgtctatcgcctcgcactcgcaaagttgagcccaccagtgattcctttcatgcctctgctgcttaaagacatgacgtttatacacgaaggaaaccacactcttgttgaaaatctcatcaatttcgaaaaaatgcggatgatggctcgggcagcccgtatgctgcatcactgtcggtcacacaatcccgtccctctgagccccctgcgcagcagggttagccacctccatgaggactcccaagtagcacgcatttctacatgcagcgaacagtccctttcaactcgttcgcctgccagcacttgggcttacgttcagcagttaaaggtcatagacaaccagagagaactgtccaggctgagtagggagcttgagccatag

SEQ ID NO: 333375 - DNA, 2776 bp, Artificial Sequence
  derived and/or modified sequence
tcctttaggagctgccggtggagagtgagtgctggtcctgtggaggagggagcaagccccgtggtccggagtgcatttccatggatggcttcagagctggccaggatggacagtactccaggcagtgggaaccgcacgtgtgatggcgcagagggaagaaataaagcggccgctttgggaaactgtgggctggccaggtgagagctgctggcaggtgggcctggctgtggaggatagcccagctctgggagcaccgcgggtgggagccctccctgacgtggtgccggaggggacactactcaacatggtgttgagaaggatgcaccggccccgaagctgctcctaccagctgctgctggagcaccagcgtccgagctgcatccaggggctgcgctggacaccactcaccaacagcgaggagtccctggatttcagcgagagcctggagcaggcctccacagagcgggtgctcagggctgggaggcagctgcatcggcatctgctggccacctgcccaaacctcatccgagaccggaagtaccaccttaggctctatcggcagtgctgctctggccgggagctggtggatgggatcttggccctgggacttggggtccattcccggagccaagttgtgggaatctgccaggtgctgctggatgaaggtgccctctgccatgtgaaacacgactgggccttccaggaccgagatgcccaattctaccggttccccgggcccgagcccgagcccgtgagaactcatgagatggaggaggagttggccgaagctgtggccctgctctcccagcgggggcctgacgccctgctcactgtggcacttcgaaagcccccaggtcagcgcacggatgaagagctggacctcatctttgaggagctgctgcacatcaaggctgtggcccacctctccaactcggtgaagcgagaattagcggctgttctgctctttgaaccacacagcaaggcagggaccgtgttgttcagccagggggacaagggcacttcgtggtacattatctggaagggatctgtcaacgtggtgacccatggcaaggggctggtgaccaccctgcatgagggagatgattttggacagctggctctggtgaatgatgcaccccgggcagccaccatcatcctgcgagaagacaactgtcatttcctgcgtgtggacaagcaggacttcaaccgtatcatcaaggatgtggaggcaaagaccatgcggctggaagaacatggcaaagtggtgctggtgctggagagagcctctcagggcgccggcccttcccgacccccaaccccaggcaggaaccggtatacagtgatgtctggcaccccagagaagatcctagagcttctgttggaggccatgggaccagattccagtgctcatgacccaacagagacattcctcagcgacttcctcctgacccacagggtcttcatgcccagcgcccaactctgcgctgcccttctgcaccacttccatgtggagcctgcgggtggcagcgagcaggagcgcagcacctacgtctgcaacaagaggcagcagatcttgcggctggtcagccagtgggtggccctgtatggctccatgctccacactgaccctgtggccaccagcttcctccagaaactctcagacctggtgggcagggacacccgactcagcaacctgctgagggagcagtggccagagaggcggcgatgccacaggttggagaatggctgtgggaatgcatctcctcagatgaaggcccggaacttgcctgtttggctccccaaccaggacgagccccttcctggcagcagctgtgccatccaagttggggataaagatgccattggcctgcagccagatgcccgtggtgtggccacatctctggggctcaatgagcgtctctttgttgtcaacccacaggaagtgcatgagctgatcccacaccctgaccagctggggcccactgtgggctctgctgaggggctggacctggtgagtgccaaggacctggcaggccagctgacggaccacgactggagcctcttcaacagtatccaccaggtggagctgatccactatgtgctgggcccccagcatctgcgggatgtcaccaccgccaacctggagcgcttcatgcgccgcttcaatgagctgcagtactgggtggccaccgagctgtgtctctgccccgtgcccggcccccgggcccagctgctcaggaagttcattaagctggcggcccacaactcggccatcagccgcctagcccacacctgggagcggctgcctcacaaagtccggaagctgtactccgccctcgagaggctgctggatccctcatggaaccaccgggtataccgactggccctcgccaagctctcccctcctgtcatccccttcatgccccttcttctcaaagacatgaccttcattcatgagggaaaccacacactagtggagaatctcatcaactttgagaagatgagaatgatggccagagccgcgcggatgctgcaccactgccgaagccacaaccctgtgcctctctcaccactcagaagccgagtttcccacctccacgaggacagccaggtggcgaggatttccacatgctcggagcagtccctgagcacccggagtccagccagcacctgggcttatgtccagcagctgaaggtcattgacaaccagcgggaactctcccgcctctcccgagagctggagccatgaggaggggctgggactggagctggagca

SEQ ID NO: 333376 - DNA, 672 bp, Artificial Sequence
  derived and/or modified sequence
atggtgctgagaagaatgcacagacccagaagctgcagctaccagctgctgctggagcaccagagacccagctgcatccagggcctgagatggacccccctgaccaacagcgaggagagcctggacttcagcgagagcctggagcaggccagcaccgagagagtgctgagagccggcagacagctgcacagacacctgctggccacctgccccaacctgatcagagacagaaagtaccacctgagactgtacagacagtgctgcagcggcagagagctggtggacggcatcctggccctgggcctgggcgtgcacagcagaagccaggtggtgggcatctgccaggtgctgctggacgagggcgccctgtgccacgtgaagcacgactgggccttccaggacagagacgcccagttctacagattccccggccccgagcccgagcccgtgagaacccacgagatggaggaggagctggccgaggccgtggccctgctgagccagagaggccccgacgccctgctgaccgtggccctgagaaagccccccggccagagaaccgacgaggagctggacctgatcttcgaggagctgctgcacatcaaggccgtggcccacctgagcaacagcgtgaagagagagctggccgccgtgctgctgttcgagccctag

SEQ ID NO: 333377 - DNA, 672 bp, Artificial Sequence
  derived and/or modified sequence
atggtgttgcgacgcatgcaccgtccacggagctgttcttaccagctcctactggaacatcaacgaccctcctgtatacagggacttcgatggacacccctgaccaatagtgaagaaagcctcgatttctccgagtccctagaacaagcaagtacagaacgggttctcagggctggccgccagctgcatcgtcacctattggccacttgtcctaatttaatcagagacagaaagtaccatctgcgtctataccggcaatgctgctccggccgagagttagtcgatggtatcttggccctaggactgggagtacattcacgaagccaggtggtcggaatttgtcaggtgctgctggacgagggggcgctttgtcacgttaaacacgactgggcgtttcaggaccgggacgcccagttctaccggtttccagggcctgagcccgagccggtcagaacgcacgagatggaagaggagctggccgaggcagtggcactcctgtcccaacggggccctgatgctctactaacagtagccctgcgcaagccacccggacagaggacagacgaggaactcgacctgatcttcgaggaactactgcacatcaaagccgtagcccacctgagcaattccgtcaaacgggaactcgccgcggtccttctatttgaaccctag

SEQ ID NO: 333378 - DNA, 672 bp, Artificial Sequence
  derived and/or modified sequence
atggtgctgcggaggatgcaccggcccaggagctgcagctaccagctgctgctggagcaccagaggcccagctgcatccagggcctgcgctggacccccctgaccaacagcgaggagagcctggacttcagcgagagcctggagcaggccagcacagagcgggtgctgcgggccggccggcagctgcaccgccacctgctggccacctgccccaacctgatccgggacaggaagtaccacctgcggctgtaccggcagtgctgcagcggccgggagctggtggatggcatcctggccctgggcctgggcgtgcacagccgcagccaggtggtgggcatctgccaggtgctgctggatgaaggagccctgtgccacgtgaagcatgactgggccttccaggacagagatgcccagttctaccgcttccctggccctgagcctgagcctgtgaggacccatgagatggaggaggagctggccgaggccgtggccctgctgagccagaggggcccagatgccctgctgactgtggccctgaggaagcccccaggccagaggacagatgaggagctggacctgatctttgaggagctgctgcacatcaaggctgtggcccacctgagcaacagcgtgaagcgggagctggccgctgtgctgctgtttgagccctag

SEQ ID NO: 333379 - DNA, 672 bp, Artificial Sequence
  derived and/or modified sequence
atggtgctgcggcggatgcaccggccccggagctgcagctaccagctgttgctggaacaccagcgcccgagctgtatccaggggttgaggtggacacccctgaccaattcggaggagtctctggattttagcgagtctctcgaacaagcctctactgaacgagtgctgagagcagggcgtcaattgcaccggcacctgcttgctacatgtcctaatctgatcagggacagaaagtaccaccttcgtttgtatcgccagtgttgtagtggtagagagcttgtggacggaattttggcattaggcctcggtgtgcatagcagatcccaggttgtcggcatatgtcaggtgttgctggatgaaggtgccctgtgtcacgttaaacatgactgggccttccaggacagagatgcccaattttaccggtttcccggtccagaacccgaacctgtcaggactcatgaaatggaagaggagttggccgaggctgtggccttgctcagccagcgaggccccgacgctctactcaccgtggcgttgcgcaagccacccggacaaagaaccgatgaggagctcgatctgatctttgaggagctgctgcacatcaaagcagtggctcatcttagcaatagtgtgaaacgcgaactcgccgcagttctgttgttcgagccctag

SEQ ID NO: 333380 - DNA, 672 bp, Artificial Sequence
  derived and/or modified sequence
atggtacttcgacgaatgcacagacccaggtcttgctcctaccaactcctgttggaacatcagcggcctagctgtattcaaggtttgagatggacacccctgacaaactctgaggaaagtttggacttcagtgagtcattggaacaggcttccaccgaacgcgtactgagagccggtagacagctgcatcggcatcttctcgctacctgccccaatttgatccgcgatcgcaagtaccatctccgcctatatcgacagtgttgctctgggagggagcttgttgatggaattctggctctcggactgggggtccacagccggagtcaggtagtgggaatctgtcaagtgctgctggacgagggggctttgtgtcatgttaagcacgactgggcattccaggatagagatgctcagttttacaggtttcctgggcctgagcctgaacccgtgaggactcatgaaatggaggaagagttggcggaggctgtagctctgctgagccaaagggggcctgatgcactgctgactgtcgcactgcgcaagccgcctggccagcggaccgacgaggaactggacttgatcttcgaggagcttcttcacattaaagctgtcgcccatctgtctaacagtgtgaagagagagctcgccgctgtgttgctctttgagccgtag

SEQ ID NO: 333381 - DNA, 855 bp, Artificial Sequence
  derived and/or modified sequence
ggagaagggtttaagccgaagctgcatttctgggagacctagtgaatctatagcttcatactgggaggtgggctggccaggtgagagctgctggcaggtgggcctggctgtggaggatagcccagctctgggagcaccgcgggtgggagccctccctgacgtggtgccggaggggacactactcaacatggtgttgagaaggatgcaccggccccgaagctgctcctaccagctgctgctggagcaccagcgtccgagctgcatccaggggctgcgctggacaccactcaccaacagcgaggagtccctggatttcagcgagagcctggagcaggcctccacagagcgggtgctcagggctgggaggcagctgcatcggcatctgctggccacctgcccaaacctcatccgagaccggaagtaccaccttaggctctatcggcagtgctgctctggccgggagctggtggatgggatcttggccctgggacttggggtccattcccggagccaagttgtgggaatctgccaggtgctgctggatgaaggtgccctctgccatgtgaaacacgactgggccttccaggaccgagatgcccaattctaccggttccccgggcccgagcccgagcccgtgagaactcatgagatggaggaggagttggccgaagctgtggccctgctctcccagcgggggcctgacgccctgctcactgtggcacttcgaaagcccccaggtcagcgcacggatgaagagctggacctcatctttgaggagctgctgcacatcaaggctgtggcccacctctccaactcggtgaagcgagaattagcggctgttctgctctttgaacc

SEQ ID NO: 333382 - DNA, 648 bp, Artificial Sequence
  derived and/or modified sequence
agtccagaggactctaaggaagtagttctgcctggggcagttgtactgtggcccagccgccccagtcgtgtcccatggctgtccactttcctccccgtgtcacaggtgggctggccaggtgagagctgctggcaggtgggcctggctgtggaggatagcccagctctgggagcaccgcgggtgggagccctccctgacgtggtgccggaggggacactactcaacatggtgttgagaaggatgcaccggccccgaagctgctcctaccagctgctgctggagcaccagcgtccgagctgcatccaggggctgcgctggacaccactcaccaacagcgaggagtccctggatttcagcgagagcctggagcaggcctccacagagcgggtgctcagggctgggaggcagctgcatcggcatctgctggccacctgcccaaacctcatccgagaccggaagtaccaccttaggctctatcggcagtgctgctctggccgggagctggtggatgggatcttggccctgggacttggggtccattcccggagccaagttgtgggaatctgccaggtgctgctggatgaaggtgccctctgccatgtgaaacacgactgggccttccaggaccgagatgcccaattctaccgg

SEQ ID NO: 333383 - protein, 314 aa, Artificial Sequence
  derived and/or modified sequence
MLGEGLGVKETPQQKYQRLLHEVQELTTEVEKIKTTVKESATEEKLTPVLLAKQLAALKQQLVASHLEKLLGPDAAINLTDPDGALAKRLLLQLEATKNSKGGSGGKTTGTPPDSSLVTYELHSRPEQDKFSQAAKVAELEKRLTELETAVRCDQDAQNPLSAGLQGACLMETVELLQAKVSALDLAVLDQVEARLQSVLGKVNEIAKHKASVEDADTQSKVHQLYETIQRWSPIASTLPELVQRLVTIKQLHEQAMQFGQLLTHLDTTQQMIANSLKDNTTLLTQVQTTMRENLATVEGNFASIDERMKKLGK

SEQ ID NO: 333384 - DNA, 945 bp, Artificial Sequence
  derived and/or modified sequence
atgctcggggagggcctgggagtgaaggaaacaccccagcagaaatatcaacggttgctgcacgaagtgcaagagctcacaaccgaagtggaaaaaatcaaaactaccgtgaaggagtccgccactgaggaaaagctgacaccagttctcctcgccaaacagctcgccgcattaaagcaacaactggtggcctctcacctggaaaagcttctcggccctgacgcggccattaatctgaccgatcccgatggcgctctggctaagcgcttactgttacagctggaggccactaaaaactcaaagggtggaagcggcggaaaaaccactggtaccccccctgatagcagtctcgtgacatacgaattgcatagcaggcctgagcaggataagttctcccaggccgccaaggtggctgaattagaaaaaagactgaccgagcttgagaccgccgtccgctgcgatcaggatgcgcagaaccccctctccgctggactccagggagcgtgtcttatggaaacagtcgagctcctccaggccaaggtgtcagccctggatctggccgttttggatcaggtagaggctcgactccagagcgtgctcggcaaggtaaacgagatcgccaaacacaaggcttctgttgaggatgcagatacccaatcaaaagtacatcagttatatgagacaatccagaggtggagtccgattgcttcaacactccctgagttagtccaacgcctggtgaccattaaacagctccacgagcaggccatgcagtttggccagctgctgactcatctggacacgacccagcagatgatcgcgaattccctcaaagacaatacgaccctcctgacacaggtgcaaaccacgatgcgtgagaacctcgcaacagtcgagggaaacttcgcatctattgatgaaagaatgaagaaacttggaaaatag

SEQ ID NO: 333385 - DNA, 945 bp, Artificial Sequence
  derived and/or modified sequence
atgctgggggagggcctgggcgtgaaggagaccccccagcagaagtaccagaggctgctgcacgaggtgcaggagctgaccacagaggtggagaagatcaagaccaccgtgaaggagagcgccacagaggagaagctgacccctgtgctgctggccaagcagctggccgccctgaagcagcagctggtggccagccacctggagaagctgctgggcccagatgctgccatcaacctgacagatcctgatggagccctggccaagaggctgctgctgcagctggaggccaccaagaacagcaaaggaggcagcggcggcaagaccaccggcaccccaccagacagcagcctggtgacctatgagctgcacagcaggcctgagcaggacaagttcagccaggccgccaaggtggccgagctggagaagaggctgacagagctggagacagctgtgcgctgtgaccaggatgcccagaaccccctgtctgctggcctgcagggcgcctgcctgatggagaccgtggagctgctgcaggccaaggtgtctgccctggacctggccgtgctggaccaggtggaggcccggctgcagagcgtgctgggcaaggtgaatgagatcgccaagcacaaggcctctgtggaggatgctgacacccagagcaaggtgcaccagctgtatgagaccatccagcgctggagccccatcgccagcaccctgcctgagctggtgcagaggctggtgaccatcaagcagctgcacgagcaggccatgcagtttggccagctgctgacccacctggacaccacccagcagatgattgccaacagcctgaaggacaacaccaccctgctgacccaggtgcagaccaccatgagggagaacctggccaccgtggagggcaactttgccagcattgatgagaggatgaagaagctgggcaagtag

SEQ ID NO: 333386 - DNA, 945 bp, Artificial Sequence
  derived and/or modified sequence
atgctgggcgagggcctgggcgtgaaggagaccccccagcagaagtaccagcgattgctgcatgaagtgcaagaactaacaacagaagtggagaagatcaagacaactgtcaaagagagcgcaactgaggagaaactcactccagtgcttttagctaagcaattggcagcgctgaaacagcagttggtcgcaagtcacctggagaagctgctgggccccgacgccgccatcaatctaactgacccggacggcgccctcgcaaagcggctgctcctccaactggaggctacgaagaacagcaaaggcggaagcggcggaaaaaccacaggaacccccccagatagcagcctggtcacttatgagcttcactcccgaccagaacaagacaagttttcccaagctgccaaggtagccgagcttgaaaagaggcttacagaattagagacggccgtgagatgcgaccaggatgcccagaatcctttgtccgcagggctgcaaggcgcctgcttaatggagaccgtggagttattgcaagcaaaggtaagtgctctggacctggcggttctggaccaggtggaagccagactccagagcgtactgggcaaggtgaacgaaatagcaaaacataaggcaagcgtcgaggacgcagacacacaaagtaaggtgcaccagttgtacgaaacaatccagaggtggtcacccattgcttctactctgccagaactggtccagagactggtgacaattaagcaattacatgagcaggcaatgcagtttgggcagctgctcacgcacctggacaccacccagcagatgatcgcgaatagtctgaaggacaacacaactctgctgactcaagtccagaccacaatgcgggaaaacctggccacggtggagggaaatttcgcctcgatagatgaacggatgaagaaactgggcaaatag

SEQ ID NO: 333387 - DNA, 945 bp, Artificial Sequence
  derived and/or modified sequence
atgctgggcgaaggacttggcgtgaaagaaacccctcagcaaaagtatcagcgcctcttgcacgaagtgcaggagcttactactgaggttgagaagatcaagaccacagttaaagaatccgctacagaggagaaacttaccccggtgttgctcgcgaaacagttggctgccttaaagcagcaactggtggcaagccacttagagaaactgctcgggcctgatgccgctatcaatctgacagatcccgacggcgctctcgccaaaagactcctgttgcagctggaagctactaaaaactctaaaggcggttctggaggtaaaacaacaggtacgccaccagattcttctttggtgacatatgaactccactctagacccgaacaagataaattttcccaggccgctaaagtggctgagctggagaagcgcttgacagaattagaaacggctgttaggtgcgatcaggacgcccagaacccgttaagcgcgggtctgcaaggggcatgtcttatggagaccgttgagctcctacaggccaaggtaagcgctctggatctggcagttctcgatcaggtggaagctcgccttcagtccgttctgggaaaggtaaatgaaatcgcaaagcacaaagcttctgtggaggacgctgatacacagtcaaaagtccaccagctatatgaaaccatacagaggtggtcacctatcgcttcaacgctgcccgaattggtgcagcgcctggttacgattaagcaattgcacgagcaggccatgcagttcggtcagctcctcacacatttggacactactcagcagatgatcgctaattcgctcaaagataataccacactcctgacccaggtgcagacgactatgcgcgagaacctcgcaactgtggagggcaactttgcatctatcgacgaaaggatgaagaaattgggcaagtag

SEQ ID NO: 333388 - DNA, 945 bp, Artificial Sequence
  derived and/or modified sequence
atgctgggcgagggcctgggcgtgaaggagaccccccagcagaagtaccagagactgctgcacgaggtgcaggagctgaccaccgaggtggagaagatcaagaccaccgtgaaggagagcgccaccgaggagaagctgacccccgtgctgctggccaagcagctggccgccctgaagcagcagctggtggccagccacctggagaagctgctgggccccgacgccgccatcaacctgaccgaccccgacggcgccctggccaagagactgctgctgcagctggaggccaccaagaacagcaagggcggcagcggcggcaagaccaccggcaccccccccgacagcagcctggtgacctacgagctgcacagcagacccgagcaggacaagttcagccaggccgccaaggtggccgagctggagaagagactgaccgagctggagaccgccgtgagatgcgaccaggacgcccagaaccccctgagcgccggcctgcagggcgcctgcctgatggagaccgtggagctgctgcaggccaaggtgagcgccctggacctggccgtgctggaccaggtggaggccagactgcagagcgtgctgggcaaggtgaacgagatcgccaagcacaaggccagcgtggaggacgccgacacccagagcaaggtgcaccagctgtacgagaccatccagagatggagccccatcgccagcaccctgcccgagctggtgcagagactggtgaccatcaagcagctgcacgagcaggccatgcagttcggccagctgctgacccacctggacaccacccagcagatgatcgccaacagcctgaaggacaacaccaccctgctgacccaggtgcagaccaccatgagagagaacctggccaccgtggagggcaacttcgccagcatcgacgagagaatgaagaagctgggcaagtag

SEQ ID NO: 333389 - protein, 533 aa, Artificial Sequence
  derived and/or modified sequence
MSSCVSSQPSSNRAAPQDELGGRGSSSSESQKPCEALRGLSSLSIHLGMESFIVVTECEPGCAVDLGLARDRPLEADGQEVPLDTSGSQARPHLSGRKLSLQERSQGGLAAGGSLDMNGRCICPSLPYSPVSSPQSSPRLPRRPTVESHHVSITGMQDCVQLNQYTLKDEIGKGSYGVVKLAYNENDNTYYAMKVLSKKKLIRQAGFPRRPPPRGTRPAPGGCIQPRGPIEQVYQEIAILKKLDHPNVVKLVEVLDDPNEDHLYMVFELVNQGPVMEVPTLKPLSEDQARFYFQDLIKGIEYLHYQKIIHRDIKPSNLLVGEDGHIKIADFGVSNEFKGSDALLSNTVGTPAFMAPESLSETRKIFSGKALDVWAMGVTLYCFVFGQCPFMDERIMCLHSKIKSQALEFPDQPDIAEDLKDLITRMLDKNPESRIVVPEIKLHPWVTRHGAEPLPSEDENCTLVEVTEEEVENSVKHIPSLATVILVKTMIRKRSFGNPFEGSRREERSLSAPGNLLTKKPTRECESLSELKT

SEQ ID NO: 333390 - protein, 49 aa, Artificial Sequence
  derived and/or modified sequence
MSSCVSSQPSSNRAAPQDELGGRGSSSSESQKPCEALRGLSSLSIHLGM

SEQ ID NO: 333391 - protein, 125 aa, Artificial Sequence
  derived and/or modified sequence
MSSCVSSQPSSNRAAPQDELGGRGSSSSESQKPCEALRGLSSLSIHLGMESFIVVTECEPGCAVDLGLARDRPLEADGQEVPLDTSGSQARPHLSGRKLSLQERSQGGLAAGGSLDMNGRCICPS

SEQ ID NO: 333392 - protein, 87 aa, Artificial Sequence
  derived and/or modified sequence
MSSCVSSQPSSNRAAPQDELGGRGSSSSESQKPCEALRGLSSLSIHLGMESFIVVTECEPGCAVDLGLARDRPLEADGQEVPLDTSG

SEQ ID NO: 333393 - protein, 307 aa, Artificial Sequence
  derived and/or modified sequence
MGDDRPFVCNAPGCGQRFTNEDHLAVHKHKHEMTLKFGPARTDSVIIADQTPTPTRFLKNCEEVGLFNELASSFEHEFKKAADEDEKKAAAGPLDMSLPSTPDIKIKEEEPVEVDSSPPDSPASSPCSPPLKEKSPAQPTPSTGGRRRRTVDEDPDERRQRFLERNRAAASRCRQKRKLWVSSLEKKAEELTSQNIQLSNEVTLLRNEVAQLKQLLLAHKDCPVTALQKKTQGYLESPKESSEPTGSPAPVIQHSSATAPSNGLSVRSAAEAVATSVLTQMASQRTELSMPIQSHVIMTPQSQSAGR

SEQ ID NO: 333394 - protein, 494 aa, Artificial Sequence
  derived and/or modified sequence
MGDDRPFVCNAPGCGQRFTNEDHLAVHKHKHEMTLKFGPARTDSVIIADQTPTPTRFLKNCEEVGLFNELASSFEHEFKKAADEDEKKARSRTVAKKLVAAAGPLDMSLPSTPDIKIKEEEPVEVDSSPPDSPASSPCSPPLKEKEVTPKPVLISTPTPTIVRPGSLPLHLGYDPLHPTLPSPTSVITQAPPSNRQMGSPTGSLPLVMHLANGQTMPVLPGPPVQMPSVISLARPVSMVPNIPGIPGPPVNSSGSISPSGHPIPSEAKMRLKATLTHQVSSINGGCGMVVGTASTMVTARPEQSQILIQHPDAPSPAQPQVSPAQPTPSTGGRRRRTVDEDPDERRQRFLERNRAAASRCRQKRKLWVSSLEKKAEELTSQNIQLSNEVTLLRNEVAQLKQLLLAHKDCPVTALQKKTQGYLESPKESSEPTGSPAPVIQHSSATAPSNGLSVRSAAEAVATSVLTQMASQRTELSMPIQSHVIMTPQSQSAGR

SEQ ID NO: 333395 - DNA, 1485 bp, Artificial Sequence
  derived and/or modified sequence
atgggcgatgatcgaccgttcgtgtgcaacgccccagggtgtgggcagaggtttaccaacgaagaccatctcgcagtgcacaagcataaacacgaaatgaccctgaagtttggcccagccaggaccgattcggttatcattgcagatcagacaccaacgcccactcgattcctgaagaactgcgaggaagttggcctcttcaacgagctggcaagcagctttgagcatgagtttaagaaggccgcggatgaagacgagaaaaaagcacgaagtcggactgtcgcaaaaaaactggtggccgctgccgggccccttgacatgtctttgccctcaaccccagacatcaaaatcaaggaggaagaacccgtggaagtcgattcctcacctcccgatagcccagcatcgtcaccctgctctccacccttgaaggaaaaggaggtcacccctaaaccagttcttatttccacacccacgcccacgatagtgcggccaggctcgctcccccttcaccttgggtatgaccccctccaccctacccttcccagccctacctccgtgattacccaggctcctccctccaacagacagatggggtctcctacaggaagcctccccctggtgatgcacctggctaacggccagacaatgcccgtgctgcctgggccaccagttcagatgccctccgtcatctcactcgcaaggcctgtatcaatggtgccgaatatacccggaatccctggccccccagtcaatagctctggcagcatctctccttcgggccacccaatcccctccgaagccaagatgaggctgaaagcaacgctgactcaccaggtgtcatctatcaatggtgggtgcgggatggttgtcggcactgccagtactatggtaacagcacgaccagagcagagccaaatccttatccagcaccccgacgccccatcccccgcccaaccccaggtgtctcctgcccaacccaccccaagcaccggcgggcggaggaggcgcaccgtggacgaggatcctgatgaaagacgtcagcgattccttgagaggaatcgtgctgctgccagcaggtgtcgacaaaaacgcaaactctgggtctcaagcctcgaaaagaaggcagaggaactgaccagtcagaatatccagctgagcaacgaagtcactctccttcgcaacgaagtagcccagcttaagcagctcctcctcgcacacaaggattgcccggtgaccgctctccaaaaaaaaacccagggttatttggaaagtcccaaagaaagcagtgaacctaccggcagtccagctcctgtaattcagcacagtagtgcaactgccccctcgaacggcttatcggttaggtccgccgccgaggcagtcgctacttctgttctcactcagatggcctctcagcgcactgaactcagcatgcccattcaaagccacgtgatcatgaccccccagtcacagtcggccgggcggtag

SEQ ID NO: 333396 - DNA, 1485 bp, Artificial Sequence
  derived and/or modified sequence
atgggggatgacaggcccttcgtctgcaacgccccaggctgtggtcagagattcactaatgaggatcacctcgcagtgcacaagcacaagcatgagatgacactcaaattcggtccagctcgtaccgatagtgtgattattgctgaccagacccccacacctactaggttccttaagaactgcgaagaagttggcctcttcaacgagcttgcctcatcttttgagcatgagttcaagaaagcagccgacgaagacgagaagaaggcgcgatctaggactgtggctaagaaactggtcgccgcagcaggaccactggatatgtccctgccgtctacacctgatattaaaatcaaagaggaagagcccgtcgaagtggattctagcccacccgactctcccgcatcatccccttgctctcccccattaaaggagaaggaagttactcccaagccagttctgatcagcacaccaacacctactatcgtgcgacccggatccctgcccctgcatctgggctacgaccctctccacccaaccctgccgtcaccaacctcagtcatcacgcaagcccctccaagcaatagacaaatgggttcccctaccggctctttgcctctggtgatgcatctcgccaacggacaaaccatgccagtgcttcctgggccccctgttcaaatgccttccgtgatctctcttgctcgtcccgtgtctatggtccctaacataccaggcatccccggtcctcccgtgaatagttctggctccatctctccatccgggcatccgattccatcagaggcgaaaatgaggctcaaggccacccttacacaccaggtttcctctataaacggcggttgtgggatggtcgtcgggaccgccagtactatggtgacagcccggcccgagcaatctcagatattaatccagcatccggatgcacctagccccgcccaaccccaagtcagtcctgctcagcccacaccttccacaggtgggaggcgccgccgcaccgtggacgaggatccagacgaaagaagacagcggttcctggagcggaacagggcggctgcaagtcgctgtagacagaagaggaagctgtgggtgtccagcctggaaaaaaaggccgaggagctaaccagtcaaaacattcagttatcaaatgaagtaacactgctaaggaacgaagtcgcccagctgaagcagctgctgctggcccacaaggactgtcccgtgacagctctgcagaagaagacgcaaggttacctcgaaagcccaaaggagtcttctgaacctacaggctcgccagctcctgtgattcagcactccagtgccacggctccttccaatggtctgtccgtgcggtccgcggccgaagcagtagccacctccgtgttgacgcagatggccagtcagcgaaccgaattgagcatgccaatccagagccacgtgatcatgacaccccaaagccaatccgcagggcgctag

SEQ ID NO: 333397 - DNA, 1485 bp, Artificial Sequence
  derived and/or modified sequence
atgggagatgaccggccctttgtgtgcaatgcccctggctgcggccagcgcttcaccaatgaagaccacctggccgtgcacaagcacaagcatgagatgaccctgaagtttggacctgccaggacagacagcgtcatcatcgctgaccagacccccacccccacccgcttcctgaagaactgtgaggaggtgggcctcttcaatgagctggccagcagctttgagcacgagttcaagaaggccgcagatgaagatgagaagaaggcccggagcaggacagtggccaagaagctggtggccgccgccggccccctggacatgagcctgcccagcaccccagacatcaagatcaaggaggaggagcctgtggaggtggacagcagccccccagacagccctgccagcagcccctgcagcccccccctgaaggagaaggaggtgacccccaagcctgtgctgatcagcacccccacccccaccatcgtgcggcccggcagcctgcccctgcacctgggctatgaccccctgcaccccaccctgcccagccccaccagcgtcatcacccaggccccacccagcaaccggcagatgggcagccccaccggcagcctgcccctggtgatgcacctggccaacggccagaccatgcctgtgctgcccggcccccctgtgcagatgcccagcgtcatcagcctggcccggcctgtgtccatggtgcccaacatccctggcatccctggcccccctgtgaacagcagcggcagcatcagccccagcggccaccccatccccagcgaggccaagatgaggctgaaggccaccctgacccaccaggtgagcagcatcaatggaggctgcggcatggtggtgggcacagccagcaccatggtgacagcccggcctgagcagagccagatcctgatccagcacccagatgcccccagccctgcccagccccaggtgtccccagcccagcccacccccagcactggaggaagaagaagaagaacagtggatgaggaccctgatgaaagacggcagcgcttcctggagaggaacagagctgctgccagccgctgccggcagaagaggaagctgtgggtgagcagcctggagaagaaggccgaggagctgaccagccagaacatccagctgagcaatgaggtgaccctgctgagaaatgaggtggcccagctgaagcagctgctgctggcccacaaggactgccctgtgacagccctgcagaagaagacccagggctacctggagagccccaaggagagcagcgagcccaccggcagccctgcccctgtgatccagcacagcagcgccacagcccccagcaatggcctgtctgtgcgctctgctgctgaggccgtggccacctctgtgctgacccagatggccagccagaggacagagctgtccatgcccatccagagccacgtgatcatgaccccccagagccagagcgctggccgctag

SEQ ID NO: 333398 - DNA, 1485 bp, Artificial Sequence
  derived and/or modified sequence
atgggcgacgaccggcccttcgtgtgcaacgcccccggctgcggccagaggtttaccaacgaggatcacttagcagtccataaacacaagcatgaaatgactttaaaattcgggccagcccggacagattctgtaatcatcgccgatcagacacccacgcctacaagattcttgaagaactgcgaagaggtgggtttgttcaacgagttagcctcatccttcgaacatgaattcaagaaagcggccgacgaggatgaaaagaaggctcggtcaaggaccgtagctaaaaagctcgtggccgctgcaggcccactcgacatgagcctgcccagcacgcccgatattaaaattaaagaagaggagccggtcgaggttgactccagccccccggatagcccagcgagtagcccatgctcacccccactgaaggagaaagaggtgaccccaaagcccgtcctgattagcacccctacgcctaccatcgtccgccctggatccctgccattacatctgggatatgacccgcttcatcccacgcttccatctccaaccagcgttatcacacaggcaccaccttccaaccgccagatgggcagccccacaggaagtctgccgctggtgatgcatctggctaacggccagacaatgccagtgctcccggggccccccgttcaaatgccgtctgtcatctcccttgcaagacccgtgagcatggtgcccaatattcccggcatccccggacccccagtgaacagttccggatccataagcccaagcggtcaccctatccctagcgaggcaaagatgaggctgaaggctacccttactcaccaggtaagctcaattaatggaggatgcggtatggtggtggggaccgcatctactatggtgactgcgcgacctgagcaaagtcaaatcctaattcagcaccccgacgcccctagcccggcccagccccaagtctctcccgctcagccaacaccaagcacgggcggccggagaaggaggactgttgatgaagaccctgacgagcgacggcagagattccttgagcggaaccgcgctgctgcttctcggtgcaggcaaaagcgcaaactctgggtgtcatcactggaaaaaaaagctgaggagttaacctcccaaaacattcagctctcaaacgaggtgacgttactcaggaatgaggtagcccagcttaaacagctcctgcttgcccacaaggactgtcccgttactgctctgcaaaagaagacacaggggtacttggagtccccaaaagaatcaagcgagccaactggctctcctgcccctgtgattcagcactcctcagcaaccgctcctagtaacggactgagtgtgagaagcgcggccgaagcggtcgccacgtcagttctgacccagatggcctcccaaaggactgagctgtcaatgccaattcagagccatgtgatcatgactcctcaatcacagtcggctggcaggtag

SEQ ID NO: 333399 - DNA, 1485 bp, Artificial Sequence
  derived and/or modified sequence
atgggcgacgaccggcccttcgtgtgcaacgcccccggctgcggccaacggtttactaacgaggaccacctggctgtgcataaacataagcacgagatgacgctgaaattcggaccagctcgcactgacagcgtcataatcgcagatcagacgccaactccgactcgtttcctgaaaaactgcgaggaggtgggcctgtttaacgagctggcttctagctttgaacacgagtttaaaaaagccgccgacgaagacgagaagaaggccagatcccgaaccgtggccaagaagctcgtggccgccgccggcccactggacatgtccctgcccagtacacccgatatcaagatcaaggaggaggagcccgtggaggtggacagcagtcccccagactctcctgctagcagcccatgcagtccccctcttaaagagaaagaggtcacaccgaagccagtactcatttctacccccactcccaccatcgtgcggcctggcagcttgcccctgcaccttggctacgaccccctgcatcctacactcccaagtccaacttccgttatcacacaggcaccaccatcgaacagacagatgggctcaccaacagggagcctgcctctcgtcatgcatcttgctaatgggcagacaatgcctgtactgcccggaccaccagttcagatgcccagcgtaatttcgctggcccggccggtgtcaatggtacccaacatccctggaattcctggccctcctgtgaacagctctggatccatcagcccttcggggcaccccatcccctcagaagcgaaaatgcggctaaaggcaacactcactcatcaggtgtcttctattaatggaggctgtggcatggtggtcgggaccgcaagcacaatggtcacagcaaggcccgaacagagtcagattcttattcagcatccagacgccccgagtcccgctcagcctcaggtatccccagctcagcccaccccaagcactgggggccggcggaggcgcaccgtagatgaggaccccgatgaacgacgccagcgcttcctggagcggaatagggccgcagccagtcgctgccgtcagaagaggaagctctgggtgagttctctcgaaaagaaggctgaggagcttacttcccagaacatccaactgtcaaatgaagtaaccctgctccggaacgaagttgcacagttgaagcagttgctgttggcccataaagactgtcctgtgacggcactccagaaaaagacacagggctatctcgaaagtcccaaggagagttcagagcccacaggctccccagcgcctgtcatccaacactccagtgcaaccgctccaagcaacgggctgtctgttaggagcgccgcagaagccgtcgccacatctgtgttaacgcagatggcatctcaacgtaccgagctctcgatgcccatccagtcccacgtgattatgacgcctcaaagccagtctgccggacgctag

SEQ ID NO: 333400 - DNA, 1485 bp, Artificial Sequence
  derived and/or modified sequence
atgggcgacgatcgtccattcgtctgtaatgcacccggatgtggacagcgtttcacaaacgaggatcatttagctgtgcacaagcacaaacacgagatgacattaaaattcggacctgctcgtaccgactcagtgataatagctgatcagactccaactcctacaaggttcctgaaaaattgtgaagaagtaggtctgtttaacgagctagcatcgagtttcgagcacgaatttaagaaagccgcagatgaggacgagaagaaagctagatcacggactgtcgccaagaaacttgttgcagccgcagggcctctcgatatgtccctcccttctactccagacatcaagattaaagaagaagaacccgtggaggttgacagctcaccacctgactcccctgccagcagtccctgcagcccgccactgaaagagaaagaagtaaccccaaagccggtgctgatctcgacccctacgcctacaattgttagaccaggcagccttcctctgcacctgggttatgatcctctgcaccctacacttccatctccgacttccgtgattacccaggccccaccgtccaaccggcagatggggtccccgacgggtagcttgcctctcgttatgcacctcgctaatggacaaactatgcccgtcctgccaggccctcccgtacagatgccttcagtcatatccctagccagaccagtgagtatggtgcccaacatccctggtattcctgggcctccagtgaactccagcggatccatatcacccagtgggcatcccattcccagcgaagccaaaatgcgcctgaaggccactctcacacaccaggtgtcttctattaatgggggttgtgggatggtagttggcactgcatcaaccatggtgactgccaggcctgagcaatcacagatcttgatccagcaccctgatgcacccagccctgctcagccacaggtctcacctgcccagccaaccccaagcacgggcggtcggcgacgaagaactgttgatgaagatccagacgaacggcgacaacggttcctggaaaggaacagagctgccgcaagcaggtgtagacagaagcgcaagctgtgggttagttccctagagaaaaaggctgaggagctgacgagccagaacatacagctctctaatgaggtgacactccttcgtaacgaagtggcacagctcaaacagcttttacttgcgcataaagactgtcccgtcactgcactgcagaaaaaaacccagggctacctggaatctcccaaagaatccagcgaacctacgggctcccctgcccctgtcattcagcactcatccgctactgccccaagtaatggactaagtgtgagaagcgcagcagaagccgtggccacctcggtgctcacgcagatggccagccaacgcaccgagctctcaatgccaattcaaagtcacgttataatgacgccacagagccagagcgcaggcagatag

SEQ ID NO: 333401 - DNA, 1485 bp, Artificial Sequence
  derived and/or modified sequence
atgggagatgatagacctttcgtctgcaatgcccctggctgcggtcaacggttcacaaatgaggaccaccttgctgtccataagcacaaacatgaaatgaccctcaagttcgggccagcgagaacagatagtgtgattatcgccgatcaaaccccaacgcccacacggttcttgaagaattgtgaggaagtaggcctattcaacgagctggcttcctcgttcgaacacgaattcaagaaggcagcagatgaggatgaaaagaaggccaggtcaagaaccgtggcgaaaaaattggtagccgctgcgggacccctcgacatgtctctacccagcacaccggacatcaagatcaaggaggaggaacccgtggaggtggacagcagtcccccagactcccccgctagcagtccatgctctcctcctctcaaagagaaagaggtgacacccaaaccggtcctgataagtacccccacccccacaatcgtaaggcctggtagcctcccactccatctcggatacgaccccttgcaccccactttgccttccccgacttcagtgattacccaagccccaccctctaatcgccagatgggatccccaaccggtagcttacctctggtaatgcacctggccaatggccagactatgcctgtgctgcctgggccacccgttcagatgccatccgttatttcactggctagacccgtctcaatggtccctaatatcccgggaatccccggacctcctgtgaactcgtccggatccatcagcccctctggacatcctatcccctctgaggctaagatgaggcttaaagcaaccctcactcatcaggtaagctccattaatggcggatgcggcatggtcgtgggcaccgcttcgaccatggtgaccgccagacccgagcaatctcaaatactcatccaacaccccgatgcacccagccccgctcagcctcaggtatcccctgcccagcctactcctagcacgggcggtagaaggcgcaggacggtggatgaggatccagatgaacggaggcagcgctttctcgagagaaatcgggcagcagcttccaggtgtcgccagaagcggaagctatgggtgtcaagtctggagaaaaaggccgaagagcttacttcccagaacattcaactatccaatgaggttaccctcctcagaaacgaagtcgcgcagctcaaacaactgttgctggcccacaaggactgcccggttactgcattgcagaagaagacacagggctatctggaatctcctaaagagtcttcggaacctacgggaagcccggcacccgttattcagcacagcagtgctactgccccaagcaacggcctttccgtgagatccgctgctgaagcagtcgcaacgtcagttcttacccagatggcaagtcagcgtacggaactgagcatgcctatccaaagccatgtcataatgaccccgcagtcccagtctgccggacggtag

SEQ ID NO: 333402 - DNA, 1485 bp, Artificial Sequence
  derived and/or modified sequence
atgggcgacgacagacccttcgtgtgcaacgcccccggctgcggccagagattcaccaacgaggaccacctggccgtgcacaagcacaagcacgagatgaccctgaagttcggccccgccagaaccgacagcgtgatcatcgccgaccagacccccacccccaccagattcctgaagaactgcgaggaggtgggcctgttcaacgagctggccagcagcttcgagcacgagttcaagaaggccgccgacgaggacgagaagaaggccagaagcagaaccgtggccaagaagctggtggccgccgccggccccctggacatgagcctgcccagcacccccgacatcaagatcaaggaggaggagcccgtggaggtggacagcagcccccccgacagccccgccagcagcccctgcagcccccccctgaaggagaaggaggtgacccccaagcccgtgctgatcagcacccccacccccaccatcgtgagacccggcagcctgcccctgcacctgggctacgaccccctgcaccccaccctgcccagccccaccagcgtgatcacccaggccccccccagcaacagacagatgggcagccccaccggcagcctgcccctggtgatgcacctggccaacggccagaccatgcccgtgctgcccggcccccccgtgcagatgcccagcgtgatcagcctggccagacccgtgagcatggtgcccaacatccccggcatccccggcccccccgtgaacagcagcggcagcatcagccccagcggccaccccatccccagcgaggccaagatgagactgaaggccaccctgacccaccaggtgagcagcatcaacggcggctgcggcatggtggtgggcaccgccagcaccatggtgaccgccagacccgagcagagccagatcctgatccagcaccccgacgcccccagccccgcccagccccaggtgagccccgcccagcccacccccagcaccggcggcagaagaagaagaaccgtggacgaggaccccgacgagagaagacagagattcctggagagaaacagagccgccgccagcagatgcagacagaagagaaagctgtgggtgagcagcctggagaagaaggccgaggagctgaccagccagaacatccagctgagcaacgaggtgaccctgctgagaaacgaggtggcccagctgaagcagctgctgctggcccacaaggactgccccgtgaccgccctgcagaagaagacccagggctacctggagagccccaaggagagcagcgagcccaccggcagccccgcccccgtgatccagcacagcagcgccaccgcccccagcaacggcctgagcgtgagaagcgccgccgaggccgtggccaccagcgtgctgacccagatggccagccagagaaccgagctgagcatgcccatccagagccacgtgatcatgaccccccagagccagagcgccggcagatag

SEQ ID NO: 333403 - DNA, 6582 bp, Artificial Sequence
  derived and/or modified sequence
ctcctctctgctatatgaaatatgggagacgacagaccgtttgtgtgcaatgccccgggctgtggacagagatttacaaacgaggaccacctggcagttcataaacacaagcatgagatgacattgaaatttggcccagcccgaactgactcagtcatcattgcagatcaaacgcctactccaactagattcctgaagaactgtgaggaggtgggactcttcaatgaactagctagctcctttgaacatgaattcaagaaagctgcagatgaggatgagaaaaaggcaagaagcaggactgttgccaaaaaactggtggctgctgctgggccccttgacatgtctctgccttccacaccagacatcaaaatcaaagaagaagagccagtggaggtagactcatccccacctgatagccctgcctctagtccctgttccccaccactgaaggagaaggaggttaccccaaagcctgttctgatctctacccccacacccaccattgtacgtcctggctccctgcctctccacttgggctatgatccacttcatccaacccttccctccccaacctctgtcatcacacaggctccaccatccaacaggcaaatggggtctcccactggctccctccctcttgtcatgcatcttgctaatggacagaccatgcctgtgttgccagggcctccagtacagatgccgtctgttatatcgctggccagacctgtgtccatggtgcccaacattcctggtatccctggcccaccagttaacagtagtggctccatttctccctctggccaccctataccatcagaagccaagatgagactgaaagccaccctaactcaccaagtctcctcaatcaatggtggttgtggaatggtggtgggtactgccagcaccatggtgacagcccgcccagagcagagccagattctcatccagcaccctgatgccccatcccctgcccagccacaggtctcaccagctcagcccacccctagtactggggggcgacggcggcgcacagtagatgaagatccagatgagcgacggcagcgctttctggagcgcaaccgggctgcagcctcccgctgccgccaaaagcgaaagctgtgggtgtcctccctagagaagaaggccgaagaactcacttctcagaacattcagctgagtaatgaagtcacattactacgcaatgaggtggcccagttgaaacagctactgttagctcataaagactgcccagtcactgcactacagaaaaagactcaaggctatttagaaagccccaaggaaagctcagagccaacgggttctccagcccctgtgattcagcacagctcagcaacagcccctagcaatggcctcagtgttcgctctgcagctgaagctgtggccacctcggtcctcactcagatggccagccaaaggacagaactgagcatgccgatacaatcgcatgtaatcatgaccccacagtcccagtctgcgggcagatgatgcctcctctggtggagaggtcctcagccagagctcgcccgcccaagagccaagagagatgtcatcttatcccctcccatctgccttggacatggcaatatgggtggggggaattgtgtgttgtgagtaatggacagatatggggctttttagccatgtggtcatgtacgtttgacacctgtgctgggggcctcccagccccggagcctcatagatcatcccccagggtggggtttctgatgcatccacagccaaaggcctttccagatggtccgaacaatcacccctgccccatgcacgtgtatctgtctcttttaacactaacccttggcacttctaggtttggggtttctcagttccctctcttcccactaagccgtggctgttacctttttgttccttaccagcatgccacttcctgccagatagagggaggctagatttgatgacatattacccgctgacccagccccagccaccccatggactcaggactcaggtctcccatagctgcttatttacccgtttcctttttcctcttccttaattctagttaaaacattcacttacggagaatgtaaggttacctttgatgtatgaagtagcagtattttccagtttttccataagctttattccttctctctacctgccaccaaaaagaaagaaaccctcaagagttctaattctttttcatctatttgcagagctatttgggtacctcattttgtcccttgactttagtgtagtggtggggtctttcccaccaccccactaagccttggcaacctcattttgtggccttattattaaagattgcttggtagtgaaaagggaagggcccagaatctgactggctgattctgtctcctcccctccctccttctttagtttaaccatcagggcagacaggaacaaagtatttcaaagcttgttccatcaagttagggattaatcgattcctttatgttttataagagtttaccggccaaagcatattgtcatctttggtcatttttctgctcctgcttctctctcttcattcccctatcaacattaccgcccctgtctctcttctgtaactacttcagactcagccctcctggaggctgtcatgtaggggactctcgagttcctttgttctaccccatctctccccctcacacatctgtctgcttttctgagctagagtcttctgttcacaagtgcccatcaccgtctggactatcttctttctctttcaccaggttcctagcttagccactaggtcttccaggtcctccagagtttcttcaacccatttcttctctcttctctttacatgcagtgctccaggatcttgaagcgtcatagccaagatgctgagtgggtttacttgagtataagattgaaaggagggaggaagaggagagggaaagtgcagaactggtcccagcaaaggaccccaggttctggcctgggaaattggtgactattgctctcaaccattcttactttgaagagttgggttgcagagggagcaattcatctctcttgtccctcttccacgttaaggcttctcatctccccttggctctgaactatgcagtttctaccaggaccataggaagcaattcagagccagaggcctgtggatagataggtcagctttaattgcctttccgtatgaaacccttccagttgtcccagagccactttctgccatctgtgcaagccaagaatgtccttctctccatctttcctacctccatcttaaacatacatacaaaataactgccagcttcctttcttattttgtctccaaaattgactgtcacaggggaatgagaaaatgttctaagctacaagattcccgtttccttaaagtgatatcctgtcctagtgaaccagtcaggtaacaggttctgctgcatttgttttaaatttcccctcctgcttttcagagctggtgctgaacaggccacacccctaaagacaaaggagagaaaacacggttttctcatcctctaccatcaggtacccaacaggaataggccctgaagtgattcagactagcaaatgttatggcagatggtcaggacgcaggttaccacatccagggacttcacttttgcctttaaaaattcacagccgtaacttgtgctcaggacttcccctttagctggctgctccctgggattttctcctgctttagagttttgtttcatttttttattgtcttgatttcccagtagcagccttgccctaaagcttgactgagtttatggctcctaaggagctttcctaagactcttgactatttttcttcccccttcagtcaagtgtttttacagttaagaattaatttgtaactgcatacatgccctgccagtctgtccctgtgttgggtggctaatttatgtagcgggtcttttttatttcttagcccccatgactaattatctagtcctaacttcatttttatcagtgggaagatgtgtacgggacctcagtgaggagcactgccagaaccacagtaacaaaatggcactgaaataaggaagcagcaggtcagaaccccctagatagttcttgagttggttctcagtctcactaaggaggcagaataattgctgccctgaaacttctctgatagtcaaaggtaacttcacttaccttgttattgctaccagccatgtggtcactctccccaaatctttgtcttccagatccatctggaccagaaccaaacatcatggaaggtgtcacttggcccttcctaaagtccatggcgtttctagaggcctaagggaggacactttcagaaaggagctgagtgtatggtgggtgtcctgaattcgttcatgtgaatacaggactcaggcttcccaccccactccaatgtgagtgctcgatacacaagcactctagctagctgccacgtacccaaggccacagagggaggggacagaaccaggtcttctggtctgctcactttctgccccattcccctaacagaaagtttgcttagagttgaaaagtctaagaaagcctcccacaatactagagaggccaacaaaaaaaaagtcatgccccctttacttactcttttgctgctggttatgcatctcaaatctgacttccttagccttcacctccctccttggccctaagcattagaccatgtactctaagtagtggttaaagagggactgagcaaactgaacctcctctcgctcacttctctatccctgttctgttggttttggctcctttcttgattcactgccctctagcaccacccatcctggtagatggagtgcttaaccccaaccgtgccctatgtacagcctgaaccaccaaacagacaccaaaaaaattcttcctgtggtttctggggctcccctgctccacactgagaggctccttaaaggtgctagcccctgatacagctatccccgccagttttctccttttttcataacttccttcccatccccaaatcattaatttttcattaatattgtacattatatacacaggaaggaaatacattattttttttaaatttcataaccagcctgtttagattccagtcttcctagctatatcacatatgccttgttgatatgctctttctgctttctttagacttaatgtttgacgggggtgggggtgtctggaagaacaggaaaggtggggatcctaaggcagattaaaggactccctccaccccactacagcctcccataactctagtcatccctctcatagtacaggactgatttctctgtgtctgtttgtacacacaaatgtgcatacagacataaattcccccaccccataccaaggtggttacctagcaggaatgagcgtaggtggctgctggccaccattaccaccgtctgcatcagctgtgttgtctctctttggggtaaagtcctaccccagaatgagaaaaggctggggagagtagggcaggttaaaggagcttatgtcctctgtagatgtaggtttgtatcatagctactagggtttatttttttaatggggggctaatagcacagagttatctcaccagcagtagctactggtgagtgatgttttagctgtaagaagtggctatgagcaatagtttcactgactttaccttagggcagtgccacagtaatctgggaacttgttagaaatacacattctcaggccccatcccagacttattgaatcacagactctgggggcagggtttaaaagcactccaagtgattctaatgcacactaaaggttgagaaccatttcttagggataagctgggaaatttttacaggtgtggaggatatttcaaatacatcttttgcctttgcactaacatgctttcatttctttcagtctcttcctccattccctttaaagtcttccccatcatatcactgatctcaaaagctagatttgtcttcattttagtcgtatccctaaaaccatgcattggtctggacaggagttgtcccatattcccttgcagactggtcactccatgttctctgttacagtaaggaccagccaagcttcagctgtcccattcctccccctacaacacacacacctttcaggcagggaggagatgagcttccagccccaagagtggaggctgccacatcctaacatagtatctattgaaaaggaagcagtgtgtatctatgattatatctctgttcatctatatatttttgacatgtagcaacacctctccatcttatcaaggaactcaactcggtctgggtctccccagtgcccagtggtggcctttgacaggtaggaggatgcagtgctgcaggctattttgttttttgttacaaaactgtcttttcccttttcccctccacctgattcagcatgatccctgtgagctggttctcacaatctcctgggactgggctgaggcaggggcttcgctctattctccctaaccatactgtcttcctttcccccttgccacttagcagttatccccccagctatgccttctccctccctcccttgccctggcatatattgtgccttatttatgctgcaaatataacattaaactatcaagtg

SEQ ID NO: 333404 - DNA, 1801 bp, Artificial Sequence
  derived and/or modified sequence
gctcctctctgctatatgaaatatgggagacgacagaccgtttgtgtgcaatgccccgggctgtggacagagatttacaaacgaggaccacctggcagttcataaacacaagcatgagatgacattgaaatttggcccagcccgaactgactcagtcatcattgcagatcaaacgcctactccaactagattcctgaagaactgtgaggaggtgggactcttcaatgaactagctagctcctttgaacatgaattcaagaaagctgcagatgaggatgagaaaaaggcaagaagcaggactgttgccaaaaaactggtggctgctgctgggccccttgacatgtctctgccttccacaccagacatcaaaatcaaagaagaagagccagtggaggtagactcatccccacctgatagccctgcctctagtccctgttccccaccactgaaggagaaggaggttaccccaaagcctgttctgatctctacccccacacccaccattgtacgtcctggctccctgcctctccacttgggctatgatccacttcatccaacccttccctccccaacctctgtcatcacacaggctccaccatccaacaggcaaatggggtctcccactggctccctccctcttgtcatgcatcttgctaatggacagaccatgcctgtgttgccagggcctccagtacagatgccgtctgttatatcgctggccagacctgtgtccatggtgcccaacattcctggtatccctggcccaccagttaacagtagtggctccatttctccctctggccaccctataccatcagaagccaagatgagactgaaagccaccctaactcaccaagtctcctcaatcaatggtggttgtggaatggtggtgggtactgccagcaccatggtgacagcccgcccagagcagagccagattctcatccagcaccctgatgccccatcccctgcccagccacaggtctcaccagctcagcccacccctagtactggggggcgacggcggcgcacagtagatgaagatccagatgagcgacggcagcgctttctggagcgcaaccgggctgcagcctcccgctgccgccaaaagcgaaagctgtgggtgtcctccctagagaagaaggccgaagaactcacttctcagaacattcagctgagtaatgaagtcacattactacgcaatgaggtggcccagttgaaacagctactgttagctcataaagactgcccagtcactgcactacagaaaaagactcaaggctatttagaaagccccaaggaaagctcagagccaacgggttctccagcccctgtgattcagcacagctcagcaacagcccctagcaatggcctcagtgttcgctctgcagctgaagctgtggccacctcggtcctcactcagatggccagccaaaggacagaactgagcatgccgatacaatcgcatgtaatcatgaccccacagtcccagtctgcgggcagatgatgcctcctctggtggagaggtcctcagccagagctcgcccgcccaagagccaagagagatgtcatcttatcccctcccatctgccttggacatggcaatatgggtggggggaattgtgtgttgcaaatctgagtagcctccaagaggcacacaagcagaggatgggctgtgttgccctgactgccagccccaggcacagaggaccaggcctggtcatcctcacagactctgaccctggctcttcccactcctcttccactccaggacatcctacttaacccctcctgacatgag

SEQ ID NO: 333405 - protein, 276 aa, Artificial Sequence
  derived and/or modified sequence
MAPSPLQRLHCGPSPSPRPTEVPRGTVSVSCRYLKNSLHVFVSGGAIGTSSPALLECQEGVGPARPSLLVPPPPRPRRLDLARTLPAERTDSQSLYIVYIALPGRTPRPALAFAFLMPACCNRPSPRPSPAHLTASSVLRRQRHVLAASAASPCQWSGLRVAHSLRQVVSLCPRCTGSCPFSGACASSLPSPLSCPHSHSGSWGTWSQGRPCSSTEVAGLALWPTDFLSCLLDASELQTQGSHGFSFTPTGFSSNRKVGVGSCRDGAGRGAMGGLF

SEQ ID NO: 333406 - DNA, 561 bp, Artificial Sequence
  derived and/or modified sequence
cctccctctcacctgctcctctacctgctccaccctcaatccaccagaaccatgggctgctgtggctgctctggaggctgtggctccggctgtgggggctgtggctctggctgtgggggctgtgggtccagctgctgtgtgcccatctgctgctgcaagcccgtgtgctgctgtgtgccagcctgttcctgcaccagctgtggctcttgtgggggctccaaggggtgctgtggctcttgtgggggctccaaagggggctgtggctcttgtgggggctccaagggaggctgtggctcttgtggctgctcccagtgcagttgctgcaagccctgctactgttcctcaggctgtgggtcatcctgctgccagtccagctgctgcaagccctgctgttcccaggccagctgctgtgtccccatttgctgccagtgcaaaatctgaggctctgactttggacctcaggtgagtccagcatatccacaccacccaagaagtgaccagtgctgcatttcagttctggctgtcccacagctccaggagttgtgtcccctgaattttgca

SEQ ID NO: 333407 - DNA, 831 bp, Artificial Sequence
  derived and/or modified sequence
atggcgcctagtccattacaaaggctgcattgcggcccatctcccagcccacgtcctactgaagtccctcgcggtaccgtgtccgtgtcttgtcgatacctgaagaactccctgcacgtcttcgtttccggcggtgccataggaacctcctctccagcgctgctcgagtgtcaggaaggtgttggcccagcgcgaccgagtctgctggttccacctccccctcggccaaggcgactggacctcgctaggacactgcccgctgaacggactgactcccagtcgttgtatatcgtctatattgcactccccggaaggaccccccgtccagctcttgctttcgctttcctgatgcctgcttgttgtaatcgtccatcccctcgaccttcacctgcccatctgactgcctccagcgtgcttcgaagacagagacacgtactggccgcaagcgctgcgagtccttgccaatggtctggactgcgggtcgcccatagcctgcgacaggtggtgtccctgtgtcccaggtgcacaggctcctgccccttttctggcgcatgtgctagttcattgccatctcccctcagttgccctcattcacacagcgggtcttgggggacatggagccaaggacgaccctgctcaagtaccgaggtggccggtcttgcattgtggccaacagatttcctcagctgccttttggacgcctcagaattacagacacaaggtagccacggcttttcttttaccccgaccgggttcagcagcaataggaaggtgggtgtcggttcttgtcgggatggcgcagggaggggggcaatgggcggtctcttctag

SEQ ID NO: 333408 - DNA, 929 bp, Artificial Sequence
  derived and/or modified sequence
gtttgttcgggaagtggatccgccgctgccggagcagcccgaagggagctgcggatcgcgaggccagtaccgaccccgcccgcccgcgcgcaccgcccccgcccgccatggcccgggactacgaccacctcttcaagctgctcatcatcggcgacagcggtgtgggcaagagcagtttactgttgcgttttgcagacaacactttctcaggcagctacatcaccacgatcggagtggatttcaagatccggaccgtggagatcaacggggagaaggtgaagctgcagatctgggacacagcggggcaggagcgcttccgcaccatcacctccactgcagagactgcactgcggtccctcccccagcccgaggcccacggaggttcctcgggggacagtctcagtttcgtgccgttatttaaagaattctctccatgtttttgtatcgggaggtgccatcggcacttcctcccccgccctcctcgagtgccaagaaggtgttggaccagcccgcccttccctactggtgccccctcctccccggccaaggcgcctggacctggcgaggacgctgcccgccgagcggactgattcgcagagtctgtacatagtgtatattgctctacccggccgcacaccacgtcctgctctggcttttgccttcttgatgccagcctgctgcaacagaccctccccgcgcccctccccagcccatcttactgcaagcagcgtcctgaggagacagcggcacgttctagctgcgtctgcggccagcccgtgccagtggagtgggctccgcgttgctcattctctccgacaggttgtcagcctctgtccccgctgcacagggtcttgccccttctccggggcctgtgccagctcccttccctccccgttgtcctgtccccacagccattctgggagctgggg

SEQ ID NO: 333409 - DNA, 1312 bp, Artificial Sequence
  derived and/or modified sequence
aacgtcaagcggtggcttcacgaaatcaaccagaactgtgatgatgtgtgccgaatattagatgttcaactgcatcacggagctggtcctccgagcaaagaaagacaacctggcaaaacagcagcagcaacaacagaacgatgtggtgaagctcacgaagaacagtaaacgaaagaaacgctgctgctaatggcacccagtccactgcagagactgcactgcggtccctcccccagcccgaggcccacggaggttcctcgggggacagtctcagtttcgtgccgttatttaaagaattctctccatgtttttgtatcgggaggtgccatcggcacttcctcccccgccctcctcgagtgccaagaaggtgttggaccagcccgcccttccctactggtgccccctcctccccggccaaggcgcctggacctggcgaggacgctgcccgccgagcggactgattcgcagagtctgtacatagtgtatattgctctacccggccgcacaccacgtcctgctctggcttttgccttcttgatgccagcctgctgcaacagaccctccccgcgcccctccccagcccatcttactgcaagcagcgtcctgaggagacagcggcacgttctagctgcgtctgcggccagcccgtgccagtggagtgggctccgcgttgctcattctctccgacaggttgtcagcctctgtccccgctgcacagggtcttgccccttctccggggcctgtgccagctcccttccctccccgttgtcctgtccccacagccattctgggagctggggaacctggtctcaaggcaggccctgcagttccacagaggtggcaggtcttgccctttggccaacagatttcttgtcctgccttctagatgcctctgagctccaaacccagggcagccatggcttctcatttacaccaacaggtttcagttccaacagaaaggtcggggtaggttcgtgcagagatggggctggcaggggggctatgggaggattattttaacagatcaagaaaatgaagccaaatcaagtgaattaaattcctcacaattattttctttccctgaggtttgattggcacagcagcaaaagttgaggccaccccacttgtgtccactgtttttagaaaaaaatgaatggcttcctgccattgtggggctggactcttgggctttcttggtgggagcggagaaggggcctcccacccttgtccgagttgcctcccactggaggtcaggagtctacactgcagcctcgggcactgtggggagtgcatgcctggggcctctgggtgg

SEQ ID NO: 333410 - DNA, 831 bp, Artificial Sequence
  derived and/or modified sequence
atggccccctccccactgcagcgtcttcactgcggaccaagccctagtccgaggcccactgaggtacccagagggactgtgtctgtgtcctgccggtatctaaagaattccctgcatgtattcgtctctgggggcgctattggaactagctccccagccttgcttgagtgtcaggagggcgtgggcccagctagaccctccttactagttcctccccctcccaggccccggcgactcgatctggctagaacactgccagcagaaagaaccgactcccagtcgctgtatattgtatacatcgcccttcccggtcgtacccctcgcccggctctggccttcgcgttcttgatgccagcatgttgcaaccgaccctcacctagaccttctcctgcccacctcactgcctcttcagttctgcggcggcaacgtcatgtgctggctgcctctgctgcctccccttgtcagtggtctggtctaagggtcgcccacagcctgagacaggtggtgtctctgtgtcctagatgcacgggctcttgtccctttagcggcgcatgtgcttcatcactgccctctcctcttagctgtcctcactcccactctgggtcctggggaacatggtcgcaaggaaggccctgcagttctaccgaggtagctggactggcgctctggcctactgatttcctaagctgtctgctagacgcatccgaactgcagactcaggggtcccacggattctcctttacacccaccggtttttcttcaaaccggaaggttggcgtaggctcttgtcgcgatggagctgggcgaggcgcaatgggaggtctgttctag

SEQ ID NO: 333411 - DNA, 831 bp, Artificial Sequence
  derived and/or modified sequence
atggccccctcacctctgcagagactacattgcggcccttcaccgagtcccaggcccacagaagtacctcgggggacagtgtccgtctcatgtcggtacctgaagaacagccttcatgtctttgtcagcggcggagctatcggcacttcgtccccagcccttttggagtgccaagaaggtgtcggaccagcacgtccctccctcctcgttcctcctccacctcgccctcgccgcttagatctcgcgagaacacttcccgctgagcgcaccgatagtcagagcctgtatatcgtgtatatcgcactgccaggccgtacaccaagacctgcccttgcttttgcgtttctaatgcccgcgtgttgcaaccgaccaagccctcgaccttccccagcgcatctaaccgcttccagtgtgctgagaagacagcgtcacgtcctagccgcttccgctgcaagcccatgccagtggagcgggctcagagtagcacattccttaagacaggtggttagcctgtgccctaggtgtaccggatcctgcccattctctggcgcatgtgcttcatcgctgccatcccctctttcttgtccacattcacactctggatcctggggaacctggagccaggggaggccctgctcgtctacagaagtcgccggcctggctctgtggccaacagacttcttgtcatgcctcttagatgcaagcgaactccaaacccagggcagtcacggtttctcttttacccccacaggcttctctagcaaccggaaagttggtgtgggatcttgcagggacggcgctggacggggggccatgggcggtctgttttag

SEQ ID NO: 333412 - DNA, 2945 bp, Artificial Sequence
  derived and/or modified sequence
aaggagggaggcggtggtagcggcggcggctgctgaggaggaggagggggagcggagggaggtgtttctgtcagttccggctgtttgttcgggaagtggatccgccgctgccggagcagcccgaagggagctgcggatcgcgaggccagtaccgaccccgcccgcccgcgcgcaccgcccccgcccgccatggcccgggactacgaccacctcttcaagctgctcatcatcggcgacagcggtgtgggcaagagcagtttactgttgcgttttgcagacaacactttctcaggcagctacatcaccacgatcggagtggatttcaagatccggaccgtggagatcaacggggagaaggtgaagctgcagatctgggacacagcggggcaggagcgcttccgcaccatcacctccacgtattatcgggggacccacggggtcattgtggtttacgacgtcaccagtgccgagtcctttgtcaacgtcaagcggtggcttcacgaaatcaaccagaactgtgatgatgtgtgccgaatattagtgggtaataagaatgacgaccctgagcggaaggtggtggagacggaagatgcctacaaattcgccgggcagatgggcatccagttgttcgagaccagcgccaaggagaatgtcaacgtggaagagatgttcaactgcatcacggagctggtcctccgagcaaagaaagacaacctggcaaaacagcagcagcaacaacagaacgatgtggtgaagctcacgaagaacagtaaacgaaagaaacgctgctgctaatggcacccagtccactgcagagactgcactgcggtccctcccccagcccgaggcccacggaggttcctcgggggacagtctcagtttcgtgccgttatttaaagaattctctccatgtttttgtatcgggaggtgccatcggcacttcctcccccgccctcctcgagtgccaagaaggtgttggaccagcccgcccttccctactggtgccccctcctccccggccaaggcgcctggacctggcgaggacgctgcccgccgagcggactgattcgcagagtctgtacatagtgtatattgctctacccggccgcacaccacgtcctgctctggcttttgccttcttgatgccagcctgctgcaacagaccctccccgcgcccctccccagcccatcttactgcaagcagcgtcctgaggagacagcggcacgttctagctgcgtctgcggccagcccgtgccagtggagtgggctccgcgttgctcattctctccgacaggttgtcagcctctgtccccgctgcacagggtcttgccccttctccggggcctgtgccagctcccttccctccccgttgtcctgtccccacagccattctgggagctggggaacctggtctcaaggcaggccctgcagttccacagaggtggcaggtcttgccctttggccaacagatttcttgtcctgccttctagatgcctctgagctccaaacccagggcagccatggcttctcatttacaccaacaggtttcagttccaacagaaaggtcggggtaggttcgtgcagagatggggctggcaggggggctatgggaggattattttaacagatcaagaaaatgaagccaaatcaagtgaattaaattcctcacaattattttctttccctgaggtttgattggcacagcagcaaaagttgaggccaccccacttgtgtccactgtttttagaaaaaaatgaatggcttcctgccattgtggggctggactcttgggctttcttggtgggagcggagaaggggcctcccacccttgtccgagttgcctcccactggaggtcaggagtctacactgcagcctcgggcactgtggggagtgcatgcctggggcctctgggtggggaccatggacaggccctggtcactgtcctaacctttgtcaggacaaaggtagcaagaggatttcctggcgggtgggaaggaatggctggggcggccagttttgacacgccccagtgccctggagaacaaccagggtcatctgcacttgatgactgctccccgacccccagcccggacacctcattcccctcccactacagggatcaagtgacctgggaagaaccgagtttaacaccaggatgtgtttccttagatttcctttcctaggcgatttccagggagagccctgattggacaatcacatcacagatcacactgcagtttccatgttagcactgtggatgggtttttaatcaataaaaactgggggtttcttctcaccgactctccacttgcccaaactgccaaaagctggtgattctgggacaggccttcactttggagccacgggatggggtgggggagccccatgggcctgggaaggagggtgctgtggagggggctgcagggctgaccagcaggcagcctcatctggtcgggggcgggggcggcaggagcagaagcggggtctccgtccttgggactgtcctggttggccacgggccctgaggatgcacggtgcctggggctcctgtgccggtgggcggggggcatgctggcctctgagcgatcaggcgaggccagcgagggtgtgcttgcaaattcaagcaataagaggggggttcctgggggcttccagcccaggctagaagcccccatggcttctggcagctggacatcagccccaggtattggggtgattttggtcatgacagtgtgcctgtcccactgttacacgcatgaatgggggttatggggtgggggtggggactcagggctggaccgacgtcctagtggacctgatgtgaaattcctgtcaaacaaacaccacttttcaatggtttgctaggagtatttctgtattgaaagtttctaattatgctttttaaaaaaatactaaaaataaaggttcaagctgccaaatttt

SEQ ID NO: 333413 - DNA, 831 bp, Artificial Sequence
  derived and/or modified sequence
atggcccccagccccctgcagagactgcactgcggccccagccccagccccagacccaccgaggtgcccagaggcaccgtgagcgtgagctgcagatacctgaagaacagcctgcacgtgttcgtgagcggcggcgccatcggcaccagcagccccgccctgctggagtgccaggagggcgtgggccccgccagacccagcctgctggtgccccccccccccagacccagaagactggacctggccagaaccctgcccgccgagagaaccgacagccagagcctgtacatcgtgtacatcgccctgcccggcagaacccccagacccgccctggccttcgccttcctgatgcccgcctgctgcaacagacccagccccagacccagccccgcccacctgaccgccagcagcgtgctgagaagacagagacacgtgctggccgccagcgccgccagcccctgccagtggagcggcctgagagtggcccacagcctgagacaggtggtgagcctgtgccccagatgcaccggcagctgccccttcagcggcgcctgcgccagcagcctgcccagccccctgagctgcccccacagccacagcggcagctggggcacctggagccagggcagaccctgcagcagcaccgaggtggccggcctggccctgtggcccaccgacttcctgagctgcctgctggacgccagcgagctgcagacccagggcagccacggcttcagcttcacccccaccggcttcagcagcaacagaaaggtgggcgtgggcagctgcagagacggcgccggcagaggcgccatgggcggcctgttctag

SEQ ID NO: 333414 - DNA, 831 bp, Artificial Sequence
  derived and/or modified sequence
atggcccctagccctctgcagcgccttcactgtgggccctcaccctcgcctcgacctacagaggtcccacgcggaacagtctctgtcagttgtagatatttgaagaactcccttcatgttttcgttagcggcggagcaattgggacatctagcccagctcttcttgagtgccaggaaggagttgggcccgccagacccagccttctggtgcctcctccacccaggccccggcggctggacctggctagaacactgcctgccgaaaggactgattcacagtccctctacatcgtgtacatcgctttgcccgggagaaccccacgccctgcactggcctttgctttcctgatgcccgcctgctgcaaccgtccaagcccacggcccagccctgcccaccttaccgcctcttctgttctcagacgacaaagacacgtgcttgccgcaagtgcggcgtccccatgtcagtggagtggattaagggttgctcattccttgcgccaagtcgtgagtttgtgcccgaggtgcacaggaagctgccccttcagcggagcatgtgcctctagcctgcccagtcccttgagttgcccccattctcactccggctcctggggaacatggtcgcagggcaggccatgctcatccaccgaagttgcagggttggctctgtggccaactgactttctgtcttgcctgctggacgcctccgagttacaaacccaaggatcccatggattctccttcaccccaaccgggttttcttcaaataggaaggtaggggtcggctcgtgccgcgacggggccggacgtggagctatgggtggactattttag

SEQ ID NO: 333415 - DNA, 831 bp, Artificial Sequence
  derived and/or modified sequence
atggcccccagccccctgcagaggctgcactgcggccccagccccagcccccggcccacagaggtgccccggggcaccgtgtctgtgtcctgccgctacctgaagaacagcctgcacgtgtttgtgtctggaggagccatcggcaccagcagccctgccctgctggagtgccaggagggcgtgggccctgcccggcccagcctgctggtgcccccaccaccccggccccggcggctggacctggcccggaccctgcctgctgagaggacagacagccagagcctgtacatcgtgtacatcgccctgcccggccgcacccccaggcctgccctggcctttgccttcctgatgcctgcctgctgcaaccggcccagcccccggcccagccctgcccacctgacagccagctctgtgctgcggcggcagagacatgtgctggccgccagcgctgccagcccctgccagtggagcggcctgcgggtggcccacagcctgcggcaggtggtgtccctgtgcccccgctgcaccggcagctgccccttcagcggggcctgtgccagcagcctgcccagccccctgagctgcccccacagccacagcggctcctggggcacctggagccagggccggccctgcagcagcacagaggtggccggcctggccctgtggcccacagacttcctgagctgcctgctggatgccagcgagctgcagacccagggcagccacggcttctccttcacccccaccggcttcagcagcaacaggaaggtgggcgtgggcagctgcagagatggagctggccgcggggccatgggcggcctcttctag

SEQ ID NO: 333416 - DNA, 831 bp, Artificial Sequence
  derived and/or modified sequence
atggcccccagccccctgcagcggctgcactgcggccccagcccctccccgcgacctacggaggtgcctagaggcaccgtttcagttagctgtcgctacctgaaaaacagtctccacgtatttgtgagtggtggagccattgggacaagtagtcctgcgcttctggaatgccaggagggcgtaggcccagctcgcccgtctcttctggtaccaccccccccaaggccccgccggctcgatctcgctcgcacattgccggccgagcggaccgacagtcagagtctatacatagtgtatattgcgctgcctggccggacaccacgtcccgcactggcctttgccttcctgatgcccgcttgttgcaacaggcccagtccacgacctagccccgcacacctaacagcctcgtctgtcctccgcagacagaggcacgtccttgccgcctccgcagccagcccttgtcagtggtcagggctgcgagtagcccattctctgagacaggtagtgtctttgtgcccccggtgtaccggcagttgcccatttagcggggcctgcgcttctagtctgccctctcctttaagctgccctcattctcatagcggctcctggggaacatggtcacagggcaggccctgctctagcactgaggttgctggactcgctctgtggcccaccgacttcctgagctgcctcctggacgcctcagagctgcagactcaagggagtcacggattctcattcactcctacgggattttcctccaaccggaaagtgggcgttggttcttgccgggacggcgccggccggggagccatggggggccttttctag

SEQ ID NO: 333417 - RNA, 831 nt, Artificial Sequence
  derived and/or modified sequence
auggcccccuccccacugcagcgucuucacugcggaccaagcccuaguccgaggcccacugagguacccagagggacugugucuguguccugccgguaucuaaagaauucccugcauguauucgucucugggggcgcuauuggaacuagcuccccagccuugcuugagugucaggagggcgugggcccagcuagacccuccuuacuaguuccucccccucccaggccccggcgacucgaucuggcuagaacacugccagcagaaagaaccgacucccagucgcuguauauuguauacaucgcccuucccggucguaccccucgcccggcucuggccuucgcguucuugaugccagcauguugcaaccgacccucaccuagaccuucuccugcccaccucacugccucuucaguucugcggcggcaacgucaugugcuggcugccucugcugccuccccuugucaguggucuggucuaagggucgcccacagccugagacagguggugucucuguguccuagaugcacgggcucuugucccuuuagcggcgcaugugcuucaucacugcccucuccucuuagcuguccucacucccacucuggguccuggggaacauggucgcaaggaaggcccugcaguucuaccgagguagcuggacuggcgcucuggccuacugauuuccuaagcugucugcuagacgcauccgaacugcagacucaggggucccacggauucuccuuuacacccaccgguuuuucuucaaaccggaagguuggcguaggcucuugucgcgauggagcugggcgaggcgcaaugggaggucuguucuag

SEQ ID NO: 333418 - RNA, 831 nt, Artificial Sequence
  derived and/or modified sequence
auggcccccucaccucugcagagacuacauugcggcccuucaccgagucccaggcccacagaaguaccucgggggacaguguccgucucaugucgguaccugaagaacagccuucaugucuuugucagcggcggagcuaucggcacuucguccccagcccuuuuggagugccaagaaggugucggaccagcacgucccucccuccucguuccuccuccaccucgcccucgccgcuuagaucucgcgagaacacuucccgcugagcgcaccgauagucagagccuguauaucguguauaucgcacugccaggccguacaccaagaccugcccuugcuuuugcguuucuaaugcccgcguguugcaaccgaccaagcccucgaccuuccccagcgcaucuaaccgcuuccagugugcugagaagacagcgucacguccuagccgcuuccgcugcaagcccaugccaguggagcgggcucagaguagcacauuccuuaagacaggugguuagccugugcccuagguguaccggauccugcccauucucuggcgcaugugcuucaucgcugccauccccucuuucuuguccacauucacacucuggauccuggggaaccuggagccaggggaggcccugcucgucuacagaagucgccggccuggcucuguggccaacagacuucuugucaugccucuuagaugcaagcgaacuccaaacccagggcagucacgguuucucuuuuacccccacaggcuucucuagcaaccggaaaguuggugugggaucuugcagggacggcgcuggacggggggccaugggcggucuguuuuag

SEQ ID NO: 333419 - protein, 352 aa, Artificial Sequence
  derived and/or modified sequence
MAGTICFIMWVLFITDTVWSRSVRQVYEVHDSDDWTIHDFECPMECFCPPSFPTALYCENRGLKEIPAIPSRIWYLYLQNNLIETIPEKPFENATQLRWINLNKNKITNYGIEKGALSQLKKLLFLFLEDNELEEVPSPLPRSLEQLQLARNKVSRIPQGTFSNLENLTLLDLQNNKLVDNAFQRDTFKGLKNLMQLNMAKNALRNMPPRLPANTMQLFLDNNSIEGIPENYFNVIPKVAFLRLNHNKLSDEGLPSRGFDVSSILDLQLSHNQLTKVPRISAHLQHLHLDHNKIKSVNVSVICPSPSMLPAERDSFSYGPHLRYLRLDGNEIKPPIPMALMTCFRLLQAVII

SEQ ID NO: 333420 - DNA, 1059 bp, Artificial Sequence
  derived and/or modified sequence
atggctggcactatctgtttcattatgtgggtcctgttcatcacagacacagtgtggtccaggtccgtcaggcaagtgtacgaagtccatgactcggatgactggacgatccatgactttgagtgtcccatggagtgcttctgtcctccaagctttccaaccgctctttactgtgaaaaccgcggcctgaaggagatacccgccattccatctagaatatggtacctatacctgcagaataacttaatcgaaacgatcccggagaagccattcgagaacgctacacagctgcggtggatcaatctgaataagaacaagatcacaaattacggtatcgagaaaggagccctgtcccagctaaagaaactgctctttctgttcctggaggataacgaactggaggaggtgccatcccccttgcctcggtcattagaacaactacagttagctagaaacaaagtctcccgcattccacagggaacgttttcaaacttggaaaatctgacgcttctcgaccttcagaataacaagctcgtcgataacgcctttcagcgcgatactttcaaagggctcaagaacctcatgcagctgaatatggccaaaaacgcactgagaaacatgcccccgcgcctaccggctaacactatgcagctgtttctcgacaacaactccatcgaaggtattccggaaaattactttaatgtcattcctaaagtggcgtttttgcgtctgaaccacaacaaattaagcgacgagggactgccttcacggggtttcgacgtcagctccatcctcgacctccagctgagccataaccagctgaccaaggtccctcggatctccgcacatcttcaacatttgcatttggatcataataagattaagagtgttaacgtgtctgtaatttgtccgtcccccagtatgctgcccgctgaacgcgattcattctcctatgggccgcatcttcgctatctgagactcgatgggaacgagattaagcctccaatcccaatggcactgatgacctgcttcagactactgcaggcggttattatttag

SEQ ID NO: 333421 - DNA, 2162 bp, Artificial Sequence
  derived and/or modified sequence
gaagaagatccaagaaggctgaggtaagcagtcttctgaagccctgtcaaagtggaaacaatagatcaaaggtgttcatggtgactgggacgagtaggtttcactgtttctcatagacgacttgacagcttaaagtaaaaacaaattattttcgtcaaagtttttttttttctcttaactgatttttagcaaacctcagactgagacacaggactcaacggtgtattcctggaaggcaaggtgctataatggcaggcacaatctgtttcatcatgtgggtgttattcataacagacactgtgtggtctagaagtgtgaggcaggtctatgaagtacatgattcagatgattggactattcatgacttcgagtgtcccatggaatgtttctgcccacccagttttcctactgctttatattgtgaaaatagaggtctcaaagaaattcctgctattccttcaagaatttggtatctttatcttcaaaacaacctgatagaaaccattcctgaaaagccatttgagaatgccacccagctaagatggataaatctaaacaagaacaaaataaccaactacggaattgaaaaaggagccctaagccagctgaagaagttgctcttcttatttctggaagataatgagctagaggaggtaccttctccattgccaagaagtttagaacaattacaattagctagaaataaggtgtccagaattcctcaagggacctttagcaatctggagaacctgacccttcttgacctacagaacaacaaattagtggacaatgcctttcaaagagacacttttaaaggactcaagaatctcatgcagctaaacatggccaagaatgccctgaggaatatgcctccaagattaccagccaatacaatgcagttgtttttagacaacaattccattgaaggaataccagaaaattattttaatgtgattcctaaagtggcctttttgagactaaatcacaacaaactgtcagatgagggtctcccatcaagaggatttgatgtatcatcaattctagatcttcaactgtcgcacaatcaactcacaaaggttccccgaatcagtgctcatctgcagcaccttcaccttgatcataacaaaattaaaagtgtgaatgtctctgtaatatgtcccagcccatccatgctgcctgcagaacgagattccttcagttatggacctcatcttcgctacctccgtctggatggaaatgaaatcaaaccaccaattccaatggctttaatgacctgcttcagacttctgcaggctgtcattatttaaacacattctcaccaaatctaaaattagtttaatgagctgtttctgacatgaaatgtggttaccattaataggtttaggacacaagtcatattccccattgctctcggccaccattttcatttgtgcagtgtattttttctattcaaagatgcttttgccagttacatgcatcacagcctgcattaatttgcttttcttttaattaataaaacagacacagagttaagatagtttatcaactcaaagatagttttattttggtctcttccatagcttattaacactaaagaaaacaattacattcttatacaataaaaaggacacatttgtgtatgtttaaaattacttatgcagataccgtaatttacagtataaatgtaataatcaaacaggaggataacgacctgaagaaaatgagaaaataaaatatttcttaattgtaatcataataaaacaattgcagattgctaagtagctgttggtggtacaagtttgatatttagcttgagaatgggtatggaatgaatcaaatacttcatcactaaagaattcttgttatttaatatcaaataatgaaacagcagtcacttctagttcattaccatttcttgtagctgttgtttttagatatagtccactgcattcttataagttctaaattttatgtttattataatgcatttcttgtggaatcttagtgttttaacatttgaaatccacttaaactgcaaattgttctttatatttgattgtgttttttggattttctaaataaaaatattgaatgctttctaacaaaacagaatatttcaaagaaattagcaagcttcattaaagaacatgttttaataaaaa

SEQ ID NO: 333422 - DNA, 1059 bp, Artificial Sequence
  derived and/or modified sequence
atggccggcaccatctgcttcatcatgtgggtgctcttcatcacagacacagtgtggagccgctctgtgcggcaggtgtatgaggtgcatgacagtgatgactggaccatccatgactttgaatgtcccatggagtgcttctgccccccatccttccccacagccctgtactgtgaaaatagaggcctgaaggagatcccagccatccccagccgcatctggtacctgtacctgcagaacaacctgattgagaccatccctgagaagccctttgaaaatgccacccagctgcgctggatcaacctgaacaagaacaagatcaccaactacggcatcgagaagggggccctgagccagctgaagaagctgctcttcctgttcctggaggacaatgagctggaggaggtgcccagccccctgcccaggagcctggagcagctgcagctggccaggaacaaggtgagccgcatcccccagggcaccttcagcaacctggagaacctgaccctgctggacctgcagaacaacaagctggtggacaatgccttccagagggacaccttcaagggcctgaagaacctgatgcagctgaacatggccaagaatgccctgaggaacatgccaccccggctgcctgccaacaccatgcagctgttcctggacaacaacagcattgagggcatccctgagaactacttcaacgtcatccccaaggtggccttcctgcggctgaaccacaacaagctgagtgatgagggcctgcccagccggggctttgatgtgagcagcatcctggacctgcagctgagccacaaccagctgaccaaggtgccccgcatcagcgcccacctgcagcacctgcacctggaccacaacaagatcaagtctgtgaatgtgtctgtcatctgccccagccccagcatgctgcctgctgagcgggacagcttctcctatggcccccacctgcgctacctgcggctggatggaaatgagatcaagccacccatccccatggccctgatgacctgcttccggctgctgcaggccgtcatcatctag

SEQ ID NO: 333423 - DNA, 1059 bp, Artificial Sequence
  derived and/or modified sequence
atggccggcaccatctgcttcatcatgtgggtgctgttcatcaccgacactgtgtggtctaggtctgtgaggcaggtctatgaggtacatgatagtgatgactggaccattcacgactttgagtgcccaatggaatgcttttgccctccctccttcccaactgccctgtactgtgagaatcggggactaaaggagatacctgccattccgtctaggatctggtacctgtacctgcaaaataatctgattgaaacaattcccgagaaaccattcgagaatgctactcagctgagatggattaacttgaacaaaaataaaatcacaaattacggtattgaaaagggtgccctttcacaactgaaaaagctgctgttcctgttcctggaagacaatgagctggaagaggtccctagccctctgccaaggagccttgaacagctgcagctggctagaaacaaggtgagcaggataccccaggggacattctcaaatctggaaaacctcacattgttagacttgcagaacaataaactggtcgacaatgcgtttcagagggatacgttcaagggtttaaagaacctgatgcagctgaacatggccaaaaacgccttgcgcaatatgcccccacggctgcctgccaataccatgcagttgtttctggacaataactctatcgagggaattcccgagaactattttaatgtgatcccgaaggtggccttcctacgcctgaaccataataaactctccgatgaaggtttgcccagtcgaggcttcgacgtgtcgagcattttggacctgcagttgtcacacaatcagttaaccaaggtgccccgcatcagcgcgcacctgcagcatctccatctggatcataacaagataaaatctgtcaatgttagtgtgatttgtccttcaccctcaatgctgcccgcggagagagactcattcagctacggacctcacctccgatatctcaggctggacggcaatgaaataaagcctcccataccaatggctctcatgacctgctttcgcctgttgcaggctgtgattatatag

SEQ ID NO: 333424 - DNA, 1059 bp, Artificial Sequence
  derived and/or modified sequence
atggcgggaaccatttgtttcatcatgtgggtgttatttattacagataccgtgtggagtagatccgtaagacaggtgtatgaagtgcacgattcagacgattggactatccacgactttgagtgccctatggaatgcttttgtcccccatccttccctacagctctgtattgcgaaaatcggggactgaaggaaattccggcaataccctcccggatctggtatctctatctgcaaaacaatctgatcgagaccatacccgaaaaaccctttgaaaacgctacccaactgcgctggatcaacctaaataagaataagataaccaactatggcatcgaaaagggcgctttgtcacaactgaaaaaactgctgttcctatttctagaagacaacgagttggaggaggtcccaagcccactgcctcggtctctggagcagctgcagctggctcggaacaaagtctctcgcatcccgcagggcaccttcagcaatttggagaatctgacattgctcgatcttcaaaataataaattagtagataacgcctttcagagagacacctttaagggactcaagaacctcatgcagctcaacatggcaaaaaatgctttgcgaaacatgccacctagactccctgccaatactatgcagttattcctggataataactcgattgaaggtatacccgagaattacttcaatgtcattcccaaggtcgccttcctgaggctcaaccacaataagctctcagatgaagggctgccttcccgcggatttgatgttagctcaatattggatctccaactgagccataatcagctaacaaaggtgcccaggatcagcgcacacctccagcacctgcacttggatcacaataagatcaaaagtgtgaacgtgtccgtcatatgccccagccccagcatgcttcccgcagagcgggacagcttctcctatggaccccacctgcgttatctgcgtctggacggaaacgaaatcaaaccacctattcctatggccttaatgacgtgttttcgattgcttcaggctgtgataatttag

SEQ ID NO: 333425 - DNA, 1059 bp, Artificial Sequence
  derived and/or modified sequence
atggccggcaccatctgcttcatcatgtgggtgctgttcatcaccgacaccgtgtggagcagaagcgtgagacaggtgtacgaggtgcacgacagcgacgactggaccatccacgacttcgagtgccccatggagtgcttctgcccccccagcttccccaccgccctgtactgcgagaacagaggcctgaaggagatccccgccatccccagcagaatctggtacctgtacctgcagaacaacctgatcgagaccatccccgagaagcccttcgagaacgccacccagctgagatggatcaacctgaacaagaacaagatcaccaactacggcatcgagaagggcgccctgagccagctgaagaagctgctgttcctgttcctggaggacaacgagctggaggaggtgcccagccccctgcccagaagcctggagcagctgcagctggccagaaacaaggtgagcagaatcccccagggcaccttcagcaacctggagaacctgaccctgctggacctgcagaacaacaagctggtggacaacgccttccagagagacaccttcaagggcctgaagaacctgatgcagctgaacatggccaagaacgccctgagaaacatgccccccagactgcccgccaacaccatgcagctgttcctggacaacaacagcatcgagggcatccccgagaactacttcaacgtgatccccaaggtggccttcctgagactgaaccacaacaagctgagcgacgagggcctgcccagcagaggcttcgacgtgagcagcatcctggacctgcagctgagccacaaccagctgaccaaggtgcccagaatcagcgcccacctgcagcacctgcacctggaccacaacaagatcaagagcgtgaacgtgagcgtgatctgccccagccccagcatgctgcccgccgagagagacagcttcagctacggcccccacctgagatacctgagactggacggcaacgagatcaagccccccatccccatggccctgatgacctgcttcagactgctgcaggccgtgatcatctag

SEQ ID NO: 333426 - protein, 1873 aa, Artificial Sequence
  derived and/or modified sequence
MEANDHFNFTGLPPAPAASGLKPSPSSGEGLYTNGSPMNFPQQGKSLNGDVNVNGLSTVSHTTTSGILNSAPHSSSTSHLHHPSVAYDCLWNYSQYPSANPGSNLKDPPLLSQFSGGQYPLNGILGGSRQPSSPSHNTNLRAGSQEFWANGTQSPMGLNFDSQELYDSFPDQNFEEVGSGIHPDEAAEKEMTSVVAENGTGLVGSLELEEEQPELKMCGYNGSVPSVESLHQEVSVLVPDPTVSCLDDPSHLPDQLEDTPILSEDSLEPFNSLAPEPVSGGLYGIDDTELMGAEDKLPLEDSPVISALDCPSLNNATAFSLLADDSQTSTSIFASPTSPPVLGESVLQDNSFDLNNGSDAEQEEMETQSSDFPPSLTQPAPDQSSTIQLHPATSPAVSPTTSPAVSLVVSPAASPEISPEVCPAASTVVSPAVFSVVSPASSAVLPAVSLEVPLTASVTSPKASPVTSPAAAFPTASPANKDVSSFLETTADVEEITGEGLTASGSGDVMRRRIATPEEVRLPLQHGWRREVRIKKGSHRWQGETWYYGPCGKRMKQFPEVIKYLSRNVVHSVRREHFSFSPRMPVGDFFEERDTPEGLQWVQLSAEEIPSRIQAITGKRGRPRNTEKAKTKEVPKVKRGRGRPPKVKITELLNKTDNRPLKKLEAQETLNEEDKAKIAKSKKKMRQKVQRGECQTTIQGQARNKRKQETKSLKQKEAKKKSKAEKEKGKTKQEKLKEKVKREKKEKVKMKEKEEVTKAKPACKADKTLATQRRLEERQRQQMILEEMKKPTEDMCLTDHQPLPDFSRVPGLTLPSGAFSDCLTIVEFLHSFGKVLGFDPAKDVPSLGVLQEGLLCQGDSLGEVQDLLVRLLKAALHDPGFPSYCQSLKILGEKVSEIPLTRDNVSEILRCFLMAYGVEPALCDRLRTQPFQAQPPQQKAAVLAFLVHELNGSTLIINEIDKTLESMSSYRKNKWIVEGRLRRLKTVLAKRTGRSEVEMEGPEECLGRRRSSRIMEETSGMEEEEEEESIAAVPGRRGRRDGEVDATASSIPELERQIEKLSKRQLFFRKKLLHSSQMLRAVSLGQDRYRRRYWVLPYLAGIFVEGTEGNLVPEEVIKKETDSLKVAAHASLNPALFSMKMELAGSNTTASSPARARGRPRKTKPGSMQPRHLKSPVRGQDSEQPQAQLQPEAQLHAPAQPQPQLQLQLQSHKGFLEQEGSPLSLGQSQHDLSQSAFLSWLSQTQSHSSLLSSSVLTPDSSPGKLDPAPSQPPEEPEPDEAESSPDPQALWFNISAQMPCNAAPTPPPAVSEDQPTPSPQQLASSKPMNRPSAANPCSPVQFSSTPLAGLAPKRRAGDPGEMPQSPTGLGQPKRRGRPPSKFFKQMEQRYLTQLTAQPVPPEMCSGWWWIRDPEMLDAMLKALHPRGIREKALHKHLNKHRDFLQEVCLRPSADPIFEPRQLPAFQEGIMSWSPKEKTYETDLAVLQWVEELEQRVIMSDLQIRGWTCPSPDSTREDLAYCEHLSDSQEDITWRGRGREGLAPQRKTTNPLDLAVMRLAALEQNVERRYLREPLWPTHEVVLEKALLSTPNGAPEGTTTEISYEITPRIRVWRQTLERCRSAAQVCLCLGQLERSIAWEKSVNKVTCLVCRKGDNDEFLLLCDGCDRGCHIYCHRPKMEAVPEGDWFCTVCLAQQVEGEFTQKPGFPKRGQKRKSGYSLNFSEGDGRRRRVLLRGRESPAAGPRYSEEGLSPSKRRRLSMRNHHSDLTFCEIILMEMESHDAAWPFLEPVNPRLVSGYRRIIKNPMDFSTMRERLLRGGYTSSEEFAADALLVFDNCQTFNEDDSEVGKAGHIMRRFFESRWEEFYQGKQANL

SEQ ID NO: 333427 - DNA, 5622 bp, Artificial Sequence
  derived and/or modified sequence
atggaagccaatgaccactttaactttacgggactgcctcccgctcccgcagcctctggtctcaaaccatcgccttccagtggtgagggcttgtacacaaacggcagccctatgaactttccccagcagggaaagagtctgaacggtgacgtcaacgtaaacgggctgagcacagtgtcgcatacaactacttccggcattctgaacagtgcccctcattcctcctctaccagtcacttacatcatccctccgttgcctacgactgtctctggaactactctcagtatcccagcgcaaatcccgggagcaatctcaaagaccctcccctgctgtctcaattttccggcgggcagtatcccctcaacggaatccttggaggtagccgccagccatcatcaccctctcacaacacgaatttgagagcaggaagccaggagttttgggcaaacggcacccagagtcctatgggcttaaacttcgattcacaggaactatacgattctttcccagaccaaaactttgaggaggtcggctctggtattcaccctgatgaagccgcggaaaaggagatgacatctgtcgtggccgagaatggcaccggtctcgttggatccctggaactggaggaagagcagcctgagctgaagatgtgcggctataacgggtctgtacctagcgtggagtcacttcaccaagaagtgagcgttctcgtgccagatcctactgtgtcctgcctggatgatccctctcacctgccagaccagcttgaagacaccccaatcttgagtgaagattctctcgagccttttaattcactcgcacctgaacctgttagcggcggactctacgggattgatgatacagagcttatgggcgctgaggacaagctgcccttggaagatagccctgtgatcagtgccttagactgccccagcctgaacaacgctactgccttcagccttcttgccgatgactctcagacgtccacctcaatctttgcctcccctacgagtccaccggtgctgggagaatctgtactccaggataacagcttcgacctcaataacgggagcgacgctgaacaggaagagatggagactcaatccagtgattttccaccttcgctgacacagcccgcccctgatcagtccagtacaattcaactgcatcccgccacctctcccgcagtcagccccactacttcgccagccgtatcgctggtggtaagccctgctgccagccccgaaatcagtccagaagtttgtcctgctgcctctaccgttgtatctcctgctgtattttccgtagtgagccccgcatcgtccgctgtgctgcccgccgtgagtctagaggtcccccttacggcaagcgtcaccagcccgaaggcctcaccagtgacatccccagcagccgcattccctaccgcgtcccccgcgaataaggacgtgagctctttcctggaaactaccgccgatgtagaggagataacaggggaaggcctgactgcttctggctcgggagatgtgatgaggagacggatagctacccccgaggaggtcaggctcccactgcagcacggatggagaagagaggtgcgaatcaaaaaggggtctcaccgctggcagggagagacctggtactatggaccatgcggcaagaggatgaagcaattcccggaagttataaaatacctgtctcgcaatgtcgtgcacagtgtgcgccgcgagcattttagcttcagccctcggatgcctgtcggagatttctttgaggagcgcgacacgccagagggtttacagtgggtacagctgagtgctgaagagatcccctcccggatccaggccataaccggcaaaaggggcagacctcgaaacacagagaaagctaagacaaaggaagtccctaaggttaaacgagggaggggtagaccgccaaaggtcaagatcaccgaactgctaaataaaaccgataacaggccactcaagaaactggaagcgcaggagactctgaatgaagaggacaaagccaaaatcgcaaagtctaaaaaaaaaatgaggcaaaaagtccagagaggagaatgccagaccactattcagggacaggcccgcaacaagagaaagcaggaaacaaagtctttgaagcaaaaagaggccaaaaagaagtcaaaggcagaaaaggagaaaggaaaaacaaaacaagagaagctgaaagagaaggtgaaacgtgagaagaaggaaaaggttaagatgaaggagaaggaggaggtgaccaaggcaaagcccgcttgtaaggcagataagacccttgcaacccagcgccggctggaagagcgccagagacagcagatgattctcgaagagatgaaaaagcccacagaggacatgtgcctcaccgaccaccagcctttaccggatttctccagggttcccggtctgacattgccatccggggcctttagtgactgtctgaccattgtcgagtttctgcacagctttggaaaagttctcgggtttgacccagccaaggatgtgcctagcttaggcgtgctgcaggaagggctactttgtcagggggatagtctgggcgaagtacaagaccttcttgtgcgcttgctgaaggccgcacttcacgaccctggattccccagttactgtcagtcccttaaaatcttgggagagaaggtgtccgagatccctctgacacgggataacgtgagtgagatactccgttgtttcctaatggcttatggagtcgaaccagctctgtgcgaccggttgcgcactcagccttttcaggcccaaccacctcagcagaaagccgctgtgctggcgtttctcgttcatgagttgaacggttcaaccctgatcatcaacgagattgacaagaccctcgaaagtatgagcagttaccggaaaaacaagtggatcgtggagggccgactcagacggctgaagacagtcttggccaaacgaactgggaggagcgaagtcgagatggaagggcctgaagaatgcctggggcggcgcaggtcttctcgaatcatggaggaaaccagcggcatggaagaagaggaggaggaggaatccatcgcagctgttcccggaagaaggggacgacgtgacggagaagtggatgctaccgcatcaagcatccctgaacttgaacgtcagatagagaagctgagtaaaaggcagctcttttttcgaaaaaaactgctgcacagctctcaaatgttacgggccgtttcactgggacaggaccgttatagaagacgctattgggtgcttccttatctggcaggaatatttgtagaaggaacagaaggcaacttagtcccagaagaggtgatcaaaaaggaaacagacagtctgaaagtggccgcccacgcttccttaaaccccgccctctttagcatgaagatggaactggccggctctaataccaccgcctcatctcccgcccgtgcaagaggcaggcctcgaaagacgaaaccaggctccatgcagccccgtcacttaaaatctccagtgcggggccaggacagtgagcagcctcaggctcaactacaaccagaagctcagttgcacgctccggcgcagcctcagccccaacttcagctccagttacagagtcacaagggcttcctggagcaagagggaagcccgctaagtctgggacagtctcaacacgacctgtcacaaagcgcctttttgtcatggctgtcgcagacacaatcccattcctccctcctctcctcaagtgttctgactcccgatagctcgccaggaaagctggatccagctccctctcaaccccccgaggaacccgaacccgacgaggctgagtcatccccagacccacaagccctgtggtttaatatctctgctcaaatgccctgtaacgcggcgcccacccctcctcccgcagtctccgaagaccagcccaccccatcgccccaacaactggcttcttctaagccaatgaaccgaccaagtgcagccaacccctgctccccagtgcagtttagctctacgccgttagccgggctcgcgccgaaacgaagagccggagacccaggtgagatgccacagagcccgacaggtctaggacaaccaaagcgtcggggtaggccaccaagtaagtttttcaaacagatggaacagagatacctgactcagcttacggcccagccagttcctcccgaaatgtgttcaggatggtggtggatcagagaccccgaaatgctcgacgcaatgctgaaggctctccaccctcgaggcatccgagaaaaagccctccacaagcatctgaataagcaccgagacttccttcaggaggtttgtctgcgccccagcgcagacccaatcttcgaacctagacaattgcctgccttccaggaggggatcatgagctggtcccccaaggagaagacctacgaaacagatctggcagtgctgcaatgggtggaagaactggaacagagagtgataatgtctgatttacagattcgggggtggacttgtcccagtcccgattcgacaagagaggaccttgcatattgtgaacacctatctgatagtcaggaggacattacgtggcgaggtcggggcagggaaggactcgcgccacagagaaagacgaccaaccctcttgacctcgccgttatgagacttgctgcactggaacaaaatgttgagaggcgatacctgcgggagcccttgtggcccacgcacgaagtcgtgctcgagaaagcgctgttgagcacccctaatggagcccccgaaggcaccactaccgaaattagttatgagatcaccccacgtatccgcgtttggcgacaaactttggaaagatgtaggtcggcagcccaggtatgcttatgtctggggcagctggagcgatccattgcgtgggagaagagcgtgaataaagttacctgccttgtgtgcagaaaaggggataatgacgagttcctgcttttgtgtgatggctgtgatcgcgggtgtcacatttactgccaccgcccaaaaatggaagctgttcccgagggggactggttctgtacagtgtgcttggcccagcaagttgagggtgaattcacccagaaacccgggtttcctaagagagggcaaaaaaggaaatctggctactcattgaactttagcgagggcgacgggagacggaggcgtgtgttattgaggggccgtgaaagccccgcagccggtcccaggtattcagaggaaggactgtccccgagcaagagacggcgcttgtcaatgaggaaccatcatagcgacttgaccttttgtgaaatcatactcatggagatggagtcccacgacgctgcatggcccttcctagagcccgtgaaccctaggctggtgtcgggctatcgcagaattataaagaatcccatggatttctcaacgatgagagagcgacttctaaggggcggctacacatcatccgaagaattcgcagctgatgcactgctcgtcttcgacaactgtcaaacattcaacgaagacgactctgaggtggggaaagccgggcatattatgcggagattctttgagtctcgatgggaggaattctatcagggaaagcaggccaacttatag

SEQ ID NO: 333428 - DNA, 5622 bp, Artificial Sequence
  derived and/or modified sequence
atggaggccaatgaccacttcaacttcaccggcctgcccccagccccagctgccagcggcctgaagcccagccccagcagtggagagggcctgtacaccaacggcagccccatgaacttcccccagcagggcaagagcctgaatggagatgtgaatgtgaatggcctgagcacagtgagccacaccaccaccagcggcatcctgaacagcgccccccacagcagcagcaccagccacctgcaccaccccagcgtggcctatgactgcctgtggaactacagccagtaccccagcgccaaccctggcagcaacctgaaggacccccccctgctgagccagttcagcggcggccagtaccccctgaatggcatcctgggcggcagccggcagcccagcagccccagccacaacaccaacctgcgggccggcagccaggagttctgggccaacggcacccagagccccatgggcctgaactttgacagccaggagctgtatgacagcttcccagaccagaactttgaggaggtgggcagcggcatccacccagatgaggccgctgagaaggagatgacctctgtggtggctgaaaatggcaccggcctggtgggcagcctggagctggaggaggagcagcctgagctgaagatgtgtggctacaatggatctgtgcccagcgtggagagcctgcaccaggaggtgtctgtgctggtgcctgaccccaccgtgtcctgcctggatgaccccagccacctgcctgaccagctggaggacacccccatcctgtctgaggacagcctggagcccttcaacagcctggcccctgagcctgtgtctgggggcctgtatggaattgatgacacagagctgatgggcgctgaggacaagctgcccctggaggacagccctgtgatcagcgccctggactgccccagcctgaacaatgccacagccttcagcctgctggctgatgacagccagaccagcaccagcatctttgccagccccaccagcccccctgtgctgggggagagcgtgctgcaggacaacagctttgacctgaacaacggcagtgatgctgagcaggaggagatggagacccagagcagtgacttcccccccagcctgacccagcctgccccagaccagagcagcaccatccagctgcacccagccaccagccctgctgtgagccccaccaccagccctgctgtgtccctggtggtgtccccagctgccagccctgagatcagccctgaggtgtgcccagctgccagcacagtggtgtccccagctgtgttttctgtggtgtccccagccagcagcgctgtgctgcctgctgtgtccctggaggtgcccctgacagcctctgtgaccagccccaaggccagccctgtgaccagccctgctgctgccttccccacagccagccctgccaacaaggatgtgtcctccttcctggagaccacagcagatgtggaggagatcactggagagggcctgacagccagcggcagcggagatgtgatgagaagacgcatcgccaccccagaggaggtgcggctgcccctgcagcacggctggaggcgggaggtgcgcatcaagaagggcagccaccgctggcagggcgagacctggtactacggcccctgtgggaagaggatgaagcagtttcctgaggtgatcaagtacctgagcagaaatgtggtgcacagcgtgcggcgggagcacttctccttcagccccaggatgcctgtgggggacttctttgaggagcgggacaccccagagggcctgcagtgggtgcagctgtctgctgaggagatccccagccgcatccaggccatcaccgggaagaggggccggcccaggaacacagagaaggccaagaccaaggaggtgcccaaggtgaagaggggccggggccggccccccaaggtgaagatcacagagctgctgaacaagacagacaaccggcccctgaagaagctggaggcccaggagaccctgaatgaggaggacaaggccaagatcgccaagagcaagaagaagatgaggcagaaggtgcagagaggagagtgccagaccaccatccagggccaggccaggaacaagaggaagcaggagaccaagagcctgaagcagaaggaggccaagaagaagagcaaggccgagaaggagaagggcaagaccaagcaggagaagctgaaggagaaggtgaagcgggagaagaaggagaaggtgaagatgaaggagaaggaggaggtgaccaaggccaagccagcctgcaaggctgacaagaccctggccacccagaggcggctggaggagcggcagaggcagcagatgatcctggaggagatgaagaagcccacagaggacatgtgcctgacagaccaccagcccctgcctgacttcagccgggtgcccggcctgaccctgcccagcggggccttcagtgactgcctgaccatcgtggagttcctgcacagctttgggaaggtgctgggctttgatcctgccaaggatgtgcccagcctgggcgtgctgcaggagggcctgctgtgccagggcgacagcctgggggaggtgcaggacctgctggtgcggctgctgaaggccgccctgcatgaccccggcttccccagctactgccagagcctgaagatcctgggggagaaggtgtctgagatccccctgacccgggacaacgtgtctgagatcctgcgctgcttcctgatggcctacggcgtggagcccgccctgtgtgaccggctgcggacccagcccttccaggcccagcccccccagcagaaggctgctgtgctggccttcctggtgcatgagctgaatggcagcaccctcatcatcaatgaaattgacaagaccctggagagcatgagcagctacaggaagaacaagtggatcgtggagggccgcctgcggcggctgaagacagtgctggccaagaggacaggccgctctgaggtggagatggagggccctgaggagtgcctgggcagaagaagaagcagccgcatcatggaggagaccagcggcatggaggaggaggaggaggaggagagcattgctgctgtgcccggccggcggggcagaagagatggagaggtggatgccacagccagcagcatccctgagctggagcggcagatcgagaagctgagcaagaggcagctgttcttcaggaagaagctgctgcacagcagccagatgctgcgggctgtgtccctgggccaggaccgctacagaagacgctactgggtgctgccctacctggccggcatctttgtggagggcacagagggcaacctggtgcctgaggaggtgatcaagaaggagacagacagcctgaaggtggccgcccacgccagcctgaacccagccctcttctccatgaagatggagctggccggcagcaacaccacagccagcagccctgcccgggcccggggccggcccaggaagaccaagccaggctccatgcagcccaggcacctgaagagccctgtgcggggccaggacagcgagcagccccaggcccagctgcagcctgaggcccagctgcacgccccagcccagccccagccccagctgcagctgcagctgcagagccacaagggcttcctggagcaggagggcagccccctgagcctgggccagagccagcacgacctgagccagagcgccttcctgtcctggctgagccagacccagagccacagcagcctgctgagcagctctgtgctgaccccagacagcagccctgggaagctggaccctgcccccagccagcccccagaggagcctgagccagatgaagctgagagcagcccagacccccaggccctgtggttcaacatcagcgcccagatgccctgcaatgctgcccccaccccacctcctgctgtgtctgaggaccagcccacccccagcccccagcagctggccagcagcaagcccatgaaccggcccagcgctgccaacccctgcagccctgtgcagttcagcagcacccccctggccggcctggcccccaagaggcgggccggggaccctggagagatgccccagagccccaccggcctgggccagcccaagaggcggggccggccccccagcaagttcttcaagcagatggagcagcgctacctgacccagctgacagcccagcctgtgcccccagagatgtgcagcggctggtggtggatccgggaccctgagatgctggatgccatgctgaaggccctgcacccccggggcatccgggagaaggccctgcacaagcacctgaacaagcaccgggacttcctgcaggaggtgtgcctgcggcccagcgctgaccccatctttgagccccggcagctgcctgccttccaggagggcatcatgtcctggagccccaaggagaagacctatgaaacagacctggccgtgctgcagtgggtggaggagctggagcagagggtcatcatgtctgacctgcagatccggggctggacctgccccagcccagacagcacccgggaggacctggcctactgtgagcacctgagtgacagccaggaggacatcacctggaggggccggggccgggagggcctggccccccagaggaagaccaccaaccccctggacctggccgtgatgaggctggccgccctggagcagaatgtggagcggcgctacctgcgggagcccctgtggcccacccatgaggtggtgctggagaaggccctgctgagcaccccaaatggagcccctgagggcaccaccacagagatctcctatgagatcaccccccgcatccgggtgtggaggcagaccctggagcgctgccgctctgctgcccaggtgtgcctgtgcctgggccagctggagaggagcatcgcctgggagaagtctgtgaacaaggtgacctgcctggtgtgcaggaagggggacaatgatgagttcctgctgctgtgtgatggctgtgaccggggctgccacatctactgccaccggcccaagatggaggccgtgcctgagggggactggttctgcaccgtgtgcctggcccagcaggtggagggggagttcacccagaagccaggcttccccaagaggggccagaagaggaagagcggctacagcctgaacttctctgaaggagatggaagaagaagaagagtgctgctgcggggccgggagagccctgctgctggcccccgctacagcgaggagggcctgagccccagcaagagaagaaggctgtccatgaggaaccaccacagcgacctgaccttctgtgagatcatcctgatggagatggagagccatgatgctgcctggcccttcctggagcctgtgaacccccggctggtgtctggctaccgccgcatcatcaagaaccccatggacttcagcaccatgagggagcggctgctgcggggcggctacaccagcagcgaggagtttgctgctgatgccctgctggtgtttgacaactgccagaccttcaatgaagatgattctgaggtgggcaaggccggccacatcatgaggcgcttctttgagagccgctgggaggagttctaccagggcaagcaggccaacctgtag

SEQ ID NO: 333429 - DNA, 5622 bp, Artificial Sequence
  derived and/or modified sequence
atggaggccaacgaccacttcaacttcaccggcctgccccccgcccctgccgcttcaggcctcaaaccttccccttcaagcggcgagggtttgtatacaaacgggagcccaatgaattttcctcaacaaggtaagagcctgaatggggacgtaaatgtgaatggcctctctacagtgtcccacacaaccaccagtggaatcctaaattctgcacctcactccagttcaacatcccatctgcaccatccttcggtggcttacgactgcctgtggaactattcacagtaccccagtgccaaccccgggagcaatttaaaggatccccccctcttgtctcagttttccgggggccagtaccccctgaacgggattctgggaggtagccgtcagccgtcatcaccctcacacaacacaaacctcagggccggttcccaggagttctgggctaacggaacccaaagtcctatgggcctgaattttgattctcaggagttgtacgacagctttccagatcagaactttgaggaggtgggaagcggcatccacccagacgaggcggccgaaaaggagatgacgtccgtggtggccgaaaacggtacaggtctcgtggggtccctcgaactagaggaggagcagccagaacttaaaatgtgcgggtataacggatcagtccccagcgttgagagtctccaccaggaggtctctgtgctcgtacccgacccaaccgtaagctgtctagatgatccttctcacctgcccgaccagcttgaggacacccccatcctcagcgaagatagtctagagccttttaattcactcgccccagagccagtgtcgggggggctgtatggaattgatgataccgagttaatgggtgctgaggacaaattgccgctggaggatagtccggtcatcagcgcgctcgactgtccatctttaaataatgccaccgcattcagtctgctggccgacgattctcagacaagtacctcaatcttcgcctctcctaccagccccccagtgctgggtgaatctgttttgcaggacaactcctttgacctcaataatggaagcgacgctgaacaggaagagatggagacacaaagttctgatttcccaccatctctgactcagccagcccccgaccagtcttccacaatccaactgcatccagcaacctcgcccgcagtgagccccactaccagccctgccgtgagcctggtggttagcccggctgcatcacctgagatatctcctgaggtttgccctgccgcttctactgtggtttctcccgccgtgttttccgttgtatctccagcttcctccgcggtattgccagccgtttcgctggaagtccccctaaccgcatccgtcacatctcctaaggcttcccctgtaacaagtccagctgccgctttccctactgcctcgcccgctaataaggacgtatcttcctttctggaaaccactgccgacgtcgaggagatcacaggagagggcctcacagcctcagggagcggagacgtgatgcgccgtaggatcgctacgcctgaagaggtgagattacctttgcagcatggctggcggcgggaggtcagaattaaaaaagggtcacacaggtggcagggcgaaacctggtactacggcccatgcgggaaaagaatgaaacagtttcctgaggtaatcaaatatctgtcaagaaacgtggtccacagcgtaagaagagagcacttttcatttagcccccgtatgcccgtgggagacttcttcgaggaaagagatacgcccgaggggctccaatgggtccagctttccgcagaggagatcccatcccgaattcaagcaataactggcaaacgtgggagacctaggaacaccgagaaggcaaaaactaaggaggtgccaaaggtgaagagagggcggggccgaccgcccaaggtcaaaataaccgagctgctgaataaaaccgataaccgtccacttaaaaaactggaagcacaggaaacactgaatgaggaagacaaggccaagattgcaaaaagcaagaaaaagatgagacagaaggtgcagcgtggggagtgccagacgaccatccaaggtcaggctaggaataaaaggaagcaggagactaagagcctgaagcagaaagaggcgaaaaagaaatccaaggccgagaaagaaaaagggaagactaaacaggagaagctgaaagagaaggtgaagcgggaaaagaaagagaaggtaaaaatgaaagagaaggaggaggtcaccaaggctaagcccgcctgcaaagctgataagactctggcaacgcaacggaggctagaagagcgccagcgtcagcagatgatactcgaagaaatgaaaaagcccacagaagacatgtgcctgactgatcaccagccactgccagatttttcgagggttcctggcctgacgctgcccagcggagcattctccgactgcttgacgattgtggagtttctgcacagttttgggaaggtactgggcttcgatcctgccaaggacgttccgagcttgggagtgctccaggaggggctactgtgtcagggggactccttaggtgaggtgcaggatttgctggttcgcctcttgaaggcagcccttcatgatcccggatttccttcttactgccaatcccttaagattctgggagaaaaggtgtcagagatcccactgacgcgggacaatgttagcgaaatactgagatgctttttaatggcctatggagtcgagcccgccttgtgcgatcgcttaaggacccagccttttcaggctcagccgccgcagcaaaaagctgctgtcctggctttcttggtccatgagctaaacgggtcaaccttgattatcaacgagattgataagaccctggagagcatgagtagttaccggaaaaacaaatggattgtcgaaggacgtcttcgtcgcctcaaaacggtactcgccaagcggacaggtaggtctgaagtcgagatggaggggcccgaagaatgtctcggccgaagacgttcgtcccggataatggaggagacgtccggaatggaggaggaggaggaggaggaatccatcgccgcagtgccgggacgaagggggagacgtgacggagaagtagacgcgacggcctcaagcataccagaactggagcggcagattgaaaagcttagcaaaaggcagctgttttttagaaaaaaactcctccattcgtcgcagatgctacgcgccgtctcgctcggccaagatagataccggcggcggtactgggtgctcccctatctggctggcatctttgtggaaggtacggagggcaatctggtaccagaggaagtgatcaagaaggaaactgactctctgaaagttgccgcacacgccagcctgaatcccgcccttttttcgatgaagatggaattggcaggcagtaataccacagcatcaagcccggcgcgtgctcgtggtcgaccccgaaaaacaaagccagggtctatgcagccccggcatcttaaaagtcctgttaggggacaggactcagagcagcctcaggcccaactgcagccggaagctcagctgcacgcgccagcccagccccagccccagctgcagctgcagctgcagagccataagggttttctggagcaggagggaagcccactgagtctaggacagagtcaacacgacttatctcagtccgccttcctgtcctggctctcccagactcagtcgcactcctcccttctgagcagcagtgttttaactcctgattcatcccccggaaagttggacccggctccctctcaaccacctgaggaacccgaacccgatgaggctgaaagttctccagacccccaggcgctctggtttaacatttcagcccagatgccatgtaatgctgccccgacacccccaccagctgtgtctgaggaccagcccactccatctccccagcagctggcctcatctaaaccaatgaaccggccttcagccgcaaatccctgctccccggtgcagtttagttctacaccactagctggactcgcaccaaagaggagggcaggggatcctggcgaaatgccccagtctcccactggtttggggcagcctaagcggcgggggaggcctcccagcaagttttttaaacagatggaacagagatatttgacccagctgaccgcccagccagttcccccagaaatgtgttccgggtggtggtggatacgggacccagaaatgctcgacgcaatgttgaaggccctgcacccccgcggtattagagaaaaggccttacacaaacacctgaacaagcatcgcgacttcctgcaggaggtctgtttgcggccctctgcggatccaatctttgagccacgccagctgcccgcgtttcaagagggcattatgagttggtccccaaaggagaagacatacgaaacagacctcgctgtccttcaatgggtagaagaactcgagcagcgtgtcataatgtctgatctccagatacgcggatggacctgtccatccccagatagcaccagagaggacttggcctattgcgagcacctctctgacagccaagaagacatcacatggaggggtcgaggcagggaggggctagccccccagagaaaaacaacgaaccctctggacctcgccgtgatgaggcttgcagcgcttgaacagaatgtggaaagacgctacctgagggagcccctgtggcccactcatgaagtggttcttgaaaaggctctgctgtctacccctaatggggccccagagggaaccacaaccgaaatcagttacgagatcacaccccgaatcagagtttggcgacagaccctggagcggtgccgtagtgcggcgcaggtttgcctttgcctgggccagctcgagcgatcaatcgcgtgggagaagtccgtcaataaagtgacgtgtctggtctgtcggaagggagataacgatgaattcctcctgctgtgtgatggctgcgacaggggttgccacatatactgtcacaggcctaagatggaggcagttcctgaaggagactggttttgcactgtgtgccttgcgcagcaggtcgaaggggaatttactcagaaaccgggctttccaaaacggggccagaaaagaaaatctgggtatagtcttaatttttctgaaggagatgggcgccggcgtagggttcttctgaggggacgtgagtcacccgcggccggaccccgttattccgaggagggcctcagcccatccaaaaggagacgcctgagcatgagaaaccaccactctgacctgacattctgtgagattattcttatggagatggaaagccatgatgctgcttggccttttctggaaccagtgaaccccagactcgtgtctggttacaggcggataattaagaatcccatggacttctccactatgagggaaagattgttaaggggcgggtacacatctagtgaagagtttgctgccgacgcccttctcgtctttgataactgtcagacatttaacgaggacgacagcgaggtggggaaggcaggacacattatgagaagattttttgaatctcgctgggaagaattttatcagggaaagcaggcaaatctctag

SEQ ID NO: 333430 - DNA, 5622 bp, Artificial Sequence
  derived and/or modified sequence
atggaagccaacgaccactttaatttcaccgggcttcccccagcccctgcggcaagcggactgaagccgtcccctagtagcggagagggtttgtatacgaatggtagtcccatgaatttcccacagcagggcaagtccctgaacggggacgtcaatgtgaacggactctcgaccgtgtcacacactacaaccagcggtattctcaacagcgcgcctcactccagcagcacctcccatctgcatcacccctccgtggcctatgactgcctttggaattattcacagtacccctccgccaaccccggtagcaatctaaaagacccacctctgctgtctcaatttagtgggggacagtatcctctaaacggaatcctcggcggatcccgccagccgtcttcaccatctcacaacacaaacctgagggctggatctcaggagttttgggcaaatggcacacagtcgcccatggggctcaattttgactcacaggaactttatgattctttccccgatcagaacttcgaggaagtggggtccggaatccaccccgatgaggcggctgaaaaggaaatgactagcgtggtggctgaaaatggaaccgggttagtcggcagcttggagttggaggaggaacagcccgaacttaaaatgtgcgggtataatggatccgtgccaagtgtcgagtccttgcatcaggaagtgtcagtgctagttcctgatccaactgtctcttgtttggatgatccttcacacttgccggaccagcttgaggatacacctattctgagcgaggactcactcgagcctttcaacagtctggcccctgagcccgtgtcaggcggactatatgggattgacgacactgaattgatgggtgctgaggataagcttccattagaagactctccagtgatcagtgccctcgactgtccctcactgaataacgccactgccttctctctattagcagacgacagccaaacaagtacgtctatcttcgcaagtcccacgtcacccccagtcctgggtgagagcgtgcttcaggacaattccttcgacttgaataatgggagtgacgctgaacaggaagagatggagactcagtctagcgacttcccacccagcctgactcagccggctccggaccagtcctctaccatccagctacatccagcaacttcacccgctgtttccccaacaacatctcccgctgtgagtctggtggtcagcccggctgcttcgccggagatatcaccggaagtctgcccggctgctagtactgttgtttcgcctgcagtttttagcgttgtgtcacctgcatctagcgccgttcttcccgcagtgtctctcgaggtgcctctgactgcaagcgtaacctcccctaaagctagcccggtcacttcccccgctgccgcattcccaacagctagccctgcgaataaagatgtgtcatcctttctggagactacagccgacgtggaggagatcaccggcgaaggtctcacggcatccggttcaggtgatgtaatgcgtcgtagaatcgccacccctgaggaggtccggctgcctctccagcatgggtggcgcagagaggtgagaattaagaagggcagtcaccggtggcaaggcgagacctggtattacggcccatgtggaaaacgcatgaaacagtttcctgaggtgattaagtacttgtctagaaacgtggttcacagcgttaggagggaacacttcagcttttcccccagaatgcccgtgggtgacttcttcgaggagagagacacgccggaagggcttcaatgggttcagctcagtgcagaagaaatccccagccgcatacaggcaatcactggcaagaggggccgaccaaggaatactgaaaaagctaaaaccaaagaggtgcccaaagttaagagaggccgaggcaggccccctaaggtaaagattaccgagttgctgaacaaaactgacaaccgaccactgaagaagctggaggctcaggagaccctcaatgaggaggacaaagccaagatcgctaagtctaagaagaagatgcggcagaaggttcaaaggggcgagtgccagacaaccatccaggggcaagctcggaataagaggaagcaggagacaaagtcactgaaacagaaagaagcaaaaaaaaagagtaaagctgagaaagagaagggaaagaccaaacaggaaaaacttaaagagaaggtaaaacgcgagaagaaggagaaggtcaaaatgaaggaaaaagaggaggtgactaaggctaaacccgcttgcaaggctgacaagacactggccacccagcggaggcttgaagagaggcagaggcagcagatgattttggaggaaatgaaaaaaccaaccgaggacatgtgtcttaccgatcaccaaccgctgccggatttcagcagggtgcctgggctgactctgccttccggagcgttctcagattgccttaccatcgtcgagttcctccattcattcggcaaggtcctgggattcgatccagccaaagatgtgccctcccttggagtgctgcaggagggactactgtgccaaggggactcactgggagaggtccaggacctgctggtgcgcctgctgaaggcagccctgcatgatcccggttttcctagttattgtcagtcattgaagatcctgggggaaaaagtgagtgaaattcccctcaccagagataatgtatcagagatacttagatgcttccttatggcttacggtgttgaacctgctctgtgtgataggcttcggactcagcctttccaagcgcagccccctcaacaaaaagctgccgtcttggctttcttagttcatgaactgaacggatccactctgattatcaacgaaattgataaaaccctcgaatcaatgtcctcatacagaaaaaacaagtggattgtggaaggaaggttgcgcagattaaagactgtgttggcaaagcgcacgggccgttctgaagtggaaatggaaggacccgaagaatgtctgggtaggagacgctccagcagaataatggaagaaacctcgggaatggaagaggaagaagaggaagagtctatagcggctgtcccagggcgtaggggcaggagggatggagaggttgatgcaaccgctagcagtatccctgagctggagcggcaaattgaaaaattgagtaaacggcagctcttttttagaaaaaaattgctgcactcatctcaaatgctgcgagcagtgtctctggggcaggataggtatcgcagacgatattgggttctaccctacttggccggaatattcgtcgagggcactgaggggaatcttgtgccggaagaggtgattaagaaggaaaccgactccctgaaagtggccgcacatgcttcactcaaccctgccctattttctatgaagatggagctggccggatctaatactactgcgagtagccctgcacgggcacgcggaaggccacgtaagaccaaaccaggcagtatgcaaccgaggcatttgaaatctccggtgcgcggacaggatagcgagcaaccccaggctcagctgcagccagaggctcagctgcacgccccagcccagccccagccccaactgcagttacagttacagagccacaagggatttctggaacaggaggggtctcccctgtctctgggccagtcccagcatgatctgagtcaaagtgcattcctaagttggctgagtcagactcagtcgcattccagcctactgtcctccagcgtcctaacacctgatagtagccccggaaaattggaccctgctccttcccagccacctgaagagcctgaacctgatgaggccgagtccagccccgaccctcaagccctctggttcaacatttcagcccaaatgccctgcaatgccgcaccaacccctcctccagcggtatctgaagaccagccaacgcccagcccccagcagttggctagttcaaaacctatgaatcgtccgagtgcagcaaatccctgttctccagttcagttcagctccaccccattggctggtctggctccaaagaggcgggcaggcgacccgggtgagatgccccaaagccctactgggctgggccagcctaaaaggagggggaggccaccttcaaaattttttaaacaaatggaacaacgatatttaacccagctaacagcgcaacctgtaccgccagaaatgtgctcaggctggtggtggattagagatcccgaaatgctggatgcgatgctgaaagccctccaccccaggggcattagagagaaagcactgcacaaacatttgaataagcaccgtgatttccttcaagaagtctgtctgcggccatccgccgaccctatcttcgagccaagacagctgcctgcttttcaagaagggatcatgtcttggtcacccaaggagaagacctatgagacagacttagccgttttgcagtgggtggaggagctcgagcagagggtcatcatgagcgacttacagatcagaggttggacatgcccgtcgccagactccactcgagaagatttggcctactgcgagcacctgagtgatagccaggaggatattacttggcgcggtcgaggacgggagggattagctccacagcgaaagaccaccaacccactggatctggctgtgatgcggctggcagctctagaacaaaacgtagagaggcgctatcttagggagcccttatggcccacacatgaggtggtgctcgaaaaggctctgctgtcaacaccgaatggcgctccggagggtactaccacagaaatttcttatgagatcacacctcggattcgggtatggaggcagaccttggagagatgcagaagcgctgcccaagtgtgcctctgcctgggacagctcgagcgctctatcgcctgggaaaagtctgtcaataaggttacttgtctcgtctgcagaaaaggggacaatgacgagttcctactcctatgcgatggatgtgatcggggatgtcacatatattgtcatcgtccaaaaatggaggccgttcccgaaggtgattggttttgtaccgtatgtctggctcagcaagttgaaggagaatttacacagaagcccggatttcctaagagggggcagaagcggaaatctggatactctctgaacttttccgagggagacgggaggagacgacgagtgctgttacggggaagggaatccccagcggcagggccacgctactctgaagaaggcctctctccttctaaaagaaggagactttccatgcggaatcatcatagcgacctaaccttctgcgagataatacttatggagatggagagccatgacgctgcatggcctttcctggagcctgtaaatcctcgtctagttagcggatatcggagaattatcaagaaccccatggatttttccaccatgcgggagcggctgctgcgtggcggatacacatcatctgaagagttcgccgctgatgccttactggtgttcgacaattgccagacctttaacgaagacgactcagaagtgggaaaagctgggcatataatgaggcgattcttcgagtcgcgatgggaggagttttatcaaggtaaacaggcaaatctctaa

SEQ ID NO: 333431 - DNA, 8844 bp, Artificial Sequence
  derived and/or modified sequence
agtctgtcacacagggacatcaccctacagcagttcaggctgtgtggttcgcaggaagcatacactggctttttgattcttgctagttcccagctcacagtttgggaggatccaacaccaacctttacgtgaagtggaggcccaaggacagtgaggagctgggtggtcccagcctggagctgtgccagcctgacatggaaatggaggcaaacgaccattttaactttactggccttccccctgcacctgctgcctcaggactgaaaccctctccttcctcaggggagggcctctacactaacgggtctcccatgaacttcccccagcaagggaaaagtttgaatggggatgtgaatgttaatggcttatctactgtatctcacactactacttcagggattttgaactctgctccccactcctccagcacctcacacctccatcaccccagcgtggcctacgactgtctctggaactactcacagtacccatctgccaatcctggcagcaacctcaaggacccaccccttctctcccagttctcggggggacaatacccactcaacggcatccttgggggcagccggcaaccttcatccccaagtcataacactaaccttcgggctgggagccaagagttctgggccaacggtacccagagtcccatggggcttaactttgattcacaagaactgtatgattcctttcctgaccagaattttgaggaggtaggcagtggtatccatcctgatgaggcagcagaaaaggagatgacttcagttgtggcagagaatggcactggcttggtaggcagcttggagctggaagaagagcagccagaactgaagatgtgtggctacaatggctctgtcccttctgtggaatcgttacaccaagaggtctcagtcctggtccctgaccccacagtgagctgtttagatgatccttcacatcttcctgatcaactggaagacactccaatcctcagtgaagactctctggagcccttcaactctctggcaccagagccagtgagtggaggactatatggtattgatgacacggagctgatgggtgcagaggacaagctgcctcttgaggacagccctgtgatttctgcccttgattgcccttccctcaataatgctactgccttcagtctcctggcagatgatagtcaaacatcaacctctatctttgccagtcccacctctccacctgtcctaggggagtctgtcctgcaagataacagctttgacctgaataatggtagtgacgctgaacaggaagaaatggaaactcaatcttcagacttcccaccatccctgacccagccagctcctgatcagtcatccactattcagctacatccagcaacctcaccagcagtctcgccaacaacctccccagcagtctccctagtggtttctccagcagcctccccagaaatctctccagaagtttgtcccgcagcttctacagttgtctctccagcagtcttctcagtggtctctccagcttcctcagcagtcctcccagcagtctccttagaagtcccgttgacggcttcagtgacatccccaaaagcctctcccgtaacttccccagcagctgcctttccaacagcctccccagcaaataaggatgtcagcagctttctagaaaccactgctgacgtggaagagatcactggagaaggactcactgcttctggtagtggtgatgtcatgaggagacgtattgctaccccagaagaagttcgtcttcccctccaacatgggtggcggagagaggtgcgcatcaagaagggcagccaccgatggcagggggagacctggtattatggcccctgtgggaagaggatgaagcaatttccagaagtgatcaagtacctgagccgcaacgtggtacacagtgtccgccgagagcacttcagcttcagtccccgtatgcctgttggagatttctttgaagaaagagacacgccagagggcttgcagtgggtgcagctctcagcagaggagatcccgtcgaggattcaggcaattactggcaaacggggtcgacctcgaaacactgagaaggctaagactaaggaagtccccaaggtgaaacggggtcgaggtcggccacctaaggtcaaaatcactgagctattgaacaagacagacaaccgccccctaaagaaactggaggcccaagaaacattgaatgaggaggataaagcaaagattgctaaaagcaagaagaagatgaggcagaaggttcaacggggagagtgtcagactactatccaagggcaggccagaaataagcggaaacaagagaccaagagcttaaagcagaaggaagctaagaagaaatccaaggctgagaaagaaaaaggaaagacaaagcaggaaaaactgaaggaaaaagtcaagagggaaaagaaggagaaggtaaaaatgaaggaaaaggaggaggtgaccaaagccaagccagcctgtaaagcagataagaccctggccacacagaggcgcttggaggaacggcagaggcagcagatgatcttggaggaaatgaagaagccgacagaggatatgtgtctgactgaccaccagcccctgcctgacttctcacgagtccctggtctgacattgcccagtggagccttctcagactgcttgaccattgtggagttcctgcatagctttggcaaggtgctgggctttgatcctgccaaagatgtgcctagcctgggggtcctgcaggagggactcctgtgtcaaggtgacagcttgggtgaggtgcaagacctgctggtcaggctgctgaaggctgcactccatgatcctggctttccctcctactgtcagtccctaaagatcttgggggagaaggtgtctgagatcccactgacaagagacaatgtgtcagagatcctgcgctgcttccttatggcatatggagtagagccagccctctgtgaccgcctgcgcacccagccttttcaggcccagccaccccagcagaaggctgctgtcctggccttccttgtgcatgagctcaatggctccaccctcatcatcaatgagattgacaagactctggagagtatgtccagctacaggaaaaacaagtggattgttgaaggccggctccggaggctgaaaactgttctggccaagcgaactgggcggtctgaagtagagatggaagggccagaggaatgcctgggacggaggcgcagttctcggatcatggaggagaccagtggcatggaagaagaggaagaagaggagtctatagcagctgtccctggccgcaggggtcgaagagatggagaggttgatgccacagcatctagcatcccagagctagagcgccagatagaaaaactcagcaagcgtcagcttttctttcgcaaaaagctgcttcactcatcccagatgcttcgggcggtctccctgggtcaggaccgctacagacgtcgctactgggtattgccgtatttggctggtatctttgtagaaggaacagaggggaacttagttcctgaggaggtgataaagaaggaaactgactccttaaaagtggcagcccatgcgtcactcaaccctgccctcttctctatgaagatggagttagctggctccaacaccactgccagttctcctgcccgggcccgaggccgacctcgaaaaactaagcccgggtctatgcaacctaggcatcttaagtcccctgtcaggggtcaggattcagaacagccccaggcccagcttcagcctgaggctcagcttcatgctcctgcccagccccagcctcagcttcagcttcagcttcagtcccataaggggttcctggagcaagaaggctcccctttgtcactgggtcagagccagcatgacctcagccagtcagccttcctgtcttggctgagccagactcagagccatagctccctgttgagcagctcagtcctcacacctgatagcagtccgggaaaactagacccagctccatcacaacccccggaggagccagagcctgatgaggcagaatccagccctgatcctcaagcactctggtttaacatctcagcccagatgccctgcaatgctgcccccacaccgccccctgcagtttctgaggaccaacccactccctcccctcagcagcttgcctcctccaagccaatgaatagacctagtgctgccaacccttgttctccagtgcagttctcttccacgcccttggctgggttggcccctaagaggcgagcaggagaccctggagaaatgccacagagtcccacagggctgggacagcccaaacggagagggagacctcccagtaagttcttcaaacagatggaacagcgttacctaacccagctgacagcccagcctgtcccacctgagatgtgctcaggctggtggtggatacgagatcctgagatgttggatgccatgctcaaggccctacacccccgaggtatccgggagaaggcacttcacaaacaccttaacaagcacagggacttcttgcaggaagtctgcctgcggccctcagctgaccccatctttgagcccaggcaactacctgcctttcaagaagggattatgagctggtcccccaaagagaagacatacgagacagacctagcagtgcttcaatgggtagaggagctggagcagcgggttatcatgtctgatctgcagattcggggctggacatgtcctagcccagactctacccgtgaagacttggcctactgtgagcacctctccgactcccaggaggatatcacctggcgaggtcggggcagggagggactggcacctcagcgtaaaactaccaaccctttggacctggctgtgatgcggctggctgccctggaacagaatgtagaacggcggtacctgcgggagcccctctggccaactcatgaggttgtgctggagaaggccctgcttagcacacctaatggtgcccctgagggcaccactacagagatatcatatgagatcacccctcgcattcgtgtctggcgccagaccctcgagcggtgccggagcgcagcccaggtgtgcttgtgcctgggccagctggagaggtccattgcctgggagaagtctgtcaacaaagtgacatgtctagtctgccggaagggtgacaatgatgagtttcttctgctttgtgatgggtgtgaccgtggctgccacatttactgccatcgtcccaagatggaggctgtcccagaaggagattggttctgtactgtctgtttggctcagcaggtggagggagaattcactcagaagcctggtttcccaaagcgtggccagaagcggaaaagtggttattcgctgaacttctcagagggtgatggccgccgacgccgggtactgttgaggggccgagaaagcccagcagcagggcctcggtactcggaagaagggctctccccctccaagcggcggcgactctctatgcggaaccaccacagtgatctcacattttgcgagattatcctgatggagatggagtcccatgatgcagcctggcctttcctagagcctgtgaacccacgtttggtgagtgggtaccggcgcatcatcaaaaatcctatggatttttccaccatgcgggagcggctgctcaggggagggtacaccagctcagaggagtttgcggctgatgccctcctggtatttgacaactgccagactttcaacgaggatgactctgaagtaggcaaggctgggcacatcatgcgccgcttcttcgagagccgctgggaggagttttatcagggaaaacaggccaatctgtgaggcaagggaggtggggagtcaccttgtggcatctccccccaccttccaaacaaaaacctgccattttcacctgctgatgctgccctgggtccagactcaagtcagatacaaccctgatttttgaccttgcccttggcagtgccccacatcctcttattcctacatccctttctcccttccctcctcttgctcctcaagtaagaggtgcagagatgaggtccttctggactaaaagccaaaaaaagaaagaaaaaaataatttttcttttctgttttatttgctaattaaaaatggggagggggaaagtcgtccctacttcctcctccctgcttcctctcctcccctgtacgtgccccagcattctggggttatttaacaatagcaatagttctagtgaatgtgtgaaaccaagaaacactctgtactgtgtgcggacccgcagtgacggccagtaaagtggacttaactcccaagtgtgtcgcgccggacaccgggccctggacatgctgcttccatgttcagtcccttccctgcttctcgctgtctttcttttcccacctcccaccccccagttttcagattttctctcatccaataatgtaaaactatcgtgtacgggttcctccctccttttctcttctcccaaatcttttcccttcaaaggaaaaaaaaatgttcagaggtccctgtcttctgtccccatcttcctgccgatagctatcccctgtatgatgttggatgctcctcacatgctgagtttccagccttttctgaaactcagtagctggggagagggcagggaggcttcctgggccttccagcctccttccccacctccttcccaaaccctcttgggaactcctcagggacaactactgctgagtttgggtgcaccctaagatggaggccaggtagcaatggggccggcctcagagagagcgctgtgtgtgtgtgtgtgtgtgtgtgtgtgtgtgtgtgtcggcctcagagcgcgctgtgtgtgtgtgtgtgtgtgtcagcctcagagcgcgcgctgtgtgtgtgtgtgtgtgtgcgtgcttgtgaccctgtattgtttgataggatccattcagtttccccaagtacctgttttcattcccatttttcccattgtttaaaaccatcacttttttgtctttgggaaaccacaggaacaatttctctggagacaaggctgtgtctctctcctggtcatttttgttccagcctcttcagactgtgcaatctttcagcaggaactccctctcttctcggtagctttgaatcttaagcttctacgggagagtggtagaactggatcatttcctaatcccatttagttgtgcttttcttcatttacttcataccccaggaccccttccccagcagcagagaccctggagcacaggagagtagggaggaggggttctgggtccatcactgccctacatgtgactatgtccaagttaagcccccaacacgagaggaaagctgctgactcccagctatagccatgggcacttggccccctgcttttcctgctcagcagagcccctcccttcagagattacgggtacttgcactggggaggtggctgctggctggcccaagcagagagctgaggcatccaagaaatgttccattggggggtgggggtgccaggtgaggtggagcattccttgtattctggcagcactgaagagccactgaagggggtaggggcagtgtaggtcctggggcagcccctttattcctttatgccccttctccctcatagcctatttctaaagtcgccttttctgtcagataaacctcaaaacttttaattttatttgagatttttttttgcttttaagaggtggattgaagaatatttgaattgactttatattatgcataaatatttatattttatctaaataactgcgctgtaacaaactttgtgttagacagttgaaactgttagagttgggggctctgctttttccccctggcaattttcccctggtataagatgtgctagattaatttcattgtgaggtggatgggggagtgaaattgtgaggtggatgggggagtgaaatctccatggttcctgctttgtgttcctctcccagctccatctctttccctagggaccaggcactcatatggcggggtggggtcctagcctcagtttgaagaagtgggggctggagcggggttgggggtggtagggatagggcatgatcaaaggggccatttcttgcttttctttcctcatcttcactgcccccttgagctaggtggattttctcttcatgacaagagtatttggtagggaaagcaggtttaaaataaaaagacaacccaccccctgcccttttgcttccctcccatcagtctggttgacaggaagaaaccacaccatcaacaccaacaagtttctgtgttccttttacagcaaaagggactttttatataaccaaatgtggtgttttagtgactttttgataatgtacagttttttgtgaatttaaatttatttctttctatatttttaggaccaatctcatttttaataaggttaaaaagaaaaaaaaagtctagcgaaaaaactcctgtttttgccatgtgatgttccacaagtgcagctgtagaaaagtgcttgtcagttgttgaataaaaaaaaccacatttgatagagattcaaaagactctgtgtattcatcttcccttctacacacctgagggggagacggcgttgggataggtatgactggcttaagagaccacaggcaagggaacaacaggggctcctgttccataccctctgtgtggatggaaagggtcattagtgctcctgcctaaatgtctggctgagttgctggagcaaagggggattcagtgcatccaggtcctgccttgtgagatgtggccccagcttcctaagctgccacctctgtgttcctgtcatagcaaatatgggaccatcaccagcttaccacttcccactcacggataagacaccaagacgtagac

SEQ ID NO: 333432 - DNA, 5622 bp, Artificial Sequence
  derived and/or modified sequence
atggaggccaacgaccacttcaacttcaccggcctgccccccgcccccgccgccagcggcctgaagcccagccccagcagcggcgagggcctgtacaccaacggcagccccatgaacttcccccagcagggcaagagcctgaacggcgacgtgaacgtgaacggcctgagcaccgtgagccacaccaccaccagcggcatcctgaacagcgccccccacagcagcagcaccagccacctgcaccaccccagcgtggcctacgactgcctgtggaactacagccagtaccccagcgccaaccccggcagcaacctgaaggacccccccctgctgagccagttcagcggcggccagtaccccctgaacggcatcctgggcggcagcagacagcccagcagccccagccacaacaccaacctgagagccggcagccaggagttctgggccaacggcacccagagccccatgggcctgaacttcgacagccaggagctgtacgacagcttccccgaccagaacttcgaggaggtgggcagcggcatccaccccgacgaggccgccgagaaggagatgaccagcgtggtggccgagaacggcaccggcctggtgggcagcctggagctggaggaggagcagcccgagctgaagatgtgcggctacaacggcagcgtgcccagcgtggagagcctgcaccaggaggtgagcgtgctggtgcccgaccccaccgtgagctgcctggacgaccccagccacctgcccgaccagctggaggacacccccatcctgagcgaggacagcctggagcccttcaacagcctggcccccgagcccgtgagcggcggcctgtacggcatcgacgacaccgagctgatgggcgccgaggacaagctgcccctggaggacagccccgtgatcagcgccctggactgccccagcctgaacaacgccaccgccttcagcctgctggccgacgacagccagaccagcaccagcatcttcgccagccccaccagcccccccgtgctgggcgagagcgtgctgcaggacaacagcttcgacctgaacaacggcagcgacgccgagcaggaggagatggagacccagagcagcgacttcccccccagcctgacccagcccgcccccgaccagagcagcaccatccagctgcaccccgccaccagccccgccgtgagccccaccaccagccccgccgtgagcctggtggtgagccccgccgccagccccgagatcagccccgaggtgtgccccgccgccagcaccgtggtgagccccgccgtgttcagcgtggtgagccccgccagcagcgccgtgctgcccgccgtgagcctggaggtgcccctgaccgccagcgtgaccagccccaaggccagccccgtgaccagccccgccgccgccttccccaccgccagccccgccaacaaggacgtgagcagcttcctggagaccaccgccgacgtggaggagatcaccggcgagggcctgaccgccagcggcagcggcgacgtgatgagaagaagaatcgccacccccgaggaggtgagactgcccctgcagcacggctggagaagagaggtgagaatcaagaagggcagccacagatggcagggcgagacctggtactacggcccctgcggcaagagaatgaagcagttccccgaggtgatcaagtacctgagcagaaacgtggtgcacagcgtgagaagagagcacttcagcttcagccccagaatgcccgtgggcgacttcttcgaggagagagacacccccgagggcctgcagtgggtgcagctgagcgccgaggagatccccagcagaatccaggccatcaccggcaagagaggcagacccagaaacaccgagaaggccaagaccaaggaggtgcccaaggtgaagagaggcagaggcagaccccccaaggtgaagatcaccgagctgctgaacaagaccgacaacagacccctgaagaagctggaggcccaggagaccctgaacgaggaggacaaggccaagatcgccaagagcaagaagaagatgagacagaaggtgcagagaggcgagtgccagaccaccatccagggccaggccagaaacaagagaaagcaggagaccaagagcctgaagcagaaggaggccaagaagaagagcaaggccgagaaggagaagggcaagaccaagcaggagaagctgaaggagaaggtgaagagagagaagaaggagaaggtgaagatgaaggagaaggaggaggtgaccaaggccaagcccgcctgcaaggccgacaagaccctggccacccagagaagactggaggagagacagagacagcagatgatcctggaggagatgaagaagcccaccgaggacatgtgcctgaccgaccaccagcccctgcccgacttcagcagagtgcccggcctgaccctgcccagcggcgccttcagcgactgcctgaccatcgtggagttcctgcacagcttcggcaaggtgctgggcttcgaccccgccaaggacgtgcccagcctgggcgtgctgcaggagggcctgctgtgccagggcgacagcctgggcgaggtgcaggacctgctggtgagactgctgaaggccgccctgcacgaccccggcttccccagctactgccagagcctgaagatcctgggcgagaaggtgagcgagatccccctgaccagagacaacgtgagcgagatcctgagatgcttcctgatggcctacggcgtggagcccgccctgtgcgacagactgagaacccagcccttccaggcccagcccccccagcagaaggccgccgtgctggccttcctggtgcacgagctgaacggcagcaccctgatcatcaacgagatcgacaagaccctggagagcatgagcagctacagaaagaacaagtggatcgtggagggcagactgagaagactgaagaccgtgctggccaagagaaccggcagaagcgaggtggagatggagggccccgaggagtgcctgggcagaagaagaagcagcagaatcatggaggagaccagcggcatggaggaggaggaggaggaggagagcatcgccgccgtgcccggcagaagaggcagaagagacggcgaggtggacgccaccgccagcagcatccccgagctggagagacagatcgagaagctgagcaagagacagctgttcttcagaaagaagctgctgcacagcagccagatgctgagagccgtgagcctgggccaggacagatacagaagaagatactgggtgctgccctacctggccggcatcttcgtggagggcaccgagggcaacctggtgcccgaggaggtgatcaagaaggagaccgacagcctgaaggtggccgcccacgccagcctgaaccccgccctgttcagcatgaagatggagctggccggcagcaacaccaccgccagcagccccgccagagccagaggcagacccagaaagaccaagcccggcagcatgcagcccagacacctgaagagccccgtgagaggccaggacagcgagcagccccaggcccagctgcagcccgaggcccagctgcacgcccccgcccagccccagccccagctgcagctgcagctgcagagccacaagggcttcctggagcaggagggcagccccctgagcctgggccagagccagcacgacctgagccagagcgccttcctgagctggctgagccagacccagagccacagcagcctgctgagcagcagcgtgctgacccccgacagcagccccggcaagctggaccccgcccccagccagccccccgaggagcccgagcccgacgaggccgagagcagccccgacccccaggccctgtggttcaacatcagcgcccagatgccctgcaacgccgcccccacccccccccccgccgtgagcgaggaccagcccacccccagcccccagcagctggccagcagcaagcccatgaacagacccagcgccgccaacccctgcagccccgtgcagttcagcagcacccccctggccggcctggcccccaagagaagagccggcgaccccggcgagatgccccagagccccaccggcctgggccagcccaagagaagaggcagaccccccagcaagttcttcaagcagatggagcagagatacctgacccagctgaccgcccagcccgtgccccccgagatgtgcagcggctggtggtggatcagagaccccgagatgctggacgccatgctgaaggccctgcaccccagaggcatcagagagaaggccctgcacaagcacctgaacaagcacagagacttcctgcaggaggtgtgcctgagacccagcgccgaccccatcttcgagcccagacagctgcccgccttccaggagggcatcatgagctggagccccaaggagaagacctacgagaccgacctggccgtgctgcagtgggtggaggagctggagcagagagtgatcatgagcgacctgcagatcagaggctggacctgccccagccccgacagcaccagagaggacctggcctactgcgagcacctgagcgacagccaggaggacatcacctggagaggcagaggcagagagggcctggccccccagagaaagaccaccaaccccctggacctggccgtgatgagactggccgccctggagcagaacgtggagagaagatacctgagagagcccctgtggcccacccacgaggtggtgctggagaaggccctgctgagcacccccaacggcgcccccgagggcaccaccaccgagatcagctacgagatcacccccagaatcagagtgtggagacagaccctggagagatgcagaagcgccgcccaggtgtgcctgtgcctgggccagctggagagaagcatcgcctgggagaagagcgtgaacaaggtgacctgcctggtgtgcagaaagggcgacaacgacgagttcctgctgctgtgcgacggctgcgacagaggctgccacatctactgccacagacccaagatggaggccgtgcccgagggcgactggttctgcaccgtgtgcctggcccagcaggtggagggcgagttcacccagaagcccggcttccccaagagaggccagaagagaaagagcggctacagcctgaacttcagcgagggcgacggcagaagaagaagagtgctgctgagaggcagagagagccccgccgccggccccagatacagcgaggagggcctgagccccagcaagagaagaagactgagcatgagaaaccaccacagcgacctgaccttctgcgagatcatcctgatggagatggagagccacgacgccgcctggcccttcctggagcccgtgaaccccagactggtgagcggctacagaagaatcatcaagaaccccatggacttcagcaccatgagagagagactgctgagaggcggctacaccagcagcgaggagttcgccgccgacgccctgctggtgttcgacaactgccagaccttcaacgaggacgacagcgaggtgggcaaggccggccacatcatgagaagattcttcgagagcagatgggaggagttctaccagggcaagcaggccaacctgtag

SEQ ID NO: 333433 - DNA, 2007 bp, Artificial Sequence
  derived and/or modified sequence
aaaacatagaatgtgcctaccctccacccagtgcttgaacatcccttccccctcatcactccggggaaggatcctgctcaacacccaactactcattcaaacctggaacccgaaactttaatgaaggttgctctactgagatttttctccccaccgaacatgtctgtgacccacaaagaagcccatgaaagaaagtgcccagagaaaccagagctgtggaaggctggctcgacggtgcccctcactgcccctgagaaaacagacccatttcctctctgcccacctctttccctgacatgtccccagcagcagtcctgtattcccagttcctctcaagatgttctgaatagtctctgggtatcctctcattgccttcaactcaagatatctaaaaccaaaactcattgtcttcccactcaaaacgtcctcccctttctgctgccaaccccagtcagtattgtctgcaggcttccaggcttggatccttgactcacggccacccaagcttccttcccccgtgtgcgattagtcagtaagtcttagtagtgatgagggcttcctgcaccgtgactgtccggcatgctttttcctctcccatttcctcagccaccagcaattccaggcccctctttacttcgtatgtattctagcgagatcaactggcaagacaaagctcagacgtcacctccagaaggttttcatggcttgtgataatctggcttcacctgtattctacttcatgagacaactgactatctcgtggcctcttccctgtggcctccatctctctttgcagctccagtccctggcacatgcttggcacacagctcactgcagctgctcaatgagttttgtggactggatgtttgcttgtgggaagtggaagcagggaccagatggatgggcagaaggattgtcctattcaaatatgcactggtggtcctgtcttgtgtttgggcaccagttgaatccaagagctctcaacctgtggagtgtcggatgaaatctatggaatccctcctcagaaaagcaaatgaacccacacaatgatggcgcagtttcattgtcatcagcctcctgaggcgtatccacaatcaccaggatatgggaacaaaggaattgtgtttaaatgtaaaaaagaagttctagaatttccacagaatttacattcttcttgttgtaaggaatatgcctggtaatggaactcaaatatcagcttggatcgccctggcctttgaaatttgaggtaaaattaggcttaagccgtatccagcgcacaacagaaacctcagtgtctcccacccagggactgtctcggaggctgtgtgttcagatgtcacttctgcctcccggcatctgctcctgagttttcactcttcagcctcccctcccaaggcctccttcctaccctggcactgggcttcttgccccgtccccctagaatccgtggcacaggggctttatctgtgtggagtctctacagacggttagaaacacagagtcagctagaaattaagcagtaggcagctgtgatgttttttgacagcctcatttctaaaaccccttcagcaaccccagtcaaggagcttctccctctagactccagcctcctgctgagtcacctgcaccgtctctgccttcctccccttcctcacatcctccctggccccatcttccaattcctctgaacttctgcagagcagccagctcttcctccagcttcaacttccccaccccaagcaggtggggcatcctgaccctgagcaaaagcagttctctccctaagaaacaccggtgacttttgttcatggcactccatggatgcaaagctctgagttctgttgaacagggactcacctacgagtggtggtgctatcagctgagacgggaagcagcactcagtagaagaagaaaaggcctggactggtgtgggcatgcactggctcgtgagaagcagggaaggtcgctcttatgggtcccgtttctaagtgacgttcacggcctggc

SEQ ID NO: 333434 - protein, 404 aa, Artificial Sequence
  derived and/or modified sequence
MSVKPSWGPGPSEGVTAVPTSDLGEIHNWTELLDLFNHTLSECHVELSQSTKRVVLFALYLAMFVVGLVENLLVICVNWRGSGRAGLMNLYILNMAIADLGIVLSLPVWMLEVTLDYTWLWGSFSCRFTHYFYFVNMYSSIFFLVCLSVDRYVTLTSASPSWQRYQHRVRRAMCAGIWVLSAIIPLPEVVHIQLVEGPEPMCLFMAPFETYSTWALAVALSTTILGFLLPFPLITVFNVLTACRLRQPGQPKSRRHCLLLCAYVAVFVMCWLPYHVTLLLLTLHGTHISLHCHLVHLLYFFYDVIDCFSMLHCVINPILYNFLSPHFRGRLLNAVVHYLPKDQTKAGTCASSSSCSTQHSIIITKGDSQPAAAAPHPEPSLSFQAHHLLPNTSPISPTQPLTPS

SEQ ID NO: 333435 - DNA, 1215 bp, Artificial Sequence
  derived and/or modified sequence
atgagcgtgaagcccagctggggccccggccccagcgagggcgtgaccgccgtgcccaccagcgacctgggcgagatccacaactggaccgagctgctggacctgttcaaccacaccctgagcgagtgccacgtggagctgagccagagcaccaagagagtggtgctgttcgccctgtacctggccatgttcgtggtgggcctggtggagaacctgctggtgatctgcgtgaactggagaggcagcggcagagccggcctgatgaacctgtacatcctgaacatggccatcgccgacctgggcatcgtgctgagcctgcccgtgtggatgctggaggtgaccctggactacacctggctgtggggcagcttcagctgcagattcacccactacttctacttcgtgaacatgtacagcagcatcttcttcctggtgtgcctgagcgtggacagatacgtgaccctgaccagcgccagccccagctggcagagataccagcacagagtgagaagagccatgtgcgccggcatctgggtgctgagcgccatcatccccctgcccgaggtggtgcacatccagctggtggagggccccgagcccatgtgcctgttcatggcccccttcgagacctacagcacctgggccctggccgtggccctgagcaccaccatcctgggcttcctgctgcccttccccctgatcaccgtgttcaacgtgctgaccgcctgcagactgagacagcccggccagcccaagagcagaagacactgcctgctgctgtgcgcctacgtggccgtgttcgtgatgtgctggctgccctaccacgtgaccctgctgctgctgaccctgcacggcacccacatcagcctgcactgccacctggtgcacctgctgtacttcttctacgacgtgatcgactgcttcagcatgctgcactgcgtgatcaaccccatcctgtacaacttcctgagcccccacttcagaggcagactgctgaacgccgtggtgcactacctgcccaaggaccagaccaaggccggcacctgcgccagcagcagcagctgcagcacccagcacagcatcatcatcaccaagggcgacagccagcccgccgccgccgccccccaccccgagcccagcctgagcttccaggcccaccacctgctgcccaacaccagccccatcagccccacccagcccctgacccccagctag

SEQ ID NO: 333436 - DNA, 1694 bp, Artificial Sequence
  derived and/or modified sequence
gattgggggaatgcaggaaaaaccccatccctccctacagagcctcagcagtgacagctacttcccggatgagaagggcggccgtgaagccagcagggaagccagccccacagccaagggccccccagcctcctcacagctccccatagcctggacctgccggccctccctccaggaccgaggggctcccaagggaaactcaggcgtgtgctggtcccaatgtcagtgaaacccagctgggggcctggcccctcggagggggtcaccgcagtgcctaccagtgaccttggagagatccacaactggaccgagctgcttgacctcttcaaccacactttgtctgagtgccacgtggagctcagccagagcaccaagcgcgtggtcctctttgccctctacctggccatgtttgtggttgggctggtggagaacctcctggtgatatgcgtcaactggcgcggctcaggccgggcagggctgatgaacctctacatcctcaacatggccatcgcggacctgggcattgtcctgtctctgcccgtgtggatgctggaggtcacgctggactacacctggctctggggcagcttctcctgccgcttcactcactacttctactttgtcaacatgtatagcagcatcttcttcctggtgtgcctcagtgtcgaccgctatgtcaccctcaccagcgcctccccctcctggcagcgttaccagcaccgagtgcggcgggccatgtgtgcaggcatctgggtcctctcggccatcatcccgctgcctgaggtggtccacatccagctggtggagggccctgagcccatgtgcctcttcatggcaccttttgaaacgtacagcacctgggccctggcggtggccctgtccaccaccatcctgggcttcctgctgcccttccctctcatcacagtcttcaatgtgctgacagcctgccggctgcggcagccaggacaacccaagagccggcgccactgcctgctgctgtgcgcctacgtggccgtctttgtcatgtgctggctgccctatcatgtgaccctgctgctgctcacactgcatgggacccacatctccctccactgccacctggtccacctgctctacttcttctatgatgtcattgactgcttctccatgctgcactgtgtcatcaaccccatcctttacaactttctcagcccacacttccggggccggctcctgaatgctgtagtccattaccttcctaaggaccagaccaaggcgggcacatgcgcctcctcttcctcctgttccacccagcattccatcatcatcaccaagggtgatagccagcctgctgcagcagccccccaccctgagccaagcctgagctttcaggcacaccatttgcttccaaatacttcccccatctctcccactcagcctcttacacccagctgaggtagaggccagactcctccaacagtgaaggaaaaggcacaggtgagagtataggtgggagatttggggggatgtagaggggagggtcaaagcactcgtggtcaattttgaatctatcttaaaatactgaggtgtggagagagagacaggatcaggagcgatagagagcaggccctcagtgttgtactatttgtctcggtccttgtgtctaaggagcaatgcagaaaaaaaggtgaaataaatggaagagatagccatgg

SEQ ID NO: 333437 - DNA, 1215 bp, Artificial Sequence
  derived and/or modified sequence
atgagtgtcaagccttcctggggccctggaccatctgagggtgtgacagcggtccccacatctgacctgggggaaattcataattggacagagctcttggacttgtttaaccatacacttagtgaatgtcatgtggagctgtctcagtctactaagagggtcgtgttattcgctctatatctggcaatgttcgtggtcggcctcgttgagaacctcttggtgatttgtgtgaactggcgtgggtccggcagagcaggtttaatgaacctctatattcttaacatggccatagctgatctcggtattgtcttgagccttcctgtgtggatgctggaagtgacgctcgattacacctggctgtggggaagcttctcctgcagattcacacactatttctatttcgttaatatgtactcaagcatattttttttggtctgtctgtctgttgacagatatgtaacactgactagcgcttcaccctcatggcagaggtatcagcacagggttaggagggccatgtgcgctggaatctgggtgctgagcgcaatcatccctttgcccgaggtggttcacatccagctggtggagggtcccgaacctatgtgcctattcatggcgcccttcgagacctacagcacctgggctctagcagtggccctttctacaactatcttggggtttctcctgccctttcccctgatcaccgtcttcaatgtactcaccgcttgccgcctgcgccagcccggtcagcctaaatcgcggcgacattgcctgcttctgtgcgcctatgtggcagtctttgtcatgtgttggctgccataccatgtgactctgttgctgctcacattgcatggcactcacattagcctccattgtcatctcgttcatctcctgtattttttttacgacgtcattgattgtttctcaatgctacactgtgttattaatccgattctgtacaattttctgagcccacattttaggggtcgccttcttaatgccgtggttcattacttacccaaagaccagactaaagccggcacctgcgcatccagctcctcttgctcaacccaacactctatcattatcactaagggcgattcacaaccagccgctgcagcccctcacccagagccttcccttagtttccaggcacaccacttgttgccaaacacctcccccatcagtcccactcagcccctcacaccttcatag

SEQ ID NO: 333438 - DNA, 1215 bp, Artificial Sequence
  derived and/or modified sequence
atgtctgtgaagcccagctggggccctggccccagcgagggcgtgacagctgtgcccaccagtgacctgggggagatccacaactggacagagctgctggacctcttcaaccacaccctgtctgagtgccacgtggagctgagccagagcaccaagagggtggtgctgtttgccctgtacctggccatgtttgtggtgggcctggtggagaacctgctggtgatctgtgtgaactggaggggcagcggccgggccggcctgatgaacctgtacatcctgaacatggccatcgctgacctgggcatcgtgctgagcctgcctgtgtggatgctggaggtgaccctggactacacctggctgtggggcagcttcagctgccgcttcacccactacttctactttgtgaacatgtacagcagcatcttcttcctggtgtgcctgtctgtggaccgctacgtgaccctgaccagcgccagccccagctggcagcgctaccagcaccgggtgcggcgggccatgtgtgccggcatctgggtgctgagcgccatcatccccctgcctgaggtggtgcacatccagctggtggagggccctgagcccatgtgcctcttcatggccccctttgagacctacagcacctgggccctggccgtggccctgagcaccaccatcctgggcttcctgctgcccttccccctcatcaccgtcttcaacgtgctgacagcctgccgcctgcggcagcccggccagcccaagagccgccgccactgcctgctgctgtgtgcctacgtggccgtgtttgtgatgtgctggctgccctaccacgtgaccctgctgctgctgaccctgcacggcacccacatcagcctgcactgccacctggtgcacctgctgtacttcttctatgatgtgattgactgcttctccatgctgcactgtgtgatcaaccccatcctgtacaacttcctgagcccccacttccggggccgcctgctgaatgctgtggtgcactacctgcccaaggaccagaccaaggccggcacctgtgccagcagcagcagctgcagcacccagcacagcatcatcatcaccaagggggacagccagcctgctgctgctgccccccaccctgagcccagcctgtccttccaggcccaccacctgctgcccaacaccagccccatcagccccacccagcccctgacccccagctag

SEQ ID NO: 333439 - DNA, 1215 bp, Artificial Sequence
  derived and/or modified sequence
atgagcgtgaagcccagctggggccccggccccagcgagggcgtgactgccgtccccacatccgacctcggagagatccataattggaccgagctacttgatttgtttaaccatactttgtctgaatgtcacgttgagctgtcccagtcaacaaaaagggtggtccttttcgcactctacttggccatgttcgtggtgggactcgttgaaaatctgttagtcatatgcgtgaactggagaggtagtggtcgtgctgggctgatgaacctatacatcttaaacatggcaatagccgacctcggcattgtgctgtcactgccggtatggatgctggaagtgaccctcgattacacctggctctggggcagctttagctgcagattcacacactacttttactttgtgaacatgtactctagcatcttctttcttgtgtgtctttctgtggacagatatgtgacacttactagcgcttccccatcctggcagaggtaccaacatcgagtaaggcgggctatgtgtgctggaatatgggtgctgtctgccatcatccccctaccagaagtcgtgcacatccagctcgttgaaggtcctgagcccatgtgtctgttcatggcaccttttgagacgtactctacctgggccctggcggtcgccctgagcacaacgatcctaggatttttgctgcccttccccttgattaccgtgttcaacgtgctgacagcttgcagactacggcagccaggccagcccaaaagtagaagacactgcctcctcttatgtgcctacgttgcagtctttgtaatgtgctggctaccttaccacgtcacactgctccttctgaccctgcacggtacccacatatctctgcactgccatttggtgcacctgttgtattttttctacgacgtgatcgactgtttctccatgttgcactgcgttattaatccaattctgtataatttcctatcaccacacttccgcggccggctccttaatgcggtggtgcattacctaccaaaagaccagactaaagctggaacttgtgcgagttcttccagttgctcaacccagcattcaattatcattacaaagggcgactcgcaacccgccgctgccgctccacaccccgagccctccctgtctttccaagctcatcatctgctgccaaacacttcccccatctcaccaacgcagccgctgaccccttcttag

SEQ ID NO: 333440 - DNA, 1215 bp, Artificial Sequence
  derived and/or modified sequence
atgagcgtgaagccgagttgggggccaggacctagtgaaggggtgacagctgtgcccaccagtgatttaggggagattcacaattggacagaattgttagatttattcaatcatacactgtccgaatgtcacgtcgagctgtctcagtcaaccaagcgagtagtgctgtttgccctgtacctggcaatgttcgtggtggggttagtcgaaaacctgctggtgatttgcgtcaactggagaggaagcggacgggcaggcctgatgaatctgtacattctgaatatggccatagctgatctcgggatcgtgctctctctcccagtctggatgctggaggttacgttggactatacatggctgtggggaagctttagctgtcggtttacacactatttttatttcgtgaacatgtacagttcgattttctttttagtttgtctgagcgtggataggtacgtcaccctcacgtccgcaagcccaagttggcagagataccagcacagggtgcgtcgggctatgtgtgccggaatatgggtactgtctgccatcattcccctccctgaagtcgtgcacatccagcttgtagagggaccagagcccatgtgtcttttcatggctcctttcgagacatactctacgtgggccctcgctgttgccctgtcgaccaccattctgggcttcttgttgccatttccacttatcaccgtctttaatgtcctgacagcgtgccggctgcgccagcccggtcagcctaagagccggagacattgtctcctgctgtgtgcttacgtcgccgtcttcgtaatgtgctggctcccctaccatgttacactgctgttacttaccttgcatggcacacatatttccctccattgtcacctggtgcacctgctatattttttttacgacgtcatcgattgcttcagtatgttgcattgcgtcataaatcctatcctatataactttctgtccccacactttcggggacgcctgctgaatgctgtggtacactacctacccaaggatcagaccaaggcaggtacctgtgcctcatcaagcagctgttccacgcagcatagcataatcattaccaagggggattcccagcctgcggctgctgctccccatcccgagccttccctgagctttcaagcccaccatctgctccctaacacatccccaatatctccaactcagcctttgaccccaagctag

SEQ ID NO: 333441 - protein, 730 aa, Artificial Sequence
  derived and/or modified sequence
MLLFVEQVASKGTGLNPNAKVWQEIAPGNTDATPVTHGTESSWHEIAATSGAHPEVSVFNTGNAELSEDICKEYEVMYSSSCETTRNTTGIEESTDGMILGPEDLSYQIYDVSGESNSAVSTEDLKECLKKQLEFCFSRENLSKDLYLISQMDSDQFIPIWTVANMEEIKKLTTDPDLILEVLRSSPMVQVDEKGEKVRPSHKRCIVILREIPETTPIEEVKGLFKSENCPKVISCEFAHNSNWYITFQSDTDAQQAFKYLREEVKTFQGKPIMARIKAINTFFAKNGYRLMDSSIYSHPIQTQAQYASPVFMQPVYNPHQQYSVYSIVPQSWSPNPTPYFETPLAPFPNGSFVNGFNSPGSYKTNAAAMNMGRPFQKNRVKPQFRSSGGSEHSTEGSVSLGDGQLNRYSSRNFPAERHNPTVTGHQEQTYLQKETSTLQVEQNGDYGRGRRTLFRGRRRREDDRISRPHPSTAESKAPTPKFDLLASNFPPLPGSSSRMPGELVLENRMSDVVKGVYKEKDNEELTISCPVPADEQTECTSAQQLNMSTSSPCAAELTALSTTQQEKDLIEDSSVQKDGLNQTTIPVSPPSTTKPSRASTASPCNNNINAATAVALQEPRKLSYAEVCQKPPKEPSSVLVQPLRELRSNVVSPTKNEDNGAPENSVEKPHEKPEARASKDYSGFRGNIIPRGAAGKIREQRRQFSHRAIPQGVTRRNGKEQYVPPRSPK

SEQ ID NO: 333442 - DNA, 2193 bp, Artificial Sequence
  derived and/or modified sequence
atgctgctgttcgtggagcaggtggccagcaagggcaccggcctgaaccccaacgccaaggtgtggcaggagatcgcccccggcaacaccgacgccacccccgtgacccacggcaccgagagcagctggcacgagatcgccgccaccagcggcgcccaccccgaggtgagcgtgttcaacaccggcaacgccgagctgagcgaggacatctgcaaggagtacgaggtgatgtacagcagcagctgcgagaccaccagaaacaccaccggcatcgaggagagcaccgacggcatgatcctgggccccgaggacctgagctaccagatctacgacgtgagcggcgagagcaacagcgccgtgagcaccgaggacctgaaggagtgcctgaagaagcagctggagttctgcttcagcagagagaacctgagcaaggacctgtacctgatcagccagatggacagcgaccagttcatccccatctggaccgtggccaacatggaggagatcaagaagctgaccaccgaccccgacctgatcctggaggtgctgagaagcagccccatggtgcaggtggacgagaagggcgagaaggtgagacccagccacaagagatgcatcgtgatcctgagagagatccccgagaccacccccatcgaggaggtgaagggcctgttcaagagcgagaactgccccaaggtgatcagctgcgagttcgcccacaacagcaactggtacatcaccttccagagcgacaccgacgcccagcaggccttcaagtacctgagagaggaggtgaagaccttccagggcaagcccatcatggccagaatcaaggccatcaacaccttcttcgccaagaacggctacagactgatggacagcagcatctacagccaccccatccagacccaggcccagtacgccagccccgtgttcatgcagcccgtgtacaacccccaccagcagtacagcgtgtacagcatcgtgccccagagctggagccccaaccccaccccctacttcgagacccccctggcccccttccccaacggcagcttcgtgaacggcttcaacagccccggcagctacaagaccaacgccgccgccatgaacatgggcagacccttccagaagaacagagtgaagccccagttcagaagcagcggcggcagcgagcacagcaccgagggcagcgtgagcctgggcgacggccagctgaacagatacagcagcagaaacttccccgccgagagacacaaccccaccgtgaccggccaccaggagcagacctacctgcagaaggagaccagcaccctgcaggtggagcagaacggcgactacggcagaggcagaagaaccctgttcagaggcagaagaagaagagaggacgacagaatcagcagaccccaccccagcaccgccgagagcaaggcccccacccccaagttcgacctgctggccagcaacttcccccccctgcccggcagcagcagcagaatgcccggcgagctggtgctggagaacagaatgagcgacgtggtgaagggcgtgtacaaggagaaggacaacgaggagctgaccatcagctgccccgtgcccgccgacgagcagaccgagtgcaccagcgcccagcagctgaacatgagcaccagcagcccctgcgccgccgagctgaccgccctgagcaccacccagcaggagaaggacctgatcgaggacagcagcgtgcagaaggacggcctgaaccagaccaccatccccgtgagcccccccagcaccaccaagcccagcagagccagcaccgccagcccctgcaacaacaacatcaacgccgccaccgccgtggccctgcaggagcccagaaagctgagctacgccgaggtgtgccagaagccccccaaggagcccagcagcgtgctggtgcagcccctgagagagctgagaagcaacgtggtgagccccaccaagaacgaggacaacggcgcccccgagaacagcgtggagaagccccacgagaagcccgaggccagagccagcaaggactacagcggcttcagaggcaacatcatccccagaggcgccgccggcaagatcagagagcagagaagacagttcagccacagagccatcccccagggcgtgaccagaagaaacggcaaggagcagtacgtgccccccagaagccccaagtag

SEQ ID NO: 333443 - DNA, 2193 bp, Artificial Sequence
  derived and/or modified sequence
atgctgctgtttgtggaacaggttgctagcaagggcacaggcctcaaccctaatgcaaaggtgtggcaagagatagcgcccggaaatactgatgctactccagtgacacacggcacggagtccagctggcacgaaattgccgccaccagcggggcacacccagaggtgtcggtgtttaacacaggaaacgcggagctctctgaagatatctgtaaggagtacgaagttatgtatagctcttcctgcgaaaccacaagaaacacaaccggaatagaagaatctacggacggcatgatactcggcccagaggacttgtcctatcagatttacgacgtcagcggagaatccaacagcgccgtttctactgaggacctgaaggagtgcctcaagaagcaattggagttttgcttctcacgggaaaacctgtccaaagatctttacctgatctcacagatggactcggatcaattcattcctatatggacagtggctaacatggaagaaatcaaaaagcttactacagatcctgacctcatcttagaggtgctgcggtcaagtccaatggtgcaggtagacgagaagggcgagaaagtgaggccatcgcacaagcggtgtatcgtcatcttacgcgaaatccccgaaactactcccattgaagaagttaaggggttgttcaagagcgagaactgccctaaggtgattagctgcgagtttgcccataatagcaactggtacattacctttcagagtgacaccgatgctcagcaggcttttaaatacctgagagaagaagttaagacctttcaaggtaaacccataatggctcggattaaggctatcaatacattcttcgccaaaaacgggtaccgtctcatggactcttccatctatagtcatcccatacagactcaggcacagtacgccagtcctgtgttcatgcagccagtctataaccctcatcagcagtactcagtgtattccatcgttccccaatcatggagtcctaatcctacaccctattttgaaaccccacttgcaccattcccaaacggatcgttcgttaatgggttcaactctcccggctcctataagacaaacgctgcagctatgaatatggggaggccatttcagaagaacagagtgaaaccccagttccgttcttcaggcggaagcgaacactcaacagagggaagtgtgtccctgggggacggacagctcaaccggtactcaagtcggaatttccccgctgagcgacacaatccgaccgtgacagggcaccaagagcaaacatatttgcagaaggaaacaagcactctccaggtggagcagaacggcgactacgggcggggtcggcgcaccctatttcgaggtcgtcgccggagggaagacgaccgcattagcaggcctcatccctccaccgctgaatctaaggcccccacgcccaaattcgatttgttggcatctaacttccccccgctccccggatcctccagccggatgcccggtgagcttgtcctcgagaaccgaatgtctgacgtcgtcaagggggtatacaaagagaaggataacgaggaacttacaatttcttgtcctgtacccgcagacgaacagacggagtgtacgagcgctcagcagctcaatatgtccacctccagtccttgtgctgccgaactgaccgccctcagcaccacccaacaagaaaaggatctgattgaggactcctcagttcaaaaggatggcctcaaccagacaacgatcccggtttccccaccatcaaccaccaaaccttctcgggcatcaacggcatctccgtgcaataacaacattaatgcagcaactgctgtggccttacaagagccaaggaagctgtcctacgccgaagtgtgccagaaaccccctaaggagccgtcaagcgtcctggttcagccattacgggagctgcgcagtaacgtcgtgtcacctactaagaacgaggataacggggctcctgaaaattcagtcgagaagccacacgagaaaccggaggctagagcctccaaggactactccggttttcgcggcaacattatccctaggggggcagccggcaagataagagaacaacgacggcagttttctcaccgtgccatcccacagggagtgacacggaggaatggaaaagagcaatatgtgcccccgcggtcaccgaagtag

SEQ ID NO: 333444 - DNA, 2193 bp, Artificial Sequence
  derived and/or modified sequence
atgctgctgtttgtggagcaggtggccagcaaaggaacaggcctgaaccccaatgccaaggtgtggcaggagatcgcccctggcaacacagatgccacccctgtgacccatggaacagagagctcctggcatgaaattgctgccaccagcggggcccaccctgaggtgtctgtgttcaacacaggaaatgctgagctgtctgaggacatctgcaaggagtatgaggtgatgtacagcagcagctgtgagaccaccaggaacaccactggaattgaggagagcacagatggcatgatcctgggccctgaggacctgagctaccagatctatgatgtgtctggagagagcaacagcgctgtgtccacagaggacctgaaggaatgtctgaagaagcagctggagttctgcttcagccgggagaacctgagcaaggacctgtacctgatcagccagatggacagcgaccagttcatccccatctggacagtggccaacatggaggagatcaagaagctgaccacagatcctgacctgatcctggaggtgctgcggagcagccccatggtgcaggtggatgagaagggggagaaggtgcggcccagccacaagcgctgcatcgtcatcctgcgggagatccctgagaccacccccatcgaggaggtgaagggcctcttcaagtctgagaactgccccaaggtgatcagctgtgaatttgcccacaacagcaactggtacatcaccttccagagcgacacagatgcccagcaggccttcaagtacctgcgggaggaggtgaagaccttccagggcaagcccatcatggcccgcatcaaggccatcaacaccttctttgccaagaatggctaccgcctgatggacagcagcatctacagccaccccatccagacccaggcccagtatgccagccctgtgttcatgcagcctgtgtacaacccccaccagcagtacagcgtgtacagcatcgtgccccagagctggagccccaaccccaccccctactttgagacccccctggcccccttccccaacggcagctttgtgaatggcttcaacagccctggcagctacaagaccaatgctgctgccatgaacatgggccggcccttccagaagaacagagtgaagccccagttccgcagcagcggcggcagcgagcacagcacagagggctctgtgtccctgggagatggccagctgaaccgctacagcagcaggaacttccctgctgagcggcacaaccccaccgtgacaggccaccaggagcagacctacctgcagaaggagaccagcaccctgcaggtggagcagaatggagactatggccggggccgccgcaccctcttccggggcagaagaagaagagaagatgaccgcatcagccggccccaccccagcacagctgagagcaaggcccccacccccaagtttgacctgctggccagcaacttcccccccctgcccggcagcagcagcaggatgcctggagagctggtgctggagaacaggatgtctgatgtggtgaagggcgtgtacaaggagaaggacaatgaggagctgaccatcagctgccctgtgcctgcagatgagcagacagaatgtaccagcgcccagcagctgaacatgagcaccagcagcccctgtgccgctgagctgacagccctgagcaccacccagcaggagaaggacctgattgaggacagctctgtgcagaaggatggcctgaaccagaccaccatccctgtgagcccccccagcaccaccaagcccagccgggccagcacagccagcccctgcaacaacaacatcaatgctgccacagctgtggccctgcaggagcccaggaagctgtcctatgcagaggtgtgccagaagccacccaaggagcccagctctgtgctggtgcagcccctgcgggagctgcggagcaatgtggtgagccccaccaagaatgaagacaacggggcccctgagaacagcgtggagaagccccatgagaagccagaggcccgggccagcaaggactacagcggcttccggggcaacatcatccccagaggagctgctgggaagatccgggagcagaggcggcagttcagccaccgggccatcccccagggcgtgaccaggagaaatggcaaggagcagtatgtgcccccaagaagccccaagtag

SEQ ID NO: 333445 - DNA, 4000 bp, Artificial Sequence
  derived and/or modified sequence
aggccgcagcggctgacggcaggggaggagccgggtccactgccgggtggaggggcaaggcgagtgtgtgtccttatcctagcaattggggcgcgggcctgtgagccagttggagttgcggcggcgggaacgattgggctgagcagaggacgacatgttgcttttcgtggagcaggtagcatctaaaggaactggtttaaatcctaatgccaaagtatggcaagaaattgctcctggaaatactgatgccaccccagtaactcatggaactgaaagctcttggcatgaaatagcagctacatcaggtgctcatcctgaggtgtctgtctttaatacaggtaatgcagagctctcagaagatatatgtaaagaatatgaagtaatgtattcttcatcttgtgaaaccacaagaaatactacaggcattgaagaatcaactgatgggatgattttaggaccagaagatctgagttaccaaatatatgatgtttccggagaaagcaattcagcagtttctacagaagacctaaaagaatgtctgaagaaacaattagaattctgtttttcacgagaaaatttgtcaaaggatctttacttgatatctcaaatggatagtgatcagttcatcccaatttggacagttgccaacatggaagaaataaaaaagttgactacagaccctgatctaattcttgaagtgttaagatcttctcccatggtacaagttgatgagaagggtgagaaagtgagaccaagtcataagcgttgtattgtaattcttagagagattcctgaaacaacaccaatagaggaagtgaaaggtttgttcaaaagtgaaaactgccccaaagtgataagctgtgagtttgcacacaatagcaactggtatatcactttccagtcagacacagatgcacaacaggcttttaaatacttaagagaagaagttaaaacatttcagggcaagccaattatggcaaggataaaagccatcaatacattttttgctaagaatggttatcgattaatggattctagtatctatagtcaccccattcaaactcaagcacagtatgcctccccagtctttatgcagcctgtatataatcctcaccaacagtactcggtctatagtattgtgcctcagtcttggtctccaaatcctacaccttactttgaaacaccactggctccctttcccaatggtagttttgtgaatggctttaattcgccaggatcttataaaacaaatgctgctgctatgaatatgggtcgaccattccaaaaaaatcgtgtgaagcctcagtttaggtcatctggtggttcagaacactcaacagagggctctgtatccttgggggatggacagttgaacagatatagttcaagaaactttccagctgaacggcataaccccacagtaactgggcatcaggagcaaacttaccttcagaaggagacttccactttgcaggtggaacagaatggggactatggtaggggcaggagaactctcttcagaggtcgaagacgacgagaagatgacaggatctcaagacctcatccttcaacagctgaatcaaaggctccaacaccaaagtttgacttattagcctcaaattttccacctttacctggaagttcatcaagaatgccaggtgaactcgttttggagaataggatgtctgatgttgttaaaggtgtctacaaagaaaaggataatgaagagttgacaattagttgcccagtgcctgcagatgagcagacagaatgcacttctgcccagcaactcaatatgagtaccagttctccatgtgctgctgagcttactgcattaagcacaactcagcaagaaaaggatctaatagaagattcctctgttcagaaggatggtctcaatcagacaactataccagtttctcctccaagtactacaaagccatcgagggcaagtactgcttcaccatgtaataataacataaatgcagctacagctgtggctctacaggaaccccgaaagttaagttatgctgaagtgtgccagaagccccctaaagagccatcttcagttcttgtgcagccactacgggaacttcgctccaatgtggtgtctcccaccaaaaatgaagacaatggagctcctgagaactccgttgagaaaccacatgagaagccagaagcaagggctagtaaggattattctggcttccgaggcaatataatccccaggggagcagcaggaaaaatcagggaacagagacgccagtttagccatagggctatacctcagggagtgactcgacgtaatggcaaagagcaatatgtgccacccagatcaccaaagtaaaaaacaacaaaactattcaaaaacttcactctcttcccattaaacttgaactgtggctatattgaactgttttggaggggagggggtagccaggaaggaaacaagagaaagtacgtccatttcattatggattttggagttgtgagtgataggatcccaaaattcatctctaatgtggtttttaaatgctggaggattccaatcaatataaatatatatatatatatacacacacatatataaaaagtataatttttctatttttgtttttggttttaatttgcagagatttgctgccaggaatcaattttgagggttcagatttagcttggaagaaaaaaaagaaacatacatccttcagtataggagatgagggaatgagagaaaatattttttgaagaagcatttctgtaaaattagaaattactttttttaatctatttaaagtttggcttgaagaatgccatctctgactatatggccttgtattgcaaagcggatcagtggctggggtgcctgttgtgggtgtgagtgtgtacaagagcgattgaagccaaatctgttgtcatgttagtaaatgatttgaaaactgaatgtaatacttgagtagatttttttttctagtttgaaatttagtctgtctttttgaccttactaatatttcatttaacaagttgtaaaactctgattgtacttagagatgtgactaccaatcagtttgatactcaaggaaagggggttattcaagaaattgaaaatttcatcttggacctcagtgcataggtcaaatggatttcagaggtttaaacttccctgtgattcccccgaatacccccaaaatgagaaacaaaattttttttcttactccatttgttactctctgttctttgactgcccacccacagaaaagcaaaataaccaactacctactcaattgtgtgtttgtaattgctttgagcagtctagtcaaatcatataaattgttctaaatttcagaattgaacattgaagtattaactcttctgttcacacatttagaattttagctcccaagatggtagggcagactgaccgtacagtaatttatttgtcgttagtgttaaagattaagcatagtaactgactcttaagtgttaaataatgtagaagtaaaaaaattttttttaaaggcttaatttgggaggggggacttatttctgtttacagtgtattaccttccttccctcctcttctccccccacacccaacaaaatacagtttggaattcactgaaacagtaccagcaagtcatgagattttttagtaaagatgagaaagatggttgaagaaaattagtgcataatttctcagtgaataaagttgtagctctcatatactaaatagacaagtttacatgctgttatttagaaaatgactaaaatattaaaaaccgtgttgtgttaatctgttttaagtcataccatgttcagagttctatgtaaggtgggttttatttttcttttaagggatagtttgtaatagtaagaactgtcccatatgttagtaaattacatatgtacaaattgaaactgtaaattgtgaacactggaaagcaccattgtgacatagagtaaacatcttagtaatatattaaagtgaatgtaaatggtggtt

SEQ ID NO: 333446 - DNA, 2193 bp, Artificial Sequence
  derived and/or modified sequence
atgctgctgttcgtggagcaggtggccagcaagggcaccggcctgaacccaaatgcaaaagtgtggcaagagatagctcccggcaacactgatgctactccagtgacgcatggaacagagagcagttggcatgagatcgccgcaacttccggcgctcatccagaggtgtcagtctttaatacaggaaacgccgaactgtctgaggatatttgtaaggagtatgaagtaatgtactcttcgtcatgtgagaccacacgtaataccaccggtattgaggaaagcacggatggcatgattctggggccagaggatctaagctaccagatctatgatgtctcaggcgaatctaactcagcagtgagcaccgaagacctcaaggaatgcctcaagaagcaattagagttttgtttcagcagagaaaacctgtctaaggatctatacctgatatcccagatggatagcgaccagttcatcccaatctggacggtcgccaatatggaggaaataaagaagttaacgactgaccccgatctcatactggaagttctgcgcagttcccctatggtgcaagtcgacgagaaaggcgagaaggttaggccctctcataaaaggtgcatagtgatcttgagggagataccagagacaaccccaattgaagaggttaaaggcctgttcaaatctgaaaactgcccaaaggtcatcagttgtgagtttgcacataactccaattggtacatcacgttccagagtgataccgatgcccaacaagcatttaaatatctgcgcgaggaagttaaaactttccaggggaagcccattatggctaggataaaagctattaacaccttcttcgcaaagaacggctaccggctgatggactccagcatttatagtcatcctatacaaacccaggcacagtatgcttcgccagtgttcatgcaacccgtctacaatcctcaccaacagtacagcgtatatagcattgtacctcagtcctggagccccaaccctacgccttacttcgaaactcctttggcgcccttcccgaacggatcgtttgtgaacggatttaactcccccggaagctataaaacaaatgcagccgctatgaacatgggccgcccttttcaaaaaaacagagtcaagcctcagtttaggagctccggagggagtgaacacagcacagaggggtccgtgtccctgggcgatggccagcttaataggtattctagtcgcaatttccctgcagagcgtcacaacccgacagtcaccggccatcaggagcagacctatctgcaaaaagaaacctccaccttacaagtagagcagaacggcgattacgggcgggggagacgaaccctgttccggggacgacgccggagggaagacgatagaatatcccggccccatccgtctactgcagagagcaaagcccctacaccaaaatttgatctactggcctccaactttccaccgctcccagggagcagctcacgaatgcctggggagctcgtattggagaatcgcatgtcagacgttgtgaaaggtgtctacaaggaaaaggataacgaagaattgacaatttcatgtccggtccctgcagatgagcagacagagtgcacgagcgctcagcagctcaacatgagtacatcttccccctgtgccgccgagctgaccgctctgtctaccactcagcaggagaaggacctcatagaggatagctccgtgcagaaagacggactgaaccaaaccacaatccctgtgagcccaccctctactacgaagccatcccgggcgagtaccgcctccccctgcaataacaacatcaacgctgctactgccgtggctctgcaggagcccagaaagctgagctacgctgaagtatgtcaaaagcctcctaaagaaccatcaagcgtactggtgcagcctctgagggaattacgctctaatgtggtatcccccaccaagaatgaagacaacggagctcccgaaaatagtgtcgagaaaccccatgaaaagcctgaggcgagagcaagtaaagattatagtggcttccgaggtaatattatcccgagaggcgctgcaggtaaaattcgagagcagcgcagacaattctctcacagggctatcccccagggtgttacgcggagaaatggaaaggagcagtatgtcccccctagaagccctaagtag

SEQ ID NO: 333447 - DNA, 2193 bp, Artificial Sequence
  derived and/or modified sequence
atgctgctcttcgtggaacaggttgcaagcaaggggactggcctgaacccaaatgccaaggtgtggcaggaaatagcacccggtaataccgatgcaacacctgttacacatgggacagaatcgtcttggcacgagatcgccgctacatcaggagcccaccccgaggtctccgtcttcaatacaggaaacgctgaactgagcgaggacatttgtaaggaatatgaggtcatgtactctagttcttgtgaaaccacaaggaatactacaggaattgaagaaagcaccgatggaatgatccttggcccagaggacttgtcatatcagatctacgacgtgtcaggagaaagtaattcagccgttagcaccgaagaccttaaggagtgtctgaagaagcagttggaattctgttttagccgagagaacctgtccaaggacctttatctcatctcacaaatggattcagaccagttcatacccatctggacagttgcaaatatggaggaaatcaaaaagctgaccaccgatcccgatctgattctggaggtgctacggtcaagccccatggtgcaagtcgacgagaaaggagagaaggtccgcccatcgcacaagcgatgcattgtcatcctgcgggagattcccgagaccacacccattgaggaggtaaagggcttattcaaaagcgagaattgcccaaaagtgatctcttgcgaatttgcccataactcaaactggtacattacctttcagtccgataccgacgcccaacaggcctttaaatatttgcgagaggaggtaaaaacgttccaggggaaacccattatggcgcgaattaaagcaatcaatactttcttcgcaaagaacggctacagattgatggacagctccatttacagccatcccatacaaacccaggcccaatatgccagcccagtgttcatgcaaccagtatacaatcctcatcagcagtatagtgtgtactccatcgtgccccagagttggtcacccaatcccacgccctacttcgaaacgccgctggcaccattccctaatggcagcttcgttaatggattcaatagccccggaagctacaaaaccaacgctgccgcaatgaatatgggaagaccatttcagaagaatcgagttaagccccagttcagaagctccggaggaagcgagcacagcacagagggttccgtgtctctcggggatggccaactaaatagatactcttcccgtaactttcccgctgagcgccacaacccgacagtaaccgggcaccaagagcaaacatacctgcagaaggagacttcgactttgcaggtcgaacagaatggggactacgggcgaggaagacgaactttgttcagaggcagacgcagacgcgaggatgacagaatcagcagacctcacccaagtaccgcggagtcaaaggctcctacccctaaatttgatctcctggcgagtaacttcccccctctgccagggagctcctcacgcatgcctggagagcttgtactggaaaaccgaatgtctgacgttgtcaagggggtctataaggagaaggacaatgaagagctgacaatatcctgtcctgtcccagcagacgagcagaccgaatgcaccagcgctcagcagttaaatatgtctacctccagcccctgtgcagctgagttaaccgccttatctacgactcagcaggagaaggaccttattgaagattcatctgttcagaaggatgggttaaaccagacaacaatccctgtttcaccgcctagcacaactaaaccaagcagagctagcacagccagcccatgtaacaataacataaatgcagccaccgcggtagctttgcaggaaccacggaagctttcctatgcggaagtgtgtcagaaaccacccaaggaaccttcgagtgtcctagttcagcctctgagagaactgaggtcaaatgttgtgtctcccacgaagaatgaagataatggcgcacctgagaacagtgtggaaaagccccatgaaaagccggaggcccgagcctccaaggattactcaggtttccgcggtaacattattcccaggggtgccgcaggcaaaatccgcgagcagagacgccagttctcccacagagccatcccccagggcgtgacccggaggaatgggaaggaacagtacgtgcccccacgatcgcctaaatag

SEQ ID NO: 333448 - protein, 188 aa, Artificial Sequence
  derived and/or modified sequence
MYSSSCETTRNTTGIEESTDGMILGPEDLSYQIYDVSGESNSAVSTEDLKECLKKQLEFCFSRENLSKDLYLISQMDSDQFIPIWTVANMEEIKKLTTDPDLILEVLRSSPMVQVDEKGEKVRPSHKRCIVILREIPETTPIEEVKGLFKSENCPKVISCEFAHNSNWYITFQSDTDAQQAFILKRRS

SEQ ID NO: 333449 - DNA, 567 bp, Artificial Sequence
  derived and/or modified sequence
atgtacagcagcagctgcgagaccaccagaaacaccaccggcatcgaggagagcaccgacggcatgatcctgggccccgaggacctgagctaccagatctacgacgtgagcggcgagagcaacagcgccgtgagcaccgaggacctgaaggagtgcctgaagaagcagctggagttctgcttcagcagagagaacctgagcaaggacctgtacctgatcagccagatggacagcgaccagttcatccccatctggaccgtggccaacatggaggagatcaagaagctgaccaccgaccccgacctgatcctggaggtgctgagaagcagccccatggtgcaggtggacgagaagggcgagaaggtgagacccagccacaagagatgcatcgtgatcctgagagagatccccgagaccacccccatcgaggaggtgaagggcctgttcaagagcgagaactgccccaaggtgatcagctgcgagttcgcccacaacagcaactggtacatcaccttccagagcgacaccgacgcccagcaggccttcatcctgaagagaagaagctag

SEQ ID NO: 333450 - DNA, 567 bp, Artificial Sequence
  derived and/or modified sequence
atgtattcatctagttgtgagaccacacgaaacacgacaggcattgaagaaagcacagacggcatgatactggggccggaagacctgagttatcaaatttacgatgtgtccggagagtccaatagcgcagtgagtactgaagacctgaaagagtgtttgaaaaagcaattagagttctgcttctctagggaaaatctttcaaaagacctgtacttaatttctcagatggacagcgaccagtttatccccatttggactgtcgcaaacatggaggaaattaagaaacttaccaccgatcccgacctgattctggaggtcttgcgatcatcccccatggttcaggtcgatgaaaaaggcgagaaagtgcggccttcccacaaacgatgtatcgttatcctgagggaaatccctgaaactacccccattgaagaggtcaaaggactttttaaatccgagaattgcccaaaggtgatttcctgtgagttcgcccacaactctaactggtatatcactttccagagcgataccgatgcgcagcaggcattcattctcaagaggcggtcatag

SEQ ID NO: 333451 - DNA, 567 bp, Artificial Sequence
  derived and/or modified sequence
atgtacagcagcagctgtgagaccaccaggaacaccactggaattgaggagagcacagatggcatgatcctgggccctgaggacctgagctaccagatctatgatgtgtctggagagagcaacagcgctgtgtccacagaggacctgaaggaatgtctgaagaagcagctggagttctgcttcagccgggagaacctgagcaaggacctgtacctgatcagccagatggacagcgaccagttcatccccatctggacagtggccaacatggaggagatcaagaagctgaccacagatcctgacctgatcctggaggtgctgcggagcagccccatggtgcaggtggatgagaagggggagaaggtgcggcccagccacaagcgctgcatcgtcatcctgcgggagatccctgagaccacccccatcgaggaggtgaagggcctcttcaagtctgagaactgccccaaggtgatcagctgtgaatttgcccacaacagcaactggtacatcaccttccagagcgacacagatgcccagcaggccttcatcctgaagaggaggagctag

SEQ ID NO: 333452 - DNA, 567 bp, Artificial Sequence
  derived and/or modified sequence
atgtacagcagcagctgcgagaccacccggaacaccaccggcatcgaagagagcactgacggcatgatattggggccagaggacctgagctatcagatttatgatgtttccggcgagtctaattctgcggtatcaacagaggacctgaaggagtgcttgaagaaacagttagaattttgttttagccgcgagaacttaagtaaggacctctaccttatttcacagatggactctgaccagttcataccaatctggacagtggctaacatggaggagattaagaagctgacaactgatcctgacttgattctggaagtgctgcggtcttccccaatggtgcaggtagacgagaagggggagaaggtgaggccaagccataaacgatgcatcgtcattcttcgagaaatcccagagacaacccccatcgaagaggtgaagggtttgtttaaaagtgaaaactgtcccaaggtaatctcctgcgagttcgcccacaatagtaattggtatatcacctttcagtccgacaccgatgctcaacaagcctttattctgaagaggagatcttag

SEQ ID NO: 333453 - DNA, 567 bp, Artificial Sequence
  derived and/or modified sequence
atgtacagctcatcttgtgaaaccacccgaaacactactggtatcgaggagagtaccgatggtatgatcttggggcctgaagatctgtcttatcagatctacgacgttagcggagagtctaatagcgctgtctctaccgaggacctcaaggaatgcctcaagaagcagctagaattctgtttctcccgcgaaaacctgtccaaggatctctatctcatctcgcaaatggattccgatcagttcatccctatctggaccgtggccaacatggaagagataaagaaactcactactgatcctgaccttatcctcgaggtactgcgctcatcgcccatggtacaggttgatgaaaagggcgagaaagtaaggcctagccacaagaggtgcattgttatactgcgtgagatacccgaaactacacccattgaagaggtgaagggactgttcaagagcgaaaactgtccgaaagtgatcagttgcgagttcgcacacaactctaattggtatattacattccagtccgacaccgatgcccaacaggcctttatattaaagcggaggtcatag

SEQ ID NO: 333454 - protein, 357 aa, Artificial Sequence
  derived and/or modified sequence
MSRKASENVEYTLRSLSSLMGERRRKQPEPDAASAAGECSLLAAAESSTSLQSAGAGGGGVGDLERAARRQFQQDETPAFVYVVAVFSALGGFLFGYDTGVVSGAMLLLKRQLSLDALWQELLVSSTVGAAAVSALAGGALNGVFGRRAAILLASALFTAGSAVLAAANNKETLLAGRLVVGLGIGIASMTVPVYIAEVSPPNLRGRLVTINTLFITGGQFFASVVDGAFSYLQKDGWRYMLGLAAVPAVIQFFGFLFLPESPRWLIQKGQTQKARRILSQMRGNQTIDEEYDSIKNNIEEEEKEVGSAGPVICRMLSYPPTRRALIVGCGLQMFQQLSGINTIMYVFLSGFLLKRL

SEQ ID NO: 333455 - DNA, 1074 bp, Artificial Sequence
  derived and/or modified sequence
atgtctcggaaggcttcggaaaacgtagagtatacattgcggtcactgtctagcctgatgggagaacggcgacgcaaacaacctgaaccagatgccgctagtgcagctggggagtgtagtttgctggcagctgccgaaagttccacctcgctgcagagcgcaggcgctgggggcgggggagtgggcgatcttgagcgcgctgcaaggagacagtttcagcaggacgagaccccagcgttcgtttacgtcgttgccgtgtttagcgccctcggcgggtttctatttgggtatgatacaggggttgtgtccggggctatgctactccttaagcgccaactgagtctggacgctctgtggcaggaactgcttgtcagtagcactgttggcgccgccgcagtatccgccctcgcagggggcgccctgaatggggtgtttgggcgcagggccgcgatcctgctggcatccgccctgttcaccgcaggtagtgctgtgctagcggcagccaataataaagagacactgctggcaggtagactggttgtgggcctgggaatcggcatcgcatctatgactgtgcccgtgtacatcgctgaagtttcacctccaaatctgagagggagactcgtcaccatcaacactctctttatcacgggcggtcagttcttcgcaagcgttgtcgatggggcttttagctacctccaaaaggacggctggcggtacatgctaggtttggcggcagtacccgctgtcatacagttctttgggtttctcttcctcccggagtccccaagatggctaatccaaaaaggacagacacagaaggccaggagaatccttagccagatgaggggaaaccagactatagacgaggagtacgatagcattaagaataatatcgaagaggaggagaaggaggtgggctcggcggggcccgtcatatgccgcatgctgtcttatccaccaacgagaagggcgcttattgtgggatgtggactccagatgttccagcagctgagtggcattaataccatcatgtacgtctttttatcgggcttccttcttaagagactatag

SEQ ID NO: 333456 - DNA, 1074 bp, Artificial Sequence
  derived and/or modified sequence
atgagcaggaaggcctctgaaaatgtggagtacaccctgcggagcctgagcagcctgatgggagagaggaggaggaagcagcctgagccagatgctgccagcgctgctggggagtgcagcctgctggccgctgctgagagcagcaccagcctgcagagcgctggggccggcggcggcggcgtgggggacctggagagagctgcccggcggcagttccagcaggatgagaccccagcctttgtgtatgtggtggccgtgttcagcgccctgggcggcttcctgtttggctatgacacaggagtggtgtctggggccatgctgctgctgaagaggcagctgagcctggatgccctgtggcaggagctgctggtgagcagcacagtgggcgctgctgctgtgtctgccctggccggcggggccctgaatggagtgtttggaagaagagctgccatcctgctggccagcgccctcttcaccgctggcagcgctgtgctggccgccgccaacaacaaggagaccctgctggccggccgcctggtggtgggcctgggcattggaattgcctccatgacagtgcctgtgtacatcgccgaggtgtccccacccaacctgcggggccgcctggtgaccatcaacaccctcttcatcactggaggccagttctttgcctctgtggtggatggagccttctcctacctgcagaaggatggctggagatacatgctgggcctggccgctgtgcctgctgtgatccagttcttcggcttcctgttcctgcctgagagcccccgctggctgatccagaagggccagacccagaaggcccggcgcatcctgagccagatgaggggcaaccagaccattgatgaggagtatgacagcatcaagaacaacatcgaggaggaggagaaggaggtgggcagcgctggccctgtgatctgcaggatgctgagctacccacccacccggcgggccctgattgtgggctgcggcctgcagatgttccagcagctgagcggcatcaacaccatcatgtatgtgttcctgagcggcttcctgctgaagaggctgtag

SEQ ID NO: 333457 - DNA, 1074 bp, Artificial Sequence
  derived and/or modified sequence
atgagccggaaggccagcgagaacgtggagtacaccctgcggagcctgtcctctttgatgggggaacggagaaggaaacaacccgagcccgatgctgcctcggccgccggggaatgtagcttactcgccgctgcggagtctagcacatccctccagtctgcgggggctggcggcggaggggtcggggacctggagcgagccgcacgtcgtcaatttcaacaagatgagacaccagcctttgtgtacgtggtggctgttttttccgccctgggcggctttctttttgggtacgatactggagtcgtaagcggagctatgctactgctcaagcgccagttgtctttagacgcgttgtggcaggaactcctggtgagttccacagtgggcgcggccgccgtgtccgccctcgccgggggcgcattgaacggagtgtttgggcggcgagccgccatcctgctcgcctcagcactgtttaccgctgggtcagctgtcctcgcggccgccaacaataaagagaccttactggcaggacgcctggtcgtggggttgggtattgggatcgcctccatgacagtgccggtgtacatcgcagaggtgagtccgccaaacttgaggggccgcctcgtcactatcaacacattatttatcaccgggggtcagttttttgccagtgtagttgatggcgcgttttcatatctgcagaaggatggctggaggtatatgctgggtctggctgccgtccccgcagttatccaattctttggattcctgtttttacccgaatcccctaggtggctgatccagaagggacagacacagaaagccaggagaatcctcagccagatgagaggtaatcagactatcgacgaagaatacgattctattaaaaataatatcgaagaggaggagaaagaagtgggtagcgccggtccagtcatctgtcggatgttgagctaccctcccacaaggcgggccctgatcgttggctgtggcttgcagatgtttcaacagctgtccggcataaacaccatcatgtacgtgttcctatcaggatttttgttgaaaaggctctag

SEQ ID NO: 333458 - DNA, 1074 bp, Artificial Sequence
  derived and/or modified sequence
atgagcagaaaagcctctgagaatgtggagtatacattacgcagcctgagttccctgatgggcgaaagaagacgcaagcaacctgagcctgatgccgcttccgcggcaggcgagtgctccttactcgccgctgctgagtcgagcacctccctgcagtctgctggggctggaggagggggagtgggagatttggaacgggctgcgagacgccagttccagcaagacgaaacacctgcattcgtttatgtggtggccgtattttctgcattgggaggctttttattcgggtatgacactggggtcgtatctggagcgatgcttctcctgaaaaggcagctgagcctggacgccttgtggcaggagctcctggtgagcagcaccgtgggagctgctgcagtgagcgccctggcgggaggtgctctgaatggcgtcttcggtcgcagggcggcaatcctgttggcctccgcattgtttacagcaggaagtgcggtgctagccgctgccaacaacaaggagacgctgctggctgggagactggtcgtgggtctgggcatcgggatagcatccatgaccgtacccgtttacatagctgaggtgagcccccctaatctgcgcggtaggcttgtgaccattaatactctatttataactgggggacagtttttcgcatcagttgtggacggcgctttctcctacttacagaaagacgggtggaggtacatgctgggcctcgcagccgtgcccgcagtcatccagttttttggctttctgttcttaccagaatccccacgttggctaatacagaagggtcagacacaaaaggcgagaagaatcttgtctcaaatgcgcggaaatcagaccattgacgaggagtacgattctatcaagaacaacatagaggaggaggagaaggaggtcggctccgcaggccctgtcatctgccggatgcttagctatcccccaaccagacgggctttgatagtcgggtgcgggctccagatgttccagcagctatccggcataaacaccattatgtacgtgtttctgagcggatttttactgaaacgcctatag

SEQ ID NO: 333459 - DNA, 3082 bp, Artificial Sequence
  derived and/or modified sequence
cgcctcccgcccgctccgcagcgccagctcggcaggcgcggggcgtgagtgtggagtgagacccgccgggctccaactccgcagcgtcggagcgcggcgggcagcaactttctccccggagcggccgtggcggcggctgctgccgtggcagccggagcggaagccgggaggaagaaagcggcggcagcggcggttgctcccgccggctcgggctgtctagctcgccgagactgccggcccgcggagccgcgtccccccgggcagccccgggcccctgccctatgtcccgcaaggcaagcgagaatgtggagtacacgctgcggagcctgagcagcctgatgggcgagcggcgcaggaagcagccggagccggacgcggcgagcgcggccggggagtgcagcctcctggctgccgccgaatcgagcaccagcctgcagagcgcgggcgcgggcggcggcggcgtcggggacctggagcgcgcggcgcggcggcagttccagcaggacgagacccccgccttcgtgtacgtggtggccgtcttctccgcgctgggcggcttcctgtttggctatgacaccggggtggtgtcaggggccatgctgctgctcaagcggcagctcagtctggacgcgctgtggcaggagctgctggtgtccagcacggtgggggcggctgccgtctcggcgctggccggaggcgccctcaacggcgtcttcggccgccgcgctgccatcctcctggccagtgccctcttcaccgccggctccgcggtgctggctgcggccaacaacaaggagacactgctcgccggccgcctggtcgtgggactcggcatcggcattgcttctatgacagtgccagtgtacattgcggaggtctcaccacccaatttaagaggccgattagtcaccattaataccctcttcatcacaggagggcagttctttgcaagtgttgttgatggagccttcagttatctccagaaggatggatggaggtacatgttgggacttgcagcagttccggcggttatacagttttttggctttctctttttgcctgaaagccctcgatggcttattcagaaaggacagactcagaaggcccgtagaattttatctcagatgcgtggtaaccagaccattgatgaggaatatgatagcatcaaaaacaacattgaagaggaggaaaaagaggttggctcagctggacctgtgatctgcagaatgctgagttatcccccaactcgccgagctttaattgtgggttgtggcctacaaatgttccagcagctctcaggcattaacaccatcatgtatgtatttctttctggctttttactgaaaagattgtgaaaggattattttatgtgaaatagtgaaaagtatttcatgtaaatactagactcagtgatttgttctgattaaatgtatgaattctccttttgggagatactgactttacaattttttaattccagtaatttgttactagataaaggtgatttattttgtttgttatatgattggctttatttgattccataaaatttctcttttacgccatccaatacctccttgtattctgagcttaaatgtgtcattttttctaagccatttcttgatgctggttggaaagcaaaatagaaggaaatcacctggcattgccagagattatgggcacacagataactaattcatttctttttggtgcagtctactacagtgcaatgtgataaggacattagtagaagtacgtttattataaccagagtatggtagaggggagattgagtgggaaggagagtgaggaatacagaaaaattccctgttctctaattttaagagtaattcccaaagctgtatgtgtgctgagggtgggaaggactaaatattaagggctctactaggtttccctcattcagtattaaacccatttttgagggcctctgttgcactagacctacagcagtaactaaaatagacctgggtcttgtcctcatggatgtacaggctggtagaggaagcacacattaaataaactcacagttaaatataagatttcaaactatgataagggccatacaggactctctcaattctctacagagtagacttttaagatcctaaatcataaaatacagtttagagaaggttatgtgctttcccagggcacatattgttagattaaaagctgccacatcttagaagtcctccccactccctgcctattgattgaatttttttcattaagaaaatacaaattatgtaaaattaaattttctttggtaaaccatttgtatttgagactcttgattttttttaattacttgagatatgatgagttatttagtgactgtttgagaagagtgaattgattaaaatatttttaaaaaagaaggattaggacccaatgagccagtatattaaatcaagatttgttgagaaactccattttctatacattcacacactttgtggatttgactttaatcataatccctgttgaacttcaactttcgagactacatgttcaatattttgttctctcctgcttctctctgacattaactttcattttttctcacctttaccagctctattaaggcccatctgttggtctagtgccaggcacgtttgattgcttgttctctgaatttggcacatcatgacttgttctgagatgtgtccaccttctgcagtctggtggaagtatagaattgcagctaggctaggaccaagcatcaaataattaaatccattaataatcctatgtgaattcgttagttgaccaacctaatatttgttctggttttgaaaatatgttttgtttgttatgctttttttcctaagcatttaaacttgacaagtataaaagcatagaaagtgaaggatttttcttgtactttttttgttttcacttaaaactggtatcacaaacagagccaactctagtttatgggtagtgactggggccagtgtattcctagtttgaaatgactgtcataatccattagcagtagctagtgtaaattgagctgattgatgctgtcaaattttaataaaacattcatttctccaaa

SEQ ID NO: 333460 - DNA, 1074 bp, Artificial Sequence
  derived and/or modified sequence
atgagcagaaaggccagcgagaacgtggagtacaccctgagaagcctgagcagcctgatgggcgagagaagaagaaagcagcccgagcccgacgccgccagcgccgccggcgagtgcagcctgctggccgccgccgagagcagcaccagcctgcagagcgccggcgccggcggcggcggcgtgggcgacctggagagagccgccagaagacagttccagcaggacgagacccccgccttcgtgtacgtggtggccgtgttcagcgccctgggcggcttcctgttcggctacgacaccggcgtggtgagcggcgccatgctgctgctgaagagacagctgagcctggacgccctgtggcaggagctgctggtgagcagcaccgtgggcgccgccgccgtgagcgccctggccggcggcgccctgaacggcgtgttcggcagaagagccgccatcctgctggccagcgccctgttcaccgccggcagcgccgtgctggccgccgccaacaacaaggagaccctgctggccggcagactggtggtgggcctgggcatcggcatcgccagcatgaccgtgcccgtgtacatcgccgaggtgagcccccccaacctgagaggcagactggtgaccatcaacaccctgttcatcaccggcggccagttcttcgccagcgtggtggacggcgccttcagctacctgcagaaggacggctggagatacatgctgggcctggccgccgtgcccgccgtgatccagttcttcggcttcctgttcctgcccgagagccccagatggctgatccagaagggccagacccagaaggccagaagaatcctgagccagatgagaggcaaccagaccatcgacgaggagtacgacagcatcaagaacaacatcgaggaggaggagaaggaggtgggcagcgccggccccgtgatctgcagaatgctgagctacccccccaccagaagagccctgatcgtgggctgcggcctgcagatgttccagcagctgagcggcatcaacaccatcatgtacgtgttcctgagcggcttcctgctgaagagactgtag

SEQ ID NO: 333461 - DNA, 162 bp, Artificial Sequence
  derived and/or modified sequence
atgaatggggggaacgaaagctccggtgctgaccgggccgggggacctgtagccacttcagtcccgatagggtggcagcgttgcgtgcgcgaaggtgcggtgctgtatatttctccatcagggaccgagctctcatctcttgagcagacccgctcttattag

SEQ ID NO: 333462 - DNA, 162 bp, Artificial Sequence
  derived and/or modified sequence
atgaacgggggcaatgagagctctggcgcagatagagcaggaggcccagtagccacatctgtacccattgggtggcaacgttgcgttagagagggcgccgtgctgtatatttctccatccggaacagagctgtcctcactcgaacagaccaggtcctattag

SEQ ID NO: 333463 - DNA, 138 bp, Artificial Sequence
  derived and/or modified sequence
atgaatggaggtaatgagtcctcgggggctgacagggctggcggtcctgtggccacctcagtgccaatcgggtggcagcgatgtgtaagggagggcgccgttctctacatatctccatcgggaacagaacttagttag

SEQ ID NO: 333464 - DNA, 162 bp, Artificial Sequence
  derived and/or modified sequence
atgaatggaggaaatgaaagcagcggggctgacagagctgggggccctgtggccacctctgtgcccatcggctggcagagatgtgtgcgggagggcgctgtgctgtacatcagccccagcggcacagagctgagcagcctggagcagaccaggagctactag

SEQ ID NO: 333465 - DNA, 138 bp, Artificial Sequence
  derived and/or modified sequence
atgaatggaggaaatgaaagcagcggggctgacagagctgggggccctgtggccacctctgtgcccatcggctggcagagatgtgtgcgggagggcgctgtgctgtacatcagccccagcggcacagagctgtcctag

SEQ ID NO: 333466 - DNA, 162 bp, Artificial Sequence
  derived and/or modified sequence
atgaacggcggcaacgagagcagcggcgccgaccgggccggcggccctgtggccacatctgtgccgatcggttggcagagatgtgttcgggaaggcgcagtgctgtacatctctcctagtggtaccgaactaagctccctagagcagacccggagttattag

SEQ ID NO: 333467 - DNA, 162 bp, Artificial Sequence
  derived and/or modified sequence
atgaacggcggcaacgagagcagcggcgccgaccgggccggcggccctgtggcaacatccgtccccatcggctggcaacgatgtgtacgtgagggagccgttctgtacattagccccagcggcactgaacttagttcccttgagcagactcgctcatattag

SEQ ID NO: 333468 - DNA, 138 bp, Artificial Sequence
  derived and/or modified sequence
atgaacggcggcaacgagagcagcggcgccgaccgggccggcggcccagtggccaccagtgtccctataggctggcaacggtgcgtcagagaaggggctgtcctctacattagtccaagcggcacagaattgtcctag

SEQ ID NO: 333469 - DNA, 162 bp, Artificial Sequence
  derived and/or modified sequence
atgaacggcggaaatgagtcttccggtgccgacagggcgggtgggccagtggccacctccgtccccatcggttggcagcgctgtgtacgcgagggtgccgtcttgtacatctccccatctggcacagagctgtcctccctcgagcagacacggagctattag

SEQ ID NO: 333470 - DNA, 162 bp, Artificial Sequence
  derived and/or modified sequence
atgaatgggggaaacgaatcgtccggggcagatcgagccggaggcccagtcgcaactagcgtgcccatcgggtggcagaggtgtgtgcgcgaaggtgccgtgctgtacatcagccctagcggcaccgaactgagctcactggagcaaactcgctcttattag

SEQ ID NO: 333471 - DNA, 138 bp, Artificial Sequence
  derived and/or modified sequence
atgaacggtggcaatgagagcagcggcgctgatcgcgcagggggtccagtcgctactagcgtgcctatcggttggcagagatgcgtgagagaaggcgctgttctctacatcagcccatccggcacagagctgtcatag

SEQ ID NO: 333472 - DNA, 162 bp, Artificial Sequence
  derived and/or modified sequence
atgaacggcggcaacgagagcagcggcgccgacagagccggcggccccgtggccaccagcgtgcccatcggctggcagagatgcgtgagagagggcgccgtgctgtacatcagccccagcggcaccgagctgagcagcctggagcagaccagaagctactag

SEQ ID NO: 333473 - DNA, 138 bp, Artificial Sequence
  derived and/or modified sequence
atgaacggcggcaacgagagcagcggcgccgacagagccggcggccccgtggccaccagcgtgcccatcggctggcagagatgcgtgagagagggcgccgtgctgtacatcagccccagcggcaccgagctgagctag

SEQ ID NO: 333474 - protein, 874 aa, Artificial Sequence
  derived and/or modified sequence
MEGGLADGEPDRTSANSDESQLLTPGKMSQRQGKEAYPTPTKDLHQPSLSPASPHSQGFERGKEDISQNKDESSLSMSKSKSESKLYNGSEKDSSTSSKLTKKESLKVQKKNYREEKKRATKELLSTITDPSVIVMADWLKIRGTLKSWTKLWCVLKPGVLLIYKTQKNGQWVGTVLLNACEIIERPSKKDGFCFKLFHPLEQSIWAVKGPKGEAVGSITQPLPSSYLIIRATSESDGRCWMDALELALKCSSLLKRTMIREGKEHDLSVSSDSTHVTFYGLLRANNLHSGDNFQLNDSEIERQHFKDQDMYSDKSDKENDQEHDESDNEVMGKSEESDTDTSERQDDSYIEPEPVEPLKETTYTEQSHEELGEAGEASQTETVSEENKSLIWTLLKQVRPGMDLSKVVLPTFILEPRSFLDKLSDYYYHADFLSEAALEENPYFRLKKVVKWYLSGFYKKPKGLKKPYNPILGETFRCLWIHPRTNSKTFYIAEQVSHHPPISAFYVSNRKDGFCLSGSILAKSKFYGNSLSAILEGEARLTFLNRGEDYVMTMPYAHCKGILYGTMTLELGGTVNITCQKTGYSAILEFKLKPFLGSSDCVNQISGKLKLGKEVLATLEGHWDSEVFITDKKTDNSEVFWNPTPDIKQWRLIRHTVKFEEQGDFESEKLWQRVTRAINAKDQTEATQEKYVLEEAQRQAARDRKTKNEEWSCKLFELDPLTGEWHYKFADTRPWDPLNDMIQFEKDGVIQTKVKHRTPMVSVPKMKHKPTRQQKKVAKGYSSPEPDIQDSSGSEAQSVKPSTRRKKGIELGDIQSSIESIKQTQEEIKRNIMALRNHLVSSTPATDYFLQQKDYFIIFLLILLQVIINFMFK

SEQ ID NO: 333475 - protein, 76 aa, Artificial Sequence
  derived and/or modified sequence
MSQRQGKEAYPTPTKDLHQPSLSPASPHSQGFERGKEDISQNKDESSLSMSKSKSESKLYNGSEKDSSTSSKLTKK

SEQ ID NO: 333476 - DNA, 902 bp, Artificial Sequence
  derived and/or modified sequence
actagaatgtgaaggatcttcgcggttctgggtgcccagaaaggcggcgacgcggcggatgacaacattaggccgcgacgcgctcctggccaggcggcggctgtagtgttagctttggacgccgcagtagccgctgccggtagcaagccgactgagggaaggtgggggtccgcccgggctggtggacctcggggccgaaagttcccgccccgctcgggggctgagccggcagtgcctccgcggccgctgggcagcgcccttcgtccaggctcgcgccccagctgccgccgacgacagcggccgagagaagttggggtctgactagacgcttacggggcctcggaccccggcgccgcggcgacctcggaggaaccggctccttgcgtcccgcctccctgggagctccgcacgggatttgcagatttacagaatggctgcacattaatggaaagagaagcataaacctatcttctttcattatggagggaggtttggcagatggagaacctgatcgaacttcgctgttgtagcaaacagtgacgaatctcagcttctgacaccaggaaagatgagtcagcgccaaggaaaagaagcttatccaacgccaaccaaagatttgcatcagccatctcttagtccagcaagtcctcatagccagggttttgaaagagggaaggaagatatttctcaaaataaagatgaatcttcactttctatgtcaaagagcaagtctgaatctaaactttataatggctcagagaaggacagttcaacttcaagcaaactcacaaaaaaagaatctcttaaggtacaaaagaaaaattaccgagaagaaaagaaaagagccacaaaggagctgctcagtacaatcacagatccttctgttattgttatggctgatt

SEQ ID NO: 333477 - protein, 90 aa, Artificial Sequence
  derived and/or modified sequence
MKFLAVLVLLGVSIFLVSAQNPTTAAPADTYPATGPADDEAPDAETTAAATTATTAAPTTATTAASTTARKDIPVLPKWVGDLPNGRVCP

SEQ ID NO: 333478 - DNA, 273 bp, Artificial Sequence
  derived and/or modified sequence
atgaagtttctggccgtgctcgttcttttgggggtgagtattttcctggtatccgcccagaatcccacaacggctgccccagctgatacctaccccgctaccgggccagccgacgacgaagcgccagatgcagagactacagccgctgccaccaccgcgactaccgccgcaccaactacggccaccacggccgcttcaacaaccgctcggaaggatatcccagtactcccgaaatgggttggagatctaccgaatggtagggtctgtccttag

SEQ ID NO: 333479 - DNA, 273 bp, Artificial Sequence
  derived and/or modified sequence
atgaaattcttagccgttctcgttctcctgggtgtttccatctttctcgtgtccgcccagaaccctactactgctgctcctgccgatacttaccccgcgaccgggcctgctgatgacgaggcgcctgatgccgagacaactgctgccgcaaccacagccactactgccgctcctactactgctaccacagcggcttccactactgctcgcaaagacattccagtgcttcctaaatgggtgggagacctgccaaacggccgcgtttgcccttag

SEQ ID NO: 333480 - DNA, 273 bp, Artificial Sequence
  derived and/or modified sequence
atgaagttcctggccgtgctggtgctgctgggcgtgagcatcttcctggtgagcgcccagaaccccaccaccgccgcccccgccgacacctaccccgccaccggccccgccgacgacgaggcccccgacgccgagaccaccgccgccgccaccaccgccaccaccgccgcccccaccaccgccaccaccgccgccagcaccaccgccagaaaggacatccccgtgctgcccaagtgggtgggcgacctgcccaacggcagagtgtgcccctag

SEQ ID NO: 333481 - DNA, 470 bp, Artificial Sequence
  derived and/or modified sequence
ctttgaagcatttttgtctgtgctccctgatcttcaggtcaccaccatgaagttcttagcagtcctggtactcttgggagtttccatctttctggtctctgcccagaatccgacaacagctgctccagctgacacgtatccagctactggtcctgctgatgatgaagcccctgatgctgaaaccactgctgctgcaaccactgcaaccactgctgctcctaccactgcaaccaccgctgcttctaccactgctcgtaaagacattccagttttacccaaatgggttggggatctcccgaatggtagagtgtgtccctgagatggaatcagcttgagtcttctgcaattggtcacaactattcatgcttcctgtgatttcatccaactacttaccttgcctacgatatcccctttatctctaatcagtttattttctttcaaataaaaaataactatgagcaacataaaaa

SEQ ID NO: 333482 - DNA, 273 bp, Artificial Sequence
  derived and/or modified sequence
atgaaatttttagctgtgctcgttctcctaggagtatccatttttctggtttctgcacagaacccaaccacagccgccccagccgatacatatccggcaaccggacccgctgacgatgaggcgcctgacgcggagactacagcagccgcgacaacagcaaccaccgcagcccctacgactgctacgaccgcagcaagtacgaccgcacgaaaagatatccccgtcctacctaaatgggtgggcgaccttcctaacgggcgagtctgtccatag

SEQ ID NO: 333483 - DNA, 273 bp, Artificial Sequence
  derived and/or modified sequence
atgaagttcctggccgtgctggtgctgctgggcgtgtccatcttcctggtgtctgcccagaaccccaccacagctgccccagctgacacctacccagccaccggccctgcagatgatgaggccccagatgctgagaccacagctgctgccaccacagccaccacagctgcccccaccacagccaccacagctgccagcaccacagccaggaaggacatccctgtgctgcccaagtgggtgggggacctgcccaacggccgggtgtgcccctag

SEQ ID NO: 333484 - DNA, 273 bp, Artificial Sequence
  derived and/or modified sequence
atgaagttcctggccgtgctggtgctgctgggcgtgagcatcttccttgtatctgctcagaacccaacaacagctgcccccgccgacacctatcctgctaccggacccgctgacgacgaggctcccgatgccgaaaccactgcagccgcaaccacagcaactactgccgctcccacaacagctaccacagctgcgtctacgaccgcccgtaaggacataccggtcttacccaaatgggtaggtgatctgcctaatgggagggtctgtccctag

SEQ ID NO: 333485 - RNA, 273 nt, Artificial Sequence
  derived and/or modified sequence
augaaauucuuagccguucucguucuccuggguguuuccaucuuucucguguccgcccagaacccuacuacugcugcuccugccgauacuuaccccgcgaccgggccugcugaugacgaggcgccugaugccgagacaacugcugccgcaaccacagccacuacugccgcuccuacuacugcuaccacagcggcuuccacuacugcucgcaaagacauuccagugcuuccuaaaugggugggagaccugccaaacggccgcguuugcccuuag

SEQ ID NO: 333486 - DNA, 1914 bp, Artificial Sequence
  derived and/or modified sequence
atgcagagagacgagagcagccccttcccccccctgttcagcctgaccagcagccaggtgagcgacagatgcgactacgtgttcgtgaacggcaaggagatgaagggcaaggtgaacgtggtggtgaacttcacctaccagcacctgagcagccccctggagatgaccgtgtgggtgcccagactgcccctgcagatcgaggtgagcgacaccgagctgaaccagatcaagggctggagagtgcccatcgtgagcagcagaagacccgccggcgacagcgaggaggaggaggacgacgagagaagaggcagaggctgcaccctgcagtaccagcacgccatggtgagagtgctgacccagttcgtggccgaggccgccggccccggcggccacctggcccacctgctgggcagcgactggcaggtggacatcaccgagctgatcaacgacttcatgcaggtggaggagcccagaatcgccaagctgcagggcggccagatcctgatgggccaggagctgggcatgaccaccatccagatcctgagccccctgagcgacaccatcctggccgagaagaccatcaccgtgctggacgagaaggtgaccatcaccgacctgggcgtgcagctggtgaccggcctgagcctgagcctgcagctgagccccggcagcaacagagccatcttcgccaccgccgtggcccaggagctgctgcagagacccaagcaggaggccgccatcagctgctgggtgcagttcagcgacggcagcgtgacccccctggacatctacgacggcaaggacttcagcctgatggccaccagcctggacgagaaggtggtgagcatccaccaggaccccaagttcaagtggcccatcatcgccgccgagaccgagggccagggcaccctggtgaaggtggagatggtgatcagcgagagctgccagaagagcaagagaaagagcgtgctggccgtgggcaccgccaacatcaaggtgaagttcggccagaacgacgccaaccccaacaccagcgacagcagacacaccggcgccggcgtgcacatggagaacaacgtgagcgacagaagacccaagaagcccagccaggagtggggcagccaggagggccagtactacggcagcagcagcatgggcctgatggagggcagaggcaccaccaccgacagaagcatcctgcagaagaagaagggccaggagagcctgctggacgacaacagccacctgcagaccatccccagcgacctgaccagcttccccgcccaggtggacctgcccagaagcaacggcgagatggacggcaacgacctgatgcaggccagcaagggcctgagcgacctggagatcggcatgtacgccctgctgggcgtgttctgcctggccatcctggtgttcctgatcaactgcgtgaccttcgccctgaagtacagacacaagcaggtgcccttcgaggagcaggagggcatgagccacagccacgactgggtgggcctgagcaacagaaccgagctgctggagaaccacatcaacttcgccagcagccaggacgagcagatcaccgccatcgacagaggcatggacttcgaggagagcaagtacctgctgagcaccaacagccagaagagcatcaacggccagctgttcaagcccctgggccccatcatcatcgacggcaaggaccagaagagcgagccccccaccagccccaccagcaagagaaagagagtgaagttcaccaccttcaccgccgtgagcagcgacgacgagtaccccaccagaaacagcatcgtgatgagcagcgaggacgacatcaagtgggtgtgccaggacctggaccccggcgactgcaaggagctgcacaactacatggagagactgcacgagaacgtgtag

SEQ ID NO: 333487 - DNA, 1914 bp, Artificial Sequence
  derived and/or modified sequence
atgcagcgcgacgaaagctccccctttcccccgctcttcagcctgacctcatctcaggtctctgacaggtgcgattatgttttcgtgaacgggaaagagatgaagggcaaagtgaacgtggtggtgaactttacttatcagcacctgtcatcaccactggagatgacagtgtgggtgccgaggctcccattgcagatcgaggtgagcgataccgagctgaatcaaataaagggatggcgcgtcccaattgtgagctctcggaggcctgctggggactcagaagaagaggaagacgatgagagacgggggcgaggatgtacgcttcagtatcagcatgccatggtgcgagtcctaacacagtttgtcgccgaggcagccggacctggcggtcatttagcccacctgctgggatccgactggcaggtcgatattactgaattaattaatgattttatgcaagtggaggagcccagaatcgctaaactgcaaggcggccagatcctcatgggacaggagctgggaatgacaaccattcaaatcctttctcctttgtcggacacaattctggctgagaaaacaataacagttctagacgagaaagtgactattacggatttgggcgtacagctcgtaactggcttatcactgtcactgcaactgtcaccgggatcaaatagagccatcttcgctactgcggtggctcaggaactgcttcagaggcccaaacaggaggcagccatctcatgttgggtccaattttcagatggatcagttaccccacttgacatctacgatggaaaggacttctcactcatggcaacttcactagatgagaaggtcgtgagtatccaccaggacccaaagttcaaatggcctataatcgccgccgagacagaaggtcagggaacgctggtgaaagtggagatggtgatttcagaaagctgccagaagagcaaacggaaaagcgtgttggccgtaggcaccgctaacattaaggtgaaatttgggcagaacgacgctaaccccaacaccagcgacagcaggcatactggggccggtgtgcatatggagaataacgtgagtgatcgcaggcctaagaagccatcccaagagtggggatctcaggagggtcagtactatggatcgagctcaatggggctgatggagggccgaggcacaacaaccgacaggtctatccttcagaagaagaaggggcaagaatcactgctggacgacaacagtcaccttcagaccatccccagcgacctgactagtttcccggctcaggtggacctgccccgcagcaatggcgagatggacggcaatgatcttatgcaggcctcaaaaggcctgagcgacctggagattggcatgtatgcattgctcggcgttttttgtcttgcaatactggtttttctgatcaactgtgttaccttcgcactgaagtatcggcacaagcaagtgcctttcgaggagcaggaagggatgtctcacagccacgattgggtgggactgagtaacagaacagagctgttggagaatcatatcaacttcgcttcttctcaggacgaacagatcacagctattgatcggggaatggactttgaggagagtaaatatctcctttcaacgaactcccagaaatctataaatggacaactgttcaagcccctggggcctatcattatagatggtaaagatcagaaatcggaaccaccgacctctccaacctccaagagaaagcgcgtgaaatttactacctttactgccgtctcctcggatgacgagtaccccacgcgtaacagcatagtcatgagttctgaggatgacattaagtgggtctgtcaggacctggaccctggggattgtaaggaactgcataattatatggagagactacacgaaaatgtatag

SEQ ID NO: 333488 - DNA, 1914 bp, Artificial Sequence
  derived and/or modified sequence
atgcagagagatgagagcagccccttccccccactcttcagcctgaccagcagccaggtgtctgacagatgtgactatgtgtttgtgaatggcaaggagatgaagggcaaggtgaatgtggtggtgaacttcacctaccagcacctgagcagccccctggagatgacagtgtgggtgccccggctgcccctgcagatcgaggtgtctgacacagagctgaaccagatcaagggctggagggtgcccatcgtgagcagcagaagacctgctggggacagcgaggaggaggaggatgatgaaagaagaggccggggctgcaccctgcagtaccagcacgccatggtgcgggtgctgacccagtttgtggccgaggccgccggccctgggggccacctggcccacctgctgggcagtgactggcaggtggacatcacagagctgatcaatgacttcatgcaggtggaggagcccagaattgccaagctgcagggcggccagatcctgatgggccaggagctgggcatgaccaccatccagatcctgagccccctgagtgacaccatcctggccgagaagaccatcaccgtgctggatgagaaggtgaccatcacagacctgggcgtgcagctggtgacaggcctgagcctgagcctgcagctgagccctggcagcaacagagccatctttgccacagctgtggcccaggagctgctgcagaggcccaagcaggaggccgccatcagctgctgggtgcagttcagtgatggctctgtgacccccctggacatctatgatggcaaggacttcagcctgatggccaccagcctggatgagaaggtggtgtccatccaccaggaccccaagttcaagtggcccatcatcgctgctgagacagagggccagggcaccctggtgaaggtggagatggtgatcagcgagagctgccagaagagcaagaggaagtctgtgctggccgtgggcacagccaacatcaaggtgaagtttggccagaatgatgccaaccccaacaccagtgacagccgccacactggagctggggtgcacatggagaacaacgtgtctgacagaagacccaagaagcccagccaggagtggggcagccaggagggccagtactacggcagcagctccatgggcctgatggagggccggggcaccaccacagacaggagcatcctgcagaagaagaagggccaggagagcctgctggatgacaacagccacctgcagaccatccccagcgacctgaccagcttccctgcccaggtggacctgcccaggagcaatggagagatggatggaaatgacctgatgcaggccagcaagggcctgagtgacctggagatcggcatgtatgccctgctgggcgtcttctgcctggccatcctggtgttcctgatcaactgtgtgacctttgccctgaagtaccgccacaagcaggtgccctttgaggagcaggagggcatgagccacagccatgactgggtgggcctgagcaacagaacagagctgctggagaaccacatcaactttgccagcagccaggatgagcagatcacagccatcgaccggggcatggactttgaggagagcaagtacctgctgagcaccaacagccagaagagcatcaatggccagctgttcaagcccctgggccccatcatcattgatggcaaggaccagaagtctgagccccccaccagccccaccagcaagaggaagagggtgaagttcaccaccttcaccgctgtgtccagtgatgatgagtaccccaccaggaacagcatcgtgatgagcagtgaagatgacatcaagtgggtgtgccaggacctggaccccggggactgcaaggagctgcacaactacatggagcggctgcatgaaaatgtgtag

SEQ ID NO: 333489 - DNA, 1914 bp, Artificial Sequence
  derived and/or modified sequence
atgcagcgggacgagagcagccccttcccccccctgttcagcctgacctcatcacaggtcagtgatcgatgcgattacgtcttcgtaaacgggaaggaaatgaagggtaaggttaacgttgttgtgaatttcacatatcagcatttaagttcccccctagagatgaccgtatgggttccccggctaccattgcagattgaagtgtctgatacagaattaaaccagatcaaaggctggagagtgcccattgtaagttcccgtcgcccagccggagacagtgaggaagaggaagatgacgaaagacggggccgagggtgtacactccagtaccagcacgctatggtcagagtgttgactcagtttgtagctgaggccgctggaccaggaggtcatctggctcacttgctgggatctgactggcaggttgacataaccgagctgattaacgattttatgcaggtggaggagccccgtattgccaagctgcagggaggccagatactaatgggtcaagagctgggaatgacaactatccagattttgagtccattgagtgataccattctggccgagaagacaatcactgtcctcgacgaaaaggtaacaatcaccgacctcggagtgcagctggttaccggcctctccctgagtctgcagctgtctcctggaagcaaccgggctatcttcgcaactgccgtagcccaagagttgctgcagcgccctaagcaagaggctgcaattagttgctgggtccagttcagcgatggtagcgtaacacctctcgacatctatgacggcaaggactttagcttgatggctacatcattggatgaaaaagttgtcagtattcaccaggaccccaagttcaaatggccaatcatagccgctgagaccgaaggccagggcacactggttaaggtcgagatggtgatatctgagtcctgtcagaagtctaagaggaaatcagtactagcagtgggcacggcaaacattaaggtgaagtttggccagaacgatgccaaccccaatactagcgatagcaggcataccggagccggtgtgcacatggaaaataatgtctcagatcgaagaccaaagaaaccaagtcaggaatggggctcacaggaaggtcaatactacggcagttcctctatgggcctgatggaggggagggggaccactacggacagatcgattcttcagaaaaagaaagggcaggagtccctgcttgatgacaactctcacctccaaaccattccatctgacctaacctcgttccctgcccaagtggatctgccgaggagcaatggagagatggacggcaatgatcttatgcaagccagcaagggactttctgatttggagattggtatgtatgcgctcctgggagtgttttgcctcgctatactggtgttcctgatcaattgtgtcacctttgccctgaagtacaggcataaacaggtaccttttgaggaacaggagggaatgtctcattcccacgattgggtcggcctttccaaccgcacagagcttttggaaaaccacatcaactttgctagtagccaggatgagcagattactgcaatcgacaggggcatggactttgaagaaagcaagtatctactaagcacgaatagccaaaaatccatcaacgggcagctcttcaagcctctgggccccatcatcatcgatgggaaggatcaaaagagcgaaccccctacctcccccacttctaaacggaagcgagtcaagtttactacattcaccgcggtgagctccgacgatgagtatcctacacgaaattcaattgtgatgtcctcagaggatgatattaagtgggtgtgccaggatttggatcctggcgattgtaaggaactccacaactacatggagcgccttcatgagaatgtctag

SEQ ID NO: 333490 - DNA, 1914 bp, Artificial Sequence
  derived and/or modified sequence
atgcaacgtgacgaatcctcacccttcccccctttattcagcctcacatctagtcaggtgagtgatcggtgtgattatgtgttcgtcaacggaaaggaaatgaagggaaaagttaatgtggtggttaattttacctaccaacacctctcatcgcctttggagatgacggtgtgggtccctcgcctgcccctgcagatagaggtgtcggatacagagctgaatcagatcaaggggtggcgggtgcctatcgtttcatcccggcgtcccgctggggactctgaggaagaggaagatgatgagcgccgagggagaggctgcaccctccagtatcaacatgccatggttcgggtccttacacagttcgtggccgaggcggctgggcctgggggtcaccttgcccacctccttggtagcgactggcaagtcgatattactgagttaattaacgattttatgcaggtggaagaaccacggatcgcgaaacttcagggaggccagatattgatgggccaggaactgggcatgactaccatacagatactgtcgcccctcagcgacacgatcctggcagagaaaactatcacggtcttggatgaaaaggtgactatcaccgacctgggtgtacagctcgttactggcctctctcttagtctccagctgagccccggttccaaccgcgctatctttgccaccgctgtcgcccaggaactgctgcagcggcctaagcaagaggcagccatttcctgctgggtgcaattttccgacgggtcggtgactccattagatatctatgacggaaaagacttctctcttatggccacttcgctcgatgagaaagtggtctcaatccaccaggatcccaagttcaaatggcccatcatcgccgctgagaccgaaggccagggaacccttgtgaaagtggaaatggtgatctccgaaagctgtcaaaaatcgaagcgaaaatcggtcctggcagtgggcacggctaacataaaggtaaagtttggacagaatgatgctaatcccaatacatccgatagccgacatacaggcgcaggggtccacatggaaaacaacgttagcgaccggaggcctaagaagccttcacaggagtgggggtctcaagaaggacaatattacggcagcagtagtatgggactcatggaagggaggggcacaactactgatcggtcgatcctgcagaagaagaagggacaggaatctctactagacgacaatagccacctgcagacgatacctagtgacctcacatcctttcccgcacaagtggacctgcctcgctctaatggagaaatggatggcaacgacctgatgcaagccagtaagggactctctgatctggaaatcggcatgtacgccttgttgggggtgttctgtttggctattctcgttttcctgatcaactgtgtgacattcgcacttaaatatagacacaaacaggtgccatttgaggagcaggaaggtatgagccacagccacgactgggttgggctgagtaatcggaccgagctgttggaaaatcatattaactttgcgtcttcccaggatgagcagattacagcaattgataggggcatggatttcgaggagagcaagtatctgttaagcaccaactcccagaaatctatcaatggtcagcttttcaaacctctaggccctattatcattgatggaaaagatcaaaagtccgagccaccgaccagcccaactagcaaacgcaaaagggtcaaattcaccacttttacagcggtgtccagcgatgatgagtatcctactcggaactcaatcgtcatgagctcggaggacgatatcaaatgggtctgtcaggacctggacccgggtgactgcaaggagctccataattacatggaaagactgcacgagaacgtgtag

SEQ ID NO: 333491 - DNA, 5305 bp, Artificial Sequence
  derived and/or modified sequence
cgtttatagataccaaggatgaggatgtggatacctttcggagctattatttagtctcccacactctcccgaagacatgtcccaattcttgtttaggatgaaaactaaaggactcattgccttcccccaggaaagctaggagacaagacaagagaacaaaatccttacattgaacttgcttcttcccatcagcgctggcatggaggagccctcttgcaccaggtagaagttggcagcctgagctctggagccagacttctggggctaaatcctggctctgcccttcctggtagaggaacataggcaggctcccccactcctgccggcttcctcatctggaatgtgggaatggcagtggtgcctagcgttgtggttgttctgaggatgaaaggaatccgcatgtttggattccctgaaaagcggagcctgtgacgtgcacttgagaacaggtgctttatttggggaatgatctctggaggcagaatgagggagtgagcagcaagacaggacacattttggaaaaccagcaggaggtgcatcattgagctagctcgcatggtgggcaacttctgtgaagtcccatcgagcccctctagggaattctgcaggacaggcctcagaatccacccctgtgcctcgtcgagcccctctagggaactctgcaggacgggcctcagaatccaccccgtgcctgcaggggaaagtggtctgcacatgccctgttgaggacgttctcaggatacacccgcatgggagtgaagacagtagaaggggaagaagaggggctaagcaaggtcaggtccaggtgcagcacagccagctccttgaggagctcttaagaatgagctgtgctgtgcatgggtccctccttgaggcaaacagcctgggcttctcaccccaccaggtagtcactgggcagagaagcggggtgagcaggacataactcccgggtaactctgagggacacagctccactcacctaagggcagtcttctacggaagatgtggcaggagctgtcggcaacacacgcagcccctggggaggagtccaccaacctagccacagggaccccaggaagcctgggtactcagagagcacctttcataacagcgtctgctattattactcaaaagcaacacccaatgtctgctccataccaggacctcctcccccatagtaaggggaggaaagggaagcacctccaccagccagggcacttccctttcctcctccttgggccatgcaacgggatgaaagctcacctttccctccccttttctctctcacctcttcacaggtttctgacagatgtgactacgtctttgtcaatgggaaagaaatgaaaggcaaggtcaacgtggtggtgaacttcacctaccagcacctgagcagccccctggagatgacggtgtgggtgccccggcttccgctgcagatcgaggtctccgacaccgagctcaatcagatcaagggttggagagtgcccatcgtctccagcaggaggcctgccggggacagtgaagaggaggaggatgatgagcggaggggccgcggctgcaccctgcagtaccagcacgccatggtgcgggtcctgacgcagtttgtggctgaggcggccggccctgggggacacctggcccacctgctgggctcagactggcaagtggacatcacggagctgataaatgacttcatgcaggtggaggagcccaggatcgccaagctgcaaggcggacagatcctgatggggcaggagcttgggatgaccaccattcagatcctgtctcctctgtcagacaccatcctcgctgaaaagaccatcactgtgctggacgagaaggtgaccatcacagacctcggggtgcagctggtgacagggctgtcactctccttgcagctcagcccaggaagcaacagggccatctttgccactgcagtggctcaggaacttctgcagaggccaaaacaggaagcagccatcagttgctgggtccagttcagtgatggctcagtcacgcccttggatatttacgatgggaaagacttctccttgatggccacatctttggatgagaaggtagtctccatccaccaagaccccaaattcaagtggcctatcattgctgcggaaacagaaggacaaggcaccctggtcaaggtggaaatggttattagtgaatcctgccagaaatccaagcggaagagtgtgttagctgttggaacggcaaacatcaaagttaaatttggccaaaacgatgctaaccccaacaccagtgacagcagacacacaggggcaggggttcacatggaaaacaatgtcagtgacagaaggcccaaaaaaccctcgcaggaatgggggagtcaggaaggacagtactatggcagttcttctatgggactcatggagggacggggcaccacgacagacaggtccatcctgcagaagaagaaaggccaggaaagccttttagatgacaacagccacttgcagaccatccccagcgacctcaccagcttcccagcccaggtggacctccccagaagcaatggggaaatggatgggaatgaccttatgcaggcatccaaagggctgagcgacttagaaattgggatgtatgctttgttgggagtcttctgtttggccattttggtcttcttgataaactgtgtgacctttgcattaaaatacagacacaaacaggttcccttcgaggagcaggaagggatgagtcactctcatgactgggttgggttaagcaaccggacagagctgttggagaatcacatcaactttgcctcctcgcaagatgagcaaatcactgccattgacaggggcatggatttcgaggaaagtaaatatctcctcagcacaaactcccaaaaaagcatcaatgggcagctgttcaaacctttgggacccatcatcattgatgggaaagatcagaaaagtgagcccccaacatcccctacctcaaaaaggaaaagggtaaaatttaccaccttcaccgccgtctcctcagacgacgagtaccccaccaggaactccatcgtgatgagtagcgaggatgacattaagtgggtctgccaggatctggaccctggggactgcaaagagctgcacaactacatggagaggttacatgaaaatgtgtaagccagacacacacagacattggttctcactcacctttcagcctttaattccaggatgtgtagcaacggtgcccccggaagagaaacaaagcagcaggacaaaataaggatgacactatccatacagcctcagccaatgaccccggctcggcggcgaggcctggagtccgcatcgacgcacacattccagagtacagtgtcttgcttaagaggtttatcatgcatggcaagatttttaagacttgaaacaaaaacgagttctgaatcactgagcgtctgagagcgtccaggaaagaacagcctctctctctcgaatcaaagcaatttggatattgtaaaatccacatggctccaatattcaatattgcagactatggaagaaaagtacaactcaggtggagcatccatggatcgcatccatggatcaatgggaggaagcgtgtcatcgaaactggagcagcacatcttgctgtgagcgcgatcacaggcagtccagtgccgccgtcagctgtgggaggcatgattgtgagtcattgtctctcaaaggctgggccagagctgtctcagatcatggacaggccaaggaagtggctgacaaggactgaaagggaacatgtgggctaacaggccacaaatacctttgtaactacatgccaaggacaaacacatggacgcaaatcctctgagcccttcagggtacttctttatttgtaaactaaggatactgggcatagaatttgaatcaggttcaaagaaccacgctcttttgattcatatcaagttcacaatgtatccatttctattcctccactgcattgccatcctccccaaagccgttggtcacctgtgggtgggggagggagagggcagtttgtagtatttgctgggtcttttttctccccctgggttttgtgtcaactcccaagtgacattctgtagagaagctccccccgcaacctgggcatatgtcccacgccgtccgtctttgaagaggctggtctctaggcatgggcggtagtcacggtgaattccataccaggggatatacattcccttgctttactagaaagaaaacagggccacttgggatgggtctttcactgttcatggcagatctcctgtccaaagatgtggcctcgaggctgttgagacaaatcggggtgcctgtgtggaacgtgcagggcgtgtggagttgggggggttctgggtgtgaaagtggtggatccagcaggaagcccagcctcacacacaccggacagcacagaaaccttcttcatcttggaggtgcgaagggataaggggcatcagtgcatgtggtgaagatgcaggtttgcaagcacttggtcctgcagtcagccccgaaaggttcagcattgcttaagaccagccatgactctggatatccctgaatcccttcacttatgaagcctatgaagatgggggcaaggatacatcagagaattcctgcctcatctcacgctcactccaaggtagagaatggtgtgttgggtgattgccagccagataggatcctgcaaaagatggtcgggggcagcgggtggtgggcagaagaggccgtgctgttgaattgatcttctatttttccctctggtcattttctctctctctctgctcttcagttgtctgttttccagtctctctgtgtgtctgtctctgtatctctctcctcctttgaacctatcttctccctgcttcctctccatctcatctctgtaattttgagtgtgtgtctttactccttcttcctctccatagaattgaattctctttagatcatgtgtgtgtaaatttcaccagtttaccctcccaaccttagccctctcccctgcaactgtggtgctcttgagactgaggtttctgcagccagtaagtcacctgctcctgtccgcaagcttacctaccttgtttggttgggtgattaagctgtcaccccttttcaatgagaatcctttgctttcagtaacgtcctcatatttctttccattcttacctgtgtcatgttctgttgaatactgcagccgctgcccgcttccaaatccatctgcgtgtagaatgtactgtagattgtaagaatgtaatatatatttataaacttactgactgtaaatataaagtttgcattcagtggct

SEQ ID NO: 333492 - protein, 240 aa, Artificial Sequence
  derived and/or modified sequence
MQTTYVLQSLHLRIPEISNITTTPHTLPAAWLTMFDAVLILLLIPLKDKLVDPILRRHGLLPSSLKRIAVGMFFVMCSAFAAGILESKRLNLVKEKTINQTIGNVVYHAADLSLWWQVPQYLLIGISEIFASIAGLEFAYSAAPKSMQSAIMGLFFFFSGVGSFVGSGLLALVSIKAIGWMSSHTDFGNINGCYLNYYFFLLAAIQGATLLLFLIISVKYDHHRDHQRSRANGVPTSRRA

SEQ ID NO: 333493 - DNA, 1242 bp, Artificial Sequence
  derived and/or modified sequence
atgctgaccgccgcctgcagcaagttcggcggcagcagccccctgagagacagcaccaccctgggcaaggccggcaccaagaagccctacagcgtgggcagcgacctgagcgccagcaagaccatgggcgacgcctaccccgcccccttcaccagcaccaacggcctgctgagccccgccggcagcccccccgcccccaccagcggctacgccaacgactacccccccttcagccacagcttccccggccccaccggcacccaggaccccggcctgctggtgcccaagggccacagcagcagcgactgcctgcccagcgtgtacaccagcctggacatgacccacccctacggcagctggtacaaggccggcatccacgccggcatcagccccggccccggcaacacccccaccccctggtgggacatgcaccccggcggcaactggctgggcggcggccagggccagggcgacggcctgcagggcaccctgcccaccggccccgcccagccccccctgaacccccagctgcccacctaccccagcgacttcgcccccctgaaccccgccccctaccccgccccccacctgctgcagcccggcccccagcacgtgctgccccaggacgtgtacaagcccaaggccgtgggcaacagcggccagctggagggcagcggcggcgccaagccccccagaggcgccagcaccggcggcagcggcggctacggcggcagcggcgccggcagaagcagctgcgactgccccaactgccaggagctggagagactgggcgccgccgccgccggcctgagaaagaagcccatccacagctgccacatccccggctgcggcaaggtgtacggcaaggccagccacctgaaggcccacctgagatggcacaccggcgagagacccttcgtgtgcaactggctgttctgcggcaagagattcaccagaagcgacgagctggagagacacgtgagaacccacaccagagagaagaagttcacctgcctgctgtgcagcaagagattcaccagaagcgaccacctgagcaagcaccagagaacccacggcgagcccggccccggccccccccccagcggccccaaggagctgggcgagggcagaagcaccggcgaggaggaggccagccagacccccagacccagcgccagccccgccacccccgagaaggcccccggcggcagccccgagcagagcaacctgctggagatctag

SEQ ID NO: 333494 - DNA, 1242 bp, Artificial Sequence
  derived and/or modified sequence
atgctcactgctgcctgctctaagtttggcggctctagccccctccgagactctacgacgcttggtaaggccgggactaaaaagccctatagcgtagggagcgatctctccgccagcaaaaccatgggtgatgcataccctgcccccttcacctcaacgaatgggctgctgagtcctgccggatcaccaccggcccctacttctggttacgccaacgattaccccccgtttagccacagcttccctgggcctacaggtacacaggaccccggtctgctagtgcccaaagggcacagctccagcgattgcctcccgtccgtctacacttcccttgacatgacacacccatatggctcttggtacaaggctgggatccatgctggcatttcgccaggccctggcaacactcccactccctggtgggatatgcatccgggcggcaattggcttgggggtgggcaggggcagggagacggcttgcagggaacccttccaacgggacctgcgcaaccacctctgaaccctcagctcccaacctacccttccgatttcgcgccactcaacccggccccttatccagcaccccatttgctccagcccgggccacagcacgtgctcccccaggacgtttacaagcctaaggccgtgggcaattctggacagcttgaggggagcggaggggcgaaacctccacgcggcgcttctaccggcggcagcggcgggtacggagggagtggcgcaggtaggagctcatgcgactgtccaaactgtcaggagctggagcgtttgggtgccgctgcggcaggcctccgtaagaaaccgattcactcctgccatattcccggatgtggcaaagtctatgggaaggcaagccacctcaaggctcacctgcggtggcatacaggggagcggccattcgtttgcaactggcttttctgcgggaagagatttactaggtccgatgagctagaacgccacgtgaggacccacaccagagagaagaagttcacttgcctcctgtgcagcaaacgatttacaaggagtgatcacttgagcaagcaccaaaggacccacggggagcccggcccagggcccccaccctcaggaccaaaagaactgggtgaggggcggtccacgggggaggaagaggcatctcagacccctcgaccatccgcatctcctgcaacgcccgagaaagcacccggcgggtcccccgaacaatccaaccttttagagatctag

SEQ ID NO: 333495 - DNA, 1242 bp, Artificial Sequence
  derived and/or modified sequence
atgctgacagctgcctgcagcaagtttggaggcagcagccccctgcgggacagcaccaccctgggcaaggccggcaccaagaagccctacagcgtgggcagtgacctgagcgccagcaagaccatgggagatgcctacccagcccccttcaccagcaccaacggcctgctgagccctgctggcagccccccagcccccaccagcggctacgccaatgactacccacccttcagccacagcttccctggccccaccggcacccaggaccccggcctgctggtgcccaagggccacagcagcagtgactgcctgcccagcgtgtacaccagcctggacatgacccacccctacggctcctggtacaaggccggcatccatgctggcatcagccctggccctggcaacacccccaccccctggtgggacatgcaccctgggggcaactggctgggcggcggccagggccagggagatggcctgcagggcaccctgcccaccggccctgcccagccccccctgaacccccagctgcccacctaccccagcgactttgcccccctgaacccagccccctacccagccccccacctgctgcagcccggcccccagcacgtgctgccccaggatgtgtacaagcccaaggctgtgggcaacagcggccagctggagggcagcggcggggccaagccacccaggggggccagcactggaggcagcggcggctacggcggcagcggggccggccgcagcagctgtgactgccccaactgccaggagctggagcggctgggcgctgctgctgctggcctgaggaagaagcccatccacagctgccacatccctggctgcggcaaggtgtatggcaaggccagccacctgaaggcccacctgcgctggcacactggagagcggccctttgtgtgcaactggctgttctgtgggaagcgcttcaccaggagtgatgagctggagcggcacgtgaggacccacacccgggagaagaagttcacctgcctgctgtgcagcaagcgcttcaccaggagtgaccacctgagcaagcaccagaggacccacggggagcccggccctggccccccacccagcggccccaaggagctgggggagggccgcagcactggagaggaggaggccagccagaccccccggcccagcgccagccctgccaccccagagaaggcccctgggggcagccctgagcagagcaacctgctggagatctag

SEQ ID NO: 333496 - DNA, 1242 bp, Artificial Sequence
  derived and/or modified sequence
atgctgaccgccgcctgcagcaagttcggcggcagcagccccctgcgagacagtactactctcggtaaggccggaacaaaaaaaccttactctgttggctccgatctttcagccagtaagacgatgggagacgcgtacccagccccctttacctccacaaacggcttgttgtcccctgccggctctccccctgctcccaccagcgggtatgccaacgattaccccccattctctcattcatttcccgggcctaccgggacccaggacccgggcctgctggttcccaagggccactcttcttctgactgcttgcctagtgtgtataccagtttggacatgacccacccatacgggtcttggtacaaagcaggaatccatgcaggcatctcccctgggcctggtaatactcccaccccttggtgggacatgcatcctggcggcaattggctgggcggtggtcagggtcaaggggacggcctgcaggggacactgcctactggaccagcacaacccccacttaacccccagcttcccacttaccccagcgactttgctcccctgaaccctgcaccttaccccgcgcctcatttgctgcagcccgggcctcagcacgtacttcctcaggacgtgtacaaacccaaagctgtaggcaacagcgggcagcttgagggttcggggggtgcaaagcctccacggggagcctcaaccggtggctcgggtggatacggaggctcaggggctggcaggtctagctgcgactgccccaactgtcaggagcttgagcgacttggcgccgccgctgcgggactgcgcaagaagcctattcacagctgtcatatcccaggatgcggcaaagtctatggtaaggcatcacacctgaaagcccatcttcggtggcacacaggggagaggcccttcgtatgtaattggctgttctgcgggaagcggtttactcggagcgacgagctcgagcgccacgtgcgcacgcatacgcgcgagaagaagtttacatgtctgctgtgttctaagcgcttcactagatctgaccacctgtccaagcaccaacgcacccatggggaacctgggcctggccctcccccatcaggccccaaggagttgggcgaaggacgatcgaccggcgaggaagaggcatcacagactcctaggccatccgcatcccctgctacgccagagaaggcaccaggcggatctcccgaacagtctaatttactcgagatttag

SEQ ID NO: 333497 - DNA, 1242 bp, Artificial Sequence
  derived and/or modified sequence
atgctcacagccgcatgttcaaagtttggcggatcctcgcctttacgtgactctaccaccttgggtaaagccggtaccaaaaagccatacagtgtcggcagtgacttgagcgcttctaagaccatgggggatgcctatcccgcaccctttacctcaactaacggtcttctcagccccgcaggttcccctcctgcaccaactagcggttatgcaaatgattacccccctttttcccactcatttcctggcccaacaggaacacaggatccaggactgctcgtgccgaaaggtcactcttccagcgattgtctgccttccgtgtacacttccttagacatgacacacccttatggtagttggtacaaagcgggaatccatgccggtatttctcccggtcccggtaatacccccacaccttggtgggacatgcatccaggcggtaactggcttggaggaggccaggggcagggagacggactgcaaggcaccctgcccactgggccagctcaaccacccctgaaccctcagctgccaacttatccgagcgattttgcgccactcaatcctgcaccgtatcccgctcctcaccttcttcagcctggcccacagcacgtcctgcctcaggacgtgtacaagcctaaggccgtcggcaacagcggccagttagaaggctctggcggagcaaagccccctagaggtgcgtctacaggtgggtctggcggatacggcggatctggggcaggtcgatcctcatgtgactgcccgaactgtcaagagctagagcggctaggtgctgctgccgctgggctgagaaagaagcccatccactcctgtcatatccctggctgcgggaaagtctacggaaaagcatctcatctgaaggcccacctgaggtggcatactggcgagaggccatttgtatgtaactggttgttctgcggtaaaagattcactagatctgatgagctcgaacgccatgttcgcactcataccagagaaaaaaagtttacttgcctgctctgttctaagcggtttacacggtcggaccacctgagcaagcaccagaggacccacggcgaaccgggaccaggtccaccaccttctgggccaaaggagttgggcgaaggccgttctaccggcgaggaggaagcatcacagaccccccgaccatcagcctcacctgctacacctgagaaggctccagggggaagtcccgaacagtcgaacttgctggagatttag

SEQ ID NO: 333498 - protein, 529 aa, Artificial Sequence
  derived and/or modified sequence
MSRQLNIKSSGDKGNFSVHSAVVPRKAVGSLASYCAAGRGAGAGFGSRSLYSLGGNRRISFNVAGGGVRAGGYGFRPGSGYGGGRASGFAGSMFGSVALGPACLSVCPPGGIHQVTVNKSLLAPLNVELDPEIQKVRAQEREQIKVLNDKFASFIDKVRFLEQQNQVLETKWELLQQLDLNNCKKNLEPILEGYISNLRKQLETLSGDRVRLDSELRSMRDLVEDYKKRYEVEINRRTTAENEFVVLKKDADAAYAVKVELQAKVDSLDKEIKFLKCLYDAEIAQIQTHASETSVILSMDNNRDLDLDSIIAEVRMHYEEIALKSKAEAEALYQTKIQELQLAASRHGDDLKHTRSEMVELNRLIQRIRCEIGNVKKQRASLETAIADAEQRGDNALKDAQAKLDELEGALHQAKEELARMLREYQELMSLKLALDMEIATYRKLLEGEECRMSGENPSSVSISVISSSSYSYHHPSSAGVDLGASAVAGSSGSTQSGQTKTTEARGGDLKDTQGKSTPASIPARKATR

SEQ ID NO: 333499 - DNA, 1590 bp, Artificial Sequence
  derived and/or modified sequence
atgtctaggcagttaaacattaaatcttcaggtgataaagggaattttagcgttcactctgccgtggtgccaaggaaggctgtaggctcactggcttcttattgtgccgccggtagaggagccggggcagggttcggttccagaagcctgtactccctcggcgggaatcgcagaatttcattcaacgtcgcaggtgggggagtccgagctggcgggtacgggttccgccctgggagcggatatggcggcggcagggcatccggcttcgcagggagtatgtttggatctgttgcacttggccccgcgtgtctgtctgtctgtcctcctggcggtattcaccaggtgaccgtgaacaagtctctgttagctcctttgaacgtagagctggatcctgagatccagaaggtaagagcccaggaaagggaacagatcaaggtacttaatgacaagttcgcctctttcatcgacaaggtgcgctttttagagcagcagaatcaagttctggaaactaaatgggaactgttacagcagctggacctgaacaactgcaaaaagaacttggaaccaattctcgaaggttatatctctaaccttagaaagcaactcgagacgctgtcgggagacagggttaggctagattctgaactgagatctatgagggacctggtggaagattacaagaagcgctacgaggtagagatcaatcgaaggacaaccgctgagaacgaatttgtggtgttgaagaaagatgctgacgccgcctacgccgtgaaggttgaactacaggccaaagtggatagtttagacaaagaaatcaaattcctgaaatgcctctacgacgctgagatcgctcagatccagacgcatgccagcgaaacatctgtgattctgtctatggacaacaatcgcgacttagatctggactctatcatcgcagaagtgcgcatgcactacgaggagattgctctaaagtctaaggctgaggccgaagccctctaccagaccaagatccaagaactgcagctcgcggcatcaagacacggggacgacctaaagcatacccgttcagagatggtggaattgaacaggctcattcaacgcatacgctgtgaaataggaaacgtcaagaaacagagagctagcctggagacggccatcgccgacgctgaacagaggggggacaatgcccttaaggacgcccaagctaagctggacgagctggagggggctctgcaccaggccaaagaggaactcgcccggatgctgcgggagtaccaggaactgatgtccctcaagctcgccctcgacatggaaatcgcgacttatcgaaagctgctggaaggcgaagagtgccgtatgtctggcgagaatcccagcagtgtttcaatttccgttatctccagcagcagctattcttaccatcacccttcctccgccggcgtcgacttgggggcctctgctgtggcaggatcctctggttccacacaaagcgggcagaccaagactacagaggcaaggggtggcgacctcaaggatacacagggcaagagtacaccggcttccatacccgctcgcaaggccaccaggtag

SEQ ID NO: 333500 - DNA, 2788 bp, Artificial Sequence
  derived and/or modified sequence
ccttggagactgcttttctccagctctgtcaactcaacctttcccaccatgagtcggcaactgaacatcaagtccagtggtgacaagggcaacttcagtgtgcattcggcagtggtgccaaggaaggctgtgggtagcctggcttcttactgtgcagctggcagaggggctggcgctggctttggcagtcggagcctctatagccttggagggaatcggcgtatttctttcaatgtggctggtggcggcgttcgggctggaggttacggcttcaggcctggctctgggtatggagggggccgggccagtggctttgctggcagtatgtttggcagtgtggccctggggcctgcatgtttgtctgtgtgcccacctgggggcatccaccaggtcactgtcaacaagagcctcttggcccccctcaacgtggagctggaccctgagatccagaaggtgcgcgcccaggagcgggaacagatcaaggtgctgaacgacaagttcgcctccttcattgacaaggtacgcttcctagagcagcagaaccaggttctagaaaccaagtgggagctgctgcagcagctggacctgaacaactgcaagaagaacctggagcccatccttgagggctacatcagcaacctgcggaagcagctggagacactgtctggggacagggtgaggctggactcggagctgagaagcatgagggatctggtggaggactataagaagagatatgaagtggagattaaccggcgcacgacagcagagaatgagtttgtggtgcttaagaaggatgcagatgcagcctacgcagtcaaggtggagcttcaggccaaagtggactcactggacaaagaaatcaagttcctcaagtgtctgtatgatgcagagatcgctcagatccagactcacgccagtgagacctctgtcatcctgtccatggacaacaaccgggacctggaccttgacagcatcatcgctgaggtccgcatgcattatgaggagatcgccctgaagagcaaggccgaggccgaggccctgtaccagaccaagatccaggagctgcagctggcagccagtcggcatggtgacgacctgaaacacaccaggagcgagatggtggagctgaaccggctcatccagaggatccggtgtgagatcgggaatgtgaagaagcagcgtgccagcctggagacggccatcgctgacgctgagcagcggggagacaatgccctgaaggatgcccaggccaagctggatgagctggagggcgccctgcaccaggccaaggaggagctggcgcggatgctgcgcgagtaccaggagctcatgagcctgaaactggccctggacatggagattgccacctaccgcaagctgctggagggcgaggagtgcaggatgtctggtgagaatccatcctctgtgagcatctctgtcatcagcagtagcagctacagctaccaccaccccagctctgcgggtgttgaccttggggccagcgctgtggcaggcagctctggcagcacccagagcgggcagaccaagaccacagaggcgcgagggggagacctcaaggacacccagggcaagagcaccccagccagcatcccagcaaggaaagccacccgctagacccatggcctcacccacctcagcacttggaagaagaggtgactttgccacccccaaaggtgtctgccacacccaagttcccaggccctgagttttaaaactgtctgtagtacactcaactgtctgcatcgtggtttagcttttactttcaagctctgattgacacagtcaccttccctgtttccttaggtcccatgtggactaacgacttctcattttcctcgctgcctttggctggcaggaggctttggaggcacaagccattataaccttcttggccctaaggaagctgtgatcatccctagaaagagggaaggagcaggagacgacaggggaggggctggtttgttctgtgcttaggccaagttagctactgtctgagaggttttacatcccctgccagcatggtggggtgacacgagacctgtaagcaggtggtgagaagttagacagcctttacttgctccatcagaaacaactttgcaggatgacgccaatatttaggacaccacgtgtacatctgtagaccaccagctgcacccatctccacaaagccaagtgaaggtgtattggggattctctgccagcctgtgtcacccacccacctccttcattatcagcaatagctaccatcatttgtcaagcacctactagatgccagacaccctacacatattgcctcctgttctcatccattcctgcaaagaagatgcaatgagcatccttggaacagactgggagcctgatcccaagaggctgctgaactggccccagtcacccacctatgtgccagagtcaggcctggccgacacaaggatctatgctttttctgtggtgtgtcactgcctttttaacaaaagggctgtcaaagtcaccattctttttgatgagggcagcgtaattacattgccttttgtcaggactgtgggtatgtgatttgtcttccacagtctctctggggctgtgtcctacatagcttctgactctcaatttttggtgccatgagctgagctcagtgagtggagctggcttttctgtcgctgagtgctactgcctagtccagatgtcgtggctcagggtgtaaatattcctaagaatggcagcatctatttcctcttttgtttgaattaaagactctgaatttctgctg

SEQ ID NO: 333501 - DNA, 1590 bp, Artificial Sequence
  derived and/or modified sequence
atgagccggcagctgaacatcaagagcagcggggacaagggcaacttctctgtgcacagcgctgtggtgcccaggaaggctgtgggcagcctggccagctactgtgccgccggcagaggagctggagctggcttcggcagccgcagcctgtacagcctgggcggcaacagacgcatctccttcaacgtggccggcggcggcgtgcgggccggcggctacggcttccggcccggcagcggctatggaggcggccgggccagcggctttgctggctccatgtttggatctgtggccctgggccctgcctgcctgtctgtgtgccccccaggcggcatccaccaggtgacagtgaacaagagcctgctggcccccctgaatgtggagctggaccctgagatccagaaggtgcgggcccaggagcgggagcagatcaaggtgctgaatgacaagtttgccagcttcatcgacaaggtgcgcttcctggagcagcagaaccaggtgctggagaccaagtgggagctgctgcagcagctggacctgaacaactgcaagaagaacctggagcccatcctggagggctacatcagcaacctgaggaagcagctggagaccctgagcggggacagagtgcggctggacagcgagctgcgctccatgagggacctggtggaggactacaagaagagatatgaggtggagatcaacagaaggaccacagcagaaaatgaatttgtggtgctgaagaaggatgctgatgctgcctatgctgtgaaggtggagctgcaggccaaggtggacagcctggacaaggagatcaagttcctgaagtgcctgtatgatgctgagatcgcccagatccagacccacgccagcgagaccagcgtcatcctgtccatggacaacaacagagacctggacctggacagcatcatcgccgaggtgaggatgcactatgaggagatcgccctgaagagcaaggccgaggccgaggccctgtaccagaccaagatccaggagctgcagctggccgccagcagacatggagatgacctgaagcacaccaggtctgagatggtggagctgaacagactcatccagaggatccgctgtgaaattggaaatgtgaagaagcagagggccagcctggagacagccatcgcagatgctgagcagagaggagacaatgccctgaaggatgcccaggccaagctggatgagctggagggcgccctgcaccaggccaaggaggagctggccaggatgctgcgggagtaccaggagctgatgagcctgaagctggccctggacatggagatcgccacctacaggaagctgctggagggggaggagtgcaggatgtctggagagaaccccagctctgtgtccatcagcgtcatcagcagcagcagctacagctaccaccaccccagcagcgctggggtggacctgggcgccagcgctgtggccggcagcagcggcagcacccagagcggccagaccaagaccacagaggcccggggcggggacctgaaggacacccagggcaagagcaccccagccagcatcccagccaggaaggccaccaggtag

SEQ ID NO: 333502 - DNA, 1590 bp, Artificial Sequence
  derived and/or modified sequence
atgagccggcagctgaacatcaagagcagcggcgacaagggcaacttctccgtgcacagcgctgtagtacctcgcaaagctgtcgggtccctagcttcctactgtgccgccggccggggcgccggcgccggattcgggtctcgatccctgtactcactcggcggaaatcgacggatctcttttaatgtggccgggggcggcgtaagagccggggggtacggcttcaggccagggtccggctatggcgggggtcgggctagcggcttcgcaggctctatgtttggatccgtcgccctcggccccgcatgcctgagcgtgtgtccccccggcgggatccatcaggtaaccgttaacaagtccctcctagctcccctgaacgtcgaactggatccagaaatccaaaaggtcagggcgcaggagagagagcagataaaggtcttgaacgacaagttcgcttctttcatagataaggtcagattcctcgagcagcagaatcaggtcctggaaaccaaatgggagctgctacaacaactcgatttgaacaattgcaaaaaaaaccttgagcccatcctggaggggtatatctcgaatcttcggaaacagctcgagaccctgtccggggacagagtcagactcgacagcgagctccggtcaatgcgcgatctggttgaagattacaagaagcggtacgaagtggagatcaatcgccggacaacggccgagaatgagtttgtagtgctgaagaaagacgccgatgcagcatatgcggttaaagtcgaacttcaggcaaaggtggatagtttggataaagagattaagttcttgaaatgcctctacgacgccgaaatcgcgcagattcagactcacgcgagcgagacgtctgtgattctgtcgatggataataaccgcgatttggatctagattcaattatcgccgaggtccggatgcattacgaggaaattgctctgaagtccaaagccgaggccgaggccctttatcagactaagatccaagagctgcagctagctgccagccggcacggtgacgatcttaaacacaccagatccgaaatggttgagctgaatcgtctgatccagcggattaggtgtgagatcggcaatgttaagaaacagagggcctcactggagaccgcaattgccgacgccgaacagcggggggataatgccctgaaagatgcccaagccaagctggacgagcttgaaggcgccctccatcaagccaaggaggaactcgcaagaatgctcagagagtaccaggagctgatgagcctaaaattagccctggacatggagattgctacgtaccggaaacttctggagggcgaggaatgcagaatgtccggagagaaccctagtagcgtctctatctctgtgatatcctcctcttcctacagctatcaccacccctcatctgccggtgtcgacctcggagccagcgcggtcgcaggaagcagcgggtctacacagagcggccagactaagacaaccgaggctcgggggggggacctcaaagatactcaaggcaaatcaaccccagcaagcatccctgctcgcaaagcaactaggtag

SEQ ID NO: 333503 - DNA, 1590 bp, Artificial Sequence
  derived and/or modified sequence
atgtccaggcagttgaacattaaatcatcaggcgataagggcaatttcagtgtgcacagtgctgtcgtgcccaggaaagccgtgggatctttggcttcctactgtgctgctgggagaggggcaggagccggttttggctctcggagcctctacagcttgggcggtaacagacggattagcttcaacgttgctggcggaggagtgagggcagggggatatggcttccggcctggcagcggctatggcggaggaagagcttctggctttgccggttccatgtttggttctgttgcccttggtcctgcttgtttgtccgtttgccctcctggcggtatccatcaggtgactgttaacaagagtctgctggctccactaaatgtggagctggatccagaaatccagaaggtgcgcgctcaggagagggaacagatcaaggtgctgaatgacaagttcgccagcttcatagacaaagtaaggttcctggaacaacagaatcaggttctggaaactaagtgggagctcctgcaacaactggacctcaacaactgtaaaaaaaacctggaaccaattctcgaaggctatatttccaacctgcgaaagcaattagaaaccctgtctggcgatcgggtgagattggactccgaactgaggtcaatgagggacctcgtggaggactacaagaaacgatatgaggtggagatcaatcgcagaacaacagcagaaaacgaatttgtcgttctcaaaaaagatgccgacgcagcatatgccgtcaaggttgaactacaggcaaaggtggactccctcgacaaagaaatcaagttcctcaagtgtctgtatgatgcggagatcgcccaaatacagacccacgccagcgagacctcagttatcctgtcgatggataacaacagagacttggatctcgactccattatcgctgaagtaaggatgcattacgaagaaatcgccctgaaatccaaggctgaggcagaggcgctgtaccaaacaaaaattcaggagctgcaactggcagcctcaaggcatggagacgacctgaagcacacccgctccgaaatggtggagctgaataggctcattcagcgcatccgctgtgaaattgggaacgttaagaagcaacgcgcaagcttagagacagcaatcgccgacgcagagcaaaggggggataacgccctcaaggatgcacaagcaaaactggacgagctcgaaggagccctccaccaggctaaggaagaactggcccgaatgctcagagagtaccaagagcttatgtcgctgaaactggcattggatatggaaatcgccacttacaggaagctgctagagggtgaagaatgcagaatgtccggggagaatccctctagcgtgtctattagtgtcatttcaagcagcagctattcctatcaccacccatcaagcgcaggtgtcgatcttggggctagcgccgttgccggatcctcaggtagtacacagtctggtcaaacaaaaacaactgaagcaaggggcggagacctgaaagacacacagggaaagtctaccccagcgtctattcccgctagaaaagcgacgaggtag

SEQ ID NO: 333504 - DNA, 1590 bp, Artificial Sequence
  derived and/or modified sequence
atgagcagacagctgaacatcaagagcagcggcgacaagggcaacttcagcgtgcacagcgccgtggtgcccagaaaggccgtgggcagcctggccagctactgcgccgccggcagaggcgccggcgccggcttcggcagcagaagcctgtacagcctgggcggcaacagaagaatcagcttcaacgtggccggcggcggcgtgagagccggcggctacggcttcagacccggcagcggctacggcggcggcagagccagcggcttcgccggcagcatgttcggcagcgtggccctgggccccgcctgcctgagcgtgtgcccccccggcggcatccaccaggtgaccgtgaacaagagcctgctggcccccctgaacgtggagctggaccccgagatccagaaggtgagagcccaggagagagagcagatcaaggtgctgaacgacaagttcgccagcttcatcgacaaggtgagattcctggagcagcagaaccaggtgctggagaccaagtgggagctgctgcagcagctggacctgaacaactgcaagaagaacctggagcccatcctggagggctacatcagcaacctgagaaagcagctggagaccctgagcggcgacagagtgagactggacagcgagctgagaagcatgagagacctggtggaggactacaagaagagatacgaggtggagatcaacagaagaaccaccgccgagaacgagttcgtggtgctgaagaaggacgccgacgccgcctacgccgtgaaggtggagctgcaggccaaggtggacagcctggacaaggagatcaagttcctgaagtgcctgtacgacgccgagatcgcccagatccagacccacgccagcgagaccagcgtgatcctgagcatggacaacaacagagacctggacctggacagcatcatcgccgaggtgagaatgcactacgaggagatcgccctgaagagcaaggccgaggccgaggccctgtaccagaccaagatccaggagctgcagctggccgccagcagacacggcgacgacctgaagcacaccagaagcgagatggtggagctgaacagactgatccagagaatcagatgcgagatcggcaacgtgaagaagcagagagccagcctggagaccgccatcgccgacgccgagcagagaggcgacaacgccctgaaggacgcccaggccaagctggacgagctggagggcgccctgcaccaggccaaggaggagctggccagaatgctgagagagtaccaggagctgatgagcctgaagctggccctggacatggagatcgccacctacagaaagctgctggagggcgaggagtgcagaatgagcggcgagaaccccagcagcgtgagcatcagcgtgatcagcagcagcagctacagctaccaccaccccagcagcgccggcgtggacctgggcgccagcgccgtggccggcagcagcggcagcacccagagcggccagaccaagaccaccgaggccagaggcggcgacctgaaggacacccagggcaagagcacccccgccagcatccccgccagaaaggccaccagatag

SEQ ID NO: 333505 - protein, 571 aa, Artificial Sequence
  derived and/or modified sequence
MYLVSGGLNNTVNIWDLKSKRVHRSLKDHKDQVTCVTYNWNDCYIASGSLSGEIILHSVTTNLSSTPFGHGSNQSVRHLKYSLFKKSLLGSVSDNGIVTLWDVNSQSPYHNFDSVHKAPASGICFSPVNELLFVTIGLDKRIILYDTSSKKLVKTLVADTPLTAVDFMPDGATLAIGSSRGKIYQYDLRMLKSPVKTISAHKTSVQCIAFQYSTVLTKSSLNKGCSNKPTTVNKRSVNVNAASGGVQNSGIVREAPATSIATVLPQPMTSAMGKGTVAVQEKAGLPRSINTDTLSKETDSGKNQDFSSFDDTGKSSLGDMFSPIRDDAVVNKGSDESIGKGDGFDFLPQLNSVFPPRKNPVTSSTSVLHSSPLNVFMGSPGKEENENRDLTAESKKIYMGKQESKDSFKQLAKLVTSGAESGNLNTSPSSNQTRNSEKFEKPENEIEAQLICEPPINGSSTPNPKIASSVTAGVASSLSEKIADSIGNNRQNAPLTSIQIRFIQNMIQETLDDFREACHRDIVNLQVEMIKQFHMQLNEMHSLLERYSVNEGLVAEIERLREENKRLRAHF

SEQ ID NO: 333506 - protein, 160 aa, Artificial Sequence
  derived and/or modified sequence
MYLVSGGLNNTVNIWDLKSKRVHRSLKDHKDQVTCVTYNWNDCYIASGSLSGEIILHSVTTNLSSTPFGHGSNQSVRHLKYSLFKKSLLGSVSDNGIVTLWDVNSQSPYHNFDSVHKAPASGICFSPVNELLFVTIGLDKRIILYDTSSKKLVKTLVADT

SEQ ID NO: 333507 - DNA, 1716 bp, Artificial Sequence
  derived and/or modified sequence
atgtatcttgtgtcaggaggactgaataatactgtgaatatctgggatctgaaaagcaaacgagtccatagaagccttaaggatcataaagatcaggtgacatgcgtaacatacaactggaatgattgctacatcgcctccggatctctatctggcgagatcatcctgcattcagttactaccaacctgagttcaaccccttttggccatggctctaatcaatccgttagacaccttaaatactctttattcaaaaagtccttgctgggaagcgtgtctgacaacggcatagtcacactgtgggacgtgaattcacagtccccctaccacaactttgatagcgtccacaaagcccctgcaagcggcatctgttttagtcctgttaatgagctgctgtttgtgaccattggcctggacaaacgcattattctgtacgacacttcctctaagaaacttgtcaaaacgctggtggctgacacaccattgacggctgtggatttcatgccggacggagctacgcttgcaatcggttcatctcgaggaaagatttaccagtacgatctacgtatgctgaagagtcctgttaagacaatttcggcacataagaccagcgtgcagtgtattgcgttccagtactctacagtccttactaagagcagcctgaataaaggctgcagcaataaacccaccactgttaataagcgatctgtaaacgtcaatgcagccagtggaggggttcagaacagcggcatcgtgcgcgaggcccccgccacaagtattgctactgtactgcctcagccaatgacatcagccatgggaaaaggaacagtggcagtgcaagagaaagctggactcccaaggtcaatcaacaccgacaccctctccaaagagactgactcaggcaaaaaccaggacttcagttcttttgatgacaccggaaaatcctccctaggtgacatgttcagcccaatcagggacgacgccgtcgtcaacaagggttcagatgagagcattggaaagggcgacggatttgatttcctcccccagcttaactccgtgtttccccccaggaagaaccctgtgacatcctccaccagcgttctgcattcctcccctctgaatgtctttatggggtccccgggaaaagaggagaatgagaatagggatttgaccgctgagtccaaaaaaatttatatgggaaagcaggaatcaaaggatagcttcaagcagctcgccaagctcgtgactagtggtgcagaatcggggaaccttaatacgtcaccctcctcaaaccagactcggaattccgaaaagtttgaaaagcctgaaaacgaaatagaggcccaacttatctgcgagcctcctattaatggcagcagcacgcccaatcccaaaatcgcaagtagcgtgacggccggagtcgcgtcatctctgagtgagaaaattgccgactcaatcggaaacaatagacagaacgcaccgctgacatcaattcagataagatttatacagaatatgatacaagagacactggatgatttccgggaggcatgccaccgcgacatcgtgaatctgcaggtggagatgattaagcaattccatatgcagttgaatgagatgcattcacttttagaacggtattccgtgaacgagggcctggtggccgagatagagcgcctaagagaggagaataaacggctgcgggcccacttctag

SEQ ID NO: 333508 - DNA, 1716 bp, Artificial Sequence
  derived and/or modified sequence
atgtatttagtttccggcggacttaacaacacagtgaatatctgggatctgaagtccaaaagagtgcatcggagtttaaaagatcacaaggatcaggttacttgcgtaacctacaactggaatgattgttacattgctagcgggtctctgtctggagagattatcctgcatagtgtaacgacgaacctcagtagtacgcccttcggacacgggtctaaccagagtgtgcgtcatcttaaatattcactgtttaaaaaatcccttctgggtagcgtgagcgacaacggaatcgttaccctgtgggacgttaactctcaatctccttatcataacttcgattcggttcacaaagctcccgcctctggcatctgctttagtccagtaaacgagcttctctttgtgaccatcggactcgacaagcgcattattctttatgacacatcctcaaagaagttagttaaaacactggtcgccgatactccattgacggctgtagattttatgcccgatggagcgacactggctattggctcttcaagggggaagatttaccagtatgacctgcggatgctaaagagcccagtgaaaaccatttccgctcacaagacaagcgtccaatgcatcgcatttcagtactctactgtgctgacaaagagctctctgaataaagggtgcagcaacaagcctacaacagttaacaaaaggagcgtgaatgtgaatgcagcaagtggaggcgtgcaaaactccggaatagttagagaggcacccgccacaagtattgccacagtgcttccgcaacctatgacctcagccatgggtaaaggcactgtcgccgtccaggaaaaagctggactgccaagaagcatcaacaccgacacactgtcaaaggagaccgactctggaaaaaatcaggacttttcatcattcgatgataccggaaaatcaagcctgggggacatgttttcccccatcagggacgatgcagtcgttaataagggaagcgacgagtccattggtaagggcgatggcttcgactttcttccacagctgaatagcgtgtttcctccgcgtaagaatccagtgacttcttcaaccagcgtgttgcatagctcaccactgaacgtgttcatggggtctcccgggaaagaggaaaacgagaatagagatcttaccgcggagtccaaaaagatctatatgggcaaacaggaatcaaaggactccttcaaacagttggccaaattagtgaccagcggcgcggaatccggcaacctcaatacttctcctagctcaaaccagacgcgaaattcagaaaaatttgagaaaccagagaatgagatagaggcacagctgatttgcgagcccccgattaacgggagttctacccccaacccgaagattgccagttcggtcacggccggggtcgctagtagtttgagtgagaaaatcgccgattcgatcgggaataatcgccagaacgcccccctaacctcaattcagatccgctttatacaaaatatgatccaggaaaccctggacgacttcagggaagcgtgccatagggacatcgttaacctgcaggtagagatgattaagcagttccatatgcaactgaatgagatgcactccctgttggagcgctacagcgtcaacgaagggctagtggctgaaatagaaagactgagggaagaaaacaaaaggctccgcgctcacttctag

SEQ ID NO: 333509 - DNA, 483 bp, Artificial Sequence
  derived and/or modified sequence
atgtatttagtcagtggtggccttaataacacagtgaacatctgggatttgaagtcgaagcgcgttcaccggagcctgaaggatcacaaggaccaggtgacatgcgtgacttataattggaacgattgctacatcgcctcagggtcgctgtccggggaaatcatcctgcatagcgttaccactaatctatcctcaactccttttggccacggttcaaaccagagtgtgaggcacctaaagtattctctctttaaaaagagcctcttagggtcagtgagcgataacggtattgtgactctttgggatgttaacagtcagagcccctatcataactttgactctgttcacaaagcacccgcgagcggaatctgtttcagtcccgtcaacgagttgctgttcgttaccatcggactggacaaacgcataatactgtatgatacctcaagcaaaaagctggtcaaaacactcgtggccgacacgtag

SEQ ID NO: 333510 - DNA, 1716 bp, Artificial Sequence
  derived and/or modified sequence
atgtacctggtgtctgggggcctgaacaacacagtgaacatctgggacctgaagagcaagagggtgcacaggagcctgaaggaccacaaggaccaggtgacctgtgtgacctacaactggaatgactgctacatcgccagcggcagcctgtctggagagatcatcctgcacagcgtgaccaccaacctgagcagcacccccttcggccacggcagcaaccagagcgtgcgccacctgaagtacagcctcttcaagaagagcctgctgggctctgtgtctgacaatggaattgtgaccctgtgggatgtgaacagccagagcccctaccacaactttgacagcgtgcacaaggccccagccagcggcatctgcttcagccctgtgaatgagctgctgtttgtgaccatcggcctggacaagaggatcatcctgtatgacaccagcagcaagaagctggtgaagaccctggtggccgacacccccctgacagctgtggacttcatgccagatggagccaccctggccatcggcagcagccggggcaagatctaccagtatgacctgaggatgctgaagagccctgtgaagaccatcagcgcccacaagacctctgtgcagtgcatcgccttccagtacagcacagtgctgaccaagagcagcctgaacaagggctgcagcaacaagcccaccaccgtgaacaagaggtctgtgaatgtgaatgctgccagcggaggagtgcagaacagcggcatcgtgcgggaggccccagccaccagcatcgccaccgtgctgccccagcccatgaccagcgccatgggcaagggcaccgtggccgtgcaggagaaggccggcctgcccaggagcatcaacacagacaccctgagcaaggagacagacagcggcaagaaccaggacttcagcagctttgatgacaccgggaagagcagcctgggggacatgttcagccccatcagagatgatgctgtggtgaacaagggcagtgatgagagcatcggcaaaggagatggctttgacttcctgccccagctgaacagcgtcttcccccccaggaagaaccctgtgaccagcagcacctctgtgctgcacagcagccccctgaatgtgttcatgggcagccctgggaaggaggagaatgaaaatagagacctgacagctgagagcaagaagatctacatgggcaagcaggagagcaaggacagcttcaagcagctggccaagctggtgaccagcggggctgagagcggcaacctgaacaccagccccagcagcaaccagaccaggaacagcgagaagtttgagaagccagaaaatgaaattgaggcccagctgatctgtgagccccccatcaatggcagcagcacccccaaccccaagatcgccagctctgtgacagctggggtggccagcagcctgtctgagaagattgctgacagcatcggcaacaaccggcagaatgcccccctgaccagcatccagatccgcttcatccagaacatgatccaggagaccctggatgacttccgggaggcctgccaccgggacatcgtgaacctgcaggtggagatgatcaagcagttccacatgcagctgaatgagatgcacagcctgctggagcgctacagcgtgaatgaaggcctggtggccgagattgagcggctgcgggaggagaacaagaggctgcgggcccacttctag

SEQ ID NO: 333511 - DNA, 483 bp, Artificial Sequence
  derived and/or modified sequence
atgtacctggtgtctgggggcctgaacaacacagtgaacatctgggacctgaagagcaagagggtgcacaggagcctgaaggaccacaaggaccaggtgacctgtgtgacctacaactggaatgactgctacatcgccagcggcagcctgtctggagagatcatcctgcacagcgtgaccaccaacctgagcagcacccccttcggccacggcagcaaccagagcgtgcgccacctgaagtacagcctcttcaagaagagcctgctgggctctgtgtctgacaatggaattgtgaccctgtgggatgtgaacagccagagcccctaccacaactttgacagcgtgcacaaggccccagccagcggcatctgcttcagccctgtgaatgagctgctgtttgtgaccatcggcctggacaagaggatcatcctgtatgacaccagcagcaagaagctggtgaagaccctggtggccgacacctag

SEQ ID NO: 333512 - DNA, 1716 bp, Artificial Sequence
  derived and/or modified sequence
atgtacctggtgagcggcggcctgaacaacaccgtgaacatctgggacctcaaaagcaagcgtgtccataggtctctgaaagaccataaggaccaagtgacttgtgtgacctacaattggaacgattgttatatcgcctcaggctctttgagtggcgaaatcatcttacactccgtgacaacgaacttgtctagtacgccctttggtcacgggtctaaccaatcagtccggcatctgaaatattctctgtttaaaaaatccctacttgggtctgtgagcgacaatggcattgtcacactgtgggatgtgaactcccagagcccttaccacaattttgatagtgtgcacaaggcccccgctagtggtatatgcttttcaccagtgaatgaacttctttttgtgacaatcggtctcgacaagcgaattatcctttatgacacctcaagtaagaaactggttaagaccctcgtggcagacactcctcttacggcggtagacttcatgcccgacggggcaacccttgccatcgggagttctcgcgggaagatatatcaatacgaccttagaatgttgaaatctccagtgaagacaatctctgcacataaaaccagtgttcagtgtatagcgttccagtatagcaccgtcctgacaaaaagctctctgaacaagggctgtagtaacaagcccaccaccgtcaacaagcggagtgtgaacgtgaatgcggctagcggcggcgttcagaatagcggaattgtgagagaggccccagcaacctctatcgccacagtactaccccagcccatgacttcagccatgggtaaagggacagtcgccgtgcaggagaaggctggcctgcctcgtagcataaataccgacacgctttcaaaggagacggactctggaaagaaccaggatttctccagctttgacgataccggaaaaagttctctcggcgacatgttctcccctatccgggacgatgccgtggtgaataaagggtcggatgaatcgattggaaagggtgatggctttgattttctcccccagttaaattcagtgttccctccacgcaaaaatcccgttacctcgtccacctccgtcctgcattcctcaccgctgaatgtctttatggggtctcctgggaaggaagaaaacgagaatagggatttgacagctgagtctaagaagatctatatggggaaacaagagtccaaagactctttcaaacaactggcaaaactggtcacatccggcgccgaatctggtaacctgaataccagtcctagcagcaatcaaaccaggaattccgagaaattcgagaagcccgagaatgaaatagaagcacagctgatttgcgagcctccaattaatggtagcagcacccccaaccccaagattgcatcaagcgtcacggccggcgtcgcatcatcattgagcgaaaagatcgctgactcgattgggaacaaccggcagaacgcccctcttacttccatccagattcggttcatacagaatatgatacaggaaaccctggacgattttcgggaagcttgtcatagggacatcgtcaatctgcaggtggagatgatcaagcagtttcatatgcaactgaatgagatgcactctctgctcgaacgatactctgtgaatgaagggctggtggcagaaatagaacggctgagagaggagaacaaaaggctaagggcccacttctag

SEQ ID NO: 333513 - DNA, 1716 bp, Artificial Sequence
  derived and/or modified sequence
atgtacctggtgagcggcggcctgaacaacaccgtgaacatctgggatctgaaatctaagcgagtccacaggagtctgaaggatcataaggaccaagtcacctgcgttacctacaattggaacgactgctatatcgccagtggaagcttgtccggcgagatcatactgcacagcgtgacaacaaacctctcctccaccccttttggccacggcagcaatcagtctgtgcgccatctcaaatatagcctttttaaaaagagcttacttggctctgtcagcgacaatgggatagtgacgctgtgggatgttaattcacaatccccttatcacaattttgattccgttcataaggctcccgccagcggcatatgcttcagtccagtgaacgagctgcttttcgtcaccatcgggcttgacaagagaattatactgtatgacaccagttccaagaagctcgttaagactctcgtcgcggacacccccctgactgcagtagacttcatgccagatggggcaacgcttgctattgggtcgtctcgcggcaagatttatcagtacgatctgcgcatgttaaagtcccccgtgaagacaatctctgcccacaagacgtcagtgcaatgtatcgccttccagtactctacagtgctgaccaaaagctcgcttaacaaaggctgttcaaacaaacctacaactgtcaataagcgcagtgtcaacgtgaatgcagcctccggaggcgttcagaacagcggcatcgtcagagaagcccctgcaacctccatagctactgtgttaccacagccgatgacgagcgctatgggcaaggggaccgtggcggtccaggaaaaagcagggctccccagatctattaacactgacacgttatcaaaagagacagattccggcaaaaaccaggacttttcttcattcgacgacaccggaaagtctagcctgggtgacatgttctcaccaatcagagatgatgccgtagtcaataagggctccgatgagtctattggcaaaggcgacggctttgatttcctgccccagttgaactcggtctttcctccacgcaagaaccccgtcacttcctcaaccagtgttctacactccagtcccctgaacgtgttcatgggctcaccgggtaaggaggagaacgaaaaccgggacctcacagctgagtctaagaaaatttatatggggaaacaggagtcgaaggactcctttaagcagctggccaagttggttacctctggggcagaaagcgggaaccttaatacctcaccctcatcaaatcagactcggaactccgagaagtttgagaagccagagaatgagattgaggctcagcttatctgcgagcctcctattaacggaagcagcaccccgaatccgaagatcgcaagttcagtgaccgccggtgtggctagcagcctcagtgaaaagattgctgactccattggcaataaccggcagaacgctccgctgacctcgatccagattaggttcatccagaacatgatccaggagactctggacgactttcgagaagcctgccaccgcgatattgtgaatctccaggttgagatgatcaaacagttccatatgcagctaaacgaaatgcattccctgttggaaaggtacagcgttaacgaggggctcgtggcggaaatcgagcgtttaagggaagaaaataagcgacttagggctcacttttag

SEQ ID NO: 333514 - DNA, 483 bp, Artificial Sequence
  derived and/or modified sequence
atgtacctggtgagcggcggcctgaacaacaccgtgaacatctgggacttgaagtccaagagggtgcaccgcagtcttaaggaccataaggaccaagtgacctgtgttacctacaactggaatgattgttacattgctagcggttccctgtctggcgagattattctccatagcgtgaccactaatctgtcctctaccccatttggacatggctcaaaccaaagcgttcggcacttgaagtactccctgttcaaaaagagcctgctgggatccgtgagtgataacggtatcgtcaccctgtgggatgtgaatagtcagagtccctatcacaattttgactcagtgcacaaggctccagctagcggaatttgcttttcgcccgtcaatgagctcctttttgtcaccattggtcttgacaagagaattatcttatatgacacgagctccaaaaaactcgtgaagacactggtggctgacacatag

SEQ ID NO: 333515 - DNA, 1716 bp, Artificial Sequence
  derived and/or modified sequence
atgtacctggtgagcggcggtctcaataatactgttaatatttgggatctgaagtcaaaaagagtccaccgaagtctgaaagaccacaaggatcaagtgacatgcgttacttataattggaatgactgttatattgcttcaggatctctttccggcgagatcatcctgcactcagtaaccactaatctgagttccaccccgtttgggcacggcagtaaccagagtgtgagacacttgaaatactccctctttaaaaagtctctgctcggaagcgtgagcgacaatggcattgtgacattgtgggacgtcaattcccagtcaccatatcataattttgactcagtgcacaaggcccctgcctctgggatctgtttttccccggtgaacgagttgctgttcgtcactatcggtttagacaagcggataattctatatgacacgagctctaaaaaattggtgaagaccctcgttgcagataccccactgactgccgttgactttatgcctgacggagccactttggccattgggtctagccgagggaagatttaccagtacgatctgcgcatgctgaaatcacctgtgaagacaatcagcgcgcataaaacaagcgtgcagtgcatcgcatttcaatactccaccgtgctgacaaagagctccttaaataaagggtgttccaacaaaccaaccaccgtgaacaagagaagcgtgaatgttaacgcagcctcgggcggagtacagaatagtggcattgtacgggaggcaccagctacatccatcgctacagtgttaccacaacctatgaccagtgcgatgggcaagggcaccgtagctgtgcaggagaaagctgggctgccgaggagtattaatacagatacactgtctaaagaaacagactctggtaagaatcaggatttcagctccttcgatgacactggcaagtcaagtctcggggacatgttcagccccattcgggacgacgcagttgtcaacaaaggttcagatgagagcatcggaaagggtgacggttttgatttcctgcctcagcttaactccgtctttcctcccagaaaaaatcctgtcacctcctccacgtctgtcctccactcgtcacccctgaacgtgttcatgggctctcccggaaaagaggaaaacgagaaccgggatctcaccgccgaaagtaaaaagatctatatggggaaacaggagagcaaagactccttcaaacagctggccaaactcgtgacctccggggcagagtctgggaacctcaacacatctccaagcagtaatcagacaaggaacagcgagaagttcgaaaagccagagaatgagatcgaggcccagttgatttgcgagcccccaattaatgggtcttctactcctaatcctaaaattgcaagttcggttactgctggagtggcatccagcctttctgaaaaaatcgccgatagtatcggtaataaccggcaaaacgctccacttactagtattcagattagatttattcagaatatgatccaggagacactggacgactttcgagaggcgtgtcaccgtgatatcgtgaatctccaggttgaaatgattaagcagtttcatatgcagctgaatgaaatgcacagtctgcttgaacgctacagcgtgaacgagggtctggtggcagagattgagcgactcagggaagagaacaagcgccttcgagcccacttttag

SEQ ID NO: 333516 - DNA, 1716 bp, Artificial Sequence
  derived and/or modified sequence
atgtacctggttagtggaggtctcaataatacagtgaacatttgggacctcaagagcaaacgcgtgcatagaagtctcaaggatcataaagatcaggttacctgcgtgacttacaactggaatgactgttatattgcttctggtagtctgtcaggtgaaatcattctacattctgtgactaccaatttgtcctccactcccttcgggcacggctcaaaccagtccgtccgccacctgaaatactcactgtttaaaaaaagtctgctggggagcgtgtctgataacggcatcgtcaccctttgggatgtcaattcccaatctccataccacaattttgactctgtccacaaagccccagcaagcgggatttgtttctcccctgttaacgagctcctgttcgtgacaatcggcttggacaaaaggatcattctgtatgacacaagctcaaaaaaactggtcaaaactctcgtggccgatactcccctgaccgcggttgatttcatgcccgacggagccacacttgccatcggctcaagccgcggaaagatctatcaatatgatttgcgcatgctgaagtcacctgtgaaaaccatcagcgcccataaaacttcagtccagtgtatcgcgttccaatactccaccgtgctcaccaagtcttccctgaacaagggctgctctaacaaacctactactgtgaataagcggagcgtcaatgtgaacgctgctagtggcggagtgcaaaacagcggaattgttagagaggctcccgctacaagcatcgcaactgtgctgccgcaacccatgactagtgccatggggaagggcacagtcgcggtgcaggaaaaagctggactgcccagatccatcaacacagatacactgtccaaggagacagacagcggaaaaaaccaggactttagttcatttgacgacacaggcaagagtagcctgggtgacatgttcagtccaatcagggacgatgccgtggtaaataagggctctgatgagtctataggaaagggcgacggcttcgattttctcccacagctcaacagtgttttcccccctcgtaaaaatcccgtgacatcaagtaccagcgtcctgcattcatctcctttaaacgtcttcatgggatctccgggaaaggaggagaacgagaatagagatctcacggccgaaagcaagaagatctacatggggaaacaggagtccaaggactctttcaagcaactggccaagctggtaactagcggagctgagtctggaaacctaaatacctctccctcctcaaaccagactcgcaatagtgaaaaattcgagaaacccgagaacgagatcgaagctcaactaatttgtgagcctccaataaacggaagctctacccccaatcctaagatcgcttccagcgtgacagccggagtggctagtagcctcagcgagaaaatcgcagatagcatcggcaataaccggcagaacgccccactgacctcaatccagattcggttcatccagaatatgatccaagagacactggatgactttagggaagcctgccacagagatattgtaaatctgcaggttgaaatgattaaacaatttcatatgcagctgaacgaaatgcactctttgctagagcggtatagtgtgaatgaaggattagtcgcagagatcgagcggcttcgagaagaaaacaaacggctgagggctcatttttag

SEQ ID NO: 333517 - DNA, 483 bp, Artificial Sequence
  derived and/or modified sequence
atgtatctggtatccggagggttaaacaatacggtgaacatctgggacctcaaatcgaaacgggtgcaccggtcacttaaagatcataaagaccaggtaacctgcgtaacatataactggaatgactgctacatagcctcgggatccttatctggcgagatcattttacacagtgtgacaaccaacctgagctctaccccgtttggtcacggctctaaccaaagcgtgcggcacctcaaatattcattattcaaaaagtctcttctcgggagcgtgtctgacaatggaattgtgactctttgggacgtgaactctcagagcccatatcacaatttcgactcggtgcacaaagctcctgcttctggcatatgcttttcacccgttaatgaacttctttttgtcacaatcggcctggataagcggatcattctgtacgacacctccagcaagaaactggtcaagaccctggtggcggacacctag

SEQ ID NO: 333518 - DNA, 1716 bp, Artificial Sequence
  derived and/or modified sequence
atgtacctggtgagcggcggcctgaacaacaccgtgaacatctgggacctgaagagcaagagagtgcacagaagcctgaaggaccacaaggaccaggtgacctgcgtgacctacaactggaacgactgctacatcgccagcggcagcctgagcggcgagatcatcctgcacagcgtgaccaccaacctgagcagcacccccttcggccacggcagcaaccagagcgtgagacacctgaagtacagcctgttcaagaagagcctgctgggcagcgtgagcgacaacggcatcgtgaccctgtgggacgtgaacagccagagcccctaccacaacttcgacagcgtgcacaaggcccccgccagcggcatctgcttcagccccgtgaacgagctgctgttcgtgaccatcggcctggacaagagaatcatcctgtacgacaccagcagcaagaagctggtgaagaccctggtggccgacacccccctgaccgccgtggacttcatgcccgacggcgccaccctggccatcggcagcagcagaggcaagatctaccagtacgacctgagaatgctgaagagccccgtgaagaccatcagcgcccacaagaccagcgtgcagtgcatcgccttccagtacagcaccgtgctgaccaagagcagcctgaacaagggctgcagcaacaagcccaccaccgtgaacaagagaagcgtgaacgtgaacgccgccagcggcggcgtgcagaacagcggcatcgtgagagaggcccccgccaccagcatcgccaccgtgctgccccagcccatgaccagcgccatgggcaagggcaccgtggccgtgcaggagaaggccggcctgcccagaagcatcaacaccgacaccctgagcaaggagaccgacagcggcaagaaccaggacttcagcagcttcgacgacaccggcaagagcagcctgggcgacatgttcagccccatcagagacgacgccgtggtgaacaagggcagcgacgagagcatcggcaagggcgacggcttcgacttcctgccccagctgaacagcgtgttcccccccagaaagaaccccgtgaccagcagcaccagcgtgctgcacagcagccccctgaacgtgttcatgggcagccccggcaaggaggagaacgagaacagagacctgaccgccgagagcaagaagatctacatgggcaagcaggagagcaaggacagcttcaagcagctggccaagctggtgaccagcggcgccgagagcggcaacctgaacaccagccccagcagcaaccagaccagaaacagcgagaagttcgagaagcccgagaacgagatcgaggcccagctgatctgcgagccccccatcaacggcagcagcacccccaaccccaagatcgccagcagcgtgaccgccggcgtggccagcagcctgagcgagaagatcgccgacagcatcggcaacaacagacagaacgcccccctgaccagcatccagatcagattcatccagaacatgatccaggagaccctggacgacttcagagaggcctgccacagagacatcgtgaacctgcaggtggagatgatcaagcagttccacatgcagctgaacgagatgcacagcctgctggagagatacagcgtgaacgagggcctggtggccgagatcgagagactgagagaggagaacaagagactgagagcccacttctag

SEQ ID NO: 333519 - DNA, 483 bp, Artificial Sequence
  derived and/or modified sequence
atgtacctggtgagcggcggcctgaacaacaccgtgaacatctgggacctgaagagcaagagagtgcacagaagcctgaaggaccacaaggaccaggtgacctgcgtgacctacaactggaacgactgctacatcgccagcggcagcctgagcggcgagatcatcctgcacagcgtgaccaccaacctgagcagcacccccttcggccacggcagcaaccagagcgtgagacacctgaagtacagcctgttcaagaagagcctgctgggcagcgtgagcgacaacggcatcgtgaccctgtgggacgtgaacagccagagcccctaccacaacttcgacagcgtgcacaaggcccccgccagcggcatctgcttcagccccgtgaacgagctgctgttcgtgaccatcggcctggacaagagaatcatcctgtacgacaccagcagcaagaagctggtgaagaccctggtggccgacacctag

SEQ ID NO: 333520 - protein, 985 aa, Artificial Sequence
  derived and/or modified sequence
MARRGKKPVVRTLEDLTLDSGYGGAADSVRSSNLSLCCSDSHPASPYGGSCWPPLADSMHSRHNSFDTVNTALVEDSEGLDCAGQHCSRLLPDLDEVPWTLQELEALLLRSRDPRAGPAVPGGLPKDALAKLSTLVSRALVRIAKEAQRLSLRFAKCTKYEIQSAMEIVLSWGLAAHCTAAALAALSLYNMSSAGGDRLGRGKSARCGLTFSVGRVYRWMVDSRVALRIHEHAAIYLTACMESLFRDIYSRVVASGVPRSCSGPGSGSGSGPGPSSGPGAAPAADKEREAPGGGAASGGACSAASSASGGSSCCAPPAAAAAAVPPAAAANHHHHHHHALHEAPKFTVETLEHTVNNDSEIWGLLQPYQHLICGKNASGVLCLPDSLNLHRDPQRSNKPGELPMFSQSELRTIEQSLLATRVGSIAELSDLVSRAMHHLQPLNAKHHGNGTPLHHKQGALYWEPEALYTLCYFMHCPQMEWENPNVEPSKVNLQVERPFLVLPPLMEWIRVAVAHAGHRRSFSMDSDDVRQAARLLLPGVDCEPRQLRADDCFCASRKLDAVAIEAKFKQDLGFRMLNCGRTDLVKQAVSLLGPDGINTMSEQGMTPLMYACVRGDEAMVQMLLDAGADLNVEVVSTPHKYPSVHPETRHWTALTFAVLHGHIPVVQLLLDAGAKVEGSVEHGEENYSETPLQLAAAVGVPWTLHTWLESLRIAFQQHRRPLIQCLLKEFKTIQEEEYTEELVTQGLPLMFEILKASKNEVISQQLCVIFTHCYGPYPIPKLTEIKRKQTSRLDPHFLNNKEMSDVTFLVEGRPFYAHKVLLFTASPRFKALLSSKPTNDGTCIEIGYVKYSIFQLVMQYLYYGGPESLLIKNNEIMELLSAAKFFQLEALQRHCEIICAKSINTDNCVDIYNHAKFLGVTELSAYCEGYFLKNMMVLIENEAFKQLLYDKNGEGTGQDVLQDLQRTLAIRIQSIHLSSSKGSVV

SEQ ID NO: 333521 - DNA, 2958 bp, Artificial Sequence
  derived and/or modified sequence
atggccagaagaggcaagaagcccgtggtgagaaccctggaggacctgaccctggacagcggctacggcggcgccgccgacagcgtgagaagcagcaacctgagcctgtgctgcagcgacagccaccccgccagcccctacggcggcagctgctggccccccctggccgacagcatgcacagcagacacaacagcttcgacaccgtgaacaccgccctggtggaggacagcgagggcctggactgcgccggccagcactgcagcagactgctgcccgacctggacgaggtgccctggaccctgcaggagctggaggccctgctgctgagaagcagagaccccagagccggccccgccgtgcccggcggcctgcccaaggacgccctggccaagctgagcaccctggtgagcagagccctggtgagaatcgccaaggaggcccagagactgagcctgagattcgccaagtgcaccaagtacgagatccagagcgccatggagatcgtgctgagctggggcctggccgcccactgcaccgccgccgccctggccgccctgagcctgtacaacatgagcagcgccggcggcgacagactgggcagaggcaagagcgccagatgcggcctgaccttcagcgtgggcagagtgtacagatggatggtggacagcagagtggccctgagaatccacgagcacgccgccatctacctgaccgcctgcatggagagcctgttcagagacatctacagcagagtggtggccagcggcgtgcccagaagctgcagcggccccggcagcggcagcggcagcggccccggccccagcagcggccccggcgccgcccccgccgccgacaaggagagagaggcccccggcggcggcgccgccagcggcggcgcctgcagcgccgccagcagcgccagcggcggcagcagctgctgcgccccccccgccgccgccgccgccgccgtgccccccgccgccgccgccaaccaccaccaccaccaccaccacgccctgcacgaggcccccaagttcaccgtggagaccctggagcacaccgtgaacaacgacagcgagatctggggcctgctgcagccctaccagcacctgatctgcggcaagaacgccagcggcgtgctgtgcctgcccgacagcctgaacctgcacagagacccccagagaagcaacaagcccggcgagctgcccatgttcagccagagcgagctgagaaccatcgagcagagcctgctggccaccagagtgggcagcatcgccgagctgagcgacctggtgagcagagccatgcaccacctgcagcccctgaacgccaagcaccacggcaacggcacccccctgcaccacaagcagggcgccctgtactgggagcccgaggccctgtacaccctgtgctacttcatgcactgcccccagatggagtgggagaaccccaacgtggagcccagcaaggtgaacctgcaggtggagagacccttcctggtgctgccccccctgatggagtggatcagagtggccgtggcccacgccggccacagaagaagcttcagcatggacagcgacgacgtgagacaggccgccagactgctgctgcccggcgtggactgcgagcccagacagctgagagccgacgactgcttctgcgccagcagaaagctggacgccgtggccatcgaggccaagttcaagcaggacctgggcttcagaatgctgaactgcggcagaaccgacctggtgaagcaggccgtgagcctgctgggccccgacggcatcaacaccatgagcgagcagggcatgacccccctgatgtacgcctgcgtgagaggcgacgaggccatggtgcagatgctgctggacgccggcgccgacctgaacgtggaggtggtgagcaccccccacaagtaccccagcgtgcaccccgagaccagacactggaccgccctgaccttcgccgtgctgcacggccacatccccgtggtgcagctgctgctggacgccggcgccaaggtggagggcagcgtggagcacggcgaggagaactacagcgagacccccctgcagctggccgccgccgtgggcgtgccctggaccctgcacacctggctggagagcctgagaatcgccttccagcagcacagaagacccctgatccagtgcctgctgaaggagttcaagaccatccaggaggaggagtacaccgaggagctggtgacccagggcctgcccctgatgttcgagatcctgaaggccagcaagaacgaggtgatcagccagcagctgtgcgtgatcttcacccactgctacggcccctaccccatccccaagctgaccgagatcaagagaaagcagaccagcagactggacccccacttcctgaacaacaaggagatgagcgacgtgaccttcctggtggagggcagacccttctacgcccacaaggtgctgctgttcaccgccagccccagattcaaggccctgctgagcagcaagcccaccaacgacggcacctgcatcgagatcggctacgtgaagtacagcatcttccagctggtgatgcagtacctgtactacggcggccccgagagcctgctgatcaagaacaacgagatcatggagctgctgagcgccgccaagttcttccagctggaggccctgcagagacactgcgagatcatctgcgccaagagcatcaacaccgacaactgcgtggacatctacaaccacgccaagttcctgggcgtgaccgagctgagcgcctactgcgagggctacttcctgaagaacatgatggtgctgatcgagaacgaggccttcaagcagctgctgtacgacaagaacggcgagggcaccggccaggacgtgctgcaggacctgcagagaaccctggccatcagaatccagagcatccacctgagcagcagcaagggcagcgtggtgtag

SEQ ID NO: 333522 - DNA, 2958 bp, Artificial Sequence
  derived and/or modified sequence
atggccaggagagggaaaaaacctgtggtaagaacgctcgaagatctgactctagactctgggtacggcggagccgctgactctgtgcgcagctccaatctgtccttatgttgcagcgattcacaccctgcttccccttacggaggatcttgctggcctccactcgctgattcgatgcactcccgtcacaactcattcgacacagttaacacagccctggtcgaagatagcgagggattggactgcgcaggacagcactgttccaggctactcccagacctcgatgaggtgccttggactctgcaggagctagaggcgctgttgctccggtcccgagatcccagagcggggccagccgtacctggtggactgccaaaagatgcccttgccaagctgagtacactggtatcacgggccttggttaggatagcaaaggaagcccagagactatctctgaggtttgctaaatgtactaagtacgagatccaaagtgccatggaaatcgtgctgtcatggggcttggccgcacactgtacagccgcagcgctggctgcactgtccctctacaatatgagctccgctgggggtgaccgacttggccgcgggaaaagtgcgcgctgtggtcttaccttctctgtcgggcgcgtttataggtggatggtcgacagccgcgtggcgctcagaattcacgaacatgcggccatctacctcaccgcctgcatggagtctctgttcagagatatttatagccgcgtggtggcatccggcgtgcctcgtagctgcagcgggccaggatctggctccggctccgggcccggcccatcttccgggccgggagccgcgcctgcagccgacaaggaacgcgaggcaccgggtgggggcgccgcgagcggaggtgcctgcagcgccgcctctagcgccagcggaggtagttcatgctgtgcaccccctgcagccgcagccgccgccgttcctcctgccgctgcagctaatcaccaccaccatcaccaccatgcactgcatgaggctccaaagttcacagttgagacccttgagcacaccgtgaataatgattccgagatctggggcctgcttcagccctatcagcacttaatttgcggtaaaaatgcaagtggtgtgctttgtctcccggattcgctgaatttgcacagggaccctcagaggtccaataaacctggtgagcttcctatgtttagccagagtgaattgcggaccatcgagcagtccctcctggcaacacgcgtgggtagcattgccgagctgagtgacctcgtgtcaagagctatgcaccatctgcaacctcttaatgcaaagcaccacgggaacggcacacctctgcatcacaaacagggtgccctttactgggagccagaggcgctttatacgctttgctattttatgcattgtccgcaaatggaatgggagaatcctaatgttgagccgagtaaggttaacctgcaagttgaaagaccgtttctggttctgcctccgctcatggagtggatcagggtggccgttgcacatgcaggtcacagaaggtctttctccatggatagtgacgatgtgaggcaggcggctaggcttcttctgcccggtgtggattgcgaaccacggcagctccgcgcagacgactgtttctgtgcaagtaggaaactcgatgctgtcgccattgaggcgaaatttaaacaggatctgggcttcagaatgctgaactgtggcagaaccgacctagttaagcaggctgtttccctcctgggtccagatggtataaatacaatgtctgagcagggcatgacacccttaatgtacgcttgcgtccgtggtgacgaagccatggtgcagatgctattggatgctggtgcagatctaaatgttgaggttgtgagtaccccacacaagtacccctcggtgcatcccgaaacccggcactggactgcattaacttttgccgtgttacatggccatatccccgtggtgcagctcctcctcgacgcaggggctaaagtggagggctcagtggagcacggggaggaaaattactcggagacccctttacagctagcagctgccgtgggggtgccatggacattgcacacctggttggagagcctgaggattgccttccagcagcatcggaggcctctgattcagtgcctccttaaggaattcaaaacgatccaggaggaggagtacacagaggagctggtgacccagggactacccctgatgttcgaaattctgaaggccagcaagaacgaggtcatttcccagcaactgtgtgtgatctttacacattgttacggcccatacccgatcccaaaactaacagaaatcaagcgaaaacagacctccagactagaccctcattttctcaacaacaaagagatgagcgatgtcacattcctcgtggagggcagacctttctacgcgcacaaagtgttgttatttacagccagcccgcgcttcaaggctttgttgtcctccaagccaactaacgatggcacttgtattgagatcggctacgtgaaatatagcatctttcagctggtgatgcagtacctgtactacgggggacctgagtccttgctaattaagaataatgaaatcatggagctcctgagcgccgccaagttctttcagttggaagcactgcagcggcactgtgagattatctgcgcaaaatccatcaatactgacaattgtgtagacatttataatcatgccaagtttctgggcgtgacggaattgtccgcctactgtgaggggtatttccttaaaaatatgatggttctgatcgaaaatgaggcttttaagcagctgctgtatgacaagaatggcgagggcaccgggcaggatgtcttgcaggatttgcaacgaacactggctatcaggattcaaagcatacacttgagttcttctaaagggtccgtcgtgtag

SEQ ID NO: 333523 - DNA, 2958 bp, Artificial Sequence
  derived and/or modified sequence
atggcccggcggggcaagaagcctgtggtgaggaccctggaggacctgaccctggacagcggctacggcggcgctgctgacagcgtgcgcagcagcaacctgagcctgtgctgcagcgacagccacccagccagcccctatggaggcagctgctggccacccctggccgacagcatgcacagccgccacaacagctttgacacagtgaacacagccctggtggaggacagcgagggcctggactgtgccggccagcactgcagccggctgctgcctgacctggatgaggtgccctggaccctgcaggagctggaggccctgctgctgcggagccgggacccccgggccggccctgctgtgcctgggggcctgcccaaggatgccctggccaagctgagcaccctggtgtcccgggccctggtgagaattgccaaggaggcccagaggctgagcctgcgctttgccaagtgcaccaagtatgagatccagagcgccatggagatcgtgctgtcctggggcctggccgcccactgcacagctgctgccctggccgccctgagcctgtacaacatgagcagcgctggaggagaccggctgggccggggcaagagcgcccgctgtggcctgaccttctctgtgggccgggtgtaccgctggatggtggacagccgggtggccctgcgcatccacgagcacgccgccatctacctgacagcctgcatggagagcctcttccgggacatctacagccgggtggtggccagcggcgtgcccaggagctgcagcggccctggcagcggcagcggcagcggccctggccccagcagcggccctggggccgccccagctgctgacaaggagcgggaggcccctgggggcggggccgccagcggcggggcctgcagcgctgccagcagcgccagcggcggcagcagctgctgtgcccccccagctgctgctgctgctgctgtgcccccagctgctgctgccaaccaccaccaccaccaccaccacgccctgcacgaggcccccaagttcaccgtggagaccctggagcacacagtgaacaatgattctgagatctggggcctgctgcagccctaccagcacctgatctgtgggaagaatgccagcggcgtgctgtgcctgcctgacagcctgaacctgcaccgggacccccagaggagcaacaagccaggagagctgcccatgttcagccagagcgagctgcggaccatcgagcagagcctgctggccaccagggtgggcagcattgctgagctgagtgacctggtgtcccgggccatgcaccacctgcagcccctgaatgccaagcaccacggcaatggcacccccctgcaccacaagcagggcgccctgtactgggagcctgaggccctgtacaccctgtgctacttcatgcactgcccccagatggagtgggagaaccccaacgtggagcccagcaaggtgaacctgcaggtggagcggcccttcctggtgctgccccccctgatggagtggatccgggtggccgtggcccacgccggccacagaagaagcttctccatggacagtgatgatgtgcggcaggccgcccggctgctgctgcccggggtggactgtgagccccggcagctgcgggcagatgactgcttctgtgccagcaggaagctggatgctgtggccatcgaggccaagttcaagcaggacctgggcttcaggatgctgaactgtggccgcacagacctggtgaagcaggccgtgtccctgctgggcccagatggcatcaacaccatgtctgagcagggcatgacccccctgatgtatgcctgtgtgagaggagatgaggccatggtgcagatgctgctggatgctggagctgacctgaatgtggaggtggtgtccaccccccacaagtaccccagcgtgcaccctgagaccaggcactggacagccctgacctttgctgtgctgcacggccacatccctgtggtgcagctgctgctggatgctggggccaaggtggagggctctgtggagcacggggaggagaactacagcgagacccccctgcagctggccgctgctgtgggcgtgccctggaccctgcacacctggctggagagcctgagaattgccttccagcagcacagaagacccctcatccagtgcctgctgaaggagttcaagaccatccaggaggaggagtacacagaggagctggtgacccagggcctgcccctgatgtttgagatcctgaaggccagcaagaatgaagtcatcagccagcagctgtgtgtgatcttcacccactgctacggcccctaccccatccccaagctgacagagatcaagaggaagcagaccagccggctggacccccacttcctgaacaacaaggagatgtctgatgtgaccttcctggtggagggccggcccttctacgcccacaaggtgctgctcttcaccgccagcccccgcttcaaggccctgctgagcagcaagcccaccaatgatggcacctgcatcgagatcggctacgtgaagtacagcatcttccagctggtgatgcagtacctgtactatggaggccctgagagcctgctgatcaagaacaatgagatcatggagctgctgtctgctgccaagttcttccagctggaggccctgcagaggcactgtgagatcatctgtgccaagagcatcaacacagacaactgtgtggacatctacaaccacgccaagttcctgggcgtgacagagctgagcgcctactgtgagggctacttcctgaagaacatgatggtgctgattgaaaatgaggccttcaagcagctgctgtatgacaagaatggagagggcaccggccaggatgtgctgcaggacctgcagaggaccctggccatccgcatccagagcatccacctgagcagcagcaaaggatctgtggtgtag

SEQ ID NO: 333524 - DNA, 2958 bp, Artificial Sequence
  derived and/or modified sequence
atggcccggcggggcaagaagcccgtggtgcggaccctggaggacttaacgttggatagcgggtatggcggggccgccgactctgttcggtcatcaaacctatccctgtgctgttcagattctcacccagccagcccctatggaggcagctgttggccaccccttgctgacagcatgcactcccgccataacagctttgacacagtgaataccgcactcgtggaggacagtgaaggacttgactgtgccggtcagcattgttcaagactgctgcccgacttggatgaggtcccctggactctccaggaacttgaggcattacttcttcgttctcgcgacccacgcgctggcccggccgtaccaggaggcttgcccaaagatgcactggcaaagttatcaacattagtcagtcgtgcactggtgcgcatcgccaaggaggcacaacgtctgtcgcttagatttgccaagtgtaccaagtatgagattcagtcagcaatggagattgtgctttcttggggactggccgcccattgcactgcagccgcccttgcagccctctcattgtacaatatgagttcggcgggtggcgatagactggggaggggaaagagtgcccgatgcgggcttacgttctctgtggggcgggtgtaccgatggatggtggattctcgggtggcactcagaatacacgaacacgcagccatttatttaaccgcctgtatggagagcctgtttagagacatatatagccgggttgtcgcaagcggcgtgccgaggagttgctccgggccagggtctggctccggttcgggacctggaccatcatctgggccaggcgccgcgcccgccgccgacaaggagcgggaagccccaggcgggggtgcggcaagcggcggggcctgtagtgcggcctcctccgcaagtggtgggtctagctgctgtgccccaccagccgctgctgcggctgctgtgccccccgccgctgcggcaaaccatcaccaccaccaccatcacgctctgcacgaggctccaaaattcacagtagagacccttgagcacaccgttaacaacgattccgaaatatggggactcctgcaaccgtaccagcatcttatttgtggtaaaaatgcgagtggagttctatgcctacccgatagcctgaacttgcaccgggatccccagaggtctaacaaaccaggagaactgcctatgttctctcaatccgagctgaggacgattgaacagtctctcctggccactagagtcggctctatcgctgagctcagcgatctggtgtctcgggccatgcatcaccttcagccgcttaacgcaaagcaccatgggaatgggactcctctgcatcacaaacagggagccctgtattgggaacctgaggccctgtatacactctgctatttcatgcactgcccacagatggagtgggaaaatcctaacgtggagccatctaaagtgaatctgcaggtggagcgtcctttcctcgttctgcccccactgatggaatggattagggtggccgttgctcacgcaggtcacaggcgctcattttcaatggattctgacgatgtgcgccaagccgcccgcctcctgctacccggtgtggactgtgagccccggcagctgcgagctgatgattgcttttgtgcgagtcggaagctcgacgctgttgccatcgaggccaaatttaaacaggacctgggcttcaggatgctcaattgtgggcgaaccgacctagtgaagcaggcagttagtctgcttgggcctgatggtataaatacaatgtctgagcagggcatgacacccctgatgtatgcatgcgtgcgcggggatgaggccatggtccaaatgttgttagatgcaggggccgacctcaatgtcgaagtcgtaagtactccacataagtaccccagcgtacatcccgagacgaggcattggacagccctgacatttgcggtgctgcacggccacatccctgtggtgcagctgcttctggatgctggtgctaaagttgaggggagcgtggagcacggcgaggagaactattctgaaacccccctgcagctggccgccgcggtgggggttccttggactctccatacttggctggaaagtcttcgcatcgctttccaacagcatcggcgcccgctgattcagtgtcttcttaaggaattcaagaccatccaggaggaggagtataccgaagagttagttacacagggcctgccattaatgtttgaaattctgaaggctagtaaaaacgaagtgatcagccaacagctctgtgtgatatttacccactgctacggaccttaccctatccctaaattaacggaaataaagcggaagcagacatccaggctggacccccacttcctcaataataaggaaatgagcgacgttactttccttgtggaggggaggccattctacgcacacaaggtgttattgttcactgcctccccgagatttaaggctttactaagctcaaagcccaccaatgatggaacctgcattgagataggctatgtgaaatactcgatcttccagctggtgatgcagtacctgtactacgggggtccggagtccctcctgataaaaaataatgaaatcatggagctgttgagcgccgcgaagttcttccaattggaagcactgcagcgccactgtgagattatctgcgctaagagtattaacaccgataactgcgtcgatatttacaatcacgccaagttcctgggcgttacggagctgtccgcttactgtgaaggatattttctcaaaaacatgatggtgctgattgagaacgaggcgtttaagcagcttctgtacgataagaacggtgaaggtactggacaggatgtcttgcaggacctgcagagaacccttgccatcagaatacagtccatccatctctccagtagcaaaggttccgtcgtctag

SEQ ID NO: 333525 - DNA, 2958 bp, Artificial Sequence
  derived and/or modified sequence
atggcgcgacgtggtaaaaaaccagtggtgaggacgctggaagacctgaccctggactccggatacgggggtgctgctgatagtgtacggagctcaaacctcagtctgtgctgttccgactcccatcccgcatcaccttatggcggttcctgctggcccccactggccgactctatgcactcccggcataactcctttgacacagtgaatactgcgctcgtagaggattcggaggggctcgactgtgccggacagcattgtagccgcttgcttcccgatctagacgaggtcccatggactctgcaggagctggaggccctcctgttgcggagccgggatcctcgcgctggccctgccgtacccggagggctgccaaaggacgccctcgcaaagctttcgacgcttgtgagcagggcgctagttcgcatagccaaggaggcccagcgccttagcttgagatttgccaagtgtactaagtacgaaattcagagtgctatggaaattgtgttaagttggggcttggccgcacattgcaccgctgctgcgctcgctgccttgtccctgtacaatatgtcatccgccggtggcgatagattgggtcggggaaagtctgccagatgtgggcttacatttagtgtaggaagagtctaccgttggatggtggatagtcgcgtcgccctgagaatccatgagcacgcagcaatctatctaaccgcctgtatggaaagtctgttccgtgacatatatagtcgggtcgtggcctctggggtccccaggagttgctcagggccaggatccggcagtggctcaggtcccggaccaagttcaggcccaggcgctgcacctgccgctgacaaggaaagggaggcccctggaggtggcgctgcttccggcggtgcctgtagcgctgcttccagcgcgagcggtggcagttcttgttgtgctccgccagccgctgccgctgccgcagttcccccagcagccgcagctaaccaccatcaccaccatcaccacgcacttcatgaagcaccaaagttcacagtcgagaccctggagcatacagtgaacaatgactccgagatttgggggttgttacaaccttatcagcacttgatctgcggtaaaaacgcgagcggtgttctctgtctacccgacagtttaaaccttcacagggatccgcagcggtcaaacaagccaggagaattaccaatgttttctcagagtgagctgaggaccatcgaacaaagtttattagctacacgcgttggcagcatcgctgaactctctgatctggtgtcccgagctatgcaccacctacagcccctcaatgcgaagcatcacggtaacggcacccccctccatcacaagcagggcgcattatactgggaacctgaggcattatataccctgtgttattttatgcactgcccccagatggaatgggagaacccaaatgtcgagcctagcaaggttaatctccaggtggaacggccatttctggtcctgccacccctcatggaatggatacgggtcgctgttgctcatgccggacatagacggtccttttctatggattcagacgacgttcgtcaggccgctcgcctcctgcttcctggcgttgactgtgagccgcgacaacttagagcagacgattgtttttgcgccagtcgcaaactcgacgcggtggccatagaagccaaattcaaacaagacctgggattcagaatgctgaactgtggcagaaccgacctcgtgaagcaggcagtgtcattgttggggccagatgggatcaatacaatgtctgagcaaggtatgaccccccttatgtacgcttgtgtgcgcggagacgaggcgatggtgcagatgctgttagacgcgggtgcggatttgaacgtggaggtggtgagtactccacataagtatccatcggtgcaccccgaaactaggcattggacggctctcacctttgcagtattacacggacatatccccgtggtacagctgcttctagatgccggtgctaaggtggagggtagcgtggaacacggcgaagaaaactactccgagacccccctgcagctggcagctgccgttggtgtaccctggactctacacacatggctggagagtctgagaattgcctttcagcagcataggagacctcttatccaatgtctactgaaggaattcaagaccatccaagaagaggaatatacagaagaacttgtcacccaggggctgccactgatgtttgagattctcaaggcatctaagaacgaggtgatctctcagcagctgtgtgtgatttttacgcactgttacggtccttatcctatcccgaaactgactgaaattaaacgtaaacagaccagtagactcgacccacattttctcaacaacaaggaaatgtccgacgtcaccttcttggttgaaggaagacccttctatgcgcacaaggtgctgctgtttacagcgagtcctcgctttaaggcactgttgtcatccaaaccaactaacgacgggacctgcattgaaatcggctacgtcaaatacagtatttttcagctcgtgatgcagtatttgtattatggcggaccagagtcccttttgattaaaaataacgagattatggagcttcttagtgcagcaaaattttttcagcttgaggccctgcagcggcattgcgagattatttgcgccaaatccattaacaccgataactgcgtggatatctataaccacgccaagtttctgggggtaactgagctaagcgcatactgtgagggatatttcctgaagaacatgatggtcctcatcgagaatgaggctttcaagcaactgctctacgataagaatggggagggaaccgggcaggatgtgctccaagacttgcagaggacgctggcaatcaggatccagagtatacacctgagcagctctaagggatcagtcgtgtag

SEQ ID NO: 333526 - DNA, 3478 bp, Artificial Sequence
  derived and/or modified sequence
aaggtttgcagccgccacggccgctgctgcgctccggtgcagggcaggctggcgccgagcgaaccagggccgggaactgggagccgggagccgggagccagctgcccgcggagctgcggcggcggcggcatctggggtggtctcagtcccacgaacaccgtggccggcgcccggtggctactgcgcccagcggggctcagggaagagcggtctagacactttttattttggaagaaaggggcaagccccggcgggagcttccttcccggcctggctcgctccccattgcgcccagctccggcccggactctggaagatgactccagggtctgctctgtatattccagcggcggcagttccgggaggcagccgaaagtactaacagttggtagcagcggctagtggaaaagtgagccaaggcggcgcggactcggctctccccgcgccccgcggcactcgctgctcctcgccgctccttccctttggctcccaggcggctgcagcatgaagtggcgcagcgatggccaggagaggtaagaagcccgtggtgagaacgctggaggatctgacgctggactcgggttatggtggcgcggcggactcggtgcgctcctccaacttgtctttgtgctgttccgactcgcacccggcgtccccgtatggcgggagctgctggccgcctctagctgactccatgcacagccggcacaacagctttgacactgtcaacactgccctggtggaagactccgaggggctggactgcgccggccagcactgctcgcggctgctgccggacctagacgaggtcccctggactctccaggagctggaggcgctgctgctgcgttcgcgggatccccgggcaggcccggcggtccccggcggcctgcccaaggacgcgctggccaagctgtcgacgctggtgagccgggcgctggtgcgcatagccaaagaggcgcagcgcctgagcctgcgcttcgccaagtgcaccaagtacgagatccagagcgccatggagatcgtgctgtcctggggcctggccgcgcactgtacggcggctgcgctggccgcactgtccctctacaacatgagcagcgccggcggcgaccgcctgggccgcggcaagtcggcccgctgcggcctcaccttctccgtgggccgcgtgtatcgctggatggtggacagccgcgtggcgctgcgcatccacgagcacgccgccatctacctgacagcctgcatggagagcctcttccgggacatctactcgcgggtcgtggcctccggggtgccccggagctgcagtggccctgggtcaggctcgggctccggcccaggcccgagctcgggccctggtgcggcccccgcggcggataaagagcgggaggcgcccgggggaggagcggcgagcggcggcgcctgcagcgcagccagcagcgccagcgggggcagcagctgttgcgccccgccggccgccgcggccgccgcagtcccgccggcagccgccgccaaccaccaccatcaccaccaccatgcgctccacgaggcgcccaagttcaccgtggagaccctggagcacacggtcaacaacgactcggagatctggggtctcctgcagccctaccagcacctgatctgcgggaagaacgccagcggggtgctgtgcctaccagacagcctgaatcttcacagagacccacagcggtcaaacaagccaggggaactgcccatgttcagccagtcggagctgaggaccatcgagcagtctttgctggccacgcgcgtaggcagcatcgccgaattgagtgacctggtgtcccgtgcaatgcatcacctgcagcccctcaatgccaagcaccacggcaatggcacccccctgcaccacaagcagggggcactgtactgggagcccgaggccctgtacaccctttgctatttcatgcactgcccacaaatggaatgggaaaaccccaacgtggagccttccaaagtcaacctccaggtggaaaggcccttcctcgtgctgccgccgctgatggagtggatccgggtggccgtggcgcacgccggccaccgccgcagcttctccatggacagcgacgacgtccgccaggcggcccggctgctgctgcccggcgtggactgcgagccgcgccagctcagggccgacgactgcttttgtgcatctcgaaagctggatgcggtggccatcgaagccaagtttaagcaggacctgggtttccggatgctgaactgtggacgaacagacctggtgaagcaggcagtgtctctgctggggcccgatgggatcaacaccatgagcgaacagggcatgactcccctgatgtatgcctgcgtccgtggggacgaggcgatggttcagatgctgctggatgccggagctgacctgaatgtggaggttgtcagtactcctcataaatatccatccgtccaccccgagacccgccattggacggctctgacttttgctgtgttgcatggacatattcctgtagttcagctcctcctggatgctggggccaaggtggaaggctcagtggagcatggcgaggagaactactcggaaacacccctccagctggcagctgctgtaggcgtcccgtggactctgcacacgtggctggagtctttgcggatcgccttccagcagcaccgcaggcctctcatccagtgcttgttaaaggagtttaagaccattcaggaggaggaatacacggaggagctcgttacccaaggcctgcccctgatgtttgagatcctgaaagcgagcaagaatgaagtgatcagccagcagctgtgcgtcatcttcacacactgctacgggccctaccccatccccaagctcacagaaatcaaacggaaacagacctcgcgcttggatcctcattttcttaacaataaagaaatgtctgatgttacatttctggtagaaggaagaccattttatgctcacaaagtgctgttatttacagcctctccaaggttcaaagcactcctctccagcaagccgacaaatgatggcacctgcatagagattggttatgtgaaatactccatctttcagctggttatgcagtatctctactatggtggcccagagtcactgctcattaaaaacaatgagatcatggagcttctgtctgctgctaagtttttccagctggaggctttgcagcgacactgtgagattatctgtgcgaaaagcatcaataccgacaactgtgtggatatttacaaccatgccaagtttcttggagtcacagagctctcagcatattgcgaaggctactttctcaaaaacatgatggtcctcattgaaaacgaagcattcaagcagctcctgtatgacaaaaatggtgaagggaccggccaggatgtgctccaggacttacagaggacgttggccatcagaattcagtccatccacttgtcgtcttccaaaggttccgtggtatga

SEQ ID NO: 333527 - protein, 955 aa, Artificial Sequence
  derived and/or modified sequence
MEASSSGITNGKTKVFHPEGGVDLQGYQLDMQILPDGPKSDVDFSEILNAIQEMAKDVNILFDELEAVSSPCKDDDSLLHPGNLTSTSDDASRLEAGGETVPERNKSNGLYFRDGKCRIDYILVYRKSNPQTEKREVFERNIRAEGLQMEKESSLINSDIIFVKLHAPWEVLGRYAEQMNVRMPFRRKIYYLPRRYKFMSRIDKQISRFRRWLPKKPMRLDKETLPDLEENDCYTAPFSQQRIHHFIIHNKETFFNNATRSRIVHHILQRIKYEEGKNKIGLNRLLTNGSYEAAFPLHEGSYRSKNSIRTHGAENHRHLLYECWASWGVWYKYQPLDLVRRYFGEKIGLYFAWLGWYTGMLFPAAFIGLFVFLYGVTTLDHSQVSKEVCQATDIIMCPVCDKYCPFMRLSDSCVYAKVTHLFDNGATVFFAVFMAVWATVFLEFWKRRRAVIAYDWDLIDWEEEEEEIRPQFEAKYSKKERMNPISGKPEPYQAFTDKCSRLIVSASGIFFMICVVIAAVFGIVIYRVVTVSTFAAFKWALIRNNSQVATTGTAVCINFCIIMLLNVLYEKVALLLTNLEQPRTESEWENSFTLKMFLFQFVNLNSSTFYIAFFLGRFTGHPGAYLRLINRWRLEECHPSGCLIDLCMQMGIIMVLKQTWNNFMELGYPLIQNWWTRRKVRQEHGPERKISFPQWEKDYNLQPMNAYGLFDEYLEMILQFGFTTIFVAAFPLAPLLALLNNIIEIRLDAYKFVTQWRRPLASRAKDIGIWYGILEGIGILSVITNAFVIAITSDFIPRLVYAYKYGPCAGQGEAGQKCMVGYVNASLSVFRISDFENRSEPESDGSEFSGTPLKYCRYRDYRDPPHSLVPYGYTLQFWHVLAARLAFIIVFEHLVFCIKHLISYLIPDLPKDLRDRMRREKYLIQEMMYEAELERLQKERKERKKNGKAHHNEWP

SEQ ID NO: 333528 - DNA, 36 bp, Artificial Sequence
  derived and/or modified sequence
atggaggccagcagcagcggcatcaccaacggctag

SEQ ID NO: 333529 - DNA, 36 bp, Artificial Sequence
  derived and/or modified sequence
atggaggcaagttcatcagggataacaaacggttag

SEQ ID NO: 333530 - DNA, 1385 bp, Artificial Sequence
  derived and/or modified sequence
atggcctccctcaccgcatacgacaaagatgtgagcagcggaagttataacctttcctctgcaacgacgggcagctactacagttgtgtcagccagatcaccataggttatgacgttgcggggcctgtggcaattgggcttacccactggaaaaatccatacgtacaaggcagaccaaccctcccatcagatctgcctctcttcgtctccaaagatgcaggcatccctgtgtaccaccgatccttcacccgcaagactgaccaggccacacctttgtcctgtccagcctcactgtctatcactccagtgccttcttacagcagtagcagccaggaaaccctgagtcaagacacaacaggtttaagtttatctattcatggggctgaaaagcgtttgcaaatccatcaacggcgaagtgtggcaagccgcccagcgtcacgtcgtcgcctgcctgtggtcaggcattcctcactcccaccaggcagaaggtcaataaaaatggaggcaagctcttctggaatcactaatggaaaaaccaaagtcttccacccagaaggaggtgtggatttgcaaggctaccagctggatatgcaaatactacctgacgggccaaagagtgatgtggacttttcagagattcttaatgcaatacaagaaatggccaaggatgtcaatattctttttgatgaattagaagctgtcagcagtccttgcaaagatgacgattctcttcttcaccctggaaacctgactagtacttcagatgatgccagcagattggaagccgggggagagacagtgccagaaagaaacaaatcaaatggactttactttcgagatggaaagtgtcgaattgactacatccttgtgtacagaaaatccaacccccagactgaaaagagagaagtatttgaaagaaacattagagcagaaggattgcaaatggagaaagagtcctctctaataaatagtgacattatctttgtgaagttgcatgccccatgggaagtccttggaagatatgcagaacaaatgaatgtaagaatgcctttcagttcaaactgtaactgacgatgggttttcttctcgactggcttcatttttgctgttcttccaggagaaaaatctattacctgccccgccgttacaagttcatgagcaggatcgataaacaaataagcaggtttcggagatggttacctaagaagccaatgaggctggacaaggagacactgccagacctggaggagaatgactgctacactgcccctttcagccagcaaaggatccatcacttcatcatacacaacaaagaaacgttcttcaacaatgccacaagaagtagaatcgtgcatcacattttacaaagaataaaatatgaagaa

SEQ ID NO: 333531 - DNA, 36 bp, Artificial Sequence
  derived and/or modified sequence
atggaagccagctcttcaggtattacgaacggatag

SEQ ID NO: 333532 - protein, 475 aa, Artificial Sequence
  derived and/or modified sequence
MAVWATVFLEFWKRRRAVIAYDWDLIDWEEEEICVVIAAVFGIVIYRVVTVSTFAAFKWALIRNNSQVATTGTAVCINFCIIMLLNVLYEKVALLLTNLEQPRTESEWENSFTLKMFLFQFVNLNSSTFYIAFFLGRFTGHPGAYLRLINRWRLEECHPSGCLIDLCMQMGIIMVLKQTWNNFMELGYPLIQNWWTRRKVRQEHGPERKISFPQWEKDYNLQPMNAYGLFDEYLEMILQFGFTTIFVAAFPLAPLLALLNNIIEIRLDAYKFVTQWRRPLASRAKDIGIWYGILEGIGILSVITNAFVIAITSDFIPRLVYAYKYGPCAGQGEAGQKCMVGYVNASLSVFRISDFENRSEPESDGSEFSGTPLKYCRYRDYRDPPHSLVPYGYTLQFWHVLAARLAFIIVFEHLVFCIKHLISYLIPDLPKDLRDRMRREKYLIQEMMYEAELERLQKERKERKKNGKAHHNEWP

SEQ ID NO: 333533 - protein, 356 aa, Artificial Sequence
  derived and/or modified sequence
MASLTAYDKDVSSGSYNLSSATTGSYYSCVSQITIGYDVAGPVAIGLTHWKNPYVQGRPTLPSDLPLFVSKDAGIPVYHRSFTRKTDQATPLSCPASLSITPVPSYSSSSQETLSQDTTGLSLSIHGAEKRLQIHQRRSVASRPASRRRLPVVRHSSLPPGRRSIKMEASSSGITNGKTKVFHPEGGVDLQGYQLDMQILPDGPKSDVDFSEILNAIQEMAKDVNILFDELEAVSSPCKDDDSLLHPGNLTSTSDDASRLEAGGETVPERNKSNGLYFRDGKCRIDYILVYRKSNPQTEKREVFERNIRAEGLQMEKESSLINSDIIFVKLHAPWEVLGRYAEQMNVRMPFSSNCN

SEQ ID NO: 333534 - DNA, 3418 bp, Artificial Sequence
  derived and/or modified sequence
ctttctgccgaagacaccaaggcactgaggaaggatcccttctccttctgttgactctttctatttttatggtttaagtttatctattcatggggctgaaaagcgtttgcaaatccatcaacggcgaagtgtggcaagccgcccagcgtcacgtcgtcgcctgcctgtggtcaggcattcctcactcccaccaggcagaaggtcaataaaaatggaggcaagctcttctggaatcactaatggaaaaaccaaagtcttccacccagaaggaggtgtggatttgcaaggctaccagctggatatgcaaatactacctgacgggccaaagagtgatgtggacttttcagagattcttaatgcaatacaagaaatggccaaggatgtcaatattctttttgatgaattagaagctgtcagcagtccttgcaaagatgacgattctcttcttcaccctggaaacctgactagtacttcagatgatgccagcagattggaagccgggggagagacagtgccagaaagaaacaaatcaaatggactttactttcgagatggaaagtgtcgaattgactacatccttgtgtacagaaaatccaacccccagactgaaaagagagaagtatttgaaagaaacattagagcagaaggattgcaaatggagaaagagtcctctctaataaatagtgacattatctttgtgaagttgcatgccccatgggaagtccttggaagatatgcagaacaaatgaatgtaagaatgcctttcaggagaaaaatctattacctgccccgccgttacaagttcatgagcaggatcgataaacaaataagcaggtttcggagatggttacctaagaagccaatgaggctggacaaggagacactgccagacctggaggagaatgactgctacactgcccctttcagccagcaaaggatccatcacttcatcatacacaacaaagaaacgttcttcaacaatgccacaagaagtagaatcgtgcatcacattttacaaagaataaaatatgaagaaggaaaaaacaagattggtctgaatcgtttgcttaccaatggctcctatgaagctgcgtttcccctgcatgagggaagttatagaagtaaaaactccattcgaacccatggagcagaaaaccaccgacatctactctatgagtgctgggcctcctggggcgtgtggtataaataccaacctttggatcttgtaaggcggtactttggagagaagattgggttatattttgcctggttgggctggtacaccggcatgctcttcccagctgccttcattggattgtttgtctttttgtatggcgtcaccactctggatcacagccaagtcagtaaagaagtctgccaagctacagatatcatcatgtgtcctgtgtgtgataaatactgtccattcatgaggctgtcagacagctgtgtatatgccaaggtaacccacctttttgacaatggagccactgtcttctttgctgttttcatggcagtctgggcaacagttttcctggagttttggaaaagacggcgagcagtaattgcttatgactgggatttgatagactgggaagaagaggagatctgcgtggtgattgctgccgtgttcgggatcgtcatttaccgggtggtgactgtcagcactttcgctgcctttaagtgggcgttaatcaggaataactctcaggttgcaaccacagggactgctgtgtgcatcaacttctgtatcattatgttgctgaatgtgctctatgaaaaagttgccctgcttctgacgaatttagaacagcctcgcacagagtctgagtgggagaacagcttcaccctgaaaatgtttctttttcagtttgtcaatctgaacagctccacattttacatcgcattcttcctcggaagatttacaggacacccaggtgcctacttgaggctgataaacaggtggagactagaagagtgccaccctagtggatgccttattgatctgtgtatgcaaatgggtattataatggtgctaaagcagacctggaataatttcatggaacttggctacccgttaattcagaattggtggactagaagaaaagtacgacaagaacatggacctgaaaggaaaataagtttcccacaatgggaaaaggactataaccttcagccgatgaatgcctatggactcttcgatgaatacttagaaatgattcttcagtttggattcacaactatctttgtggcagcttttcccctagcaccacttctggccttactgaataacataattgaaattcgacttgatgcttacaaatttgtcacacagtggaggagacctttagcttcaagggccaaagacataggaatttggtatggaattcttgaaggcattggaattctctctgttatcacaaatgcatttgtcatagcgataacatctgactttatccctcgcttggtgtatgcttataagtatggaccttgtgcaggccaaggagaagctgggcaaaagtgcatggttggctatgtgaatgccagcttgtctgtatttcgaatttctgactttgagaaccgatctgagcctgaatctgatggcagtgagttctcggggactcctcttaagtactgcagataccgggactaccgtgacccgcctcattcactggtgccctatggctacacactgcagttttggcatgtcctagctgctcgattagcttttatcattgtctttgagcacctcgtgttttgtataaagcacctcatttcatatctgatcccagacctcccaaaagacctaagggatcgaatgagaagagagaagtacttgattcaggagatgatgtatgaagcagaactggaacgtctccagaaggaacgaaaggagaggaagaagaatggaaaagcacaccacaacgagtggccgtgaccataaaatagtccctttccaggccaaggacctgaattctgtttacttcttctggctgtgcaaaagcacactcaagtgaatgactaaaaatgcaaccacagtgcatgttgcagataccggcggccgcaggaggggcagcatccagtagaggactggcgttggagtcacactgctgtgaaatcacgttgcagtccagcgcacaattgctatctatccatagaccattcttgaccaagcaagcatgcacattatgggcagttacattctcaagtttttaaaatcaaggggaacttgtatactgggcctgtttttcagcctgtttgctaccttttttgcattctatcccatgtgaattttacagacactgggctaaaaagggtattcagacacatggacacacattcctagaatgtcatcatatggtcctaattccatgtcaccaacaacacagacaagaccctgtttacaactttttctttc

SEQ ID NO: 333535 - DNA, 3509 bp, Artificial Sequence
  derived and/or modified sequence
tttctgccgaagacaccaaggcactgaggaaggatcccttctccttctgttgactctttctatttttatggtttaagtttatctattcatggggctgaaaagcgtttgcaaatccatcaacggcgaagtgtggcaagccgcccagcgtcacgtcgtcgcctgcctgtggtcaggcattcctcactcccaccaggcagaaggtcaataaaaatggaggcaagctcttctggaatcactaatggaaaaaccaaagtcttccacccagaaggaggtgtggatttgcaaggctaccagctggatatgcaaatactacctgacgggccaaagagtgatgtggacttttcagagattcttaatgcaatacaagaaatggccaaggatgtcaatattctttttgatgaattagaagctgtcagcagtccttgcaaagatgacgattctcttcttcaccctggaaacctgactagtacttcagatgatgccagcagattggaagccgggggagagacagtgccagaaagaaacaaatcaaatggactttactttcgagatggaaagtgtcgaattgactacatccttgtgtacagaaaatccaacccccagactgaaaagagagaagtatttgaaagaaacattagagcagaaggattgcaaatggagaaagagtcctctctaataaatagtgacattatctttgtgaagttgcatgccccatgggaagtccttggaagatatgcagaacaaatgaatgtaagaatgcctttcaggagaaaaatctattacctgccccgccgttacaagttcatgagcaggatcgataaacaaataagcaggtttcggagatggttacctaagaagccaatgaggctggacaaggagacactgccagacctggaggagaatgactgctacactgcccctttcagccagcaaaggatccatcacttcatcatacacaacaaagaaacgttcttcaacaatgccacaagaagtagaatcgtgcatcacattttacaaagaataaaatatgaagaaggaaaaaacaagattggtctgaatcgtttgcttaccaatggctcctatgaagctgcgtttcccctgcatgagggaagttatagaagtaaaaactccattcgaacccatggagcagaaaaccaccgacatctactctatgagtgctgggcctcctggggcgtgtggtataaataccaacctttggatcttgtaaggcggtactttggagagaagattgggttatattttgcctggttgggctggtacaccggcatgctcttcccagctgccttcattggattgtttgtctttttgtatggcgtcaccactctggatcacagccaagtcagtaaagaagtctgccaagctacagatatcatcatgtgtcctgtgtgtgataaatactgtccattcatgaggctgtcagacagctgtgtatatgccaaggtaacccacctttttgacaatggagccactgtcttctttgctgttttcatggcagtctgggcaacagttttcctggagttttggaaaagacggcgagcagtaattgcttatgactgggatttgatagactgggaagaagaggaggaagaaatacgaccccagtttgaagccaagtattccaagaaagagcggatgaatccaatttctggaaagccagaaccttatcaagcatttacagataaatgcagcagacttatcgtttctgcatctggaatattttttatgatctgcgtggtgattgctgccgtgttcgggatcgtcatttaccgggtggtgactgtcagcactttcgctgcctttaagtgggcgttaatcaggaataactctcaggttgcaaccacagggactgctgtgtgcatcaacttctgtatcattatgttgctgaatgtgctctatgaaaaagttgccctgcttctgacgaatttagaacagcctcgcacagagtctgagtgggagaacagcttcaccctgaaaatgtttctttttcagtttgtcaatctgaacagctccacattttacatcgcattcttcctcggaagatttacaggacacccaggtgcctacttgaggctgataaacaggtggagactagaagagtgccaccctagtggatgccttattgatctgtgtatgcaaatgggtattataatggtgctaaagcagacctggaataatttcatggaacttggctacccgttaattcagaattggtggactagaagaaaagtacgacaagaacatggacctgaaaggaaaataagtttcccacaatgggaaaaggactataaccttcagccgatgaatgcctatggactcttcgatgaatacttagaaatgattcttcagtttggattcacaactatctttgtggcagcttttcccctagcaccacttctggccttactgaataacataattgaaattcgacttgatgcttacaaatttgtcacacagtggaggagacctttagcttcaagggccaaagacataggaatttggtatggaattcttgaaggcattggaattctctctgttatcacaaatgcatttgtcatagcgataacatctgactttatccctcgcttggtgtatgcttataagtatggaccttgtgcaggccaaggagaagctgggcaaaagtgcatggttggctatgtgaatgccagcttgtctgtatttcgaatttctgactttgagaaccgatctgagcctgaatctgatggcagtgagttctcggggactcctcttaagtactgcagataccgggactaccgtgacccgcctcattcactggtgccctatggctacacactgcagttttggcatgtcctagctgctcgattagcttttatcattgtctttgagcacctcgtgttttgtataaagcacctcatttcatatctgatcccagacctcccaaaagacctaagggatcgaatgagaagagagaagtacttgattcaggagatgatgtatgaagcagaactggaacgtctccagaaggaacgaaaggagaggaagaagaatggaaaagcacaccacaacgagtggccgtgaccataaaatagtccctttccaggccaaggacctgaattctgtttacttcttctggctgtgcaaaagcacactcaagtgaatgactaaaaatgcaaccacagtgcatgttgcagataccggcggccgcaggaggggcagcatccagtagaggactggcgttggagtcacactgctgtgaaatcacgttgcagtccagcgcacaattgctatctatccatagaccattcttgaccaagcaagcatgcacattatgggcagttacattctcaagtttttaaaatcaaggggaacttgtatactgggcctgtttttcagcctgtttgctaccttttttgcattctatcccatgtgaattttacagacactgggctaaaaagggtattcagacacatggacacacattcctagaatgtcatcatatggtcctaatt

SEQ ID NO: 333536 - DNA, 3909 bp, Artificial Sequence
  derived and/or modified sequence
ctgttccagacttctcagggtttttacagcacaaacaactgcatacggcccgaggggaggctgaaaaggacttgtgtgtggtggttttattgcctgtcatcactttgctggcctcctcccgactggagcctggaggttcacagtggatttctttctgccgaagacaccaaggcactgaggaaggatcccttctccttctgttgactctttctatttttatggtttaagtttatctattcatggggctgaaaagcgtttgcaaatccatcaacggcgaagtgtggcaagccgcccagcgtcacgtcgtcgcctgcctgtggtcaggcattcctcactcccaccaggcagaaggtcaataaaaatggaggcaagctcttctggaatcactaatggaaaaaccaaagtcttccacccagtggccaaggatgtcaatattctttttgatgaattagaagctgtcagcagtccttgcaaagatgacgattctcttcttcaccctggaaacctgactagtacttcagatgatgccagcagattggaagccgggggagagacagtgccagaaagaaacaaatcaaatggactttactttcgagatggaaagtgtcgaattgactacatccttgtgtacagaaaatccaacccccagactgaaaagagagaagtatttgaaagaaacattagagcagaaggattgcaaatggagaaagagtcctctctaataaatagtgacattatctttgtgaagttgcatgccccatgggaagtccttggaagatatgcagaacaaatgaatgtaagaatgcctttcaggagaaaaatctattacctgccccgccgttacaagttcatgagcaggatcgataaacaaataagcaggtttcggagatggttacctaagaagccaatgaggctggacaaggagacactgccagacctggaggagaatgactgctacactgcccctttcagccagcaaaggatccatcacttcatcatacacaacaaagaaacgttcttcaacaatgccacaagaagtagaatcgtgcatcacattttacaaagaataaaatatgaagaaggaaaaaacaagattggtctgaatcgtttgcttaccaatggctcctatgaagctgcgtttcccctgcatgagggaagttatagaagtaaaaactccattcgaacccatggagcagaaaaccaccgacatctactctatgagtgctgggcctcctggggcgtgtggtataaataccaacctttggatcttgtaaggcggtactttggagagaagattgggttatattttgcctggttgggctggtacaccggcatgctcttcccagctgccttcattggattgtttgtctttttgtatggcgtcaccactctggatcacagccaagtcagtaaagaagtctgccaagctacagatatcatcatgtgtcctgtgtgtgataaatactgtccattcatgaggctgtcagacagctgtgtatatgccaaggtaacccacctttttgacaatggagccactgtcttctttgctgttttcatggcagtctgggcaacagttttcctggagttttggaaaagacggcgagcagtaattgcttatgactgggatttgatagactgggaagaagaggaggaagaaatacgaccccagtttgaagccaagtattccaagaaagagcggatgaatccaatttctggaaagccagaaccttatcaagcatttacagataaatgcagcagacttatcgtttctgcatctggaatattttttatgatctgcgtggtgattgctgccgtgttcgggatcgtcatttaccgggtggtgactgtcagcactttcgctgcctttaagtgggcgttaatcaggaataactctcaggttgcaaccacagggactgctgtgtgcatcaacttctgtatcattatgttgctgaatgtgctctatgaaaaagttgccctgcttctgacgaatttagaacagcctcgcacagagtctgagtgggagaacagcttcaccctgaaaatgtttctttttcagtttgtcaatctgaacagctccacattttacatcgcattcttcctcggaagatttacaggacacccaggtgcctacttgaggctgataaacaggtggagactagaagagtgccaccctagtggatgccttattgatctgtgtatgcaaatgggtattataatggtgctaaagcagacctggaataatttcatggaacttggctacccgttaattcagaattggtggactagaagaaaagtacgacaagaacatggacctgaaaggaaaataagtttcccacaatgggaaaaggactataaccttcagccgatgaatgcctatggactcttcgatgaatacttagaaatgattcttcagtttggattcacaactatctttgtggcagcttttcccctagcaccacttctggccttactgaataacataattgaaattcgacttgatgcttacaaatttgtcacacagtggaggagacctttagcttcaagggccaaagacataggaatttggtatggaattcttgaaggcattggaattctctctgttatcacaaatgcatttgtcatagcgataacatctgactttatccctcgcttggtgtatgcttataagtatggaccttgtgcaggccaaggagaagctgggcaaaagtgcatggttggctatgtgaatgccagcttgtctgtatttcgaatttctgactttgagaaccgatctgagcctgaatctgatggcagtgagttctcggggactcctcttaagtactgcagataccgggactaccgtgacccgcctcattcactggtgccctatggctacacactgcagttttggcatgtcctagctgctcgattagcttttatcattgtctttgagcacctcgtgttttgtataaagcacctcatttcatatctgatcccagacctcccaaaagacctaagggatcgaatgagaagagagaagtacttgattcaggagatgatgtatgaagcagaactggaacgtctccagaaggaacgaaaggagaggaagaagaatggaaaagcacaccacaacgagtggccgtgaccataaaatagtccctttccaggccaaggacctgaattctgtttacttcttctggctgtgcaaaagcacactcaagtgaatgactaaaaatgcaaccacagtgcatgttgcagataccggcggccgcaggaggggcagcatccagtagaggactggcgttggagtcacactgctgtgaaatcacgttgcagtccagcgcacaattgctatctatccatagaccattcttgaccaagcaagcatgcacattatgggcagttacattctcaagtttttaaaatcaaggggaacttgtatactgggcctgtttttcagcctgtttgctaccttttttgcattctatcccatgtgaattttacagacactgggctaaaaagggtattcagacacatggacacacattcctagaatgtcatcatatggtcctaattccatgtcaccaacaacacagacaagaccctgtttacaactttttctttccttttttttaattttagacctttctgagaagattattatatatgacatatctatagctatgtgtatggccatagatgtatttctgtgtgtacatatgtatagtcatgtattcctgcatatgtacatacaaatacagagatatataaagtacatagaaattccttacttgtaaatagccaaaaagtactgacatgagtgaattttcacatttaaatagtcatcaatatgaagccatgattaatgcttgtataatgtgatgcaataaaatttaaaataaatttctgcacatggaatattttcagctg

SEQ ID NO: 333537 - DNA, 571 bp, Artificial Sequence
  derived and/or modified sequence
tttcactccggctcgctctccggagagtcctgttccagacttctcagggtttttacagcacaaacaactgcatacggcccgaggggaggctgaaaaggacttgtgtgtggtggttttattgcctgtcatcactttgctggcctcctcccgactggagcctggaggttcacagtggatttctttctgccgaagacaccaaggcactgaggaaggatcccttctccttctgttgactctttctatttttatggctccagctcattcctggctttagttgaacttttctgacattcttcatatagcatgcagtccagtggaccttcttctgctgagagcagtattgctggccaggctgtctgggttcaaagctaggctgtgcctcataaacatgacctttggtttaagtttatctattcatggggctgaaaagcgtttgcaaatccatcaacggcgaagtgtggcaagccgcccagcgtcacgtcgtcgcctgcctgtggtcaggcattcctcactcccaccaggcagaaggtcaataaaaatggaggcaagctcttctggaatcactaatgga

SEQ ID NO: 333538 - DNA, 1071 bp, Artificial Sequence
  derived and/or modified sequence
atggccagcctgaccgcctacgacaaggacgtgagcagcggcagctacaacctgagcagcgccaccaccggcagctactacagctgcgtgagccagatcaccatcggctacgacgtggccggccccgtggccatcggcctgacccactggaagaacccctacgtgcagggcagacccaccctgcccagcgacctgcccctgttcgtgagcaaggacgccggcatccccgtgtaccacagaagcttcaccagaaagaccgaccaggccacccccctgagctgccccgccagcctgagcatcacccccgtgcccagctacagcagcagcagccaggagaccctgagccaggacaccaccggcctgagcctgagcatccacggcgccgagaagagactgcagatccaccagagaagaagcgtggccagcagacccgccagcagaagaagactgcccgtggtgagacacagcagcctgccccccggcagaagaagcatcaagatggaggccagcagcagcggcatcaccaacggcaagaccaaggtgttccaccccgagggcggcgtggacctgcagggctaccagctggacatgcagatcctgcccgacggccccaagagcgacgtggacttcagcgagatcctgaacgccatccaggagatggccaaggacgtgaacatcctgttcgacgagctggaggccgtgagcagcccctgcaaggacgacgacagcctgctgcaccccggcaacctgaccagcaccagcgacgacgccagcagactggaggccggcggcgagaccgtgcccgagagaaacaagagcaacggcctgtacttcagagacggcaagtgcagaatcgactacatcctggtgtacagaaagagcaacccccagaccgagaagagagaggtgttcgagagaaacatcagagccgagggcctgcagatggagaaggagagcagcctgatcaacagcgacatcatcttcgtgaagctgcacgccccctgggaggtgctgggcagatacgccgagcagatgaacgtgagaatgcccttcagcagcaactgcaactag

SEQ ID NO: 333539 - DNA, 1071 bp, Artificial Sequence
  derived and/or modified sequence
atggcatctctcaccgcatatgacaaggacgtgagtagtggttcatataatctatcaagcgccactacaggtagctattactcctgcgtctctcagattaccattgggtatgatgtcgcgggcccagtcgccattggcctgacccactggaaaaacccatatgtgcagggacgacccacactcccatctgacctgcccttgtttgtcagcaaggacgccggcatcccggtttatcaccgatctttcactcggaagactgaccaagccacgcccctgagctgtccagcgtcgctgtctattaccccagtcccctcatactccagttcgtctcaggaaaccctctctcaggacacaaccgggctcagtctgtctatacatggtgctgagaagcgactccagatacatcagcgcagatctgtggcgtcccgcccagccagccgcaggcgacttccagtggtccgccactcttcgctcccacctggccgaagatccatcaaaatggaggcctcgagtagcgggattaccaatgggaagacaaaggttttccatcccgaggggggggtggacctgcagggctaccagctggatatgcagatcttgccagacggtcctaaatccgatgtcgacttctcagagatcctcaatgctatccaggagatggccaaggatgtgaacattttgttcgatgagctggaagcagtgtcaagcccatgcaaggatgatgacagtttgctgcatccaggaaatttgacctcgacctcagacgacgcctcgaggttggaggccggaggcgaaacagtgccagagagaaacaaaagcaacgggttgtattttcgggacgggaaatgcagaattgactatatccttgtgtacaggaaaagtaatcctcagacggagaaacgggaagtgtttgaacggaacatcagagccgaggggctccagatggagaaggagtcttctcttatcaactcagacattatctttgtgaaactgcatgctccctgggaggtgctggggagatacgccgagcaaatgaacgtccgaatgccattttcgagcaactgcaattag

SEQ ID NO: 333540 - DNA, 1071 bp, Artificial Sequence
  derived and/or modified sequence
atggccagcctgacagcctatgacaaggatgtgagcagcggcagctacaacctgagcagcgccaccaccggcagctactacagctgtgtgtcccagatcaccatcggctatgatgtggccggccctgtggccatcggcctgacccactggaagaacccctacgtgcagggccggcccaccctgcccagcgacctgcccctgtttgtgtccaaggatgctggcatccctgtgtaccaccgctccttcaccaggaagacagaccaggccacccccctgagctgcccagccagcctgagcatcacccctgtgcccagctacagcagcagcagccaggagaccctgagccaggacaccaccggcctgagcctgagcatccacggggctgagaagaggctgcagatccaccagaggagatctgtggccagcaggcctgccagcagaagaaggctgcctgtggtgcgccacagcagcctgcccccaggccgccgcagcatcaagatggaggccagcagcagcggcatcaccaacgggaagaccaaggtgttccaccctgagggcggcgtggacctgcagggctaccagctggacatgcagatcctgcctgatggccccaagagtgatgtggacttcagcgagatcctgaatgccatccaggagatggccaaggatgtgaacatcctgtttgatgagctggaggccgtgagcagcccctgcaaggatgatgacagcctgctgcaccctggcaacctgaccagcaccagtgatgatgccagccggctggaggccggcggggagaccgtgcctgagaggaacaagagcaatggcctgtacttcagagatggcaagtgcagaattgactacatcctggtgtacaggaagagcaacccccagacagagaagcgggaggtgtttgagaggaacatccgggcagagggcctgcagatggagaaggagagcagcctcatcaacagcgacatcatctttgtgaagctgcacgccccctgggaggtgctgggccgctatgcagagcagatgaatgtgaggatgcccttcagcagcaactgcaactag

SEQ ID NO: 333541 - DNA, 1071 bp, Artificial Sequence
  derived and/or modified sequence
atggccagcctgaccgcctacgacaaggacgtgagcagcggcagctataatctgtctagcgcgaccacaggctcatattactcctgcgtttctcaaattaccatcggctacgacgtggctgggccagtggccatcggactgacacactggaaaaatccctatgtgcaaggtcgcccaacgctcccctctgatctcccactcttcgtttccaaggacgcaggcatccccgtgtaccatcggtcattcactcgaaaaaccgatcaagcgacgccactgtcatgccccgcctccctctcgatcacacccgttccctcttacagctcaagctcacaggagacactcagccaggacacaaccgggctttccctctcaatccatggtgcagagaaacgcctacagatccatcagcgccgctctgtcgcttcacggcccgccagcaggcgcagactccctgtggtacgtcatagctccctccctcctggcaggcgaagtatcaagatggaagctagcagctctgggatcactaatggcaaaactaaggtgtttcaccctgagggtggtgtggacctgcaggggtaccaacttgacatgcagatcctccccgacggtcctaaatctgatgttgattttagcgagatcctgaacgcgattcaggagatggctaaggatgttaacattcttttcgacgagttggaggccgtcagctcaccatgtaaggatgatgacagcctgctgcaccccggaaatcttacatccacctctgatgatgccagcagactcgaggctgggggagaaacagttccggaaaggaataagagcaatggactatatttcagagacggtaaatgcagaatcgactatatcctggtgtaccgcaaatcaaaccctcagacagagaagagagaggtgttcgagcggaatatcagagccgaaggcctgcaaatggaaaaagagtcgtccctcattaattccgacatcatttttgtgaagctccacgctccttgggaggttctgggaagatatgccgaacagatgaacgtgaggatgcccttttcgtcaaactgtaattag

SEQ ID NO: 333542 - DNA, 1071 bp, Artificial Sequence
  derived and/or modified sequence
atggcaagcctgacagcttacgacaaggacgtttcaagtggatcctacaatctgtccagcgcaaccacagggtcatactatagttgcgtttcgcagatcaccatagggtatgacgttgccggtccagtcgccattgggctgacacactggaagaacccctatgtccaggggcgtccaacactcccctccgacctcccactgtttgtgtccaaagatgccggtatccctgtctaccacagatccttcacgagaaagacagatcaggccacacctctttcatgccctgcctctctgagtatcaccccagttcctagctatagcagctcctcccaggaaaccttgtcacaagacactactgggttgtctctgtctatccatggtgccgagaagcgcctgcagatccaccagcgcaggtctgtggccagccgcccagctagcaggcggagattgccggtagtcaggcatagctctctccctcccggtagacgcagtatcaaaatggaagcctcttcaagcggaattacgaacggcaagacaaaagtttttcaccccgaggggggagtcgacctccaaggctatcagctggacatgcagatcctgcctgacgggccaaaatctgatgtagatttttcagaaatacttaacgctatccaggagatggccaaggacgttaatatacttttcgatgaactggaggctgtgtctagtccttgtaaggacgacgactcgttgcttcatccaggcaatttgacgtcaacatccgacgacgcatcacgattggaagcgggaggggaaacagtcccggagcggaataagtccaacggattgtacttccgtgacggaaaatgtcgcatcgattacattttggtttacaggaagtctaatccccagactgagaagcgcgaagtcttcgagagaaatatccgcgctgaaggactgcagatggaaaaagaatctagtctcataaactccgacatcatcttcgttaagctgcatgctccatgggaggtgctgggcagatacgctgagcagatgaatgtccggatgcctttctccagtaactgtaactag

SEQ ID NO: 333543 - protein, 383 aa, Artificial Sequence
  derived and/or modified sequence
SIRTHCMAYSLVDSSQVSTFLISILLIVYGSFRSLNMDFENQDKEKDSNSSSGSFNGNSPIIGIQTIDSTQALFLPIGASVSLLVMFFFFDSVQVVFTICTAVLATIAFAFLLLPMCQYLTRPCSPQNKISFGCCGRFTAAELLSFSLSVMLVLIWVLTGHWLLMDALAMGLCVAMIAFVRLPSLKVSCLLLSGLLIYDVFWVFFSAYIFNSNVMVKVATQPADNPLDVLSRKLHLGPNVGRDVPRLSLPGKLVFPSSTGSHFSMLGIGDIVMPGLLLCFVLRYDNYKKQASGDSCGAPGPANISGRMQKVSYFHCTLIGYFVGLLTATVASRIHRAAQPALLYLVPFTLLPLLTMAYLKGDLRRMWSEPFHSKSSSSRFLEV

SEQ ID NO: 333544 - protein, 1018 aa, Artificial Sequence
  derived and/or modified sequence
MKMWLLVSHLVIISITTCLAEFTWYRRYGHGVSEEDKGFGPIFEEQPINTIYPEESLEGKVSLNCRARASPFPVYKWRMNNGDVDLTSDRYSMVGGNLVINNPDKQKDAGIYYCLASNNYGMVRSTEATLSFGYLDPFPPEERPEVRVKEGKGMVLLCDPPYHFPDDLSYRWLLNEFPVFITMDKRRFVSQTNGNLYIANVEASDKGNYSCFVSSPSITKSVFSKFIPLIPIPERTTKPYPADIVVQFKDVYALMGQNVTLECFALGNPVPDIRWRKVLEPMPSTAEISTSGAVLKIFNIQLEDEGIYECEAENIRGKDKHQARIYVQAFPEWVEHINDTEVDIGSDLYWPCVATGKPIPTIRWLKNGYAYHKGELRLYDVTFENAGMYQCIAENTYGAIYANAELKILALAPTFEMNPMKKKILAAKGGRVIIECKPKAAPKPKFSWSKGTEWLVNSSRILIWEDGSLEINNITRNDGGIYTCFAENNRGKANSTGTLVITDPTRIILAPINADITVGENATMQCAASFDPALDLTFVWSFNGYVIDFNKENIHYQRNFMLDSNGELLIRNAQLKHAGRYTCTAQTIVDNSSASADLVVRGPPGPPGGLRIEDIRATSVALTWSRGSDNHSPISKYTIQTKTILSDDWKDAKTDPPIIEGNMEAARAVDLIPWMEYEFRVVATNTLGRGEPSIPSNRIKTDGAAPNVAPSDVGGGGGRNRELTITWAPLSREYHYGNNFGYIVAFKPFDGEEWKKVTVTNPDTGRYVHKDETMSPSTAFQVKVKAFNNKGDGPYSLVAVINSAQDAPSEAPTEVGVKVLSSSEISVHWEHVLEKIVESYQIRYWAAHDKEEAANRVQVTSQEYSARLENLLPDTQYFIEVGACNSAGCGPPSDMIEAFTKKAPPSQPPRIISSVRSGSRYIITWDHVVALSNESTVTGYKVLYRPDGQHDGKLYSTHKHSIEVPIPRDGEYVVEVRAHSDGGDGVVSQVKISGAPTLSPSLLGLLLPAFGILVYLEF

SEQ ID NO: 333545 - protein, 85 aa, Artificial Sequence
  derived and/or modified sequence
MKMWLLVSHLVIISITTCLAEFTWYRRYGHGVSEEDKGFGPIFEEQPINTIYPEESLEGKVSLNCRARASPFPVYKWRMNNGDVD

SEQ ID NO: 333546 - protein, 90 aa, Artificial Sequence
  derived and/or modified sequence
MKMWLLVSHLVIISITTCLAEFTWYRRYGHGVSEEDKGFGPIFEEQPINTIYPEESLEGKVSLNCRARASPFPVYKWRMNNGDVDLTSDR

SEQ ID NO: 333547 - protein, 73 aa, Artificial Sequence
  derived and/or modified sequence
MKMWLLVSHLVIISITTCLAEFTWYRRYGHGVSEEDKGFGPIFEEQPINTIYPEESLEGKVSLNCRARASPFP

SEQ ID NO: 333548 - DNA, 3057 bp, Artificial Sequence
  derived and/or modified sequence
atgaagatgtggctgctggtatctcaccttgtcatcatttctatcacaacctgcctcgctgaattcacatggtacagaaggtacggacatggggtcagtgaagaagataaaggatttggtccgatattcgaagagcaacctattaatacgatctaccccgaagagtctcttgagggaaaagtgagtctgaattgcagggctagagccagtccttttccagtgtataagtggcgaatgaacaacggcgacgtagacctcacgtccgacaggtattctatggtgggaggaaatctggtgatcaataatccagacaagcagaaggacgctggcatttattactgcctagctagcaacaactacggcatggttcgcagcaccgaggctacactctcctttgggtatctggaccccttcccaccagaggagagaccagaagttcgggtgaaggaaggcaaaggcatggtgttgctctgtgaccctccgtatcattttcccgacgatctgtcgtataggtggctgctcaacgaattcccagtttttattacaatggacaaacgacggttcgtatcgcaaactaacggcaatctatatatcgccaacgtggaagcgagtgacaaaggcaattatagctgtttcgtgagtagccccagtatcaccaagagcgtgttcagcaaattcataccattgattccaatcccggagaggaccaccaaaccgtaccctgccgatatcgtcgtgcagttcaaggacgtctacgcacttatgggacagaacgtgactcttgagtgctttgcattagggaatcctgtacccgacatccgctggaggaaggtgcttgagcccatgccgagtacagcagagatctccacttcaggagccgtgctgaaaatctttaacatccaactcgaggacgaagggatatatgagtgtgaggcagagaatataagaggcaaggataaacaccaggcccgtatctacgtccaggccttccccgaatgggtcgaacatataaacgacactgaggtcgatattggttctgatttatattggccctgtgtggccactggcaagcccattccaaccatccgatggctaaaaaatggctatgcctaccacaagggcgagcttagactttacgatgtgacctttgaaaacgccggaatgtatcaatgcatcgccgagaacacctatggcgctatttatgccaacgctgagctgaagatactggctctggccccaactttcgaaatgaacccaatgaagaaaaagatcctggccgcaaaaggtggtagggtgatcattgagtgtaagcctaaagcagctcccaagccgaagttttcatggtccaagggcacagagtggctggtcaactcctcgaggatactgatttgggaggacggtagtctcgagattaataatatcacaaggaatgatgggggaatctacacctgctttgccgaaaataatagaggcaaggcaaatagcacgggcaccctggttatcacagaccccacaaggattattctcgctccgattaatgccgacattaccgtcggcgagaacgccactatgcagtgcgccgcttccttcgacccggccctggacctaacttttgtctggagtttcaatggttacgttattgatttcaataaggaaaatatccattatcagagaaacttcatgctcgactcaaatggagaactgctgatcaggaacgcccagttgaaacacgcggggagatacacttgcaccgcacaaaccattgtagacaactcctctgcgtccgctgaccttgtagtgagaggtcctcctggacctcccggcggcctgaggattgaagacattcgcgcaacttctgtggcactgacctggagcagaggctccgataatcactcaccgatatctaagtacaccatacagactaaaaccatcttgagcgatgactggaaagatgcgaagacagacccacctattattgagggcaatatggaggcagcacgggcggtcgatctcatcccatggatggagtatgagttccgtgtcgtggcaaccaacactctcgggagaggcgagcctagtatccccagtaaccggatcaagacagacggtgccgccccaaacgtcgccccaagtgatgtaggcggcggtggcgggcggaaccgtgagctaacaatcacctgggcccccctctcccgagaataccactacggaaataactttggatatatcgtcgcatttaaacccttcgacggagaggagtggaagaaagttacagtcacaaatcctgatacagggaggtatgtgcacaaggacgagactatgtctccttccacggcctttcaggtaaaggtaaaggcttttaacaacaagggtgacgggccgtattcgctggtcgccgtgatcaatagcgctcaggatgcaccgagtgaggcacccacagaggtcggggtgaaggttctgtcttcttcggaaatctcggtccactgggagcatgtcctggaaaagatagtagagtcctaccaaataaggtattgggcagcacacgacaaagaagaagctgcaaatcgcgtccaagtgaccagccaggagtattcagcaaggcttgagaacctccttcctgacacccaatacttcatcgaggttggagcctgcaactcggccggttgcggccctccgtctgacatgatcgaagccttcacaaagaaggcaccaccctctcagccccccaggatcatatccagtgtgcgttcggggagcagatatattatcacatgggaccacgtggtcgccctctcgaatgagtctactgtgacaggatataaggtcctctaccggccggatggacagcacgacggtaaattatatagtactcacaaacacagtatcgaggtgcccatccctcgtgacggcgagtacgtggtggaggtgagggcccactcagatgggggggatggggtagtttcgcaggtcaagattagtggagctcccacgctgtccccaagcctgctaggtctcctgttaccggcctttggcatacttgtctacctggaattctag

SEQ ID NO: 333549 - DNA, 3057 bp, Artificial Sequence
  derived and/or modified sequence
atgaagatgtggctgctggtcagtcacctggttatcatatccatcacaacctgtctcgccgaatttacttggtaccgccgctacggccatggcgtgagcgaggaggataagggctttgggcccatttttgaagagcagccaattaatactatctaccctgaagaaagcctcgagggcaaagtgagtttaaactgtagagcaagagcaagcccctttccggtatacaaatggagaatgaataatggagatgtcgacctgaccagtgatcgctatagcatggtgggcggaaacttggtgattaataatcctgataagcagaaagacgctggaatctactactgcctggcctctaacaattatggtatggtgcgctccacagaagcgacccttagcttcggctatctcgatccatttccaccagaggaacggcccgaggtgcgagtaaaggagggtaaaggcatggtcctgctttgtgacccaccatatcacttccccgatgacctatcatataggtggttattgaacgaattcccggtttttataacaatggacaaaaggcggtttgtgagccaaacgaatggaaacctgtacatagccaacgtagaggccagtgacaagggaaactatagctgctttgtaagcagcccaagcatcaccaagtctgtgttctctaagttcatcccacttatacccattcctgagagaaccactaaaccttatccagcagacattgtcgttcaatttaaagatgtctatgctctgatgggacagaatgtcacgctggagtgttttgccctcgggaatccagtgcccgacatacgctggcggaaggtcttggaaccaatgcctagcaccgccgagatatcaacaagtggggccgtgcttaagatcttcaacattcaattagaagacgaggggatatatgagtgtgaggctgaaaatatcagaggaaaagataagcaccaagcccgaatctacgtgcaagcatttcccgagtgggtagaacacattaatgacaccgaagtggacatcggaagtgatctctactggccctgcgtggcaacagggaaacccattccaacaattcggtggttaaaaaatggctatgcatatcacaaaggggagctcagactctatgatgtgaccttcgagaacgctggtatgtaccaatgcatagcggaaaacacttacggagcaatttatgcaaatgccgaactgaaaatcctggcgctggcgcctacatttgagatgaaccctatgaaaaagaagattctggccgccaagggcgggcgtgttataatcgaatgcaagccgaaagctgcaccaaagcccaaattcagctggagtaaaggcacagagtggcttgtgaacagctcccgcatactcatctgggaggacggatctctcgagatcaataacatcaccagaaatgatggaggaatctacacttgttttgctgaaaataaccggggcaaggctaactccaccgggactctggtgatcactgaccccactaggattattctggcaccaattaacgctgatattaccgttggcgaaaacgcaacgatgcagtgtgcagcctcattcgatcccgccctggacttaacattcgtgtggagcttcaatggctatgtcatcgactttaataaggaaaatattcattatcaacgtaattttatgcttgactccaatggggagctgttgatcaggaatgcacaactcaagcatgccggaagatatacctgtaccgcacagaccattgtcgataattcttctgcttccgctgatctggtggttagggggcctcccggaccccctggcggcctgcgaatcgaagacatcagggctacctctgtcgctttgacgtggagccgagggagtgataaccattcccccatcagcaaatacacaattcagactaagactatcttgtcagacgattggaaagatgccaaaacggacccccccattatcgagggcaatatggaggcggctagggccgtagacctaatcccatggatggaatatgaatttagggtagtcgctaccaacacactgggccggggcgaaccttctattccctcgaaccggatcaagacggacggggccgccccaaacgtggctccgtctgacgtgggtggcggaggaggaaggaaccgcgaactcactattacatgggcccccttgtcacgtgagtaccattacgggaataatttcggatatattgtcgccttcaagccctttgatggcgaggagtggaaaaaggtgactgtgacgaatcccgataccggccgctacgtccacaaggacgagaccatgtctcctagcactgcatttcaggtaaaggttaaagcctttaacaataagggggacggcccctacagcttggtggccgtgataaactccgcccaggatgctccgagtgaggctcccaccgaggtgggggtgaaggtcctttcctcctcagagatcagcgttcactgggagcacgttctggagaagattgtggagtcctaccaaattagatactgggccgcacacgacaaggaagaggccgccaatagggtgcaggtcacctctcaggagtactctgctcgcctcgagaacctgcttcctgacacgcagtacttcattgaggtgggagcatgcaactcagctggctgcggcccacccagcgatatgatcgaagcatttacaaagaaagctccccctagccagccaccccggattatttcctcagtaaggtcaggtagcagatatatcatcacttgggaccacgtcgtggccctaagcaatgaaagtaccgtgacgggctacaaggtgctgtaccgccctgatggacaacatgacggcaagctatactccactcacaagcattctatcgaggtccctatccccagagacggcgaatacgtggtcgaggttagagcacatagcgacggaggggatggcgtagtaagccaagtgaaaatttctggggcgccaactctgagtcctagcttgctggggcttctcctgcctgcctttggtattctcgtgtatctggaattttag

SEQ ID NO: 333550 - DNA, 3057 bp, Artificial Sequence
  derived and/or modified sequence
atgaagatgtggctgctggtgagccacctggtgatcatcagcatcaccacctgcctggccgagttcacctggtaccgccgctatggccacggcgtgtctgaagaagataaaggatttggccccatctttgaggagcagcccatcaacaccatctacccagaggagagcctggagggcaaggtgtccctgaactgccgggcccgggccagccccttccctgtgtacaagtggaggatgaacaatggagatgtggacctgaccagtgaccgctacagcatggtgggcggcaacctggtgatcaacaacccagacaagcagaaggatgctggcatctactactgcctggccagcaacaactacggcatggtgcgcagcacagaggccaccctgagctttggctacctggaccccttccccccagaggagaggcctgaggtgcgggtgaaggagggcaagggcatggtgctgctgtgtgaccccccctaccacttcccagatgacctgagctaccgctggctgctgaatgagttccctgtgttcatcaccatggacaagagaagatttgtgtcccagaccaatggaaacctgtacatcgccaacgtggaggccagtgacaagggcaactacagctgctttgtgagcagccccagcatcaccaagtctgtgttcagcaagttcatccccctcatccccatccctgagaggaccaccaagccctacccagctgacatcgtggtgcagttcaaggatgtgtatgccctgatgggccagaatgtgaccctggagtgctttgccctgggcaaccctgtgcctgacatccgctggaggaaggtgctggagcccatgcccagcacagctgagatcagcaccagcggggctgtgctgaagatcttcaacatccagctggaggatgagggcatctatgaatgtgaggccgagaacatccggggcaaggacaagcaccaggcccgcatctacgtgcaggccttccctgagtgggtggagcacatcaatgacacagaggtggacatcggcagtgacctgtactggccctgtgtggccaccgggaagcccatccccaccatccgctggctgaagaatggctacgcctaccacaagggggagctgcggctgtatgatgtgacctttgaaaatgccggcatgtaccagtgcatcgccgagaacacctatggagccatctatgccaatgctgagctgaagatcctggccctggcccccacctttgagatgaaccccatgaagaagaagatcctggccgccaagggcggccgggtcatcatcgagtgcaagcccaaggccgcccccaagcccaagttctcctggagcaagggcacagagtggctggtgaacagcagccgcatcctgatctgggaggatggcagcctggagatcaacaacatcaccagaaatgatggcggcatctacacctgctttgctgagaacaacagaggcaaggccaacagcacaggcaccctggtgatcacagaccccacccgcatcatcctggcccccatcaatgctgacatcaccgtgggggagaatgccaccatgcagtgtgccgccagctttgatcctgccctggacctgacctttgtgtggagcttcaacggctacgtgattgacttcaacaaggagaacatccactaccagaggaacttcatgctggacagcaatggagagctgctgatcagaaatgcccagctgaagcacgccggccgctacacctgcacagcccagaccatcgtggacaacagcagcgccagcgctgacctggtggtgcggggccccccaggccccccaggcggcctgagaattgaggacatccgggccacctctgtggccctgacctggagccggggcagtgacaaccacagccccatcagcaagtacaccatccagaccaagaccatcctgagtgatgactggaaggatgccaagacagacccccccatcatcgagggcaacatggaggccgcccgggctgtggacctgatcccctggatggagtatgagttccgggtggtggccaccaacaccctgggccgcggggagcccagcatccccagcaaccgcatcaagacagatggagctgccccaaatgtggcccccagtgatgtgggcggcggcggcggcaggaaccgggagctgaccatcacctgggcccccctgagccgggagtaccactacggcaacaactttggctacatcgtggccttcaagccctttgatggagaggagtggaagaaggtgacagtgaccaacccagacaccggccgctacgtgcacaaggatgagaccatgagccccagcacagccttccaggtgaaggtgaaggccttcaacaacaagggagatggcccctacagcctggtggccgtcatcaacagcgcccaggatgcccccagcgaggcccccacagaggtgggcgtgaaggtgctgagcagcagcgagatctctgtgcactgggagcacgtgctggagaagatcgtggagagctaccagatccgctactgggccgcccatgacaaggaggaggccgccaacagagtgcaggtgaccagccaggagtacagcgcccggctggagaacctgctgcctgacacccagtacttcatcgaggtgggcgcctgcaacagcgctggctgcggccccccaagtgacatgattgaggccttcaccaagaaggccccacccagccagcccccacgcatcatcagctctgtgcgcagcggcagccgctacatcatcacctgggaccacgtggtggccctgagcaatgaaagcacagtgacaggctacaaggtgctgtacagaccagatggccagcatgatggcaagctgtacagcacccacaagcacagcattgaggtgcccatccccagagatggagaatatgtggtggaggtgcgggcccacagtgatggaggagatggagtggtgtcccaggtgaagatcagcggggcccccaccctgagccccagcctgctgggcctgctgctgcctgccttcggcatcctggtgtacctggagttctag

SEQ ID NO: 333551 - DNA, 3057 bp, Artificial Sequence
  derived and/or modified sequence
atgaagatgtggctgctggtgagccacctggtgatcatcagcatcaccacctgccttgctgaattcacctggtaccgccgctacggtcatggggtttcagaagaggacaaggggttcgggccaatctttgaggagcaacccataaatacgatatatccagaagaaagtcttgagggtaaggtctctctgaattgccgcgctagagcttccccattccccgtctacaaatggagaatgaataatggagatgtggatcttacatccgatcgatacagtatggtaggtggcaacctggtcatcaataaccctgacaagcaaaaggatgcaggtatttattactgtctggcatcgaacaactacggtatggtgaggtctactgaggcaaccctttcatttgggtaccttgatccatttcctcccgaggaaaggccagaagtaagagtgaaggaaggtaaaggcatggtgctgttgtgtgacccaccttatcattttccagacgatctctcttatcgatggctcctgaatgagttcccagtcttcatcaccatggacaaaaggcgatttgtttctcagacgaatggcaatctgtatatcgctaatgtggaagcatctgacaaagggaattactcctgtttcgtcagttctccatcaatcactaagtccgtgttctccaagtttattcccctgatccccataccagaacggaccacgaagccctaccctgctgatatcgtggttcagttcaaagatgtgtacgccctcatgggccagaacgtgaccctggagtgcttcgcgctcggaaatcctgttccggatattaggtggcggaaggtccttgagcctatgccttctaccgctgagatttccacaagtggagccgtcctgaaaatcttcaacatacaactggaggacgaaggaatctacgagtgcgaggccgaaaatatcagaggtaaagataaacatcaggcacgcatctatgttcaagcttttccggaatgggtggaacacatcaatgataccgaggtggatattggcagcgacttatattggccatgcgtggctaccgggaagccaatcccaaccatccgctggttgaagaatggctacgcctatcataaaggagagttgagactgtacgatgtgacatttgagaacgctgggatgtaccagtgcatcgcggagaatacatatggggcaatttatgcaaatgccgagctgaaaattcttgcccttgcacccactttcgagatgaaccccatgaagaagaaaatcctagccgctaagggcggcagagtaatcattgaatgcaaacccaaagctgccccaaagccaaagttttcttggagtaaaggtaccgagtggctggtgaattcatcaagaatcctcatctgggaggatgggagtttagagataaacaatataacacggaacgacgggggcatctacacctgcttcgcggaaaataacagagggaaagccaactccaccggcacacttgtcatcactgatcctacaaggatcatactcgcccccattaatgccgatattactgtaggtgaaaacgcgaccatgcaatgcgccgcctcttttgacccagctttggatttgacttttgtgtggtcattcaacgggtatgtcatagacttcaacaaagagaacatccactatcagcggaatttcatgttagactcgaatggagagctgttaattagaaacgctcagctgaagcatgccggcaggtacacctgtacagcccagacgatagttgataactcttctgctagcgccgacctggtggtgagaggccccccaggcccccctggcggcctacgcatcgaagacataagggcaacctctgttgcactgacctggagcagaggtagcgataaccacagccctatctccaagtacacaatccagacaaagacgattctgtcagatgattggaaagatgcaaaaaccgatccaccaattatcgagggcaacatggaggccgcccgagcagtggacctgatcccatggatggaatacgagtttagagttgtcgccaccaacactctaggacggggcgaaccttcaattccaagcaaccgcatcaaaaccgacggggccgcacccaatgtcgccccatccgatgtgggggggggcgggggccgaaatcgggagctgaccatcacgtgggcaccgctgtcccgggagtatcactacgggaataactttggctatatcgtcgcatttaaacccttcgatggagaagagtggaaaaaggtcactgttaccaatccagataccggccggtacgtccataaggacgaaacgatgagtccctcaaccgcctttcaggttaaagtgaaggcctttaataataagggagacggtccctattcactggtggccgtgatcaattccgctcaggatgcaccgagcgaggccccaaccgaggtcggcgtaaaagtgctctctagctcagaaatttcggtgcattgggagcatgtactcgaaaagattgtcgaaagctaccagattcggtattgggcggcacatgataaggaagaggctgcaaaccgagtgcaggtcacttcccaggagtactctgctaggttggagaacctgttgccggatacccagtattttatcgaggtcggtgcctgtaactctgccggatgtgggcctcctagtgatatgattgaagcctttacaaaaaaggcacccccctcacaacccccacgaattatctctagcgtccggagcggctcacgttatatcatcacttgggatcacgtcgtggctctatcaaacgaaagtacggtcaccgggtacaaggtactctatcgccccgacggacagcatgacggaaaactgtacagcacacataaacattccatagaagtccccattccaagggatggcgagtacgtggttgaggtgcgagcacactctgatggtggggacggggtggtgagccaggtgaagatctcaggcgcacccactctgtcacctagcctgctggggttactgctcccggcattcggaattctggtctacctggaattttag

SEQ ID NO: 333552 - DNA, 3057 bp, Artificial Sequence
  derived and/or modified sequence
atgaagatgtggctgctggtgagccacctggtgatcatcagcatcaccacctgtctcgctgaatttacttggtatcggagatacggtcatggcgtgtcagaggaggataagggattcggtcctattttcgaggagcagcccatcaacaccatctaccctgaggaatctctcgaggggaaggtctcacttaactgcagggccagggccagccccttccctgtgtataagtggcgtatgaacaatggcgatgttgacttaacatccgatcggtacagcatggtaggagggaacctggtcataaacaacccagataaacagaaggatgccggcatatactactgcctcgcctccaataattacggcatggttagatcgacagaagccactctctctttcggctacctcgacccctttccaccagaagagagacccgaagtacgcgttaaagaaggcaagggcatggttctcctgtgcgatcccccctatcactttcccgacgacctatcttaccgatggctgttgaatgagttccctgttttcatcaccatggacaagaggcgatttgttagtcaaaccaacggtaacctttacatcgcaaacgtggaggccagtgacaagggcaactactcctgtttcgtgtcctctccaagcatcactaaaagcgtgttctctaagtttatccccctgatacccattccggagagaaccacaaaaccatacccggccgatatagtcgtccagtttaaagatgtgtacgcgctcatggggcagaacgttacgcttgagtgcttcgccctaggcaatcctgttcccgatatccgctggcgcaaggtgctggagccaatgccctcaacagctgaaatttcaaccagcggggctgtcctgaaaatctttaacatccagctggaggatgaaggcatctacgagtgcgaggctgaaaacatccgaggcaaggacaagcaccaggcgcgcatttacgtccaggcttttccggagtgggtcgagcacattaacgacacagaggttgacatcggcagtgatttatattggccatgcgtcgcaactggaaaacccatccctaccatccggtggttaaaaaacgggtacgcttatcacaaaggagagctgcggctgtacgacgtcaccttcgagaacgccggtatgtatcagtgtatcgcagaaaatacatacggggctatttatgctaacgccgaattaaaaatcctcgcactggctccaacgtttgagatgaaccccatgaagaagaagattcttgccgccaagggtgggcgggtgatcatcgagtgtaagcctaaggccgcgccaaaacctaagttctcttggtctaagggcacagagtggttggttaattcttcccgtattcttatctgggaagatgggtcactcgagatcaataacatcactcggaatgacggtggaatctacacttgtttcgccgagaataacagaggtaaggctaactcgactggcacgctcgtcatcactgatcctaccagaattatacttgccccaatcaatgccgatatcacagtcggggagaatgcgacaatgcagtgcgcggcctcttttgacccagcgctggatttgacattcgtctggagctttaacgggtacgtgattgactttaacaaggagaatattcattaccagcgaaattttatgttggattccaacggagaattactcatcagaaatgcgcagttgaagcacgccggtcgatacacatgtaccgcacagactatcgttgacaactctagcgcgtccgccgacctggtcgttaggggccctcctggaccccccggcggactccgtattgaagacatacgcgcaacaagcgttgccctgacatggagccgtggctctgataaccactcacccatctctaaatacactatccagacgaaaactatactttccgacgactggaaagatgcaaagaccgacccccccatcattgaggggaacatggaggcagccagagccgttgacctgatcccctggatggagtatgaatttagggtggtcgctacaaataccctggggaggggggagccgagtatcccttcaaaccggataaagacagacggtgccgccccaaacgtcgctccatcggacgttggcggcggaggcgggcgcaatcgtgagctaacaatcacttgggctcccctcagcagggagtatcactacggtaataactttggctatattgtggctttcaagccctttgatggcgaggagtggaaaaaggtgacagttaccaaccctgacaccggccgatatgttcataaggacgaaactatgtccccctcaacagcgttccaggtgaaggtaaaagctttcaacaataaaggggatggaccatattcacttgtcgccgtgataaatagcgctcaggacgccccatcagaagccccaacagaggttggagttaaggtgctttcctcaagcgagatatcggtgcactgggagcatgtgctagaaaaaatcgtggagagctaccagattaggtattgggcggctcacgacaaggaggaggcggccaaccgggtgcaggtgaccagccaggaatactccgccagactcgagaacctactccctgatactcaatatttcattgaggtcggagcctgcaactctgctggctgtggtccaccttctgatatgattgaagcctttaccaaaaaagcccccccaagccagcccccgcgcattatctcctctgtgcgctctggttcccgctacatcatcacatgggaccatgtagtagccctgagtaatgagtctaccgttacagggtacaaggtcctatataggcctgatggacaacacgatggcaaactctattccacccacaaacatagcattgaggtgcccatcccgcgcgatggggaatacgtagtagaagtccgcgctcactctgatggcggcgacggcgtcgtttctcaggtgaagatcagcggagctcccacattgtctccatctctactcggccttctactgccagcctttggaattcttgtgtacttggagttttag

SEQ ID NO: 333553 - DNA, 3057 bp, Artificial Sequence
  derived and/or modified sequence
atgaaaatgtggctgcttgtgagtcatttggtgatcataagcattacaacttgtctcgccgaatttacttggtaccgcagatatgggcatggcgtctccgaggaagataaaggattcggacccatcttcgaagagcagcctatcaataccatttaccctgaggagagcctggaagggaaggtgagcctgaattgccgcgcaagggctagcccttttccggtctacaaatggaggatgaataatggcgatgtcgacctgaccagtgatcgatatagcatggtggggggaaaccttgtgattaacaacccagacaaacaaaaagatgcagggatttattattgcctggcgtcaaacaattatggaatggtgagatccaccgaagccacactgagctttggttacctcgatcccttcccaccagaagagcgaccagaggtgcgcgttaaagagggcaagggcatggtcttgctttgtgaccccccttatcacttccccgatgacttgtcctatcggtggctacttaacgagttccctgtttttataacgatggataaaagacggttcgtgagtcaaacaaacggaaatctgtacatagccaatgtggaggctagtgacaaggggaactattcatgcttcgtatcgtcaccgagcataacaaagtccgtcttcagcaagttcataccccttatccctattccagagaggacaaccaagccctacccggcagatattgtagtccagttcaaagacgtgtacgctctaatgggtcagaatgtaacgctggagtgctttgccctgggtaatccggtaccagacattcgctggcgcaaagtgctggagccaatgccctcgaccgccgagatcagcaccagcggagctgtcctcaagattttcaatatccagctagaggatgagggaatctacgagtgcgaggctgaaaatatccgcggaaaggataaacaccaagctcgtatatacgttcaagcttttccagaatgggtggaacatattaatgacaccgaagtcgatatcgggagcgacctatactggccatgcgtggcaacaggtaagccgatcccaactatccgctggctcaagaacgggtatgcttaccataagggcgaactgcgcctatacgatgttacatttgagaatgcaggcatgtatcagtgcattgccgaaaatacctacggcgctatttacgcaaatgccgaactgaagatcctggccctagcccctactttcgagatgaacccgatgaagaagaaaatcttagcagctaagggcggaagagttataatcgagtgtaagcctaaggcggctccgaaaccgaaattctcctggtcaaaggggacagagtggctcgtgaactcaagtcgaatcctgatctgggaggatggttccctggagatcaacaacatcacgcgcaacgacggtggcatatatacctgctttgccgagaataacaggggaaaggcaaactccaccggaacattagtcatcacagatccaacaagaatcatcctggcacctataaacgcagacatcactgtgggagagaacgcaaccatgcagtgcgctgctagcttcgatcccgctcttgatctgacatttgtgtggtctttcaatggttatgttattgatttcaacaaagaaaacatccattaccagcgaaatttcatgcttgactcaaacggagagttactgatccgcaacgcccaactgaagcacgctggacgctatacgtgtaccgcccagaccattgtggataactcttcagcgagtgccgaccttgttgtccgcggaccacctggaccgccagggggactgcggatcgaggacatccgagctacctcggtggccttgacatggagcagaggaagcgacaatcatagcccaatctccaaatacaccatccaaactaaaaccatcttaagtgacgactggaaagatgctaaaacagacccacctattatagaagggaacatggaagcggctagggctgttgatctgattccctggatggagtacgagtttcgcgttgtcgctacaaatacactggggcgaggagagcccagcatcccttccaaccgaatcaaaacagatggagcagctcctaacgtggcgccaagcgacgtcggcggaggaggtggacggaaccgggagctcaccatcacatgggctcccttatcccgtgaataccactacggcaataattttgggtacatagtcgccttcaaaccttttgacggggaagagtggaaaaaggtgactgtgaccaatcccgacacaggaagatacgtgcacaaggatgaaaccatgtcccctagcactgcttttcaggtgaaggtgaaagcattcaacaacaaaggggatggcccatattcacttgtagcagtgataaactccgcccaggatgcccctagcgaggccccaacggaggtgggggtgaaagtgttaagctcctccgaaatttcggtacattgggagcatgttctggaaaaaatagtggaaagctatcagataaggtattgggcagcacatgacaaagaggaagccgcaaatcgtgtccaagtgacaagccaggaatattcagcccgtctcgagaatctcctacccgatacccagtattttatcgaagtaggcgcttgtaattcagctggatgcggacctccttcagatatgatagaggccttcacaaaaaaagcaccaccttcccaaccccctcgcatcatttctagtgtgcggagtggttctagatatattatcacctgggaccacgttgtagccctcagtaacgaaagcacagttacgggatataaggtgctatatcgtcctgacggacagcacgacggcaagctctatagcactcacaaacattcaatcgaggtgccaattcctagagacggagagtacgtggtcgaagtccgggctcactccgatggcggagacggagtggtctcacaggttaagatctccggagcgcctaccctgagcccaagcctattgggactgcttctgcccgcttttggcattctggtctaccttgaattttag

SEQ ID NO: 333554 - DNA, 3057 bp, Artificial Sequence
  derived and/or modified sequence
atgaaaatgtggctgcttgtcagccacctagttatcattagcatcacaacatgtctcgccgaatttacctggtacagacgctatgggcacggcgtcagcgaagaggataaggggttcggcccaattttcgaagagcagcccatcaatacgatttacccagaggaaagcctggaagggaaagtgtccctgaactgtcgcgcacgtgcatcgccttttccagtttacaagtggaggatgaataacggcgacgtcgacttgacatctgatcgctattccatggttggaggcaacctggttatcaacaaccccgataagcagaaggacgccggaatctactattgcctcgcatctaacaactacggcatggtcaggagtacggaggccacactgtcgttcggatacttggatcctttcccccctgaggaacgccctgaggtgagagtgaaagagggaaagggcatggtcctgctgtgcgaccctccataccatttccccgatgatctgtcttatcggtggctcctgaacgagttccccgtgttcatcacgatggataaaaggcggtttgtgtctcaaactaatggaaacttgtacattgcaaatgtggaggcctccgataaaggcaattatagctgttttgttagtagcccatccattacaaagagcgtgttctcgaagttcatacctctgatccccatccctgaacggaccactaagccttaccctgccgacatagtggtgcaattcaaagatgtgtatgcccttatggggcagaatgtgacattggaatgcttcgctctgggaaatccagtgcccgatattagatggaggaaagttctggagccgatgccctcaactgcagagatttcaacttccggagctgtgctgaagatcttcaacatccaacttgaagacgagggcatctacgagtgtgaggcggaaaatatccgtgggaaggataagcaccaagccagaatctacgttcaggcctttccagagtgggtcgagcacatcaatgatactgaagtcgacataggtagcgatctctattggccatgtgtggctaccggaaagcctatacccacgattaggtggctgaaaaatgggtacgcataccacaagggcgagttaaggttatacgacgttacttttgagaacgcaggaatgtaccagtgtattgccgagaacacatacggagccatctacgccaacgcagaattaaaaatcctggccctcgcccctacatttgaaatgaacccaatgaaaaagaagatcctggcggctaaaggaggcagagttatcatcgagtgtaaacctaaagcggcaccgaagcccaaattctcatggtcaaaaggtactgaatggttggtgaatagctcccggatcctgatctgggaggacggcagcctggagattaataatatcactaggaatgacggcggaatctacacttgctttgccgagaacaacagaggcaaagccaactctaccgggactctggttattactgatccgacaagaatcatcctggctcccatcaacgccgatatcactgtgggtgagaatgccacgatgcagtgcgcggcttccttcgaccctgccttggatcttacattcgtttggtcctttaacgggtatgtcatcgacttcaacaaagagaacattcactaccaaagaaatttcatgcttgactcaaacggtgaattactcattaggaatgcacagctgaagcacgctggtcgatatacttgtacagctcaaactattgtggacaactcgagcgcaagcgccgacctcgtggtgcgcggtccacctggcccacccggaggactacggatcgaagacattagagccactagtgtcgccctgacgtggtcgcggggaagcgacaaccattcccccatatccaaatacaccatccaaaccaagacaattctgagtgacgactggaaggacgccaagacagacccccctattatcgaggggaatatggaggccgcaagagctgtagacctgattccatggatggaatacgagttccgggttgtcgccacaaacaccctgggcagaggggagcctagcattccatccaaccgcattaagacagacggggctgcaccaaatgtggctcctagcgatgtggggggaggcggaggtcgtaaccgggagctcaccattacatgggccccactgtccagagaataccattacggaaataactttgggtacattgtagcttttaagccattcgacggcgaggagtggaagaaggtgacagtgacgaacccggacactggtaggtacgtacataaggacgaaactatgagcccaagcacagcatttcaggttaaggtgaaagccttcaataacaaaggcgatgggccttattccttggttgccgtcataaactcagctcaggatgcgccaagtgaagcccctaccgaggtgggcgtgaaggtcctgtcttccagcgagatctccgtccattgggagcacgtgctggagaaaatcgtcgaaagctaccaaatcaggtactgggccgctcatgataaagaagaggccgctaacagagtccaggtcacatcccaggagtacagtgctagactagagaatctgctgccagacacccagtatttcatagaggtcggggcttgtaacagcgcaggttgcggcccaccttcggatatgattgaggcctttaccaaaaaggcacctccctcccaaccccctcggatcataagctctgtacgcagtggttctcggtacatcatcacctgggaccatgtcgtggccctgagtaacgagtccacagtaacaggatataaagtgctctatcggccagatgggcagcatgatgggaaactgtattctacccacaaacacagcattgaggtccctatccccagggatggcgagtacgtggtcgaggtcagagcccattccgacggtggtgatggggtggtctctcaggttaagatctcaggcgcaccgacactttccccttctctcctgggactgctccttcctgcttttggcattctcgtctaccttgaattttag

SEQ ID NO: 333555 - DNA, 3393 bp, Artificial Sequence
  derived and/or modified sequence
caggtgtttaaaattatccaactgccatagagctaaattcttttttggaaaattgaaccgaacttctactgaatacaagatgaaaatgtggttgctggtcagtcatcttgtgataatatctattactacctgtttagcagagtttacatggtatagaagatatggtcatggagtttctgaggaagacaaaggatttggaccaatttttgaagagcagccaatcaataccatttatccagaggaatcactggaaggaaaagtctcactcaactgtagggcacgagccagccctttcccggtttacaaatggagaatgaataatggggacgttgatctcacaagtgatcgatacagtatggtaggaggaaaccttgttatcaacaaccctgacaaacagaaagatgctggaatatactactgtttagcatctaataactacgggatggtcagaagcactgaagcaaccctgagctttggatatcttgatcctttcccacctgaggaacgtcctgaggtcagagtaaaagaagggaaaggaatggtgcttctctgtgaccccccataccattttccagatgatcttagctatcgctggcttctaaatgaatttcctgtatttatcacaatggataaacggcgatttgtgtctcagacaaatggcaatctctacattgcaaatgttgaggcttccgacaaaggcaattattcctgctttgtttccagtccttctattacaaagagcgtgttcagcaaattcatcccactcattccaatacctgaacgaacaacaaaaccatatcctgctgatattgtagttcagttcaaggatgtatatgcattgatgggccaaaatgtgaccttagaatgttttgcacttggaaatcctgttccggatatccgatggcggaaggttctagaaccaatgccaagcactgctgagattagcacctctggggctgttcttaagatcttcaatattcagctagaagatgaaggcatctatgaatgtgaggctgagaacattagaggaaaggataaacatcaagcaagaatttatgttcaagcattccctgagtgggtagaacacatcaatgacacagaggtggacataggcagtgatctctactggccttgtgtggccacaggaaagcccatccctacaatccgatggttgaaaaatggatatgcgtatcataaaggggaattaagactgtatgatgtgacttttgaaaatgccggaatgtatcagtgcatagctgaaaacacatatggagccatttatgcaaatgctgagttgaagatcttggcgttggctccaacttttgaaatgaatcctatgaagaaaaagatcctggctgctaaaggtggaagggtgataattgaatgcaaacctaaagctgcaccgaaaccaaagttttcatggagtaaagggacagagtggcttgtcaatagcagcagaatactcatttgggaagatggtagcttggaaatcaacaacattacaaggaatgatggaggtatctatacatgctttgcagaaaataacagagggaaagctaatagcactggaacccttgttatcacagatcctacgcgaattatattggccccaattaatgccgatatcacagttggagaaaacgccaccatgcagtgtgctgcgtcctttgatcctgccttggatctcacatttgtttggtccttcaatggctatgtgatcgattttaacaaagagaatattcactaccagaggaattttatgctggattccaatggggaattactaatccgaaatgcgcagctgaaacatgctggaagatacacatgcactgcccagacaattgtggacaattcttcagcttcagctgaccttgtagtgagaggccctccaggccctccaggtggtctgagaatagaagacattagagccacttctgtggcacttacttggagccgtggttcagacaatcatagtcctatttctaaatacactatccagaccaagactattctttcagatgactggaaagatgcaaagacagatcccccaattattgaaggaaatatggaggcagcaagagcagtggacttaatcccatggatggagtatgaattccgcgtggtagcaaccaatacactgggtagaggagagcccagtataccatctaacagaattaaaacagacggtgctgcaccaaatgtggctccttcagatgtaggaggtggaggtggaagaaacagagagctgaccataacatgggcgcctttgtcaagagaataccactatggcaacaattttggttacatagtggcatttaagccatttgatggagaagaatggaaaaaagtcacagttactaatcctgatactggccgatatgtccataaagatgaaaccatgagcccttccactgcatttcaagttaaagtcaaggccttcaacaacaaaggagatggaccttacagcctagtagcagtcattaattcagcacaagacgctcccagtgaagccccaacagaagtaggtgtaaaagtcttatcatcttctgagatatctgttcattgggaacatgttttagaaaaaatagtggaaagctatcagattcggtattgggctgcccatgacaaagaagaagctgcaaacagagttcaagtcaccagccaagagtactcggccaggctcgagaaccttctgccagacacccagtattttatagaagtcggggcctgcaatagtgcagggtgtggacctccaagtgacatgattgaggctttcaccaagaaagcacctcctagccagcctccaaggatcatcagttcagtaaggtctggttcacgctatataatcacctgggatcatgtcgttgcactatcaaatgaatctacagtgacgggatataaggtactctacagacctgatggccagcatgatggcaagctgtattcaactcacaaacactccatagaagtcccaatccccagagatggagaatacgttgtggaggttcgcgcgcacagtgatggaggagatggagtggtgtctcaagtcaaaatttcaggtgcacccaccctatccccaagtcttctcggcttactgctgcctgcctttggcatccttgtctacttggaattctgaatgtgttgtgacagctgctgttcccatcccagctcagaagacacccttcaaccctgggatgaccacaattccttccaatttctgcggctccatcctaagccaaataaattatactttaacaaactattcaactgatttacaacacacatgatgactgaggcattcgggaaccccttcatccaaaagaataaacttttaaatggatataaatgatttttaactcgttccaatatgccttataaaccacttaacctgat

SEQ ID NO: 333556 - DNA, 5109 bp, Artificial Sequence
  derived and/or modified sequence
tccagctgtgccgcaccgaggcgagcaggagcagggaacaggtgtttaaaattatccaactgccatagagctaaattcttttttggaaaattgaaccgaacttctactgaatacaagatgaaaatgtggttgctggtcagtcatcttgtgataatatctattactacctgtttagcagagtttacatggtatagaagatatggtcatggagtttctgaggaagacaaaggatttggaccaatttttgaagagcagccaatcaataccatttatccagaggaatcactggaaggaaaagtctcactcaactgtagggcacgagccagccctttcccggtttacaaatggagaatgaataatggggacgttgatctcacaagtgatcgatacagtatggtaggaggaaaccttgttatcaacaaccctgacaaacagaaagatgctggaatatactactgtttagcatctaataactacgggatggtcagaagcactgaagcaaccctgagctttggatatcttgatcctttcccacctgaggaacgtcctgaggtcagagtaaaagaagggaaaggaatggtgcttctctgtgaccccccataccattttccagatgatcttagctatcgctggcttctaaatgaatttcctgtatttatcacaatggataaacggcgatttgtgtctcagacaaatggcaatctctacattgcaaatgttgaggcttccgacaaaggcaattattcctgctttgtttccagtccttctattacaaagagcgtgttcagcaaattcatcccactcattccaatacctgaacgaacaacaaaaccatatcctgctgatattgtagttcagttcaaggatgtatatgcattgatgggccaaaatgtgaccttagaatgttttgcacttggaaatcctgttccggatatccgatggcggaaggttctagaaccaatgccaagcactgctgagattagcacctctggggctgttcttaagatcttcaatattcagctagaagatgaaggcatctatgaatgtgaggctgagaacattagaggaaaggataaacatcaagcaagaatttatgttcaagcattccctgagtgggtagaacacatcaatgacacagaggtggacataggcagtgatctctactggccttgtgtggccacaggaaagcccatccctacaatccgatggttgaaaaatggatatgcgtatcataaaggggaattaagactgtatgatgtgacttttgaaaatgccggaatgtatcagtgcatagctgaaaacacatatggagccatttatgcaaatgctgagttgaagatcttggcgttggctccaacttttgaaatgaatcctatgaagaaaaagatcctggctgctaaaggtggaagggtgataattgaatgcaaacctaaagctgcaccgaaaccaaagttttcatggagtaaagggacagagtggcttgtcaatagcagcagaatactcatttgggaagatggtagcttggaaatcaacaacattacaaggaatgatggaggtatctatacatgctttgcagaaaataacagagggaaagctaatagcactggaacccttgttatcacagatcctacgcgaattatattggccccaattaatgccgatatcacagttggagaaaacgccaccatgcagtgtgctgcgtcctttgatcctgccttggatctcacatttgtttggtccttcaatggctatgtgatcgattttaacaaagagaatattcactaccagaggaattttatgctggattccaatggggaattactaatccgaaatgcgcagctgaaacatgctggaagatacacatgcactgcccagacaattgtggacaattcttcagcttcagctgaccttgtagtgagaggccctccaggccctccaggtggtctgagaatagaagacattagagccacttctgtggcacttacttggagccgtggttcagacaatcatagtcctatttctaaatacactatccagaccaagactattctttcagatgactggaaagatgcaaagacagatcccccaattattgaaggaaatatggaggcagcaagagcagtggacttaatcccatggatggagtatgaattccgcgtggtagcaaccaatacactgggtagaggagagcccagtataccatctaacagaattaaaacagacggtgctgcaccaaatgtggctccttcagatgtaggaggtggaggtggaagaaacagagagctgaccataacatgggcgcctttgtcaagagaataccactatggcaacaattttggttacatagtggcatttaagccatttgatggagaagaatggaaaaaagtcacagttactaatcctgatactggccgatatgtccataaagatgaaaccatgagcccttccactgcatttcaagttaaagtcaaggccttcaacaacaaaggagatggaccttacagcctagtagcagtcattaattcagcacaagacgctcccagtgaagccccaacagaagtaggtgtaaaagtcttatcatcttctgagatatctgttcattgggaacatgttttagaaaaaatagtggaaagctatcagattcggtattgggctgcccatgacaaagaagaagctgcaaacagagttcaagtcaccagccaagagtactcggccaggctcgagaaccttctgccagacacccagtattttatagaagtcggggcctgcaatagtgcagggtgtggacctccaagtgacatgattgaggctttcaccaagaaagcacctcctagccagcctccaaggatcatcagttcagtaaggtctggttcacgctatataatcacctgggatcatgtcgttgcactatcaaatgaatctacagtgacgggatataaggtactctacagacctgatggccagcatgatggcaagctgtattcaactcacaaacactccatagaagtcccaatccccagagatggagaatacgttgtggaggttcgcgcgcacagtgatggaggagatggagtggtgtctcaagtcaaaatttcaggtgcacccaccctatccccaagtcttctcggcttactgctgcctgcctttggcatccttgtctacttggaattctgaatgtgttgtgacagctgctgttcccatcccagctcagaagacacccttcaaccctgggatgaccacaattccttccaatttctgcggctccatcctaagccaaataaattatactttaacaaactattcaactgatttacaacacacatgatgactgaggcattcgggaaccccttcatccaaaagaataaacttttaaatggatataaatgatttttaactcgttccaatatgccttataaaccacttaacctgattctgtgacagttgcatgatttaacccaatgggacaagttacagtgttcaattcaatactataggctgtagagtgaaagtcaaatcaccatatacaggtgctttaaatttaataacaagttgtgaaatataatagagattgaaatgttggttgtatgtggtaaatgtaagagtaatacagtctcttgtactttcctcactgttttgggtactgcatattattgaatggcccctatcattcatgacatcttgagttttcttgaaaagacaatagagtgtaacaaatattttgtcagaaatcccattatcaaatcatgagttgaaagattttgactattgaaaaccaaattctagaacttactatcagtattcttattttcaaaggaaataattttctaaatatttgattttcagaatcagttttttaatagtaaagttaacataccatatagatttttttttacttttatattctactctgaagttattttatgcttttcttatcaatttcaaatctcaaaaatcacagctcttatctagagtatcataatattgctatatttgttcatatgtggagtgacaaattttgaaaagtagagtgcttccttttttattgagatgtgacagtctttacatggttaggaataagtgacagttaagtgaatatcacaattactagtatgttggtttttctgcttcattcctaagtattacgtttctttattgcagatgtcagatcaaaaagtcacctgtaggttgaaaaagctaccgtattccattttgtaaaaataacaataataataataataataattagttttaagctcatttcccacttcaatgcaatactgaaaactggctaaaaataccaaatcaatatactgctaatggtactttgaagagtatgcaaaactggaaggccaggaggaggcaaataatatgtctttccgatggtgtctcccaagtgttggtgctttgggtttttataagttgtgaaaaggaagatgcacatttcttcattctccatggtgtgcatggaaatgtgtttgagtgtggatgtaaaagaaatcgagtaataaagaattagctggcttgtgaaatagtgcagtgttggatgcttcaagaggtataatcctattttattagcacaaacttgctagctaattagagtttatctttttagaaaggacaccgtataggttcgtaaaaaatatttacaggaagcaaaatagatctattactactttaccgactttaccccctttctttaatttgtataatttttgtactatatatcgatgtgtaaatgtttagagtcttcattatgaaaatatcaataaatatttcattagtttacatttaactctggtataaaatgaaacttttaaaaataagtgaaatggatgatttcccagtggaagtatgtcaacagtcttaagatcattgccagatttcataaaatatttaagtatttgaaaaagaaacaaaatgtcttcatactttagggaaacgaataccctgtataccttctgtacaaatgtttgtgttttcattgttacactttggggttttacttttgcaatgtgacccatgttgggcatttttatataatcaacaactaaatcttttgccaaatgcatgcttgccttttattttctaatatatgataataacgagcaa

SEQ ID NO: 333557 - DNA, 3057 bp, Artificial Sequence
  derived and/or modified sequence
atgaagatgtggctgctggtgagccacctggtgatcatcagcatcaccacctgcctggccgagttcacctggtacagaagatacggccacggcgtgagcgaggaggacaagggcttcggccccatcttcgaggagcagcccatcaacaccatctaccccgaggagagcctggagggcaaggtgagcctgaactgcagagccagagccagccccttccccgtgtacaagtggagaatgaacaacggcgacgtggacctgaccagcgacagatacagcatggtgggcggcaacctggtgatcaacaaccccgacaagcagaaggacgccggcatctactactgcctggccagcaacaactacggcatggtgagaagcaccgaggccaccctgagcttcggctacctggaccccttcccccccgaggagagacccgaggtgagagtgaaggagggcaagggcatggtgctgctgtgcgaccccccctaccacttccccgacgacctgagctacagatggctgctgaacgagttccccgtgttcatcaccatggacaagagaagattcgtgagccagaccaacggcaacctgtacatcgccaacgtggaggccagcgacaagggcaactacagctgcttcgtgagcagccccagcatcaccaagagcgtgttcagcaagttcatccccctgatccccatccccgagagaaccaccaagccctaccccgccgacatcgtggtgcagttcaaggacgtgtacgccctgatgggccagaacgtgaccctggagtgcttcgccctgggcaaccccgtgcccgacatcagatggagaaaggtgctggagcccatgcccagcaccgccgagatcagcaccagcggcgccgtgctgaagatcttcaacatccagctggaggacgagggcatctacgagtgcgaggccgagaacatcagaggcaaggacaagcaccaggccagaatctacgtgcaggccttccccgagtgggtggagcacatcaacgacaccgaggtggacatcggcagcgacctgtactggccctgcgtggccaccggcaagcccatccccaccatcagatggctgaagaacggctacgcctaccacaagggcgagctgagactgtacgacgtgaccttcgagaacgccggcatgtaccagtgcatcgccgagaacacctacggcgccatctacgccaacgccgagctgaagatcctggccctggcccccaccttcgagatgaaccccatgaagaagaagatcctggccgccaagggcggcagagtgatcatcgagtgcaagcccaaggccgcccccaagcccaagttcagctggagcaagggcaccgagtggctggtgaacagcagcagaatcctgatctgggaggacggcagcctggagatcaacaacatcaccagaaacgacggcggcatctacacctgcttcgccgagaacaacagaggcaaggccaacagcaccggcaccctggtgatcaccgaccccaccagaatcatcctggcccccatcaacgccgacatcaccgtgggcgagaacgccaccatgcagtgcgccgccagcttcgaccccgccctggacctgaccttcgtgtggagcttcaacggctacgtgatcgacttcaacaaggagaacatccactaccagagaaacttcatgctggacagcaacggcgagctgctgatcagaaacgcccagctgaagcacgccggcagatacacctgcaccgcccagaccatcgtggacaacagcagcgccagcgccgacctggtggtgagaggcccccccggcccccccggcggcctgagaatcgaggacatcagagccaccagcgtggccctgacctggagcagaggcagcgacaaccacagccccatcagcaagtacaccatccagaccaagaccatcctgagcgacgactggaaggacgccaagaccgacccccccatcatcgagggcaacatggaggccgccagagccgtggacctgatcccctggatggagtacgagttcagagtggtggccaccaacaccctgggcagaggcgagcccagcatccccagcaacagaatcaagaccgacggcgccgcccccaacgtggcccccagcgacgtgggcggcggcggcggcagaaacagagagctgaccatcacctgggcccccctgagcagagagtaccactacggcaacaacttcggctacatcgtggccttcaagcccttcgacggcgaggagtggaagaaggtgaccgtgaccaaccccgacaccggcagatacgtgcacaaggacgagaccatgagccccagcaccgccttccaggtgaaggtgaaggccttcaacaacaagggcgacggcccctacagcctggtggccgtgatcaacagcgcccaggacgcccccagcgaggcccccaccgaggtgggcgtgaaggtgctgagcagcagcgagatcagcgtgcactgggagcacgtgctggagaagatcgtggagagctaccagatcagatactgggccgcccacgacaaggaggaggccgccaacagagtgcaggtgaccagccaggagtacagcgccagactggagaacctgctgcccgacacccagtacttcatcgaggtgggcgcctgcaacagcgccggctgcggcccccccagcgacatgatcgaggccttcaccaagaaggccccccccagccagccccccagaatcatcagcagcgtgagaagcggcagcagatacatcatcacctgggaccacgtggtggccctgagcaacgagagcaccgtgaccggctacaaggtgctgtacagacccgacggccagcacgacggcaagctgtacagcacccacaagcacagcatcgaggtgcccatccccagagacggcgagtacgtggtggaggtgagagcccacagcgacggcggcgacggcgtggtgagccaggtgaagatcagcggcgcccccaccctgagccccagcctgctgggcctgctgctgcccgccttcggcatcctggtgtacctggagttctag

SEQ ID NO: 333558 - DNA, 108 bp, Artificial Sequence
  derived and/or modified sequence
agccccaacaagctgctgttcgacccccgggtgggcggccgggtgtcccatgtctttttcctgtttcccccctttgtgctgctgcccggccccccaggtcttccctag

SEQ ID NO: 333559 - protein, 83 aa, Artificial Sequence
  derived and/or modified sequence
MAAATASPRSLLVLLQVVVLALAQIRGPPGERGPPGPPGPPGVPGSDGIDGPPGPVGLPGEIGIRGPKGDPGPDGPSGPPGPP

SEQ ID NO: 333560 - DNA, 399 bp, Artificial Sequence
  derived and/or modified sequence
atgactgagcaggagactcttgccctcctggaagtaaaacgcgatcctggtgtccgagcggaacccgtgatgttattctgcccttccgcgctgtggggcgctaccgcagggggcggcgacccgccagccatctgcggccccgttggaccagccctgtattccttgcttttgcaacccggccgcgcatttcacctgcccgcgccaggctaccctcaaacggcgccgtcagctcattggagcctgtgtagactccctgccgatctgctggctgacctctgcaggggtcctctcttgccacgtctcagacttaggcccgacgtcagtgcgaccgcagtggatgcagacgtagagccactcctccacgtccgtggtggcgcaggtgctcacgctcattgctag

SEQ ID NO: 333561 - DNA, 4257 bp, Artificial Sequence
  derived and/or modified sequence
atgatcagactgggcgccccccagaccctggtgctgctgaccctgctggtggccgccgtgctgagatgccagggccaggacgtgagacagcccggccccaagggccagaagggcgagcccggcgacatcaaggacatcgtgggccccaagggcccccccggcccccagggccccgccggcgagcagggccccagaggcgacagaggcgacaagggcgagaagggcgcccccggccccagaggcagagacggcgagcccggcacccccggcaaccccggcccccccggcccccccggcccccccggcccccccggcctgggcggcaacttcgccgcccagatggccggcggcttcgacgagaaggccggcggcgcccagctgggcgtgatgcagggccccatgggccccatgggccccagaggcccccccggccccgccggcgcccccggcccccagggcttccagggcaaccccggcgagcccggcgagcccggcgtgagcggccccatgggccccagaggcccccccggcccccccggcaagcccggcgacgacggcgaggccggcaagcccggcaaggccggcgagagaggcccccccggcccccagggcgccagaggcttccccggcacccccggcctgcccggcgtgaagggccacagaggctaccccggcctggacggcgccaagggcgaggccggcgcccccggcgtgaagggcgagagcggcagccccggcgagaacggcagccccggccccatgggccccagaggcctgcccggcgagagaggcagaaccggccccgccggcgccgccggcgccagaggcaacgacggccagcccggccccgccggcccccccggccccgtgggccccgccggcggccccggcttccccggcgcccccggcgccaagggcgaggccggccccaccggcgccagaggccccgagggcgcccagggccccagaggcgagcccggcacccccggcagccccggccccgccggcgccagcggcaaccccggcaccgacggcatccccggcgccaagggcagcgccggcgcccccggcatcgccggcgcccccggcttccccggccccagaggcccccccggcccccagggcgccaccggccccctgggccccaagggccagaccggcgagcccggcatcgccggcttcaagggcgagcagggccccaagggcgagcccggccccgccggcccccagggcgcccccggccccgccggcgaggagggcaagagaggcgccagaggcgagcccggcggcgtgggccccatcggcccccccggcgagagaggcgcccccggcaacagaggcttccccggccaggacggcctggccggccccaagggcgcccccggcgagagaggccccagcggcctggccggccccaagggcgccaacggcgaccccggcagacccggcgagcccggcctgcccggcgccagaggcctgaccggcagacccggcgacgccggcccccagggcaaggtgggccccagcggcgcccccggcgaggacggcagacccggcccccccggcccccagggcgccagaggccagcccggcgtgatgggcttccccggccccaagggcgccaacggcgagcccggcaaggccggcgagaagggcctgcccggcgcccccggcctgagaggcctgcccggcaaggacggcgagaccggcgccgccggcccccccggccccgccggccccgccggcgagagaggcgagcagggcgcccccggccccagcggcttccagggcctgcccggcccccccggcccccccggcgagggcggcaagcccggcgaccagggcgtgcccggcgaggccggcgcccccggcctggtgggccccagaggcgagagaggcttccccggcgagagaggcagccccggcgcccagggcctgcagggccccagaggcctgcccggcacccccggcaccgacggccccaagggcgccagcggccccgccggcccccccggcgcccagggcccccccggcctgcagggcatgcccggcgagagaggcgccgccggcatcgccggccccaagggcgacagaggcgacgtgggcgagaagggccccgagggcgcccccggcaaggacggcggcagaggcctgaccggccccatcggcccccccggccccgccggcgccaacggcgagaagggcgaggtgggcccccccggccccgccggcagcgccggcgccagaggcgcccccggcgagagaggcgagaccggcccccccggccccgccggcttcgccggcccccccggcgccgacggccagcccggcgccaagggcgagcagggcgaggccggccagaagggcgacgccggcgcccccggcccccagggccccagcggcgcccccggcccccagggccccaccggcgtgaccggccccaagggcgccagaggcgcccagggcccccccggcgccaccggcttccccggcgccgccggcagagtgggcccccccggcagcaacggcaaccccggcccccccggcccccccggccccagcggcaaggacggccccaagggcgccagaggcgacagcggcccccccggcagagccggcgagcccggcctgcagggccccgccggcccccccggcgagaagggcgagcccggcgacgacggccccagcggcgccgagggcccccccggcccccagggcctggccggccagagaggcatcgtgggcctgcccggccagagaggcgagagaggcttccccggcctgcccggccccagcggcgagcccggcaagcagggcgcccccggcgccagcggcgacagaggcccccccggccccgtgggcccccccggcctgaccggccccgccggcgagcccggcagagagggcagccccggcgccgacggcccccccggcagagacggcgccgccggcgtgaagggcgacagaggcgagaccggcgccgtgggcgcccccggcgcccccggcccccccggcagccccggccccgccggccccaccggcaagcagggcgacagaggcgaggccggcgcccagggccccatgggccccagcggccccgccggcgccagaggcatccagggcccccagggccccagaggcgacaagggcgaggccggcgagcccggcgagagaggcctgaagggccacagaggcttcaccggcctgcagggcctgcccggcccccccggccccagcggcgaccagggcgccagcggccccgccggccccagcggccccagaggcccccccggccccgtgggccccagcggcaaggacggcgccaacggcatccccggccccatcggcccccccggccccagaggcagaagcggcgagaccggccccgccggcccccccggcaaccccggcccccccggcccccccggcccccccggccccggcatcgacatgagcgccttcgccggcctgggccccagagagaagggccccgaccccctgcagtacatgagagccgaccaggccgccggcggcctgagacagcacgacgccgaggtggacgccaccctgaagagcctgaacaaccagatcgagagcatcagaagccccgagggcagcagaaagaaccccgccagaacctgcagagacctgaagctgtgccaccccgagtggaagagcggcgactactggatcgaccccaaccagggctgcaccctggacgccatgaaggtgttctgcaacatggagaccggcgagacctgcgtgtaccccaaccccgccaacgtgcccaagaagaactggtggagcagcaagagcaaggagaagaagcacatctggttcggcgagaccatcaacggcggcttccacttcagctacggcgacgacaacctggcccccaacaccgccaacgtgcagatgaccttcctgagactgctgagcaccgagggcagccagaacatcacctaccactgcaagaacagcatcgcctacctggacgaggccgccggcaacctgaagaaggccctgctgatccagggcagcaacgacgtggagatcagagccgagggcaacagcagattcacctacaccgccctgaaggacggctgcaccaagcacaccggcaagtggggcaagaccgtgatcgagtacagaagccagaagaccagcagactgcccatcatcgacatcgcccccatggacatcggcggccccgagcaggagttcggcgtggacatcggccccgtgtgcttcctgtag

SEQ ID NO: 333562 - DNA, 4464 bp, Artificial Sequence
  derived and/or modified sequence
atgatcagactgggcgccccccagaccctggtgctgctgaccctgctggtggccgccgtgctgagatgccagggccaggacgtgcaggaggccggcagctgcgtgcaggacggccagagatacaacgacaaggacgtgtggaagcccgagccctgcagaatctgcgtgtgcgacaccggcaccgtgctgtgcgacgacatcatctgcgaggacgtgaaggactgcctgagccccgagatccccttcggcgagtgctgccccatctgccccaccgacctggccaccgccagcggccagcccggccccaagggccagaagggcgagcccggcgacatcaaggacatcgtgggccccaagggcccccccggcccccagggccccgccggcgagcagggccccagaggcgacagaggcgacaagggcgagaagggcgcccccggccccagaggcagagacggcgagcccggcacccccggcaaccccggcccccccggcccccccggcccccccggcccccccggcctgggcggcaacttcgccgcccagatggccggcggcttcgacgagaaggccggcggcgcccagctgggcgtgatgcagggccccatgggccccatgggccccagaggcccccccggccccgccggcgcccccggcccccagggcttccagggcaaccccggcgagcccggcgagcccggcgtgagcggccccatgggccccagaggcccccccggcccccccggcaagcccggcgacgacggcgaggccggcaagcccggcaaggccggcgagagaggcccccccggcccccagggcgccagaggcttccccggcacccccggcctgcccggcgtgaagggccacagaggctaccccggcctggacggcgccaagggcgaggccggcgcccccggcgtgaagggcgagagcggcagccccggcgagaacggcagccccggccccatgggccccagaggcctgcccggcgagagaggcagaaccggccccgccggcgccgccggcgccagaggcaacgacggccagcccggccccgccggcccccccggccccgtgggccccgccggcggccccggcttccccggcgcccccggcgccaagggcgaggccggccccaccggcgccagaggccccgagggcgcccagggccccagaggcgagcccggcacccccggcagccccggccccgccggcgccagcggcaaccccggcaccgacggcatccccggcgccaagggcagcgccggcgcccccggcatcgccggcgcccccggcttccccggccccagaggcccccccggcccccagggcgccaccggccccctgggccccaagggccagaccggcgagcccggcatcgccggcttcaagggcgagcagggccccaagggcgagcccggccccgccggcccccagggcgcccccggccccgccggcgaggagggcaagagaggcgccagaggcgagcccggcggcgtgggccccatcggcccccccggcgagagaggcgcccccggcaacagaggcttccccggccaggacggcctggccggccccaagggcgcccccggcgagagaggccccagcggcctggccggccccaagggcgccaacggcgaccccggcagacccggcgagcccggcctgcccggcgccagaggcctgaccggcagacccggcgacgccggcccccagggcaaggtgggccccagcggcgcccccggcgaggacggcagacccggcccccccggcccccagggcgccagaggccagcccggcgtgatgggcttccccggccccaagggcgccaacggcgagcccggcaaggccggcgagaagggcctgcccggcgcccccggcctgagaggcctgcccggcaaggacggcgagaccggcgccgccggcccccccggccccgccggccccgccggcgagagaggcgagcagggcgcccccggccccagcggcttccagggcctgcccggcccccccggcccccccggcgagggcggcaagcccggcgaccagggcgtgcccggcgaggccggcgcccccggcctggtgggccccagaggcgagagaggcttccccggcgagagaggcagccccggcgcccagggcctgcagggccccagaggcctgcccggcacccccggcaccgacggccccaagggcgccagcggccccgccggcccccccggcgcccagggcccccccggcctgcagggcatgcccggcgagagaggcgccgccggcatcgccggccccaagggcgacagaggcgacgtgggcgagaagggccccgagggcgcccccggcaaggacggcggcagaggcctgaccggccccatcggcccccccggccccgccggcgccaacggcgagaagggcgaggtgggcccccccggccccgccggcagcgccggcgccagaggcgcccccggcgagagaggcgagaccggcccccccggccccgccggcttcgccggcccccccggcgccgacggccagcccggcgccaagggcgagcagggcgaggccggccagaagggcgacgccggcgcccccggcccccagggccccagcggcgcccccggcccccagggccccaccggcgtgaccggccccaagggcgccagaggcgcccagggcccccccggcgccaccggcttccccggcgccgccggcagagtgggcccccccggcagcaacggcaaccccggcccccccggcccccccggccccagcggcaaggacggccccaagggcgccagaggcgacagcggcccccccggcagagccggcgagcccggcctgcagggccccgccggcccccccggcgagaagggcgagcccggcgacgacggccccagcggcgccgagggcccccccggcccccagggcctggccggccagagaggcatcgtgggcctgcccggccagagaggcgagagaggcttccccggcctgcccggccccagcggcgagcccggcaagcagggcgcccccggcgccagcggcgacagaggcccccccggccccgtgggcccccccggcctgaccggccccgccggcgagcccggcagagagggcagccccggcgccgacggcccccccggcagagacggcgccgccggcgtgaagggcgacagaggcgagaccggcgccgtgggcgcccccggcgcccccggcccccccggcagccccggccccgccggccccaccggcaagcagggcgacagaggcgaggccggcgcccagggccccatgggccccagcggccccgccggcgccagaggcatccagggcccccagggccccagaggcgacaagggcgaggccggcgagcccggcgagagaggcctgaagggccacagaggcttcaccggcctgcagggcctgcccggcccccccggccccagcggcgaccagggcgccagcggccccgccggccccagcggccccagaggcccccccggccccgtgggccccagcggcaaggacggcgccaacggcatccccggccccatcggcccccccggccccagaggcagaagcggcgagaccggccccgccggcccccccggcaaccccggcccccccggcccccccggcccccccggccccggcatcgacatgagcgccttcgccggcctgggccccagagagaagggccccgaccccctgcagtacatgagagccgaccaggccgccggcggcctgagacagcacgacgccgaggtggacgccaccctgaagagcctgaacaaccagatcgagagcatcagaagccccgagggcagcagaaagaaccccgccagaacctgcagagacctgaagctgtgccaccccgagtggaagagcggcgactactggatcgaccccaaccagggctgcaccctggacgccatgaaggtgttctgcaacatggagaccggcgagacctgcgtgtaccccaaccccgccaacgtgcccaagaagaactggtggagcagcaagagcaaggagaagaagcacatctggttcggcgagaccatcaacggcggcttccacttcagctacggcgacgacaacctggcccccaacaccgccaacgtgcagatgaccttcctgagactgctgagcaccgagggcagccagaacatcacctaccactgcaagaacagcatcgcctacctggacgaggccgccggcaacctgaagaaggccctgctgatccagggcagcaacgacgtggagatcagagccgagggcaacagcagattcacctacaccgccctgaaggacggctgcaccaagcacaccggcaagtggggcaagaccgtgatcgagtacagaagccagaagaccagcagactgcccatcatcgacatcgcccccatggacatcggcggccccgagcaggagttcggcgtggacatcggccccgtgtgcttcctgtag

SEQ ID NO: 333563 - DNA, 4257 bp, Artificial Sequence
  derived and/or modified sequence
atgatcagactgggcgccccccagaccctggtgctgctgaccctgctggtggccgccgtgctgagatgccagggccaggacgtgagaaagcccgcccccgccctggagcccgccgcccccggcagcctgagccagatcgtgggccccaagggcccccccggcccccagggccccgccggcgagcagggccccagaggcgacagaggcgacaagggcgagaagggcgcccccggccccagaggcagagacggcgagcccggcacccccggcaaccccggcccccccggcccccccggcccccccggcccccccggcctgggcggcaacttcgccgcccagatggccggcggcttcgacgagaaggccggcggcgcccagctgggcgtgatgcagggccccatgggccccatgggccccagaggcccccccggccccgccggcgcccccggcccccagggcttccagggcaaccccggcgagcccggcgagcccggcgtgagcggccccatgggccccagaggcccccccggcccccccggcaagcccggcgacgacggcgaggccggcaagcccggcaaggccggcgagagaggcccccccggcccccagggcgccagaggcttccccggcacccccggcctgcccggcgtgaagggccacagaggctaccccggcctggacggcgccaagggcgaggccggcgcccccggcgtgaagggcgagagcggcagccccggcgagaacggcagccccggccccatgggccccagaggcctgcccggcgagagaggcagaaccggccccgccggcgccgccggcgccagaggcaacgacggccagcccggccccgccggcccccccggccccgtgggccccgccggcggccccggcttccccggcgcccccggcgccaagggcgaggccggccccaccggcgccagaggccccgagggcgcccagggccccagaggcgagcccggcacccccggcagccccggccccgccggcgccagcggcaaccccggcaccgacggcatccccggcgccaagggcagcgccggcgcccccggcatcgccggcgcccccggcttccccggccccagaggcccccccggcccccagggcgccaccggccccctgggccccaagggccagaccggcgagcccggcatcgccggcttcaagggcgagcagggccccaagggcgagcccggccccgccggcccccagggcgcccccggccccgccggcgaggagggcaagagaggcgccagaggcgagcccggcggcgtgggccccatcggcccccccggcgagagaggcgcccccggcaacagaggcttccccggccaggacggcctggccggccccaagggcgcccccggcgagagaggccccagcggcctggccggccccaagggcgccaacggcgaccccggcagacccggcgagcccggcctgcccggcgccagaggcctgaccggcagacccggcgacgccggcccccagggcaaggtgggccccagcggcgcccccggcgaggacggcagacccggcccccccggcccccagggcgccagaggccagcccggcgtgatgggcttccccggccccaagggcgccaacggcgagcccggcaaggccggcgagaagggcctgcccggcgcccccggcctgagaggcctgcccggcaaggacggcgagaccggcgccgccggcccccccggccccgccggccccgccggcgagagaggcgagcagggcgcccccggccccagcggcttccagggcctgcccggcccccccggcccccccggcgagggcggcaagcccggcgaccagggcgtgcccggcgaggccggcgcccccggcctggtgggccccagaggcgagagaggcttccccggcgagagaggcagccccggcgcccagggcctgcagggccccagaggcctgcccggcacccccggcaccgacggccccaagggcgccagcggccccgccggcccccccggcgcccagggcccccccggcctgcagggcatgcccggcgagagaggcgccgccggcatcgccggccccaagggcgacagaggcgacgtgggcgagaagggccccgagggcgcccccggcaaggacggcggcagaggcctgaccggccccatcggcccccccggccccgccggcgccaacggcgagaagggcgaggtgggcccccccggccccgccggcagcgccggcgccagaggcgcccccggcgagagaggcgagaccggcccccccggccccgccggcttcgccggcccccccggcgccgacggccagcccggcgccaagggcgagcagggcgaggccggccagaagggcgacgccggcgcccccggcccccagggccccagcggcgcccccggcccccagggccccaccggcgtgaccggccccaagggcgccagaggcgcccagggcccccccggcgccaccggcttccccggcgccgccggcagagtgggcccccccggcagcaacggcaaccccggcccccccggcccccccggccccagcggcaaggacggccccaagggcgccagaggcgacagcggcccccccggcagagccggcgagcccggcctgcagggccccgccggcccccccggcgagaagggcgagcccggcgacgacggccccagcggcgccgagggcccccccggcccccagggcctggccggccagagaggcatcgtgggcctgcccggccagagaggcgagagaggcttccccggcctgcccggccccagcggcgagcccggcaagcagggcgcccccggcgccagcggcgacagaggcccccccggccccgtgggcccccccggcctgaccggccccgccggcgagcccggcagagagggcagccccggcgccgacggcccccccggcagagacggcgccgccggcgtgaagggcgacagaggcgagaccggcgccgtgggcgcccccggcgcccccggcccccccggcagccccggccccgccggccccaccggcaagcagggcgacagaggcgaggccggcgcccagggccccatgggccccagcggccccgccggcgccagaggcatccagggcccccagggccccagaggcgacaagggcgaggccggcgagcccggcgagagaggcctgaagggccacagaggcttcaccggcctgcagggcctgcccggcccccccggccccagcggcgaccagggcgccagcggccccgccggccccagcggccccagaggcccccccggccccgtgggccccagcggcaaggacggcgccaacggcatccccggccccatcggcccccccggccccagaggcagaagcggcgagaccggccccgccggcccccccggcaaccccggcccccccggcccccccggcccccccggccccggcatcgacatgagcgccttcgccggcctgggccccagagagaagggccccgaccccctgcagtacatgagagccgaccaggccgccggcggcctgagacagcacgacgccgaggtggacgccaccctgaagagcctgaacaaccagatcgagagcatcagaagccccgagggcagcagaaagaaccccgccagaacctgcagagacctgaagctgtgccaccccgagtggaagagcggcgactactggatcgaccccaaccagggctgcaccctggacgccatgaaggtgttctgcaacatggagaccggcgagacctgcgtgtaccccaaccccgccaacgtgcccaagaagaactggtggagcagcaagagcaaggagaagaagcacatctggttcggcgagaccatcaacggcggcttccacttcagctacggcgacgacaacctggcccccaacaccgccaacgtgcagatgaccttcctgagactgctgagcaccgagggcagccagaacatcacctaccactgcaagaacagcatcgcctacctggacgaggccgccggcaacctgaagaaggccctgctgatccagggcagcaacgacgtggagatcagagccgagggcaacagcagattcacctacaccgccctgaaggacggctgcaccaagcacaccggcaagtggggcaagaccgtgatcgagtacagaagccagaagaccagcagactgcccatcatcgacatcgcccccatggacatcggcggccccgagcaggagttcggcgtggacatcggccccgtgtgcttcctgtag

SEQ ID NO: 333564 - DNA, 4257 bp, Artificial Sequence
  derived and/or modified sequence
atgatcaggttgggagcgccacaaacactggtcctgctgaccctactggtagccgctgtcctcagatgccagggacaggacgtcaggcagccaggacccaaaggccaaaaaggcgagccaggggacatcaaagatattgtggggcccaaaggaccccccggtccgcaggggcctgctggcgaacagggtccgagaggtgacaggggagacaagggggaaaaaggcgccccaggtccacgcggcagggacggcgagcccggtacacccgggaaccctgggcctccaggcccgccaggcccgcccgggcccccagggttaggaggcaacttcgccgcccagatggctgggggttttgatgagaaagcaggaggtgcccagctcggcgtgatgcaggggcctatgggaccaatgggaccacggggaccaccgggaccggctggcgcaccaggtcctcagggattccaggggaatccaggggagccgggggaacctggagtctctggtccaatgggacctcgtggcccaccgggaccccctggcaagccaggcgacgatggtgaggccggaaaaccaggaaaggccggcgaaagggggcctccagggccccaaggggctcggggtttccctggaacccccgggctgccaggagttaagggacaccgcgggtatcccgggctggatggagctaagggcgaagcaggagccccaggggtgaaaggggaaagtggcagtcctggtgaaaatgggagcccaggccctatggggcctcgcggcctgcctggagagaggggtcggacaggcccagccggcgccgcgggagcccgggggaacgacgggcagcccggacccgcaggccccccaggtccagtgggtcctgcaggaggaccggggttccctggagccccaggagctaagggggaagctggaccgaccggagccagagggcctgagggcgcacagggacccaggggagagccagggacccctggcagcccagggcccgctggagcctcaggaaatcccggtacagacggtattccaggcgccaaagggtctgctggggcaccgggcatcgccggtgcaccaggtttcccaggacctcgaggccccccgggtcctcaaggggctaccggcccgctggggcccaaaggacagaccggagagccgggaatagctggcttcaagggcgagcagggccctaaaggcgagcccggtccagcaggtcctcagggagcgcctgggcctgctggcgaagaaggaaagcgtggagctaggggggaacctggtggggtgggccccatcggacctcctggcgaacgaggtgcgcctgggaaccgcggattccccggtcaggatggactagcagggcctaaaggcgcacccggagaacgaggtccatctggactagccgggccgaaaggcgccaatggcgaccctggtagacctggtgagcctggtctgccaggagctaggggactgactggacggcccggggacgccgggccacagggaaaagttggtccatcaggcgcaccaggcgaagacggcagacctggcccaccgggtccccagggtgctcgcgggcaacccggggtgatgggcttccctgggcccaagggcgctaacggggagcccggaaaagcaggagagaagggtctgcctggagcgcctggactacgtggtttgccaggaaaggacggcgaaacaggagccgctgggcctccaggccccgcaggcccagccggggagcgaggtgagcagggcgcccccgggcccagtggcttccaaggccttccagggccaccagggcctccgggggaggggggcaaaccaggcgaccagggagtgcccggcgaggccggtgctcccggcctggtggggccgcggggggaaagaggctttcctggggagagaggcagtcccggtgcccagggactacagggcccccgagggctgcctgggacgccaggaaccgacggaccaaagggggctagcggtcccgccggaccacctggagctcagggccctccaggcctgcaaggaatgcctggagagagaggggctgctgggattgccgggcctaaaggcgaccgcggggatgtgggcgagaagggacccgagggagccccaggaaaggatggcggcaggggcttgacaggccccatcggaccccctgggcccgccggcgccaacggagaaaagggcgaggtagggcccccggggcctgccggttctgccggtgcacgcggcgcccccggagagcgcggtgaaactggtcccccaggtccggctggctttgccggcccccccggagctgatggccagcctggggccaaaggcgaacagggggaggctggccagaaaggtgacgcaggagcgcccgggccccaggggccatccggagcaccaggcccacagggacccaccggggttaccggccccaaaggggcccgcggcgcacagggacctcccggagcgactggctttccgggggccgccgggagggttggtccgccgggctcgaacggcaaccctggcccacctggtcctcccggccctagcggcaaagacggtccgaagggggcgagaggtgacagtggcccccctggaagggccggcgagcctggccttcaaggcccagccggcccccccggggagaagggcgagcccggcgatgatggcccaagtggggcagagggccctcccgggccccagggcctcgctgggcagagagggatcgtaggactgccagggcagcgcggtgagagaggattcccaggcctgcccggaccttcaggggaacccggcaaacaaggcgcgccgggggccagcggtgatcggggccccccaggcccagtcggaccaccaggcctgaccgggcctgccggcgagccaggtagagagggatcaccaggagccgacgggccccccggccgggacggtgcagctggcgttaaaggagaccgcggcgagactggggccgtgggggcacccggcgccccgggccccccagggtcacctggacctgcgggcccgacgggaaaacaaggcgaccgcggagaagctggcgctcagggccctatggggccaagtggccctgccggggctaggggcatacagggacctcagggtccacgcggcgataagggcgaggccggggagcccggcgaacggggcctaaaggggcatcgcggcttcaccgggcttcagggcttacctggtccaccgggcccaagcggcgaccagggggcaagcggccccgctggtccctccggaccacgggggcccccagggcccgtaggcccaagcggcaaagatggtgcgaatggaattcccggccccattggaccccctggtccgagaggtcgctccggggaaactggccccgccggaccccccggcaaccctggaccgccaggccctccaggtccccccggcccggggattgatatgtcagccttcgccggccttgggccccgcgagaaaggccccgatccgctgcaatatatgagagcagaccaggctgctggaggcttacgccagcatgacgccgaggtggacgcaacgttaaagtccttaaataatcagatagaaagcatccggagcccagagggcagtaggaagaaccccgcaaggacttgtcgcgacttgaagttgtgccatcccgagtggaaatctggggattactggatcgatcccaatcagggatgcaccctcgatgccatgaaagtgttctgcaatatggagactggagagacctgcgtctaccctaatccagccaatgttccaaaaaagaactggtggtcctccaaaagcaaagagaagaaacacatatggtttggcgagaccattaacgggggctttcacttttcatatggcgatgacaacctggctcccaatactgcaaatgttcagatgacatttttaagactgctctcaactgagggctcccagaatatcacctaccactgtaaaaacagtatcgcctatctggacgaggccgccggcaacctgaagaaggccctcctgatccaggggtcaaacgatgtggagattagggccgaaggaaacagcaggttcacatacaccgcacttaaagacggttgtacaaagcacaccgggaagtggggtaaaaccgtcattgaatatagatcccagaagaccagccgcctgcccataatagatattgccccaatggatatcggcgggcctgaacaggaattcggcgttgacattggacctgtgtgcttcctgtag

SEQ ID NO: 333565 - DNA, 4464 bp, Artificial Sequence
  derived and/or modified sequence
atgattagactgggcgcccctcagacattggttctgttgacattactggtcgccgcggtgctgcgctgtcagggacaggacgttcaggaagccggctcctgcgtccaggacggccaaaggtacaacgataaagatgtgtggaagccagagccctgcagaatttgcgtgtgtgataccgggacagtgctgtgcgacgacatcatctgtgaagatgtgaaagactgcctgtccccggagattccctttggggaatgctgtccaatctgccccactgacctggcaacagcttcagggcagcctggccctaaggggcagaaaggagaaccaggtgatatcaaggacatcgttggcccaaaggggccccctggaccccaggggccagccggggaacagggcccaaggggcgatcggggggacaaaggcgaaaagggggctcccgggcccagggggcgagacggtgagccgggcactccggggaatcccggacccccaggaccacctggcccacctgggcccccagggctgggcggcaattttgcagcccaaatggctggaggttttgatgaaaaggccggaggagcacagctgggggtcatgcaggggccaatgggacctatgggccctagagggccgccaggcccagccggagctccgggtccacagggtttccagggaaatcctggtgagcctggcgagcccggcgtcagtggtccaatgggcccgaggggccctccaggaccaccaggaaaacctggagatgatggagaggcaggtaagccagggaaagctggggagcggggccctcctggcccacagggcgccagaggatttcccggcacccctggcctgccaggggtaaagggccaccggggttatcctggcttggatggcgctaagggtgaggccggcgctcccggcgtaaaaggagagagtggctccccaggcgagaacggttcaccaggacccatgggtccaagaggactgccgggggagagagggcggactggtcctgccggcgccgcaggtgccagagggaatgatggacaaccaggccctgcaggtccaccaggacccgtgggccctgccggcggtccaggctttcctggggcccccggggccaagggcgaagctggtccaactggcgcccgtgggcctgagggcgcccagggccccaggggagagccaggaacaccgggaagtccagggcccgccggagcgtcaggtaatcctgggaccgacgggataccaggagcaaaggggagcgccggcgcaccaggaatcgccggagctcctgggttccctggaccacgcggcccgccgggaccacaaggtgctacaggcccactggggccgaaggggcagacaggcgagcccggcatcgccggattcaagggggaacagggacccaagggtgaacccggtcctgccggccctcagggcgcccccgggccggccggtgaggagggaaagcgcggggcccgcggagagcccggcggggtgggccccatcggaccaccaggagaaaggggagcccccggcaaccgcggcttcccagggcaggacgggttagccggaccgaaaggagctcctggagagagggggccttctggcctcgcaggcccgaagggcgccaatggggatccagggcggccaggtgaacccggcctcccaggtgccaggggtctaactggccgacccggagacgctggcccccaggggaaagtcggcccttctggcgctccaggagaagacggccggcccgggccacctgggccccaaggggcccgtggccagccgggagtgatgggctttccagggccaaaaggggcaaacggcgaacccggtaaggctggcgagaagggcttaccaggcgcacctggattgcgcggcttacctgggaaggatggcgagacgggcgccgcaggccctccaggacccgctggtccagctggcgagagaggcgagcagggggctcccgggcccagcggcttccaagggctgccaggcccacctgggcccccaggcgaagggggcaagcccggagaccagggcgtacctggcgaggcgggggcacccggcttagtgggcccacggggcgagagaggatttcccggggagcggggctctcccggtgcacagggcctccaggggcccaggggactgcccgggacacccggtaccgacggtcccaagggtgcctccggtccggctggcccaccaggagcccaaggccctcctggactccaaggcatgccaggggaaaggggtgccgcgggcatagcaggtccaaagggtgaccgcggagacgtgggagagaagggccccgaaggcgcaccaggtaaggatggtggcagaggacttacaggtcccatcgggccacctggtcccgcaggagcgaacggggagaaaggtgaggtggggccgcctggtcctgctgggagcgcaggagctcggggtgcccccggtgagcggggcgagaccggccctcctggtccagcagggttcgctgggcctccaggagctgacggccagccaggcgcgaaaggcgagcagggggaggcaggccagaagggggacgcaggcgctcccggcccgcagggcccaagtggcgccccaggtccacagggccctaccggcgtgacaggccctaaaggggccagaggggctcagggcccccctggggcaactggattccccggagcagcgggccgcgtaggtccgcctggaagtaacggcaatcctggcccccctggaccaccggggccatcgggaaaagatggaccaaagggggctcgtggagatagtggacctccgggccgtgccggcgagccaggccttcaaggcccagccgggccaccgggagagaagggggagccaggagacgacggcccttcaggtgcggaaggcccacccggaccgcagggcctcgcagggcagcgggggatcgtaggtctaccaggtcagcgaggtgagaggggttttcccggactgccaggtcctagtggagagcctgggaagcagggtgcaccaggcgcttcaggcgatcggggaccgccaggacccgttggaccccctggcctgacgggtcccgcgggcgagccggggcgcgaaggctcaccaggagctgacgggccccctggcagggatggagctgccggagtgaagggggacaggggcgaaacgggagccgtgggcgcaccaggcgcccctgggcccccaggctctccaggacctgccgggccgaccggaaagcaaggcgaccgcggagaggccggcgcgcagggccccatgggaccttcaggccctgccggggcccgcggcatccagggacctcagggccccaggggtgacaaaggagaggcgggcgaacccggtgagagaggactgaagggacataggggattcacaggcctccaggggctgcctggaccaccagggccctctggggatcagggcgcatctggcccagccggaccatccggcccccggggtccaccaggccctgttggcccttcaggtaaagatggggctaatggtatacctggccccatcggcccccctgggcccaggggccggtcaggggagactggtccggctgggccccctggtaaccctgggccacccggcccacccggaccgcctggaccaggaattgacatgagtgcgtttgctggcctgggtccccgcgaaaaaggacccgaccctctccagtacatgcgagcagatcaggccgccggtggcctgaggcagcacgatgctgaagttgacgccaccttgaagtctttgaataatcaaattgagagcatacggagccccgaagggagccggaagaatccagcacgcacctgtagagacttaaaattgtgccatccagaatggaaaagtggagactactggatcgaccccaaccagggctgtaccctcgatgccatgaaggttttctgtaatatggagacgggagaaacttgcgtctaccctaatccagccaatgtccccaaaaagaactggtggtccagcaaatcaaaggagaaaaagcatatctggtttggggagactatcaacggtggcttccacttctcttacggggacgacaacctagcacccaacaccgccaacgtgcaaatgacctttttgaggctcctgtctactgaggggagtcagaatataacgtaccactgtaagaacagtatcgcctacctggacgaggctgctggcaatctgaagaaagcactcctgatccaaggctcgaatgatgtggagatcagggctgagggaaactcacggtttacatacactgcacttaaggatgggtgcacgaagcataccggtaaatggggaaagacagttatcgagtatcgcagccagaaaacatcacggctccctatcatcgatatcgcacccatggatattgggggcccagaacaggaatttggtgtggatataggccccgtttgtttcttgtag

SEQ ID NO: 333566 - DNA, 4257 bp, Artificial Sequence
  derived and/or modified sequence
atgataagacttggagcaccccagactctggtactactcactcttttggtggccgccgtgctgaggtgccaagggcaggacgttaggaagcccgcccctgcgcttgaacccgccgcaccaggttcactcagtcagatcgtgggcccaaagggaccgccagggccccagggaccagccggcgagcagggtcccaggggggacagaggtgacaagggcgagaagggggcgccaggacctcgtggacgcgacggggagccagggaccccagggaaccccgggcctcccgggccacccgggcctccgggtcctcctgggctgggagggaactttgctgcccagatggccggtggattcgacgagaaagctggtggagcacagttgggagtgatgcaaggacctatgggccctatggggcctcgcggccctcccggcccggccggagcaccgggtccacaaggttttcagggtaatccgggcgagcctggtgagcccggcgttagcggcccgatgggcccccgcggccccccaggaccacctggcaagccgggggacgatggagaggctggcaagcccggcaaagcaggggagcgcggtcctccgggtccccagggggctaggggtttcccagggacaccagggctgcctggagtgaagggccatcgcggctatcctggtctagacggcgctaagggcgaggctggggcacccggagttaaaggtgagtctgggtcacccggggaaaatggttctccaggccccatgggcccaagaggcttacctggagaaaggggcaggacagggccagcaggggcagccggtgcccggggaaacgacggccagcctggcccagctggccctcccggaccagtgggacccgcaggaggtccaggctttcccggggctccaggggccaaaggtgaggctggacccactggggcgaggggccccgagggcgcccagggcccaaggggtgagccgggcactccaggcagtcctggacccgctggcgcgtctgggaatccggggacagatggaatcccaggggccaaaggaagcgccggtgctccgggtatcgcgggggctccaggcttccctggcccacgggggcctcccggcccccagggcgccactggccctctcgggccaaaggggcagactggggagcccggaatcgccgggtttaaaggcgaacaggggccaaaaggcgagccagggcccgctggcccccagggcgcgccaggccctgctggagaagagggcaagaggggcgccagaggggagcccgggggcgttggacctattggccctcctggagaaaggggggccccgggtaaccgggggttccctggccaggatgggttggcgggacccaagggtgctcctggggaacgcggcccctccggactggccggacctaagggggctaatggagacccgggaaggccaggggagccggggctccctggagccaggggtcttacgggccgccctggtgacgcaggcccccagggtaaggtaggcccatcaggagcgcccggggaggacggacgccctggtcccccggggccgcagggagcacggggccagcctggagtcatggggttccccgggccaaaaggggccaacggtgagccaggcaaggcgggtgagaaaggattgcctggtgcccccggtctgagaggcctgcccgggaaggatggagagaccggagctgccggcccccctggacccgcaggccccgccggcgagcgtggggagcagggagcgcccggcccatccggatttcagggccttcctggcccccccggccctcctggcgaaggtgggaaacccggagaccagggggtaccaggcgaagccggcgcacctggactcgtggggcccaggggtgagcggggatttcccggtgagagaggaagtcccggggcccaaggtctccaaggtcccaggggcctcccagggacaccaggcactgacggacctaagggggctagcgggcccgcgggcccgccaggagctcaggggccccctggactccagggcatgccgggcgagagaggcgcagcagggatagctggacccaaaggagatcgcggtgacgtgggggaaaagggcccagagggtgcccccggcaaggacgggggaaggggactcaccggacccattggaccacctggcccagctggcgccaacggtgaaaaaggcgaagtgggaccacctggccctgcgggatccgccggggccaggggagctcccggggagcgaggtgagacaggacccccaggcccagccgggtttgccgggccccctggcgccgatgggcagccaggggcgaaaggagagcagggcgaagcgggccagaaaggagacgccggcgccccagggccgcagggcccaagtggcgctcccggtcctcagggccctacaggcgtgacaggccccaaaggagccaggggcgcacagggccctcccggggccaccggatttccgggcgctgcgggtcgtgtcggcccccccgggtcaaacgggaaccctgggcctcctgggccccccggcccatctggaaaagacgggccaaagggcgcccgtggtgactctggaccacccggtagggctggggaaccgggactgcaggggcccgccggcccccctggcgaaaagggagaaccgggtgatgacggtcctagtggcgcagagggtcctccggggccccaaggactggctggtcagaggggcatagtgggattgccagggcagagaggagaacgagggtttccagggctgccaggtccaagcggagagccgggcaaacaaggcgctccgggagcatcgggcgatcgagggcctcctggccctgttggaccacccggactgacaggacctgctggcgaaccaggaagggaaggatccccaggagctgatggaccccccggccgcgatggcgctgcaggggtgaaaggagatagaggagagactggtgccgtgggtgctccaggcgccccgggaccacctgggtcgcctggacccgcgggaccgacaggcaagcaaggcgatagaggcgaggctggggcacaagggcccatgggcccgagtggccctgccggagctagaggcatccagggcccccaggggcctaggggcgataaaggagaagccggagagccaggagaaagagggttaaaaggccatagaggattcaccggcctgcagggactcccagggccccccggtccctccggcgaccagggggccagtggacccgctggtccaagcggtccaagagggccgcccgggccagtggggccctcagggaaagacggagcaaacggaattcccgggcctatcgggcccccaggcccgcgcggcaggagcggcgaaacagggcccgcgggcccccccggaaatccaggcccgccaggaccgccaggccctcccggtccaggtatcgatatgtcggccttcgcaggcctgggccccagggagaaagggccagacccactccagtatatgcgcgctgatcaggcagccggcggactccggcaacatgacgccgaggtggatgccacattgaaaagtttgaataaccaaattgagtctattcgttcacctgagggatcccgaaagaaccctgctcgcacgtgcagagatctcaagctctgccaccccgaatggaagtccggcgattactggattgaccccaatcagggctgtacgctggacgctatgaaggtgttttgtaatatggagactggtgagacatgtgtgtaccccaatcccgctaatgtgcccaagaagaattggtggtcctcaaagtcgaaagaaaaaaagcatatttggttcggagagaccatcaatgggggatttcacttctcttacggcgatgataatctggccccaaacactgctaacgtgcagatgacatttctccggctcctgtctactgaaggatctcagaacatcacctatcactgtaaaaacagcatcgcctacttggacgaagctgccggaaacctcaagaaagctttgctgatccagggaagtaatgatgtggaaatccgcgctgaggggaattcacgatttacttacacagctctaaaggatggctgtacaaagcataccggtaagtggggaaagaccgtgatagagtatcggtctcagaaaacatccaggctccccatcatagacattgcacccatggacattggcggtcctgagcaggaatttggtgtggacatcggacctgtatgtttcctctag

SEQ ID NO: 333567 - DNA, 4257 bp, Artificial Sequence
  derived and/or modified sequence
atgattcgcctcggggctccccagacgctggtgctgctgacgctgctcgtcgccgctgtccttcggtgtcagggccaggatgtccggcaaccaggaccaaagggacagaaaggagaacctggagacatcaaggatattgtaggacccaaaggacctcctgggcctcagggacctgcaggggaacaaggacccagaggggatcgtggtgacaaaggtgaaaaaggtgcccctggacctcgtggcagagatggagaacctgggacccctggaaatcctggcccccctggtcctcccggcccccctggtccccctggtcttggtggaaactttgctgcccagatggctggaggatttgatgaaaaggctggtggcgcccagttgggagtaatgcaaggaccaatgggccccatgggacctcgaggacctccaggccctgcaggtgctcctgggcctcaaggatttcaaggcaatcctggtgaacctggtgaacctggtgtctctggtcccatgggtccccgtggtcctcctggtccccctggaaagcctggtgatgatggtgaagctggaaaacctggaaaagctggtgaaaggggtccgcctggtcctcagggtgctcgtggtttcccaggaaccccaggccttcctggtgtcaaaggtcacagaggttatccaggcctggacggtgctaagggagaggcgggtgctcctggtgtgaagggtgagagtggttccccgggtgagaacggatctccgggcccaatgggtcctcgtggcctgcctggtgaaagaggacggactggccctgctggcgctgcgggtgcccgaggcaacgatggtcagccaggccccgcagggcctccgggtcctgtcggtcctgctggtggtcctggcttccctggtgctcctggagccaagggtgaagccggccccactggtgcccgtggtcctgaaggtgctcaaggtcctcgcggtgaacctggtactcctgggtcccctgggcctgctggtgcctccggtaaccctggaacagatggaattcctggagccaaaggatctgctggtgctcctggcattgctggtgctcctggcttccctgggccacggggccctcctggccctcaaggtgcaactggtcctctgggcccgaaaggtcagacgggtgaacctggtattgctggcttcaaaggtgaacaaggccccaagggagaacctggccctgctggcccccagggagcccctggacccgctggtgaagaaggcaagagaggtgcccgtggagagcctggtggcgttgggcccatcggtccccctggagaaagaggtgctcccggcaaccgcggtttcccaggtcaagatggtctggcaggtcccaagggagcccctggagagcgagggcccagtggtcttgctggccccaagggagccaacggtgaccctggccgtcctggagaacctggccttcctggagcccggggtctcactggccgccctggtgatgctggtcctcaaggcaaagttggcccttctggagcccctggtgaagatggtcgtcctggacctccaggtcctcagggggctcgtgggcagcctggtgtcatgggtttccctggccccaaaggtgccaacggtgagcctggcaaagctggtgagaagggactgcctggtgctcctggtctgaggggtcttcctggcaaagatggtgagacaggtgctgcaggaccccctggccctgctggacctgctggtgaacgaggcgagcagggtgctcctgggccatctgggttccagggacttcctggccctcctggtcccccaggtgaaggtggaaaaccaggtgaccagggtgttcccggtgaagctggagcccctggcctcgtgggtcccaggggtgaacgaggtttcccaggtgaacgtggctctcccggtgcccagggcctccagggtccccgtggcctccccggcactcctggcactgatggtcccaaaggtgcatctggcccagcaggcccccctggggctcagggccctccaggtcttcagggaatgcctggcgagaggggagcagctggtatcgctgggcccaaaggcgacaggggtgacgttggtgagaaaggccctgagggagcccctggaaaggatggtggacgaggcctgacaggtcccattggcccccctggcccagctggtgctaatggcgagaagggagaagttggacctcctggtcctgcaggaagtgctggtgctcgtggcgctccgggtgaacgtggagagactgggccccccggaccagcgggatttgctgggcctcctggtgctgatggccagcctggggccaagggtgagcaaggagaggccggccagaaaggcgatgctggtgcccctggtcctcagggcccctctggagcacctgggcctcagggtcctactggagtgactggtcctaaaggagcccgaggtgcccaaggccccccgggagccactggattccctggagctgctggccgcgttggacccccaggctccaatggcaaccctggaccccctggtccccctggtccttctggaaaagatggtcccaaaggtgctcgaggagacagcggcccccctggccgagctggtgaacccggcctccaaggtcctgctggaccccctggcgagaagggagagcctggagatgacggtccctctggtgccgaaggtccaccaggtccccagggtctggctggtcagagaggcatcgtcggtctgcctgggcaacgtggtgagagaggattccctggcttgcctggcccgtcgggtgagcccggcaagcagggtgctcctggagcatctggagacagaggtcctcctggccccgtgggtcctcctggcctgacgggtcctgcaggtgaacctggacgagagggaagccccggtgctgatggcccccctggcagagatggcgctgctggagtcaagggtgatcgtggtgagactggtgctgtgggagctcctggagcccctgggccccctggctcccctggccccgctggtccaactggcaagcaaggagacagaggagaagctggtgcacaaggccccatgggaccctcaggaccagctggagcccggggaatccagggtcctcaaggccccagaggtgacaaaggagaggctggagagcctggcgagagaggcctgaagggacaccgtggcttcactggtctgcagggtctgcccggccctcctggtccttctggagaccaaggtgcttctggtcctgctggtccttctggccctagaggtcctcctggccccgtcggtccctctggcaaagatggtgctaatggaatccctggccccattgggcctcctggtccccgtggacgatcaggcgaaaccggccctgctggtcctcctggaaatcctggaccccctggtcctccaggtccccctggccctggcatcgacatgtccgcctttgctggcttaggcccgagagagaagggccccgaccccctgcagtacatgcgggccgaccaggcagccggtggcctgagacagcatgacgccgaggtggatgccacactcaagtccctcaacaaccagattgagagcatccgcagccccgagggctcccgcaagaaccctgctcgcacctgcagagacctgaaactctgccaccctgagtggaagagtggagactactggattgaccccaaccaaggctgcaccttggacgccatgaaggttttctgcaacatggagactggcgagacttgcgtctaccccaatccagcaaacgttcccaagaagaactggtggagcagcaagagcaaggagaagaaacacatctggtttggagaaaccatcaatggtggcttccatttcagctatggagatgacaatctggctcccaacactgccaacgtccagatgaccttcctacgcctgctgtccacggaaggctcccagaacatcacctaccactgcaagaacagcattgcctatctggacgaagcagctggcaacctcaagaaggccctgctcatccagggctccaatgacgtggagatccgggcagagggcaatagcaggttcacgtacactgccctgaaggatggctgcacgaaacataccggtaagtggggcaagactgttatcgagtaccggtcacagaagacctcacgcctccccatcattgacattgcacccatggacataggagggcccgagcaggaattcggtgtggacatagggccggtctgcttcttgtaa

SEQ ID NO: 333568 - DNA, 5071 bp, Artificial Sequence
  derived and/or modified sequence
gggagaagacgcagagcgctgctgggctgccgggtctcccgcttccccctcctgctccaagggcctcctgcatgagggcgcggtagagacccggacccgcgccgtgctcctgccgtttcgctgcgctccgcccgggcccggctcagccaggccccgcggtgagccatgattcgcctcggggctccccagacgctggtgctgctgacgctgctcgtcgccgctgtccttcggtgtcagggccaggatgtccaggaggctggcagctgtgtgcaggatgggcagaggtataatgataaggatgtgtggaagccggagccctgccggatctgtgtctgtgacactgggactgtcctctgcgacgacataatctgtgaagacgtgaaagactgcctcagccctgagatccccttcggagagtgctgccccatctgcccaactgacctcgccactgccagtgggcaaccaggaccaaagggacagaaaggagaacctggagacatcaaggatattgtaggacccaaaggacctcctgggcctcagggacctgcaggggaacaaggacccagaggggatcgtggtgacaaaggtgaaaaaggtgcccctggacctcgtggcagagatggagaacctgggacccctggaaatcctggcccccctggtcctcccggcccccctggtccccctggtcttggtggaaactttgctgcccagatggctggaggatttgatgaaaaggctggtggcgcccagttgggagtaatgcaaggaccaatgggccccatgggacctcgaggacctccaggccctgcaggtgctcctgggcctcaaggatttcaaggcaatcctggtgaacctggtgaacctggtgtctctggtcccatgggtccccgtggtcctcctggtccccctggaaagcctggtgatgatggtgaagctggaaaacctggaaaagctggtgaaaggggtccgcctggtcctcagggtgctcgtggtttcccaggaaccccaggccttcctggtgtcaaaggtcacagaggttatccaggcctggacggtgctaagggagaggcgggtgctcctggtgtgaagggtgagagtggttccccgggtgagaacggatctccgggcccaatgggtcctcgtggcctgcctggtgaaagaggacggactggccctgctggcgctgcgggtgcccgaggcaacgatggtcagccaggccccgcagggcctccgggtcctgtcggtcctgctggtggtcctggcttccctggtgctcctggagccaagggtgaagccggccccactggtgcccgtggtcctgaaggtgctcaaggtcctcgcggtgaacctggtactcctgggtcccctgggcctgctggtgcctccggtaaccctggaacagatggaattcctggagccaaaggatctgctggtgctcctggcattgctggtgctcctggcttccctgggccacggggccctcctggccctcaaggtgcaactggtcctctgggcccgaaaggtcagacgggtgaacctggtattgctggcttcaaaggtgaacaaggccccaagggagaacctggccctgctggcccccagggagcccctggacccgctggtgaagaaggcaagagaggtgcccgtggagagcctggtggcgttgggcccatcggtccccctggagaaagaggtgctcccggcaaccgcggtttcccaggtcaagatggtctggcaggtcccaagggagcccctggagagcgagggcccagtggtcttgctggccccaagggagccaacggtgaccctggccgtcctggagaacctggccttcctggagcccggggtctcactggccgccctggtgatgctggtcctcaaggcaaagttggcccttctggagcccctggtgaagatggtcgtcctggacctccaggtcctcagggggctcgtgggcagcctggtgtcatgggtttccctggccccaaaggtgccaacggtgagcctggcaaagctggtgagaagggactgcctggtgctcctggtctgaggggtcttcctggcaaagatggtgagacaggtgctgcaggaccccctggccctgctggacctgctggtgaacgaggcgagcagggtgctcctgggccatctgggttccagggacttcctggccctcctggtcccccaggtgaaggtggaaaaccaggtgaccagggtgttcccggtgaagctggagcccctggcctcgtgggtcccaggggtgaacgaggtttcccaggtgaacgtggctctcccggtgcccagggcctccagggtccccgtggcctccccggcactcctggcactgatggtcccaaaggtgcatctggcccagcaggcccccctggggctcagggccctccaggtcttcagggaatgcctggcgagaggggagcagctggtatcgctgggcccaaaggcgacaggggtgacgttggtgagaaaggccctgagggagcccctggaaaggatggtggacgaggcctgacaggtcccattggcccccctggcccagctggtgctaatggcgagaagggagaagttggacctcctggtcctgcaggaagtgctggtgctcgtggcgctccgggtgaacgtggagagactgggccccccggaccagcgggatttgctgggcctcctggtgctgatggccagcctggggccaagggtgagcaaggagaggccggccagaaaggcgatgctggtgcccctggtcctcagggcccctctggagcacctgggcctcagggtcctactggagtgactggtcctaaaggagcccgaggtgcccaaggccccccgggagccactggattccctggagctgctggccgcgttggacccccaggctccaatggcaaccctggaccccctggtccccctggtccttctggaaaagatggtcccaaaggtgctcgaggagacagcggcccccctggccgagctggtgaacccggcctccaaggtcctgctggaccccctggcgagaagggagagcctggagatgacggtccctctggtgccgaaggtccaccaggtccccagggtctggctggtcagagaggcatcgtcggtctgcctgggcaacgtggtgagagaggattccctggcttgcctggcccgtcgggtgagcccggcaagcagggtgctcctggagcatctggagacagaggtcctcctggccccgtgggtcctcctggcctgacgggtcctgcaggtgaacctggacgagagggaagccccggtgctgatggcccccctggcagagatggcgctgctggagtcaagggtgatcgtggtgagactggtgctgtgggagctcctggagcccctgggccccctggctcccctggccccgctggtccaactggcaagcaaggagacagaggagaagctggtgcacaaggccccatgggaccctcaggaccagctggagcccggggaatccagggtcctcaaggccccagaggtgacaaaggagaggctggagagcctggcgagagaggcctgaagggacaccgtggcttcactggtctgcagggtctgcccggccctcctggtccttctggagaccaaggtgcttctggtcctgctggtccttctggccctagaggtcctcctggccccgtcggtccctctggcaaagatggtgctaatggaatccctggccccattgggcctcctggtccccgtggacgatcaggcgaaaccggccctgctggtcctcctggaaatcctggaccccctggtcctccaggtccccctggccctggcatcgacatgtccgcctttgctggcttaggcccgagagagaagggccccgaccccctgcagtacatgcgggccgaccaggcagccggtggcctgagacagcatgacgccgaggtggatgccacactcaagtccctcaacaaccagattgagagcatccgcagccccgagggctcccgcaagaaccctgctcgcacctgcagagacctgaaactctgccaccctgagtggaagagtggagactactggattgaccccaaccaaggctgcaccttggacgccatgaaggttttctgcaacatggagactggcgagacttgcgtctaccccaatccagcaaacgttcccaagaagaactggtggagcagcaagagcaaggagaagaaacacatctggtttggagaaaccatcaatggtggcttccatttcagctatggagatgacaatctggctcccaacactgccaacgtccagatgaccttcctacgcctgctgtccacggaaggctcccagaacatcacctaccactgcaagaacagcattgcctatctggacgaagcagctggcaacctcaagaaggccctgctcatccagggctccaatgacgtggagatccgggcagagggcaatagcaggttcacgtacactgccctgaaggatggctgcacgaaacataccggtaagtggggcaagactgttatcgagtaccggtcacagaagacctcacgcctccccatcattgacattgcacccatggacataggagggcccgagcaggaattcggtgtggacatagggccggtctgcttcttgtaaaaacctgaacccagaaacaacacaatccgttgcaaacccaaaggacccaagtactttccaatctcagtcactctaggactctgcactgaatggctgacctgacctgatgtccattcatcccaccctctcacagttcggacttttctcccctctctttctaagagacctgaactgggcagactgcaaaataaaatctcggtgttctatttatttattgtcttcctgtaagaccttcgggtcaaggcagaggcaggaaactaactggtgtgagtcaaatgccccctgagtgactgcccccagcccaggccagaagacctcccttcaggtgccgggcgcaggaactgtgtgtgtcctacacaatggtgctattctgtgtcaaacacctctgtattttttaaaacatcaattgatattaaaaatgaaaagattattggaaagtaca

SEQ ID NO: 333569 - DNA, 4699 bp, Artificial Sequence
  derived and/or modified sequence
atgattcgcctcggggctccccagacgctggtgctgctgacgctgctcgtcgccgctgtccttcggtgtcagggccaggatgtccgtaagcccgctccagctctggagcccgcggctccgggctctctctcacagattgtaggacccaaaggacctcctgggcctcagggacctgcaggggaacaaggacccagaggggatcgtggtgacaaaggtgaaaaaggtgcccctggacctcgtggcagagatggagaacctgggacccctggaaatcctggcccccctggtcctcccggcccccctggtccccctggtcttggtggaaactttgctgcccagatggctggaggatttgatgaaaaggctggtggcgcccagttgggagtaatgcaaggaccaatgggccccatgggacctcgaggacctccaggccctgcaggtgctcctgggcctcaaggatttcaaggcaatcctggtgaacctggtgaacctggtgtctctggtcccatgggtccccgtggtcctcctggtccccctggaaagcctggtgatgatggtgaagctggaaaacctggaaaagctggtgaaaggggtccgcctggtcctcagggtgctcgtggtttcccaggaaccccaggccttcctggtgtcaaaggtcacagaggttatccaggcctggacggtgctaagggagaggcgggtgctcctggtgtgaagggtgagagtggttccccgggtgagaacggatctccgggcccaatgggtcctcgtggcctgcctggtgaaagaggacggactggccctgctggcgctgcgggtgcccgaggcaacgatggtcagccaggccccgcagggcctccgggtcctgtcggtcctgctggtggtcctggcttccctggtgctcctggagccaagggtgaagccggccccactggtgcccgtggtcctgaaggtgctcaaggtcctcgcggtgaacctggtactcctgggtcccctgggcctgctggtgcctccggtaaccctggaacagatggaattcctggagccaaaggatctgctggtgctcctggcattgctggtgctcctggcttccctgggccacggggccctcctggccctcaaggtgcaactggtcctctgggcccgaaaggtcagacgggtgaacctggtattgctggcttcaaaggtgaacaaggccccaagggagaacctggccctgctggcccccagggagcccctggacccgctggtgaagaaggcaagagaggtgcccgtggagagcctggtggcgttgggcccatcggtccccctggagaaagaggtgctcccggcaaccgcggtttcccaggtcaagatggtctggcaggtcccaagggagcccctggagagcgagggcccagtggtcttgctggccccaagggagccaacggtgaccctggccgtcctggagaacctggccttcctggagcccggggtctcactggccgccctggtgatgctggtcctcaaggcaaagttggcccttctggagcccctggtgaagatggtcgtcctggacctccaggtcctcagggggctcgtgggcagcctggtgtcatgggtttccctggccccaaaggtgccaacggtgagcctggcaaagctggtgagaagggactgcctggtgctcctggtctgaggggtcttcctggcaaagatggtgagacaggtgctgcaggaccccctggccctgctggacctgctggtgaacgaggcgagcagggtgctcctgggccatctgggttccagggacttcctggccctcctggtcccccaggtgaaggtggaaaaccaggtgaccagggtgttcccggtgaagctggagcccctggcctcgtgggtcccaggggtgaacgaggtttcccaggtgaacgtggctctcccggtgcccagggcctccagggtccccgtggcctccccggcactcctggcactgatggtcccaaaggtgcatctggcccagcaggcccccctggggctcagggccctccaggtcttcagggaatgcctggcgagaggggagcagctggtatcgctgggcccaaaggcgacaggggtgacgttggtgagaaaggccctgagggagcccctggaaaggatggtggacgaggcctgacaggtcccattggcccccctggcccagctggtgctaatggcgagaagggagaagttggacctcctggtcctgcaggaagtgctggtgctcgtggcgctccgggtgaacgtggagagactgggccccccggaccagcgggatttgctgggcctcctggtgctgatggccagcctggggccaagggtgagcaaggagaggccggccagaaaggcgatgctggtgcccctggtcctcagggcccctctggagcacctgggcctcagggtcctactggagtgactggtcctaaaggagcccgaggtgcccaaggccccccgggagccactggattccctggagctgctggccgcgttggacccccaggctccaatggcaaccctggaccccctggtccccctggtccttctggaaaagatggtcccaaaggtgctcgaggagacagcggcccccctggccgagctggtgaacccggcctccaaggtcctgctggaccccctggcgagaagggagagcctggagatgacggtccctctggtgccgaaggtccaccaggtccccagggtctggctggtcagagaggcatcgtcggtctgcctgggcaacgtggtgagagaggattccctggcttgcctggcccgtcgggtgagcccggcaagcagggtgctcctggagcatctggagacagaggtcctcctggccccgtgggtcctcctggcctgacgggtcctgcaggtgaacctggacgagagggaagccccggtgctgatggcccccctggcagagatggcgctgctggagtcaagggtgatcgtggtgagactggtgctgtgggagctcctggagcccctgggccccctggctcccctggccccgctggtccaactggcaagcaaggagacagaggagaagctggtgcacaaggccccatgggaccctcaggaccagctggagcccggggaatccagggtcctcaaggccccagaggtgacaaaggagaggctggagagcctggcgagagaggcctgaagggacaccgtggcttcactggtctgcagggtctgcccggccctcctggtccttctggagaccaaggtgcttctggtcctgctggtccttctggccctagaggtcctcctggccccgtcggtccctctggcaaagatggtgctaatggaatccctggccccattgggcctcctggtccccgtggacgatcaggcgaaaccggccctgctggtcctcctggaaatcctggaccccctggtcctccaggtccccctggccctggcatcgacatgtccgcctttgctggcttaggcccgagagagaagggccccgaccccctgcagtacatgcgggccgaccaggcagccggtggcctgagacagcatgacgccgaggtggatgccacactcaagtccctcaacaaccagattgagagcatccgcagccccgagggctcccgcaagaaccctgctcgcacctgcagagacctgaaactctgccaccctgagtggaagagtggagactactggattgaccccaaccaaggctgcaccttggacgccatgaaggttttctgcaacatggagactggcgagacttgcgtctaccccaatccagcaaacgttcccaagaagaactggtggagcagcaagagcaaggagaagaaacacatctggtttggagaaaccatcaatggtggcttccatttcagctatggagatgacaatctggctcccaacactgccaacgtccagatgaccttcctacgcctgctgtccacggaaggctcccagaacatcacctaccactgcaagaacagcattgcctatctggacgaagcagctggcaacctcaagaaggccctgctcatccagggctccaatgacgtggagatccgggcagagggcaatagcaggttcacgtacactgccctgaaggatggctgcacgaaacataccggtaagtggggcaagactgttatcgagtaccggtcacagaagacctcacgcctccccatcattgacattgcacccatggacataggagggcccgagcaggaattcggtgtggacatagggccggtctgcttcttgtaaaaacctgaacccagaaacaacacaatccgttgcaaacccaaaggacccaagtactttccaatctcagtcactctaggactctgcactgaatggctgacctgacctgatgtccattcatcccaccctctcacagttcggacttttctcccctctctttctaagagacctgaactgggcagactgcaaaataaaatctcggtgttctatttatttattgtcttcctgtaagaccttcgggtcaaggcagaggcaggaaactaactggtgtgagtcaaatgccccctgagtgactgcccccagcccaggccagaagacctcccttcaggtgccgggcgcaggaactgtgtgtgtcctacacaatggtgctattctgtgtcaaacacctctgtattttttaaaacatcaattgatattaaaaatgaaaagattattggaaagtaca

SEQ ID NO: 333570 - DNA, 4257 bp, Artificial Sequence
  derived and/or modified sequence
atgatccggctgggcgccccccagaccctggtgctgctgaccctgctggtggccgctgtgctgcgctgccagggccaggatgtgcggcagcccggccccaagggccagaagggggagcccggggacatcaaggacatcgtgggccccaagggccccccaggcccccagggccctgctggggagcagggccccaggggggacagaggagacaagggggagaagggggcccctggcccccggggcagagatggagagcccggcaccccaggcaaccctggccccccaggccccccaggccccccaggccccccaggcctgggcggcaactttgctgcccagatggccggcggctttgatgagaaggccggcggggcccagctgggcgtgatgcagggccccatgggccccatgggcccccggggccccccaggccctgctggggcccctggcccccagggcttccagggcaaccctggagagcctggagagcccggggtgtctggccccatgggcccccggggccccccaggccccccaggcaagccaggagatgatggagaggccggcaagccaggcaaggccggggagcggggccccccaggcccccagggcgcccggggcttccctggcaccccaggcctgcccggggtgaagggccaccggggctacccaggcctggatggagccaagggggaggccggggcccctggggtgaagggggagagcggcagccctggagaaaatggcagccctggccccatgggcccccggggcctgcccggggagcggggccgcacaggccctgctggagctgctggggcccggggaaatgatggccagcccggccctgctggccccccaggccctgtgggccctgctgggggccctggcttccctggggcccctggggccaagggggaggccggccccactggagcccggggccctgagggcgcccagggccccagaggagagcccggcaccccaggcagccctggccctgctggggccagcggcaaccctggaacagatggcatccctggggccaagggcagcgctggggcccctggcattgctggggcccctggcttccctggcccccggggccccccaggcccccagggcgccaccggccccctgggccccaagggccagacaggagagcccggcattgctggcttcaagggggagcagggccccaagggggagcccggccctgctggcccccagggcgcccctggccctgctggggaggagggcaagagaggagcccggggggagcccggcggcgtgggccccatcggccccccaggagagcggggggcccctggcaacagaggcttccctggccaggacggcctggccggccccaagggggcccctggagagcggggccccagcggcctggccggccccaagggggccaacggggaccccggccggcctggagagcccggcctgcccggggcccggggcctgaccggccggcctggagatgctggcccccagggcaaggtgggccccagcggggcccctggagaagatggccggcccggccccccaggcccccagggcgcccggggccagcccggggtgatgggcttccctggccccaagggggccaacggggagcccgggaaggccggggagaagggcctgcccggggcccctggcctgcggggcctgcccgggaaggatggagaaacaggagctgctggccccccaggccctgctggccctgctggggagcggggggagcagggcgcccctggccccagcggcttccagggcctgcccggccccccaggccccccaggagagggcggcaagccaggggaccagggcgtgcctggagaggccggggcccctggcctggtgggccccagaggagagcggggcttccctggagagcggggcagccctggggcccagggcctgcagggcccccggggcctgcccggcaccccaggcacagatggccccaagggggccagcggccctgctggccccccaggggcccagggccccccaggcctgcagggcatgcctggagagagaggagctgctggcattgctggccccaagggggacagaggagatgtgggggagaagggccctgagggcgcccctgggaaggatggcggccggggcctgaccggccccatcggccccccaggccctgctggggccaatggagagaagggggaggtgggccccccaggccctgctggcagcgctggggcccggggggcccctggagagcggggggagaccggccccccaggccctgctggctttgctggccccccaggagcagatggccagcccggggccaagggggagcagggcgaggccggccagaagggagatgctggggcccctggcccccagggccccagcggggcccctggcccccagggccccactggagtgacaggccccaagggggcccggggggcccagggccccccaggggccaccggcttccctggagctgctggccgggtgggccccccaggcagcaatggaaatcctggccccccaggccccccaggccccagcggcaaggatggccccaagggggcccggggggacagcggccccccaggccgggccggggagcccggcctgcagggccctgctggccccccaggagagaagggggagcctggagatgatggccccagcggggctgagggccccccaggcccccagggcctggccggccagaggggcatcgtgggcctgcccggccagagaggagagcggggcttccctggcctgcccggccccagcggggagcccgggaagcagggcgcccctggggccagcggggaccggggccccccaggccctgtgggccccccaggcctgactggacctgctggggagcccggccgggagggcagccctggagcagatggccccccaggaagagatggagctgctggggtgaagggggacagaggagagaccggggctgtgggcgcccctggggcccctggccccccaggcagccctggccctgctggccccaccgggaagcagggcgacagaggagaggccggggcccagggccccatgggccccagcggccctgctggggcccggggcatccagggcccccagggccccaggggggacaagggggaggccggggagcctggagagcggggcctgaagggccaccggggcttcaccggcctgcagggcctgcccggccccccaggccccagcggggaccagggcgccagcggccctgctggccccagcggcccccggggccccccaggccctgtgggccccagcggcaaggatggagccaacggcatccctggccccatcggccccccaggcccccggggccgcagcggggagactggacctgctggccccccaggcaaccctggccccccaggccccccaggccccccaggccctggcatcgacatgtctgcctttgctggcctgggcccccgggagaagggccctgaccccctgcagtacatgagagctgaccaggccgccggcggcctgcggcagcatgatgctgaggtggatgccaccctgaagagcctgaacaaccagatcgagagcatccgcagccctgagggcagcaggaagaacccagcccggacctgccgggacctgaagctgtgccaccctgagtggaagagcggggactactggattgaccccaaccagggctgcaccctggatgccatgaaggtgttctgcaacatggagaccggggagacctgtgtgtaccccaacccagccaacgtgcccaagaagaactggtggagcagcaagagcaaggagaagaagcacatctggtttggagagaccatcaatggaggcttccacttctcctatggagatgacaacctggcccccaacacagccaacgtgcagatgaccttcctgcggctgctgagcacagagggcagccagaacatcacctaccactgcaagaacagcatcgcctacctggatgaggccgccggcaacctgaagaaggccctgctgatccagggcagcaatgatgtggagatccgggcagagggcaacagccgcttcacctacacagccctgaaggatggctgcaccaagcacacaggcaagtggggcaagacagtgattgagtaccgcagccagaagaccagccggctgcccatcatcgacatcgcccccatggacattggaggccctgagcaggagtttggagtggacatcggccctgtgtgcttcctgtag

SEQ ID NO: 333571 - DNA, 4464 bp, Artificial Sequence
  derived and/or modified sequence
atgatccggctgggcgccccccagaccctggtgctgctgaccctgctggtggccgctgtgctgcgctgccagggccaggatgtgcaggaggccggcagctgtgtgcaggacggccagcgctacaatgacaaggatgtgtggaagccagagccctgccgcatctgtgtgtgtgacacaggaacagtgctgtgtgatgacatcatctgtgaagatgtgaaggactgcctgagccctgagatcccctttggagagtgctgccccatctgccccacagacctggccacagccagcggccagcccggccccaagggccagaagggggagcccggggacatcaaggacatcgtgggccccaagggccccccaggcccccagggccctgctggggagcagggccccaggggggacagaggagacaagggggagaagggggcccctggcccccggggcagagatggagagcccggcaccccaggcaaccctggccccccaggccccccaggccccccaggccccccaggcctgggcggcaactttgctgcccagatggccggcggctttgatgagaaggccggcggggcccagctgggcgtgatgcagggccccatgggccccatgggcccccggggccccccaggccctgctggggcccctggcccccagggcttccagggcaaccctggagagcccggggagcccggggtgtctggccccatgggcccccggggccccccaggccccccaggcaagccaggagatgatggagaggccggcaagccaggcaaggccggggagcggggccccccaggcccccagggcgcccggggcttccctggcaccccaggcctgcccggggtgaagggccaccggggctacccaggcctggatggagccaagggggaggccggggcccctggggtgaagggggagagcggcagccctggagaaaatggcagccctggccccatgggcccccggggcctgcctggagagcggggccgcactggacctgctggagctgctggggcccggggaaatgatggccagcccggccctgctggccccccaggccctgtgggccctgctgggggccctggcttccctggggcccctggggccaagggggaggccggccccaccggggcccggggccctgagggcgcccagggccccagaggagagcccggcaccccaggcagccctggccctgctggggccagcggcaaccctggaacagatggcatccctggggccaagggcagcgctggggcccctggcattgctggggcccctggcttccctggcccccggggccccccaggcccccagggcgccaccggccccctgggccccaagggccagacaggagagcccggcattgctggcttcaagggggagcagggccccaagggggagcccggccctgctggcccccagggcgcccctggccctgctggggaggagggcaagagaggagcccggggggagcctggaggagtgggccccatcggccccccaggagagcggggggcccctggcaacagaggcttccctggccaggacggcctggccggccccaagggggcccctggagagcggggccccagcggcctggccggccccaagggggccaatggagaccccggccggcctggagagcccggcctgcccggggcccggggcctgaccggccggcctggagatgctggcccccagggcaaggtgggccccagcggggcccctggagaagatggccggcccggccccccaggcccccagggcgcccggggccagcccggggtgatgggcttccctggccccaagggggccaatggagagcccgggaaggccggggagaagggcctgcccggggcccctggcctgcggggcctgcccgggaaggatggagagaccggggctgctggccccccaggccctgctggccctgctggggagcggggggagcagggcgcccctggccccagcggcttccagggcctgcccggccccccaggccccccaggagagggcggcaagccaggggaccagggcgtgcctggagaggccggggcccctggcctggtgggccccagaggagagcggggcttccctggagagcggggcagccctggggcccagggcctgcagggcccccggggcctgcccggcaccccaggcacagatggccccaagggggccagcggccctgctggccccccaggggcccagggccccccaggcctgcagggcatgcctggagagagaggagctgctggcattgctggccccaagggggacagaggagatgtgggggagaagggccctgagggcgcccctgggaaggatggcggccggggcctgaccggccccatcggccccccaggccctgctggggccaacggggagaagggggaggtgggccccccaggccctgctggcagcgctggggcccggggggcccctggagagcggggggagactggacctcctggccctgctggctttgctggccccccaggagcagatggccagcccggggccaagggggagcagggcgaggccggccagaagggagatgctggggcccctggcccccagggccccagcggggcccctggcccccagggccccaccggggtgacaggccccaagggggcccggggggcccagggccccccaggggccaccggcttccctggagctgctggccgggtgggccccccaggcagcaatggaaatcctggccccccaggccccccaggccccagcggcaaggatggccccaagggggcccggggggacagcggccccccaggccgggccggggagcccggcctgcagggccctgctggccccccaggagagaagggggagcctggagatgatggccccagcggggctgagggccccccaggcccccagggcctggccggccagaggggcatcgtgggcctgcccggccagagaggagagcggggcttccctggcctgcccggccccagcggggagcccgggaagcagggcgcccctggggccagcggggaccggggccccccaggccctgtgggccccccaggcctgaccggccctgctggggagcccggccgggagggcagccctggagcagatggccccccaggaagagatggagctgctggggtgaagggggacagaggagaaacaggagctgtgggcgcccctggggcccctggccccccaggcagccctggccctgctggccccaccgggaagcagggcgacagaggagaggccggggcccagggccccatgggccccagcggccctgctggggcccggggcatccagggcccccagggccccaggggggacaagggggaggccggggagcccggggagcggggcctgaagggccaccggggcttcaccggcctgcagggcctgcccggccccccaggccccagcggggaccagggcgccagcggccctgctggccccagcggcccccggggccccccaggccctgtgggccccagcggcaaggatggagccaacggcatccctggccccatcggccccccaggcccccggggccgctctggagagaccggccctgctggccccccaggcaaccctggccccccaggccccccaggccccccaggccctggcatcgacatgtctgcctttgctggcctgggcccccgggagaagggccctgaccccctgcagtacatgagagctgaccaggccgccggcggcctgcggcagcatgatgctgaggtggatgccaccctgaagagcctgaacaaccagatcgagagcatccgcagccctgagggcagcaggaagaacccagcccggacctgccgggacctgaagctgtgccaccctgagtggaagagcggggactactggattgaccccaaccagggctgcaccctggatgccatgaaggtgttctgcaacatggagactggagagacctgtgtgtaccccaacccagccaacgtgcccaagaagaactggtggagcagcaagagcaaggagaagaagcacatctggtttggagagaccatcaatggaggcttccacttctcctatggagatgacaacctggcccccaacacagccaacgtgcagatgaccttcctgcggctgctgagcacagagggcagccagaacatcacctaccactgcaagaacagcatcgcctacctggatgaagctgctggcaacctgaagaaggccctgctgatccagggcagcaatgatgtggagatccgggcagagggcaacagccgcttcacctacacagccctgaaggatggctgcaccaagcacacaggcaagtggggcaagacagtcatcgagtaccgcagccagaagaccagccggctgcccatcattgatattgcccccatggacatcggcggccctgagcaggagtttggagtggacatcggccctgtgtgcttcctgtag

SEQ ID NO: 333572 - DNA, 4257 bp, Artificial Sequence
  derived and/or modified sequence
atgatccggctgggcgccccccagaccctggtgctgctgaccctgctggtggccgctgtgctgcgctgccagggccaggatgtgaggaagccagccccagccctggagcctgctgcccctggcagcctgagccagatcgtgggccccaagggccccccaggcccccagggccctgctggggagcagggccccaggggggacagaggagacaagggggagaagggggcccctggcccccggggcagagatggagagcccggcaccccaggcaaccctggccccccaggccccccaggccccccaggccccccaggcctgggcggcaactttgctgcccagatggccggcggctttgatgagaaggccggcggggcccagctgggcgtgatgcagggccccatgggccccatgggcccccggggccccccaggccctgctggggcccctggcccccagggcttccagggcaaccctggagagcctggagagcccggggtgtctggccccatgggcccccggggccccccaggccccccaggcaagccaggagatgatggagaggccggcaagccaggcaaggccggggagcggggccccccaggcccccagggcgcccggggcttccctggcaccccaggcctgcccggggtgaagggccaccggggctacccaggcctggatggagccaagggggaggccggggcccctggggtgaagggggagagcggcagccctggagaaaatggcagccctggccccatgggcccccggggcctgcccggggagcggggccgcacaggccctgctggagctgctggggcccggggaaatgatggccagcccggccctgctggccccccaggccctgtgggccctgctgggggccctggcttccctggggcccctggggccaagggggaggccggccccactggagcccggggccctgagggcgcccagggccccagaggagagcccggcaccccaggcagccctggccctgctggggccagcggcaaccctggaacagatggcatccctggggccaagggcagcgctggggcccctggcattgctggggcccctggcttccctggcccccggggccccccaggcccccagggcgccaccggccccctgggccccaagggccagacaggagagcccggcattgctggcttcaagggggagcagggccccaagggggagcccggccctgctggcccccagggcgcccctggccctgctggggaggagggcaagagaggagcccggggggagcccggcggcgtgggccccatcggccccccaggagagcggggggcccctggcaacagaggcttccctggccaggacggcctggccggccccaagggggcccctggagagcggggccccagcggcctggccggccccaagggggccaacggggaccccggccggcctggagagcccggcctgcccggggcccggggcctgaccggccggcctggagatgctggcccccagggcaaggtgggccccagcggggcccctggagaagatggccggcccggccccccaggcccccagggcgcccggggccagcccggggtgatgggcttccctggccccaagggggccaacggggagcccgggaaggccggggagaagggcctgcccggggcccctggcctgcggggcctgcccgggaaggatggagaaacaggagctgctggccccccaggccctgctggccctgctggggagcggggggagcagggcgcccctggccccagcggcttccagggcctgcccggccccccaggccccccaggagagggcggcaagccaggggaccagggcgtgcctggagaggccggggcccctggcctggtgggccccagaggagagcggggcttccctggagagcggggcagccctggggcccagggcctgcagggcccccggggcctgcccggcaccccaggcacagatggccccaagggggccagcggccctgctggccccccaggggcccagggccccccaggcctgcagggcatgcctggagagagaggagctgctggcattgctggccccaagggggacagaggagatgtgggggagaagggccctgagggcgcccctgggaaggatggcggccggggcctgaccggccccatcggccccccaggccctgctggggccaatggagagaagggggaggtgggccccccaggccctgctggcagcgctggggcccggggggcccctggagagcggggggagaccggccccccaggccctgctggctttgctggccccccaggagcagatggccagcccggggccaagggggagcagggcgaggccggccagaagggagatgctggggcccctggcccccagggccccagcggggcccctggcccccagggccccactggagtgacaggccccaagggggcccggggggcccagggccccccaggggccaccggcttccctggagctgctggccgggtgggccccccaggcagcaatggaaatcctggccccccaggccccccaggccccagcggcaaggatggccccaagggggcccggggggacagcggccccccaggccgggccggggagcccggcctgcagggccctgctggccccccaggagagaagggggagcctggagatgatggccccagcggggctgagggccccccaggcccccagggcctggccggccagaggggcatcgtgggcctgcccggccagagaggagagcggggcttccctggcctgcccggccccagcggggagcccgggaagcagggcgcccctggggccagcggggaccggggccccccaggccctgtgggccccccaggcctgactggacctgctggggagcccggccgggagggcagccctggagcagatggccccccaggaagagatggagctgctggggtgaagggggacagaggagagaccggggctgtgggcgcccctggggcccctggccccccaggcagccctggccctgctggccccaccgggaagcagggcgacagaggagaggccggggcccagggccccatgggccccagcggccctgctggggcccggggcatccagggcccccagggccccaggggggacaagggggaggccggggagcctggagagcggggcctgaagggccaccggggcttcaccggcctgcagggcctgcccggccccccaggccccagcggggaccagggcgccagcggccctgctggccccagcggcccccggggccccccaggccctgtgggccccagcggcaaggatggagccaacggcatccctggccccatcggccccccaggcccccggggccgcagcggggagactggacctgctggccccccaggcaaccctggccccccaggccccccaggccccccaggccctggcatcgacatgtctgcctttgctggcctgggcccccgggagaagggccctgaccccctgcagtacatgagagctgaccaggccgccggcggcctgcggcagcatgatgctgaggtggatgccaccctgaagagcctgaacaaccagatcgagagcatccgcagccctgagggcagcaggaagaacccagcccggacctgccgggacctgaagctgtgccaccctgagtggaagagcggggactactggattgaccccaaccagggctgcaccctggatgccatgaaggtgttctgcaacatggagaccggggagacctgtgtgtaccccaacccagccaacgtgcccaagaagaactggtggagcagcaagagcaaggagaagaagcacatctggtttggagagaccatcaatggaggcttccacttctcctatggagatgacaacctggcccccaacacagccaacgtgcagatgaccttcctgcggctgctgagcacagagggcagccagaacatcacctaccactgcaagaacagcatcgcctacctggatgaggccgccggcaacctgaagaaggccctgctgatccagggcagcaatgatgtggagatccgggcagagggcaacagccgcttcacctacacagccctgaaggatggctgcaccaagcacacaggcaagtggggcaagacagtgattgagtaccgcagccagaagaccagccggctgcccatcatcgacatcgcccccatggacattggaggccctgagcaggagtttggagtggacatcggccctgtgtgcttcctgtag

SEQ ID NO: 333573 - DNA, 4257 bp, Artificial Sequence
  derived and/or modified sequence
atgatccggctgggcgccccccagaccctggtgctgctgaccctgctcgtagccgcagtgcttcgctgtcagggacaagacgtacgccagcctggaccaaaaggccaaaaaggtgagccaggggatattaaagatattgtggggccaaagggtccaccaggaccacagggccccgctggcgagcagggacctaggggtgacaggggcgacaaaggcgagaaaggggcgccagggcctaggggccgggacggggaacccggtaccccaggtaaccccggcccccccggacccccggggccacccggtcctcccggcctgggcggcaattttgcagcccagatggccggcggcttcgacgagaaggcaggcggggcgcagctcggcgtcatgcagggccctatgggacctatgggcccacggggaccaccagggcccgccggagcaccaggcccccagggtttccaggggaatccaggggagccaggggaaccaggtgtgagtgggcccatgggacctaggggtcccccaggcccccctgggaaacccggggacgacggtgaagctggaaaacccggaaaagccggcgagcggggcccgccagggcctcaaggcgccagagggtttcccggaactcctggccttccaggagtgaaaggacaccggggataccctggtctcgacggcgccaagggagaagccggagctccaggggtgaaaggagagagcggcagtcctggcgaaaatgggtctccaggacccatgggccctagaggactacccggagaaagaggtagaactggacccgccggagccgccggcgctcgcggaaacgatggacagccaggccctgccgggccacctgggcctgtgggtcctgctggcggccccggctttcccggagcacctggagctaaaggggaggcagggcctaccggcgcccgcgggccagagggcgcccaaggccccagaggggagcctggtactcctggatctcctggccccgcaggcgcctccgggaatcctggtacagacggaattcccggagcaaagggctctgccggggcaccaggaatcgcaggcgcacctggcttccctggtccccggggacctccagggccccagggcgccactggccctctgggccccaaaggccaaacaggggagcctgggatcgccggcttcaagggagagcaggggcccaagggggaacctggcccagcagggcctcagggagcccccggaccggcaggagaagaaggtaaaaggggcgccaggggcgaaccagggggcgtgggcccaattgggccgcccggggagagaggagcacccggcaacaggggcttcccaggtcaggacggactggctggtccaaagggagcaccgggagaacgaggacccagcggcttggctgggcccaaaggcgcaaacggcgacccaggaagacctggagaaccaggcttaccaggggctagagggctgactgggcgacctggcgatgctggtccacagggcaaggttgggccgtcgggggcccctggcgaagatggccgcccaggacctccaggcccacagggcgcacggggacagccaggcgttatgggtttccctgggcctaagggggctaatggcgaaccaggcaaggctggagaaaagggtctacctggagctcccgggctgcggggactgcccgggaaggacggagaaaccggtgcggccggtccccctggccccgcaggtccagcaggagaaagaggtgagcagggcgctccaggaccaagtggcttccaagggctgcccggaccacccggtcctccaggggaaggagggaagcctggagatcagggggtcccaggggaagcgggggcccctggcctcgtgggcccccgcggcgagcgcggctttcctggcgagagaggtagcccaggggctcagggcctccagggcccgagaggcctcccaggtacgcctggcacggacgggcccaagggagcaagcggaccagccggtccaccgggcgcccagggtcctccaggcctgcagggcatgcctggagagcgaggagccgctgggatcgcaggtccaaaaggggaccggggggacgttggcgaaaagggccccgagggcgcgcccggcaaggatgggggcagaggactaaccggcccgattggccccccaggcccggctggcgcgaacggggagaaaggggaggttgggccacctgggcccgcaggctctgcgggcgcacgcggtgctcctggagaacggggcgaaaccggcccacctgggcccgccggttttgctggtccccccggagctgatggccagccaggagccaagggtgagcagggggaggctgggcagaaaggcgacgcaggggccccagggccccagggaccctcgggcgcgccaggtccacagggcccgaccggcgttaccggacctaagggcgcaagaggggctcaggggccaccaggggccaccggcttccctggggcggcagggcgcgtggggccccctggttcgaatggaaacccggggccacctggtcccccaggaccatcgggtaaggacggccctaaaggggcccggggcgactcaggcccccccgggagggccggtgaacctggtctgcagggccctgcgggtccacctggtgagaaaggcgaacccggtgacgacggcccatctggagccgaagggccccctggcccacagggcctagcagggcaaagagggatcgtgggattgcctggccagagaggggagaggggctttcccggcctgcctggaccttccggggagcctggcaagcaaggagccccgggagcctctggagaccgcggcccaccgggcccggttgggccccccgggctcacaggaccggcaggggaacccggtcgggagggaagccccggcgccgacggccctccaggccgtgatggcgccgccggcgttaagggagaccgaggggagaccggcgccgttggcgcccctggcgcccctgggcccccgggctccccaggccctgcagggcccaccggtaagcaaggggacagaggtgaagcgggcgcacagggtcctatgggccccagcggacccgctggggcccggggtatccagggtccacaggggccacgcggagataagggcgaagccggtgaacccggcgagcggggcttgaaaggacaccgtgggtttaccggcctgcaggggcttcccggcccacccggaccctccggggaccagggtgcatctgggcctgccggccccagcggacctcgtgggcccccaggccccgtgggcccgagcggaaaggacggtgctaacggaatccctgggcctattggacccccaggcccaagagggagatcgggcgaaacgggccctgcggggccgcccggcaatccagggcccccgggaccccccggcccccctgggcctggcatcgatatgagtgccttcgccggcctcggcccacgcgagaagggtccagatcctctgcagtacatgcgggcggaccaggcagccggtggcctgcgccaacatgacgccgaggtcgacgctaccctgaaatccctgaacaatcagattgagtctatcaggtccccagaggggagtaggaaaaacccagcgaggacttgtcgcgatctgaagctttgtcatcctgagtggaaatcgggagattactggatcgaccctaatcagggctgtactctggacgcgatgaaagtgttttgcaatatggaaaccggagagacttgtgtctaccctaaccccgctaacgtcccaaagaagaactggtggagctctaagtcaaaggaaaagaagcacatttggtttggggagactatcaatggtgggtttcacttctcctatggagatgacaacttagcgcctaataccgccaacgtgcagatgacctttctcaggctgctgtcaacagaaggaagtcagaacatcacttaccattgcaagaacagcattgcttatctagacgaggctgccggtaatctgaagaaggctttactcatccaaggcagcaacgacgttgagattagagccgaaggaaattcccgattcacatacacagccctcaaagatggctgtaccaaacacaccggaaaatggggcaagaccgtcatcgaataccggtctcaaaagaccagtcgtttgcctatcatcgatattgcccccatggatatagggggtcccgaacaggaattcggcgtggacattggcccagtctgctttctttag

SEQ ID NO: 333574 - DNA, 4464 bp, Artificial Sequence
  derived and/or modified sequence
atgatccggctgggcgccccccagaccctggtgctgctgaccctgctagtcgcagcagtcctgcgatgccaggggcaagacgtacaagaagcgggttcctgcgtgcaggacggccagaggtataatgacaaagatgtgtggaagcctgagccctgccgcatctgtgtgtgtgatactggaaccgtgctgtgcgatgacattatttgtgaagacgtcaaggactgtttgagtccggagataccgtttggtgaatgttgtccaatctgcccgaccgacctggctaccgccagcggccagcccggccctaaagggcagaaaggagaacccggagacataaaagatatcgtcggtcctaagggtccccccgggcctcagggaccagcaggagagcaggggccccgaggggatcgcggagacaaaggggagaaaggagcgcccgggccgcggggacgtgatggggaaccaggaacaccaggaaatccagggcctcctgggccacctggacctccaggccccccgggactgggcggaaattttgctgctcagatggctggagggttcgatgaaaaagctggcggagcccagcttggtgtgatgcaggggcccatggggccaatgggtccccgtgggcccccaggcccagccggtgccccaggacctcaaggattccagggcaatcccggcgaacctggcgaaccaggagtgtcagggccaatgggacccagaggacccccggggccgcccggcaaacctggagacgatggggaggccggtaagcccggaaaagccggagagagaggccctcccgggccacagggcgcccgtggttttcccggaaccccaggcttgccgggcgtcaaaggccaccgcggttaccctggattagatggtgcaaagggcgaagcaggagcacccggtgtaaagggggaatctggatcgccaggcgaaaatggttctcctggacccatggggccgcgaggcctgccaggagagcgaggaaggaccggccctgctggggcagccggggcgaggggaaacgacggccagccgggacccgccggaccccccgggcctgtggggcctgcagggggtcctggctttccaggtgcaccgggcgccaaaggggaggcaggacctaccggtgcaaggggaccggaaggcgcacagggccctaggggcgaacctggcacccccggatccccgggacccgcaggagcttcaggaaatcccggcacggacggtatacccggcgcgaagggcagcgccggggctcctggaatcgccggtgcccccgggttcccaggcccacggggcccacctggacctcagggcgctacgggcccactcggacccaagggacagactggggagcctggcattgctgggttcaaaggcgaacagggccccaagggagagccgggccccgccggtccccagggggcgcccggacccgccggcgaggagggcaagagaggggctcggggtgagccgggcggagtcgggccgattgggcccccaggagagcgcggagctccaggtaaccggggatttccaggtcaggacggactggcaggcccgaagggcgcccccggtgagcgcggcccaagcggcctggccggtccaaaaggcgctaacggagaccctggcagacccggcgagccaggcctcccaggggcacgggggctcaccgggcggcctggagatgcaggtccccaggggaaagtcggtcccagcggagctcccggggaggacggccggccaggcccacctgggccacagggggctcgtggccagccgggagtgatggggttcccgggccccaagggggcaaacggcgagccagggaaggccggagagaaaggcctccctggcgcccccggtctccgggggcttcccggcaaggatggggaaactggggccgcaggtcccccaggccctgccggtccagccggggagcgcggggagcaaggggcaccaggcccctcgggcttccaggggctgcccggcccacccggacctcccggagagggagggaagcctggagatcagggcgttcccggagaggctggcgcgccaggcctggtggggccacggggcgagagaggtttcccaggagagcgggggtcccccggtgcccagggactgcaaggcccccggggcctacccggaactccaggaacagacggcccaaagggtgcatccggacctgctgggccacccggcgcgcagggtccaccaggcctgcagggaatgcccggcgaacgtggcgcggctggaattgccggaccaaaaggggatcggggggacgtcggcgaaaagggccccgaaggggcgcccgggaaggacggtggtagaggactgaccggtcctatcggccctcctgggcctgccggagccaatggcgaaaaaggcgaagtgggcccccccggccccgcaggttccgctggtgctaggggcgcccccggtgaacggggggaaacagggccccctggtcccgccgggttcgcggggccccccggagccgacggtcagcccggggctaagggcgagcagggagaggcaggacagaaaggtgacgcaggcgcgcctgggccacaaggaccctccggagcccctggtccacaaggccccactggcgttacagggcccaagggtgcccggggggcccagggtccccctggggcaaccgggttccctggggctgccggtagagttggtcctcccggttcgaacggcaacccaggacctccgggtcctccaggccctagtggcaaagacggtcccaagggcgctcggggtgacagtgggcctcctggtagggccggtgagccgggcttgcaagggcccgcgggcccacctggtgagaagggtgagccaggcgacgatggaccgtcaggtgctgaaggaccccccggcccacagggattagccgggcagagaggcatagtggggctgccaggccagcggggggagaggggatttcctggcctaccagggccgtcgggggagcccggaaaacaaggggcacctggagcatcaggggaccgaggcccccccggcccagtgggcccaccaggcttgacaggtccggcaggagaacccggacgcgagggatctcctggagcagacggcccaccggggagggatggtgccgcaggagttaaaggtgatagaggggagacaggcgccgtcggggcccccggcgccccagggccgcccgggagccccggaccagcgggccctaccggcaaacagggcgacaggggagaggcaggggctcaggggcccatggggccctcggggccggccggcgccagaggcatccagggcccacagggtcctaggggagataaaggggaagctggagaacccggggagcgcggccttaaaggccaccgtggctttacaggccttcaagggctccccggtccgcccggacccagtggagaccagggtgcgtcaggacctgcaggaccctcaggcccacgcggccctccggggccagttgggccaagtggtaaggacggcgctaacgggatacccgggccgatcggcccccctggtcccagaggtagaagcggagaaaccggaccagccggaccacctggcaaccctggcccccctggacccccaggaccaccgggaccgggaatcgatatgtcagcctttgcagggctggggcctcgagagaagggtcccgacccacttcagtacatgagagcggatcaggccgccggcggactgcgccagcatgatgctgaggtggacgcaacactgaaaagtctgaacaaccagattgagtctatccgatcaccagagggttcacgcaagaaccccgctcgtacctgtcgcgacctgaagctatgccaccccgaatggaaatcaggagattactggatcgaccctaatcagggatgcacactggatgcaatgaaggtattttgtaatatggaaacaggagagacttgcgtttaccctaacccagcaaacgtacccaagaaaaactggtggagctcgaagtccaaggagaagaagcacatttggtttggcgaaaccatcaacggaggattccacttttcttacggtgacgacaacctagccccaaatactgcgaatgtgcagatgacatttctgcgcctgctgtccaccgaaggttcacagaacataacttaccattgcaagaactctatcgcctatctagatgaagctgccggcaacttgaagaaagctttgctcattcaaggttcaaacgacgtggagatcagagccgaaggtaactctagatttacctatactgcactgaaagatggctgcactaagcacaccgggaagtgggggaaaactgtgatagaatacagatcacagaaaacttctagactgcccatcatcgacattgcccctatggacatcggagggccagagcaagaattcggggtagatattggtcctgtatgttttctctag

SEQ ID NO: 333575 - DNA, 4257 bp, Artificial Sequence
  derived and/or modified sequence
atgatccggctgggcgccccccagaccctggtgctgctgaccctgctggttgctgctgttctgcggtgccagggccaagatgttcgtaaacctgcacccgctctcgaaccggccgcacctggctcgctgtctcagatcgtcggccccaagggacccccaggaccgcaggggcctgcaggcgaacagggccctcgcggagacaggggcgataagggggaaaagggcgcacctggccctagggggagggatggcgaacccggcacgcccggtaatcccggccctcccgggcctcccggaccacctggtcctcccggtcttggaggaaactttgccgcgcagatggcagggggttttgatgagaaggcaggcggcgcacaacttggagtgatgcagggcccaatgggccctatgggaccccgggggccgccagggccggcgggcgctcctggtccccagggatttcagggaaatccaggtgaaccgggcgagcccggcgttagcggacccatgggtcctcgtgggcctcctggcccccccgggaagcccggtgatgacggggaggccggtaagccggggaaagccggcgagcggggcccgcctggtccgcaaggcgctagagggttccctggcacccccggactgcctggtgtgaaaggacacagaggctatcccggcctggatggcgctaaaggcgaagccggcgctcccggagtgaagggggagtccgggtctcctggagaaaatggctctcccggaccaatgggacccagaggcctgcccggagaacgggggcggaccggccctgcgggggccgctggtgcccggggcaatgacggtcagccaggaccggccggacccccaggtccggtgggcccggctggtgggcccgggttcccaggcgccccaggggccaaaggggaggccggccccaccggcgctcggggtcctgaaggcgcccagggtccacgaggggagcccggtactccgggatctcctgggccggccggagccagcggcaaccctggtactgatggcatccccggggccaaaggatccgctggagccccagggatagctggtgcacccggtttccccggaccacgagggccacccggcccccaaggagccaccggacctctgggtcctaagggccagaccggagagccaggcattgccggcttcaagggtgagcagggccccaagggagagcccggtcccgcaggtcctcagggcgcgcctggccctgcaggagaggagggcaagcggggcgctcgaggggagcccgggggagtgggtccgattggacccccgggcgagcggggagccccaggaaataggggcttccccggacaggatggcctcgccggacctaaaggtgccccaggcgaacgcggtcctagcgggctcgccgggcctaagggggccaatggtgacccggggcggcctggcgagcctggtctgcccggtgccaggggacttaccgggcgccctggcgacgccggcccacagggaaaggttggcccttctggagcaccgggtgaagatggccgaccaggccctccgggtccacaaggagccagaggccagcccggtgtaatgggatttccaggcccgaagggagctaacggtgaacccggcaaagccggagaaaaaggcctccccggagcccccggcttgaggggcctgcccgggaaggacggtgagacaggtgctgccggcccgcctgggccagcaggccctgccggtgagagaggagaacagggagcccctggcccaagcgggttccagggtctacccggacctccaggacctcccggagagggcggaaagcccggtgatcagggggtgcctggagaagccggggctccagggctggtaggacctaggggagaacggggtttccccggggagagaggctcccctggggctcagggcctccagggaccaaggggtctccccgggacccccggcacagacgggcccaagggtgcaagcggacctgccggcccacccggagcccagggcccccctggcttacagggcatgcccggggaacgcggtgccgcggggattgctgggccgaaaggtgatcgcggggacgttggcgaaaaaggcccagaaggcgccccgggcaaagacggcggcagaggtctgacaggacccataggaccccccgggcccgcaggagcaaatggcgaaaagggggaggtcggcccacctggccctgctgggtccgctggtgcgaggggcgctcccggagagaggggcgagacgggtccccccgggcccgcggggttcgcaggacctccaggtgcagacggacagccaggcgctaagggtgaacagggcgaggcaggccaaaagggcgacgcaggtgcaccaggccctcaaggtccgtctggagcccccgggccacaggggcctactggtgtcaccgggccaaaaggcgccaggggcgcccaagggccccctggcgctaccggtttccctggggccgctggcagagtgggtcctcctggtagcaacggaaatccaggtcccccgggcccccccggacccagtgggaaggacgggcctaagggcgcaaggggggactccggcccgccagggagggccggcgaaccaggacttcagggccccgccggtccgccaggagagaagggggagcccggcgacgacggtcctagcggtgccgagggtccacccggcccacaaggtctggctggccagcgtggaattgtgggcctcccaggccagcgtggagagcggggcttcccaggattgcctggacctagtggcgaaccaggcaagcagggcgcccccggtgcttctggggatagaggtcccccagggccagtagggccaccgggcctcacgggtcccgccggcgaacccggtcgggaaggcagccctggcgccgacggacctccagggcgggacggcgctgctggggtcaagggcgatagaggcgaaaccggcgccgtgggagccccgggcgcaccaggacccccaggaagtccagggcccgcgggacctactggcaaacagggggacagaggcgaggctggggctcagggaccgatgggaccctctggcccagccggtgcccgaggcattcagggtccccagggtccaagaggggacaaaggagaggccggtgagcctggagaacggggtcttaagggccataggggatttacaggcttgcagggactgcccggacccccgggaccgtctggcgatcagggcgcgagcggacccgctgggccaagtggaccaaggggacctcctggacccgtgggaccatcaggcaaagatggtgcaaatgggatccctggacctattggacccccgggccccaggggccgaagtggagaaactgggccagcaggccccccaggcaatcccggccctcccggtccgccagggccacccggcccgggcatcgacatgtctgcctttgcaggcctcggaccccgggaaaaaggtccggacccactgcagtacatgcgagcggatcaggccgctggggggttgcggcagcatgatgccgaggtcgacgccacactgaagtccctcaacaatcagattgaaagcattagatctcccgagggatctagaaaaaatccagctaggacatgtcgggatctcaagctgtgtcaccccgagtggaaaagcggtgactattggatcgatccgaatcaagggtgtacactggacgccatgaaagtcttttgcaacatggaaacgggtgagacatgcgtctaccccaatcccgcaaatgtacctaaaaagaactggtggtcttccaaatccaaagagaagaagcatatctggttcggtgagaccatcaacggaggattccatttctcttacggggatgataacctggcccccaacacagccaacgtgcagatgacctttttacgattactgtccactgaaggctcccagaacattacatatcactgtaagaacagcatagcctacctcgacgaagccgcaggcaacctaaagaaagcccttttgatacaagggtcgaatgatgtggagattcgcgccgaggggaactctagattcacttacacagcactgaaagacgggtgcactaaacataccggcaagtggggaaaaactgttatcgaataccgctcacagaagaccagtcggctgccaattattgacatagcgcccatggatataggaggccccgagcaagagttcggcgtggatataggacctgtgtgttttctgtag

SEQ ID NO: 333576 - DNA, 4257 bp, Artificial Sequence
  derived and/or modified sequence
atgattcggctcggcgcacctcaaaccctggttctcctgactctgctcgtcgccgctgtgttgaggtgccaggggcaggacgtaagacagcctgggccaaaggggcaaaagggcgaaccgggagacatcaaggacatcgtggggccaaaaggtccacccggtccacagggtcccgcaggtgaacaaggcccaagaggtgacaggggcgataaaggggagaaaggagctcccggtccccgtggcagagacggagagccaggcacccccggtaatccaggccctccgggaccgcctggacctcccggtccacctggcttaggcggaaattttgccgctcagatggccggtggatttgatgaaaaggcgggtggagcccagctgggagtcatgcagggccctatgggtcccatgggccctagagggccacctggccctgcaggcgctccgggtccccagggattccagggcaaccccggagagcccggagagcctggggtctccggcccaatgggccctagagggcctccaggacccccaggcaaacctggagatgacggagaggccggaaagcctgggaaggccggtgagaggggccctcccggacctcagggagcaagaggttttccaggaactcccggattgcccggagtgaagggacatagaggctatcctggacttgatggcgctaagggagaggctggtgcacccggagtgaaaggggaaagtgggagtcctggggagaatgggtcccctggtccaatgggaccacgcggactgccaggagagcgcggaaggactggcccagctggggctgctggcgcaagaggcaacgatggccaacctgggccagcagggcctccaggtcccgtgggtccagccggtggcccaggtttccccggagcccctggggctaagggtgaagccggtcccacaggcgcaagaggccctgagggagctcaaggtccgcgaggagaacctggcacccctggatcaccaggccctgctggggctagcggcaaccctgggacagacggcatccccggtgcaaagggcagcgccggtgcccctggaatcgccggagcccctgggttcccgggacccagaggccctcctggccctcagggcgctaccggacccttgggccctaaaggacagactggggaacccggaattgcaggatttaaaggggagcaaggccctaaaggcgagccgggacccgctggcccacaaggagctcctggtcccgcaggtgaagagggcaagcgcggagcccgaggcgagccaggcggagtgggccctataggcccacctggagagcgaggagcgcctggcaatagaggcttccctggacaggatggactggctggacccaagggggctcccggtgagaggggaccctccgggctggctggcccaaagggcgcaaacggtgaccccggacggcctggggagcctggtctaccgggagcgaggggactaacggggaggcccggtgacgccggacctcagggcaaagtgggccctagcggagccccaggcgaagacggtcggccagggccacccggtccgcagggcgcaagaggacagcccggagtcatgggcttccccggtcctaaaggagctaacggggagcctgggaaagccggtgagaagggcctgcccggtgccccagggctacgcggattaccaggcaaagatggtgagactggggcagccggaccgcctggtcccgcaggcccagccggagagagaggagagcagggggcacccggacctagcggattccaaggccttcccggaccccctggtccacccggagagggcggtaaaccgggagaccagggagtgcccggagaagcaggggcaccaggactggtcgggcctcggggagaacggggatttcccggtgagagaggcagcccaggtgctcagggattgcagggacctagaggcttaccaggcacgcccggaacagatggccctaagggtgcttcaggacctgccggtccacctggggctcaggggccaccaggactgcagggaatgcctggggagcgcggtgcagctgggatcgctggcccaaaaggagaccgcggtgacgttggcgaaaagggcccagagggtgctcccggaaaggatggcggtcgcggtcttaccggccctataggtccccctgggcctgccggagccaatggtgagaagggcgaggtgggacccccaggacccgctgggtccgccggtgccagaggagcacccggtgagcgtggcgagactggacctccaggacccgctggatttgccggacccccaggtgcggacgggcaaccaggagcaaagggcgagcagggcgaagcgggacagaaaggcgacgcaggggctcctgggcctcaggggccatccggcgcacctgggccacaggggccaactggcgtgacaggaccaaagggagccaggggggctcagggccctcctggcgcaacaggattcccgggtgcagcaggacgtgtcgggcctccaggttctaacggaaacccaggcccacctggcccacctggcccaagcggaaaggacggacctaagggagccagaggagacagtggacccccagggagggccggagagccaggcctccaaggccctgcaggccctcctggtgagaagggcgaacccggtgacgatggacccagcggcgctgaggggcctcccggaccgcaaggtctagccggacaacggggaattgtgggactaccaggccagcgtggcgagaggggttttcctgggctgcctggcccatccggcgagcctggtaaacagggagctcctggcgcttctggggaccggggaccgcctgggccagtcggccctccaggtctcacaggccctgccggagaacccggtcgcgaaggttcgccaggagccgatggcccacctggccgagacggggcagccggagtgaaaggcgaccggggtgaaacaggggctgtcggcgcaccaggagccccaggtcccccaggttctccgggaccagctgggcctacaggcaagcagggggaccggggtgaggccggagcacagggaccaatgggcccttccggccctgccggtgccaggggaatccagggccctcagggaccaaggggggacaagggtgaggccggagagccaggagaaagaggtctcaaaggccatcgcggatttactgggctgcagggcctccccggtcctcccggtcctagcggagatcagggggcatccggtccggcaggccctagcggcccaaggggacctccaggccctgtagggccttccggaaaggatggcgcaaacggcattcctgggccaatcggtcctcctggtcctcgcggaagaagcggagaaacgggcccagccggacctccaggtaatcccggtcctccagggcctcccggtccccctggccctggcatcgatatgagtgctttcgctgggttagggcctcgcgagaagggacctgatcctctccagtacatgcgtgctgaccaggcagcagggggactcagacaacatgatgccgaggtggatgccacattgaagtcccttaataaccaaattgaatctattaggagccctgagggatcacggaaaaacccagccagaacctgcagggatctgaagctgtgtcaccctgaatggaaatcaggtgattattggatagaccccaatcagggttgtacactggatgcgatgaaggtgttctgcaacatggagaccggagagacatgcgtttatccaaatcctgccaacgtgcccaaaaaaaattggtggtcatccaaatctaaagaaaagaagcatatctggttcggagagacgattaacgggggattccatttttcttacggtgacgataatctggccccaaacaccgccaatgtgcaaatgactttcttgcgcctgttgtccacagaaggctctcagaatatcacttaccactgcaagaattccattgcatacctggacgaggcagccggaaatctcaagaaggctctgctcatccagggctctaatgatgttgagattcgggcagaggggaacagtaggtttacatacaccgccctcaaagacggctgtaccaaacacacagggaaatggggtaagacagtcatcgagtaccgctcccagaaaaccagccgcttgccaatcattgatatcgcaccaatggatattggcggtcccgaacaggagtttggtgtggatatcggcccagtctgctttctgtag

SEQ ID NO: 333577 - DNA, 4464 bp, Artificial Sequence
  derived and/or modified sequence
atgatcagactcggagcgccacagaccttagtattgctaacactccttgtggcagccgtcctacgttgtcagggacaggacgtgcaagaggcaggcagttgcgttcaagacggacagagatataacgacaaagatgtctggaagcctgaaccctgtcggatctgtgtgtgtgataccggcactgtcttatgcgacgatatcatctgcgaggacgtgaaagattgtttgagtccagagatccctttcggcgaatgctgccctatttgtcctactgacttggcgacagcctctggtcagcctggtccgaagggccagaaaggcgaacccggagatataaaagacatcgtcggcccaaagggtcctccgggaccccagggcccagccggtgagcagggacctcgtggagatcgaggggacaagggtgaaaagggtgctcctggtccgaggggaagggatggggagcccggtacccccggtaaccccggaccccctgggcctcctggtccacccggtcctcccggacttggcggtaatttcgctgcacagatggctggcggattcgatgagaaggccggaggggctcagctcggggtgatgcagggccctatggggcctatgggacctcgcggtccacccggaccagctggcgcaccgggacctcagggcttccagggaaacccaggggagcctggggaaccaggagtatctggccctatggggccaagaggtcctccgggaccaccaggcaaacctggcgatgatggggaggctggcaaacctggcaaagccggtgagcggggtccccctgggcctcaaggcgctaggggatttcccggaactccgggactcccaggggtgaaaggtcacaggggatatcccggactcgatggagctaaaggggaggccggtgctcctggcgtcaaaggcgaatcgggctcacccggtgagaacggtagcccagggcctatgggccctaggggcctgccgggagagcgcggtaggactgggcctgcgggtgccgctggcgcaagggggaacgatggccagcctggtcctgctggcccacccggacccgtcggccctgccggaggacccggttttcctggggcaccaggtgccaaaggggaggccggtccaacaggtgctcgcggtcccgaaggagcgcagggcccacggggagagcccggtacccctgggagtccagggcctgccggtgccagcggcaaccctggaacagatggtatcccaggcgcaaaaggatccgccggagcccctgggatagcgggtgccccaggatttcctggcccacggggtccccctggccctcagggagccacgggtccgctcggcccaaaggggcagacaggggaacctggcatcgctgggtttaagggcgaacagggaccaaaaggagaacctggaccagccggtccacagggcgcaccaggccctgccggtgaagagggcaagcggggagccaggggagagcccggaggggtgggaccaataggacccccaggggaaaggggtgcccctgggaatagggggtttccagggcaggatggtctggcaggaccaaagggggcacctggagaaaggggtccgtctgggctcgctggcccaaagggagccaacggagacccaggcagaccaggggagccagggctcccgggagcccgtggtctgaccggacgtccaggcgatgccggtccccaggggaaagtgggccctagcggtgcacccggtgaggacggaaggccaggccctccaggtccccaaggtgccagaggccagccgggagtgatggggttccccggtcctaagggcgcaaatggggaacccggtaaagccggagagaaaggcctcccaggcgctccgggtctaagaggcctgcccggaaaagatggcgagacaggggcagcaggacccccaggcccagctgggccagcgggtgaacgcggtgagcagggagctcctggaccctccggctttcaagggcttccaggccctcctggccctccaggagaagggggtaaacccggagaccaaggggtgccaggggaagcaggcgcaccgggactggtaggccctcgaggagagaggggcttcccaggagaacggggatcacctggagcccagggcctgcagggaccacgaggactccccggaactccaggtacggatggacccaaaggggcaagcggccctgcgggtcctcccggagcacaagggccacccggactccagggcatgcccggagagcgcggagctgccggaattgcagggcctaaaggtgatcgcggagacgtgggcgagaaggggcctgagggggcacccggaaaagacggagggcgaggcttgaccgggccaatcggacccccaggcccagcaggggctaatggggagaagggggaggtgggaccaccaggcccagccggatcagctggagcccgtggggctcccggtgagcggggagaaaccggtcccccaggcccagctggatttgccggaccacccggagccgacggtcaacccggtgcaaaaggagagcaaggcgaagccggtcagaaaggcgacgccggagctcctggaccccaaggtccatcaggtgctcctgggcctcagggccctacaggtgttacaggacccaaaggcgctcgtggagcccagggccctcccggagccacagggttccccggagcagcgggtagggttgggccaccaggatctaacggcaaccccggtcccccaggacctccgggacccagtggcaaggacggccctaagggggctcggggtgactcaggtcctcccggaagggcaggcgaacccggtctgcaaggccctgctgggcctcctggtgagaaaggggaaccaggggatgatgggccatctggtgccgaggggcctcccggacctcagggactggctggccagaggggaatcgtgggcctgcccggtcagcgtggcgagcggggatttcctggcctcccaggccctagcggcgagcccggtaaacagggagcccctggagcatccggtgacaggggtcccccaggacccgttggaccaccaggactcaccggccctgcgggagagccagggagggagggctcccctggcgcagacggaccgcctggaagggatggagcagctggggtcaagggcgatagaggagagacaggggcagttggggcaccaggcgctcctggtccccctggatctccgggacctgccggtcccacgggtaaacagggagaccgaggcgaggccggtgcccagggacccatgggtcctagcgggcctgccggagctcgaggcatccagggaccacagggtcccagaggcgataagggcgaggctggtgaacccggagagaggggactgaaagggcatcggggtttcactggcctacaaggcctgccaggtcccccaggcccatccggtgaccaaggtgcttccggaccagcagggccttccggtcctagggggccaccagggccagtcggcccaagcggaaaggacggcgcaaatggcattccgggacccatcggaccaccaggtccacgcggtagatccggcgagactggcccagccggaccaccgggaaacccaggtccccctgggccacccggacctcccggtcccggaatcgacatgtcggcgtttgccggtctgggccctcgtgaaaaagggccagatccactacagtatatgagagccgatcaggctgccggtggcctgcgtcagcatgacgccgaggtggacgccaccttaaaaagtcttaacaaccagatcgaaagcattcggagcccagagggctctcgcaaaaaccccgcaagaacctgtcgggacttgaaattgtgccatccagaatggaagagtggcgattattggatcgatccaaaccagggatgtacccttgatgccatgaaagtgttctgtaacatggaaacaggagagacttgcgtgtacccaaacccggcaaatgtgcccaagaaaaattggtggtcatcgaaaagcaaggaaaaaaagcatatttggtttggggaaactataaatgggggatttcacttcagttatggggatgataacttagctccaaacacggctaatgtacagatgacttttctccgcttgctctcaacagagggcagccaaaacataacttaccattgcaaaaactccattgcatacctggatgaggccgcaggcaatctcaagaaagcactgcttatccaaggatcaaacgatgttgagattcgggctgaaggaaactcccggtttacctacaccgcgctgaaggacggatgcactaagcataccggaaagtggggaaaaaccgtcatcgaatatcgcagccaaaagacatctcggcttcccattatagacatagctcctatggacatcggcggaccagagcaagagtttggtgtagatatcggtccggtatgcttcttgtag

SEQ ID NO: 333578 - DNA, 4257 bp, Artificial Sequence
  derived and/or modified sequence
atgattcgcctgggcgctcctcagacccttgtgctgctgacacttcttgtggcagcggtccttcgctgtcagggtcaggatgtgcggaagcctgcacccgcattggagccagctgcaccgggaagtttatcacagattgtaggcccaaaaggcccacctggtccacagggacccgctggcgaacaaggaccccgaggcgatcgaggcgataagggggagaagggagctcccggaccgaggggtcgcgacggggaacccggtacaccgggtaaccctggccctcctggaccgcctggtcccccagggcctccaggtctaggcggaaacttcgctgcacagatggcaggaggctttgacgaaaaggctggaggagcacagcttggcgtgatgcagggccctatgggcccaatgggcccacgcggtccacccggtccagctggcgcaccgggaccccagggcttccaaggcaatcctggagagcccggtgaacctggtgtgagtggacctatgggtccaagaggccctccaggtccccctgggaaaccaggggatgatggtgaggccggtaaaccgggaaaggccggtgagagagggcctcccggacctcagggagcacgaggattcccagggacccccggactcccaggggtgaaaggacaccgtgggtatcccggtctggacggcgctaagggtgaggcaggagcccctggagtgaaaggcgaaagcgggtcacccggagaaaacggctctcctggcccaatgggtcctcggggactgcccggtgaaaggggtcgcaccgggccagccggagcagcgggagccaggggtaatgacggccagcctggtccagctggcccacccggaccggtggggccagccggaggaccgggatttcctggtgccccaggggctaagggggaggctggaccaaccggagcacggggacccgagggcgctcaaggacctaggggtgagcctgggacacctggttctcctggaccagctggtgcatctgggaatcccggtaccgacggaattccgggagctaagggtagcgcaggagccccagggatcgcaggcgcaccgggattcccgggacccagagggccaccgggaccccagggcgcaaccggtcctctcgggccaaagggacagactggcgagccaggtattgccggatttaagggtgagcaaggtcctaaaggtgagccagggcctgctggaccgcaaggagcaccagggcctgccggagaagagggtaaacgtggtgccaggggcgagcctggtggcgtaggaccaattggccctcccggtgagcggggagcacccggaaatcgcggatttcccggacaggacggcctcgcgggaccaaaaggtgcccctggagagcgaggcccatccgggttagctggaccaaagggagccaacggcgatcccggacgcccaggcgagcctggcctcccaggagctcgcggactgacggggagacctggggacgccggaccgcagggcaaggtcggtcctagcggggcacccggagaggacgggcgtccaggtcccccagggcctcagggggcaagaggacagccaggcgtcatgggcttccccggtcctaagggcgcaaacggggaacctgggaaagccggtgagaaaggactgcccggtgctccaggcttgcgaggcctgccagggaaagatggggagaccggggctgccggacctccgggtcccgcaggtccggctggtgagagaggcgagcagggagccccaggacctagcggtttccagggcctccctgggcctcctggccctccaggcgaggggggtaaacctggcgatcagggtgtgcctggcgaagcaggggcacctggcttggtgggtccgaggggggaaagaggttttccaggcgagcggggatccccaggcgcacagggcttacaaggacctcggggtctgcccggaactccagggactgacggcccaaagggcgcatccgggccagcgggaccaccaggggctcagggcccacccggtctgcagggaatgcctggagagaggggcgctgctggcattgctggaccaaagggggaccgcggagacgtcggggagaaaggaccagagggcgctcccggaaaggatgggggacgtggtttgaccggccctatcgggccacccggtcccgctggcgcaaacggagagaaaggagaggtgggaccgccaggccctgccggttccgccggtgctaggggtgcccctggagagcgaggcgaaactggcccacccggtccagccggtttcgcaggaccccctggggctgacggccagccgggtgccaaaggcgagcagggcgaggccggtcagaaaggagatgcgggagcacccggaccgcagggcccatccggggctcctggtcctcagggccctaccggagtgactgggccaaaaggggcaaggggtgcgcagggtccccctggggcaacaggatttccaggcgcagccggtagagtgggaccacccggatcaaacggaaatcccggaccacctggaccaccaggacccagcggtaaggatggaccgaagggtgcgaggggagactccggccctcctggaagagctggagaaccgggtttacagggccctgccggtcctcccggtgagaagggagagccaggagacgatgggccaagtggggcagagggcccacctggtccccaagggctggccggtcagagaggcatcgtcggcctgccaggccagcggggagagagaggattcccgggtctcccagggccatccggggagccaggcaagcagggagcccctggcgctagtggcgaccggggacctcctggccctgtagggcctcccggactgaccgggcctgcaggcgagcctgggagagaagggagccctggcgcagacggtcctcccggaagggatggtgccgctggcgtgaaaggagataggggagaaacaggtgccgtaggggctcctggcgcacccggtccaccaggtagccctgggccagccggaccaaccggcaagcagggtgaccggggtgaagccggtgcccaaggtcccatgggcccttctggacccgctggcgcaaggggtatccaggggcctcagggccctaggggtgacaaaggcgaagccggtgaacccggtgagagggggttgaagggacatcggggatttacaggacttcagggtctaccaggaccgccaggccctagcggggaccagggggcatctggcccagccggtccctcagggcctcgtggcccacccggacctgtgggacctagtggcaaagacggtgccaatgggatcccaggcccaatcggtccacccggacccaggggacggtcaggagagaccggtcccgctggtcctcccggtaatcccggaccacccggacctcccggtccacctggcccaggaatagatatgtccgcctttgccggactgggccctcgtgaaaagggtcccgatccactgcagtacatgcgggctgaccaggccgcaggtggcctgcggcagcacgacgccgaggtggacgctaccctgaaatctttgaataaccaaattgaatctattcggtcacccgagggaagcagaaagaatcctgctcgtacctgccgggacttgaagctgtgccatcccgaatggaaatccggcgattactggatcgatccaaaccaggggtgcaccctagacgcaatgaaggttttctgtaacatggaaacaggagaaacttgtgtgtatcctaaccctgcgaacgtgcctaagaaaaactggtggtctagcaaatctaaagaaaaaaagcacatctggttcggagagaccatcaacgggggattccattttagctatggtgatgataacttagcccctaatactgctaacgtacagatgaccttcttgcggttgctgtccacggagggatcacagaacatcacttatcattgtaagaatagcatagcatacttggatgaggcagccggtaatcttaagaaggcccttcttattcaaggctccaatgacgtggagatacgcgctgaaggcaactccaggtttacttatactgccctgaaggatggatgcacaaaacacactgggaaatggggtaaaaccgtcatagagtaccggagccagaagacctctagattacctattattgatatcgcacccatggacatcgggggtcccgagcaggagtttggcgtagatataggaccggtgtgcttcttatag

SEQ ID NO: 333579 - DNA, 753 bp, Artificial Sequence
  derived and/or modified sequence
atggcccacgtgggcaccagccgggtgggctctgtgctgtccatgagcctgagcatccacctgctggtgcccaccatgaccaagggggagaccgggaagccaggccaccacgaggcccccaggaccctgcaggccttcccctggacctgggcccgggccagccctggggtgtctgtggacatgtctgctggcctgccccagagcctgctgtgctggccaggggcccccctgctgcccaccccacccctgcccagcgccacctacgtgggccacagcctgggcctgccccgggccggcagctctgtgggcccctggttcagcggccgctgggtgggcggggccctggtgcagtggcccctgggcggcggcggccctggctctgtggccgccggcctgggcggccccctggtgcgctggctgctgggcggcggggccctggtgcgctggcccctgggcggcggcggccctggctctgtggccgccggctggggcggcccctggtttggaggccgctgggtgggcggccccccaggctctgtggccgccggctggggcggccctgtgcgctggcccctgggcggcggcggccctggctctgtggccaccggctggggcggcccctggtttggaggccgctgggtgggcggccccccaggctctgtggccgccggctgcggcggggccctggtgcagtggcccctgggcggcggcagcctgcacagcatccccagcttcccccgggcctggaggtag

SEQ ID NO: 333580 - protein, 193 aa, Artificial Sequence
  derived and/or modified sequence
MLEVGCGCLVVPFFNFFHCYCPVGFGRRTDPNGDYIRRYLPVLRGFPAKYIYDPWNAPEGIQKVAKCLIGVNYPKPMVNHAEASRLNIERMKQIYQQLSRYRGLGLLASVPSNPNGNGGFMGYSAENIPGCSSSGSCSQGSGILHYAHGDSQQTHLLKQGRSSMGTGLSGGKRPSQEEDTQSIGPKVQRQSTN

SEQ ID NO: 333581 - DNA, 582 bp, Artificial Sequence
  derived and/or modified sequence
atgctggaggtgggctgcggctgcctggtggtgcccttcttcaacttcttccactgctactgccccgtgggcttcggcagaagaaccgaccccaacggcgactacatcagaagatacctgcccgtgctgagaggcttccccgccaagtacatctacgacccctggaacgcccccgagggcatccagaaggtggccaagtgcctgatcggcgtgaactaccccaagcccatggtgaaccacgccgaggccagcagactgaacatcgagagaatgaagcagatctaccagcagctgagcagatacagaggcctgggcctgctggccagcgtgcccagcaaccccaacggcaacggcggcttcatgggctacagcgccgagaacatccccggctgcagcagcagcggcagctgcagccagggcagcggcatcctgcactacgcccacggcgacagccagcagacccacctgctgaagcagggcagaagcagcatgggcaccggcctgagcggcggcaagagacccagccaggaggaggacacccagagcatcggccccaaggtgcagagacagagcaccaactag

SEQ ID NO: 333582 - DNA, 1217 bp, Artificial Sequence
  derived and/or modified sequence
atgctggaagttggatgtggctgtcttgtagttccttttttcaacttttttcactgctattgccctgttggttttggtaggagaacagatcccaatggagactatatcaggcgttatttgcctgtcctaagaggcttccctgcaaaatatatctatgatccctggaatgcaccagaaggtatccaaaaggtagccaaatgtttgataggagttaattatcctaaaccaatggtgaaccatgctgaggcaagccgtttgaatatcgaaaggatgaaacagatctatcagcagctttcacgatatagaggactaggtcttctggcatcagtaccttctaatcctaatgggaatggaggcttcatgggatattctgcagaaaatatcccaggttgtagcagcagtggaagttgctctcaagggagtggtattttacactatgctcatggcgacagtcagcaaactcacctgttgaagcaaggaagaagctccatgggcactggtctcagtggtgggaaacgtcctagtcaggaagaggacacacagagtattggtcctaaagtccagagacagagcactaattagaaaacattcaggaggaatactgttgcagctgaaattggtggggagttcaatacttttcaattaagttatttaaaaatattcttcattgatggaaagcagttacatattgaaatatgttgtttctaatgacatttctgtggtttttaactttttaatgaatttcacagaggacaattggtaatttgtatataaagaacttggcaagagaatttgcttaatgtaaatataaacagtcacaattagtatagacccatcgatatatttttgataatttttcatgtatggtaaagttaaaatgacaaattgatattctgatataaaactcaaagttttgaagtcagtgggaaaaaaggaggtttttagactttcttaaaagacgttaaaattttaggacagaattttcttgatgttgtttgatctaactttgcactctttgataataatgttttagataatgtgcgtaatccaaattggtattgtagcctctgttaacacagacagtatatgttttaaactttgatgtaaacctttttagacccaaacttgtggaagtatcatgtgttaagttctctgtctctgtttctttgttcatttattactaaaatgaacttgttattaaagtatatgcaaatatg

SEQ ID NO: 333583 - DNA, 582 bp, Artificial Sequence
  derived and/or modified sequence
atgttggaggttggttgtggctgcctggtggttccatttttcaactttttccattgctactgtcctgtcggttttggaagaagaaccgaccctaacggggattatatcagaagatatctgcctgtcctgagaggctttcccgccaagtatatctacgacccttggaatgctcccgaggggatacagaaagttgctaagtgcttgattggggttaactacccgaaacccatggtgaatcacgctgaggcctcacgcctcaacattgaacgtatgaagcagatttaccagcaacttagtcggtataggggcttagggctgttggccagtgtgccatctaaccctaatggcaatggtggattcatggggtactctgcggaaaatatccccggctgctccagtagtggcagctgctctcagggctcaggaatactgcactatgcccacggcgattctcaacaaacgcacttgctgaaacaaggccggtcatctatgggcacaggtctaagtggcggaaaaaggccaagccaggaagaagatactcaatcaattggcccgaaagtacagagacagtctaccaattag

SEQ ID NO: 333584 - DNA, 582 bp, Artificial Sequence
  derived and/or modified sequence
atgctggaggtgggctgcggctgcctggtggtgcccttcttcaacttcttccactgctactgccctgtgggctttggaagaagaacagaccccaacggggactacatccgccgctacctgcctgtgctgcggggcttccctgccaagtacatctatgacccctggaatgcccctgagggcatccagaaggtggccaagtgcctgattggagtgaactaccccaagcccatggtgaaccacgccgaggccagccggctgaacatcgagaggatgaagcagatctaccagcagctgagccgctaccggggcctgggcctgctggcctctgtgcccagcaaccccaatggaaatggaggcttcatgggctacagcgctgagaacatccctggctgcagcagcagcggcagctgcagccagggcagcggcatcctgcactacgcccacggggacagccagcagacccacctgctgaagcagggccgcagctccatgggcaccggcctgagcggcggcaagaggcccagccaggaggaggacacccagagcatcggccccaaggtgcagaggcagagcaccaactag

SEQ ID NO: 333585 - DNA, 582 bp, Artificial Sequence
  derived and/or modified sequence
atgctggaggtgggctgcggctgcctggtggtgcccttcttcaactttttccattgctattgtcccgtgggcttcggtaggagaaccgatcctaatggcgattacatccgccggtatctaccggtgctgagggggttcccggccaagtacatttacgacccctggaatgcccccgagggaatacagaaagtcgcaaaatgtctcatcggcgtgaactaccccaagcctatggtcaaccacgctgaggccagccggctgaacatcgagcgcatgaaacagatttaccagcagctgtccagatatagggggctgggtctgctggccagcgtcccctcaaatcccaacgggaacggaggtttcatgggatactcagcagagaacattccagggtgcagctccagtgggagttgcagccagggatccgggatcctgcattacgctcacggggattcacagcagacgcatttactgaagcagggtagatcgagcatgggtacaggcctgagtggcggcaaacggccatcacaggaggaggacacacagtccatcggccctaaggttcagagacagtccacgaattag

SEQ ID NO: 333586 - DNA, 582 bp, Artificial Sequence
  derived and/or modified sequence
atgctcgaagtgggctgcgggtgtttagtagtcccgttctttaacttctttcattgctactgcccagtaggctttggcagaaggacagatccaaacggagattatatccgcaggtatctcccagtcttaaggggcttcccggcaaagtacatctatgatccttggaacgcccctgaaggcatccagaaagtggccaaatgcttgattggcgtcaactaccccaaacccatggtgaaccacgcagaggcatctaggcttaacattgaacgtatgaagcagatctaccagcagctctcaagataccgcggactcggactgttggcctccgtgccttctaatcccaacggaaatggaggatttatggggtactctgccgaaaacattccaggctgtagcagtagcggctcttgtagtcagggatctgggattctgcattatgctcacggcgacagccagcaaacccacctcctaaaacagggacggtcatctatgggcactggactgtcgggcggtaagagacctagccaggaggaggatacacagtccatagggccaaaggtccaacggcaatccacaaattag

SEQ ID NO: 333587 - DNA, 1679 bp, Artificial Sequence
  derived and/or modified sequence
tttcccccgcggggagcgcctgggcttcagcggttgctccgcggtcctctctggcgggatcggcagcagctccgcctcattccgggcccgggtcaagggctcggcctcctttggcagcaagagcctctcctgccttgggggcagccgaagcctggcgctcagcgctgctgcacggcggggcggcggccgcctgggcggcttcgtgggcaccgccttcggcagcgccgggctggggcccaagtgtccctccgtgtgcccacccgggggcatccctcaggtcaccgtcaacaagagcctcctggccccgctcaacgtggagatggaccccgagatccagagggtgcgcgcccaggagcgggagcagatcaaggcgctaaacaacaagttcgcctccttcatcgacaagaaaacaccagcatttatagcatgagaagctacctctgtctcatgaaaactcactgaggcagaggcagatggtaccattgcttaagccctcttcctgattccatatagaccgggtcctatttcttgtcttggagatccaggtgcggttcctggagcagcagaatcaggtgctagagaccaagtggaacctcctacagcagctggacttgaacaactgcaggaagaacctggagcccatttatgagggctacatcagcaacctgcagaagcagctggagatgctgtctggggacggggtgaggctggattcggagctgaggaacatgcaggatttggtggaggactacaagaagaggtatgaggtggagattaacagacgcacagctgctgagaatgagtttgtggtgctcaagaaggacgtggatgctgcttacatgaataaggttgagctccaggccaaggtggactccttgacagatgagattaaattcttcaagtgcctttatgaaggggagatcactcagatccagtcccacatcagcgacacgtccatcgtcctgtcaatggacaacaaccgggatctggacctggacagcatcattgccgaggtccgtgcccagtacgaggagattgccctaaagagcaaggccgaggctgagaccctgtaccagaccaagatccaggagctgcaggtcacagcaggccagcatggggatgacctcaagctcaccaaggctgaaatctctgagctcaaccgcctgatccagaggatccgctcagagatagggaatgtgaagaagcagtgtgccgatctggagacggccatcgccgacgctgaacagcggggggactgcgccctgaaagatgcccgggccaagctggatgagctggagggcgccctgcaccaggccaaggaggagctggcacggatgctgcgtgagtaccaggagctcgtgagcctgaagctggccctggatatggagatcgccacctaccgcaagctgctggagagcgaggagtgcaggatgtctggcgaatatccaaattctgtgagcatctccgtcatcagcagcaccaatgctggggcaggaggggctggcttcagcatgggctttggcgcctcaagcagttatagctacaaaactgcagctgcagacgtcaagaccaaaggcagctgtggcagtgagctcaaggatccccttgccaaaacctcggggagcagctgtgccaccaaaaaggcctccagatgatggacaagtggttggctctgtgag

SEQ ID NO: 333588 - protein, 323 aa, Artificial Sequence
  derived and/or modified sequence
MLSGDGVRLDSELRNMQDLVEDYKKRYEVEINRRTAAENEFVVLKKDVDAAYMNKVELQAKVDSLTDEIKFFKCLYEGEITQIQSHISDTSIVLSMDNNRDLDLDSIIAEVRAQYEEIALKSKAEAETLYQTKIQELQVTAGQHGDDLKLTKAEISELNRLIQRIRSEIGNVKKQCADLETAIADAEQRGDCALKDARAKLDELEGALHQAKEELARMLREYQELVSLKLALDMEIATYRKLLESEECRMSGEYPNSVSISVISSTNAGAGGAGFSMGFGASSSYSYKTAAADVKTKGSCGSELKDPLAKTSGSSCATKKASR

SEQ ID NO: 333589 - DNA, 972 bp, Artificial Sequence
  derived and/or modified sequence
atgctgtctggggacggcgtaagactggacagcgaactgagaaatatgcaggatctggtagaagattacaaaaaaagatatgaggtcgagattaacagacgcactgccgcagaaaatgagttcgtcgtccttaaaaaggacgttgacgctgcgtatatgaataaggtggagctccaggcaaaggtggatagcctgacagacgagataaagttctttaagtgtctttacgagggcgaaattacgcagattcagtcccatatcagcgacacgtccattgtgctgtccatggacaacaaccgcgacttggaccttgactcaatcatagcagaggttcgggctcagtatgaagagatcgcgcttaaatccaaagctgaggccgaaactctctaccagacgaagatacaggagcttcaagtgacagctggacaacacggggatgatttaaaactgaccaaagccgagatctcagagttaaatcgactcattcaacggattagatctgagatcggtaacgtcaagaagcagtgcgccgatctggagaccgctatcgcagacgccgagcagaggggagactgcgctctcaaggatgcacgcgctaaattggatgagctggagggggcactccaccaggccaaagaagaactggcccgtatgctccgagaataccaggaactcgtgagtcttaagctggcattagacatggaaatcgccacctaccgcaagctgcttgagagtgaagagtgcagaatgtcaggagagtaccccaactcagtctctattagcgttatatcaagtaccaacgcaggcgctggtggcgccggattctccatgggttttggcgcctcctctagttactcgtacaaaacagccgcagcagatgtgaaaaccaagggatcttgtgggagcgagctgaaagaccccttggcaaaaacaagcgggtcttcctgcgcaacaaaaaaagccagcaggtag

SEQ ID NO: 333590 - DNA, 972 bp, Artificial Sequence
  derived and/or modified sequence
atgctgtctggagatggagtgcggctggacagcgagctgaggaacatgcaggacctggtggaggactacaagaagagatatgaggtggagatcaacagaagaacagctgctgaaaatgaatttgtggtgctgaagaaggatgtggatgctgcctacatgaacaaggtggagctgcaggccaaggtggacagcctgacagatgagatcaagttcttcaagtgcctgtatgaaggagagatcacccagatccagagccacatcagtgacaccagcatcgtgctgtccatggacaacaacagagacctggacctggacagcatcatcgccgaggtgcgggcccagtatgaggagatcgccctgaagagcaaggccgaggccgagaccctgtaccagaccaagatccaggagctgcaggtgacagctggccagcacggagatgacctgaagctgaccaaggccgagatcagcgagctgaacagactcatccagaggatccgctcagaaattggaaatgtgaagaagcagtgtgccgacctggagacagccatcgcagatgctgagcagagaggagactgtgccctgaaggatgcccgggccaagctggatgagctggagggcgccctgcaccaggccaaggaggagctggccaggatgctgcgggagtaccaggagctggtgtccctgaagctggccctggacatggagatcgccacctacaggaagctgctggagagtgaagaatgtaggatgtctggagagtaccccaacagcgtgtccatcagcgtcatcagcagcaccaatgctggggccggcggggccggcttctccatgggctttggagccagcagcagctacagctacaagacagctgctgctgatgtgaagaccaagggcagctgtggcagcgagctgaaggaccccctggccaagaccagcggcagcagctgtgccaccaagaaggccagcaggtag

SEQ ID NO: 333591 - DNA, 972 bp, Artificial Sequence
  derived and/or modified sequence
atgctgagcggcgacggcgtgcggctggacagcgagctgcggaacatgcaggacttggtagaggattacaaaaaaagatacgaagtggaaatcaatagaagaaccgccgcagaaaacgagttcgttgtgctgaagaaggatgttgacgctgcgtacatgaacaaggtggaactccaggccaaggtagatagtctgacggacgaaatcaagttttttaagtgcctttatgaaggggagataactcagattcagagccacatttcagacacatccatcgtgttaagcatggataataatcgggatctggatctggactctattatcgcagaagtacgcgcacaatatgaggagattgcgctgaagtctaaggccgaagcagaaaccctgtaccagactaagatccaagaactgcaggtgacggcgggtcagcatggagacgaccttaagttgaccaaggccgagattagtgagctaaaccgcttgatacagcgaattagaagcgagataggtaatgtgaagaaacagtgtgccgacctggaaaccgccattgcagatgctgaacagcgaggggattgcgcactgaaggatgctcgagccaaactagacgaattagagggggctcttcaccaggccaaagaggagctagcacgaatgttgagagagtatcaagaactcgtgagtttgaagttagccctcgacatggaaatcgccacatatcggaaacttcttgagagcgaagaatgcagaatgagcggtgaataccctaactccgtgtccatcagtgtcatctcctccacgaatgcaggtgccggaggtgccggattttcgatggggttcggcgcaagtagtagttattcctataagacagcagccgctgacgttaaaacgaagggttcgtgcggcagcgagttgaaagacccgctggcgaaaactagcggcagcagttgtgcaaccaaaaaagcctcacgctag

SEQ ID NO: 333592 - DNA, 972 bp, Artificial Sequence
  derived and/or modified sequence
atgctatccggggacggggtaaggctagacagcgagttacggaacatgcaggaccttgtggaggattacaagaaacggtatgaagttgaaattaataggaggacagctgcagagaatgaattcgtggtccttaaaaaggatgtggatgcagcatatatgaacaaagttgaactgcaggccaaggtcgacagcttgactgacgaaatcaagttcttcaagtgcctatatgaaggcgaaattacccagatccagagtcatatcagtgatacctctattgtgttaagtatggacaataatagggatctcgatctggacagtatcatagccgaggtcagggcccagtatgaggaaattgcactcaagtccaaggccgaggcggagaccctctaccagacaaagattcaggaactccaagtgacagccggacagcacggtgacgaccttaagctcaccaaagcagaaatctccgaattaaaccgtctgattcagcgcattcgctctgaaataggaaacgtaaaaaagcagtgtgcggatcttgagactgctattgccgatgctgagcagaggggagactgcgctctgaaggatgccagagccaagctggacgaacttgaaggggctcttcatcaggccaaagaagagttagccaggatgctacgtgagtatcaagaattggtgagcctgaaattggctctggacatggaaattgccacgtaccgcaaactgttggagtctgaggagtgtaggatgtctggcgagtaccctaactccgtttcaatctccgtcatttcatcaaccaacgccggagccggaggcgcagggttctcaatgggttttggagcaagctctagttactcgtataagactgccgctgccgacgtgaaaactaagggtagttgcggatcagaactgaaggatcctcttgccaagacctctggttcgtcttgtgcaactaagaaagcatcccgctag

SEQ ID NO: 333593 - DNA, 972 bp, Artificial Sequence
  derived and/or modified sequence
atgctgagcggcgacggcgtgagactggacagcgagctgagaaacatgcaggacctggtggaggactacaagaagagatacgaggtggagatcaacagaagaaccgccgccgagaacgagttcgtggtgctgaagaaggacgtggacgccgcctacatgaacaaggtggagctgcaggccaaggtggacagcctgaccgacgagatcaagttcttcaagtgcctgtacgagggcgagatcacccagatccagagccacatcagcgacaccagcatcgtgctgagcatggacaacaacagagacctggacctggacagcatcatcgccgaggtgagagcccagtacgaggagatcgccctgaagagcaaggccgaggccgagaccctgtaccagaccaagatccaggagctgcaggtgaccgccggccagcacggcgacgacctgaagctgaccaaggccgagatcagcgagctgaacagactgatccagagaatcagaagcgagatcggcaacgtgaagaagcagtgcgccgacctggagaccgccatcgccgacgccgagcagagaggcgactgcgccctgaaggacgccagagccaagctggacgagctggagggcgccctgcaccaggccaaggaggagctggccagaatgctgagagagtaccaggagctggtgagcctgaagctggccctggacatggagatcgccacctacagaaagctgctggagagcgaggagtgcagaatgagcggcgagtaccccaacagcgtgagcatcagcgtgatcagcagcaccaacgccggcgccggcggcgccggcttcagcatgggcttcggcgccagcagcagctacagctacaagaccgccgccgccgacgtgaagaccaagggcagctgcggcagcgagctgaaggaccccctggccaagaccagcggcagcagctgcgccaccaagaaggccagcagatag

SEQ ID NO: 333594 - protein, 263 aa, Artificial Sequence
  derived and/or modified sequence
MGRVLEEARFAVAFTESMKEMAQAQWKARQISLAVTSAVPVQPHAKGKVYVQSQGIATTPNAAFNWNTFLQRSEINQSADNLHIFLLICGLRQVKDPLYLVDAFSAWHQEEPNVHLVIVGPEVDPVFTREVKAKVKRAAGVRLIGEMPQEDLHAVVKNCFAVVNSSVSEGMSAAILEAMDLEVPVLARNIPGNAAVVKHEVTGLLFSNPQEFVHLAKRLVSDPALEKEIVVNGREYVRMYHSWQVERDTYQQLIRKLEGSTED

SEQ ID NO: 333595 - DNA, 1714 bp, Artificial Sequence
  derived and/or modified sequence
agtcttaacatgctgactgcgaggtgcctgtcagacgacacactggcccatctagaggctgcagggcacgtgtgcgttttgaaggatgcctttgactttgaaagccgatctgagattgcaaacctcatcttggctgagaactgcgaggctgccctggctcttcatctctataggggaggcaggcttttgcaaggccaccgaatcccttttggagtcatctttggtggaactgatgtaaatgaagatgccaaccaggcggaaaaaaacacagtcatgggcagagttcttgaggaagccagatttgctgtcgctttcacagagtcaatgaaggaaatggcacaagcgcagtggaaagcaagacagatctcattggctgtcacaagtgcagttcctgtacagccgcatgctaagggtaaggtctatgtccagagtcaaggaattgcaacaacaccaaacgccgcttttaactggaatacctttcttcaacgctctgagattaaccaaagtgctgataatttgcacatatttcttctgatatgtggacttcgacaagttaaggatcctctctatctggtggacgcattttcagcctggcatcaggaggagcccaatgtgcacctggtgattgtgggtcctgaagtcgatccagtgtttacaagggaagtgaaagccaaagtgaaaagagccgctggggtacgattgattggagagatgcctcaagaagatctgcacgcggtggtgaagaattgcttcgcggtggtgaatagctctgtctctgaaggcatgtcagctgcaattttggaggcaatggatttagaagtaccggtattggccaggaacatccccgggaatgctgccgtggtgaagcatgaagtcacagggctactgttttccaatcctcaggagtttgttcatctggcaaagagactggttagtgatcctgcattagaaaaggaaatcgtagtgaacggaagggaatacgtgagaatgtatcattcatggcaggtggaaagagacacctaccaacagctcatcaggaagctggaaggaagcactgaagattgagggccccgcctcatcagacacctgctctctgacacacagctctgggtgcacactcagagacagagttctggatcacgtgggcccagtgcagttcaaataaaaccagcctcagcggaatcctagaaaatgttagtcgtgagtccccagagccactgcattcatcccatatccttctgtgcgttcagatgctgtcccaggcgtgttcaccagccagtcctgatggaggtgcatgagtgactgggttgactgggacagggaaaggggaactggttttcagggaatttgggagagaatttgattacctgccttagggctttggtgtggacaatagaggcttattttcaagcagtcatggttcagactcctcccgcctgccttctgaccaacctctccccatcgttgccagtttgaaaggcaaaagcaaaacagacgtgtcagctgagccgagtcctcgcaggatttttgttgtgatctcaggactctgacaggcacgtgggtgacccgaggcttctctgaacactagaaagcgctgtgagtgagctcacgcccggcacagctcacttttcaatggtggaattgaaagttgtgctttttagaaaagtggccaggctgcccgcaggccccgcccacctcttggctgaatttgagt

SEQ ID NO: 333596 - DNA, 792 bp, Artificial Sequence
  derived and/or modified sequence
atgggccgggtgctggaggaggcccggttcgccgtggccttcaccgagtccatgaaagagatggcacaggcccaatggaaggccaggcagataagcctggctgtcacatcggcagtccccgtgcagccccacgccaaaggcaaggtatacgttcagagccaaggcatagcgacaacccccaacgccgcctttaactggaacacgttcctgcagcgctccgaaataaatcagtccgccgataatttgcacatctttctcctgatttgcggcctgaggcaggtcaaagatccattatacctcgtagacgccttctctgcctggcatcaggaggaaccgaatgttcatctggtaatcgttgggccagaggtggatccagtatttacgcgtgaggtcaaggccaaagtgaagcgtgcggcgggagttcgtttaattggcgaaatgccacaggaagacctgcatgctgtggtgaagaattgttttgcggtggttaattcttcagtgtccgagggcatgagcgctgctatcctggaggcaatggatctcgaggtgccggttctcgccaggaacatccccggcaacgccgctgttgtcaaacatgaagtgactggcctgcttttctcgaatccccaagagttcgttcatctggctaaaagactggtctctgatccagctctggaaaaggaaatcgtggtgaatggacgcgaatatgtgcggatgtaccactcgtggcaagtggaaagggatacttatcagcagctcatccgtaagctcgagggcagcacggaagattag

SEQ ID NO: 333597 - DNA, 792 bp, Artificial Sequence
  derived and/or modified sequence
atggggcgagtcctggaagaagccagattcgctgtggccttcacagagtcaatgaaagaaatggcacaggcacagtggaaggccaggcagattagcctcgctgttacctctgctgtgcccgtgcagcctcatgccaaaggcaaggtgtatgtgcagagtcaaggaattgcaactaccccgaacgccgcttttaactggaacaccttcctgcagagatctgagatcaaccaatccgccgacaatctgcatatcttcctcttgatctgtggtctcagacaggtgaaagatcctctgtatctggtggacgctttctccgcatggcatcaagaggaaccaaatgtgcacctcgttatagtgggtcccgaagtggatcctgtcttcaccagggaggttaaggccaaggtaaagcgagccgctggggtgcgcttgatcggcgaaatgccacaggaagatcttcatgctgtagttaaaaactgcttcgcagtagtgaacagctcggtcagtgagggtatgagcgcagccattctggaggcaatggatttagaggtgccagtgctcgccaggaacattcctggcaacgccgcagtggtgaagcacgaagtgacgggtctactgttcagcaaccctcaggagtttgtccacctggccaaacggctggtgtcagacccggctcttgagaaggaaattgttgtcaatggacgtgagtatgtcagaatgtaccatagctggcaagtcgaacgagatacgtaccaacagctcattaggaaattggagggatcaaccgaggattag

SEQ ID NO: 333598 - DNA, 792 bp, Artificial Sequence
  derived and/or modified sequence
atgggacgggtcctggaagaggctagatttgccgttgcatttacagagtccatgaaagagatggcccaagcacagtggaaggcaaggcagatttcccttgcggttacaagtgctgttccggtgcagccccacgccaaggggaaagtgtatgttcagtcacagggaatcgcaaccacacccaacgcagcattcaactggaacacttttctccagcgatctgaaattaatcagtctgccgacaatctgcacatttttctgttgatttgcggactgaggcaggttaaagaccccttgtacctggtggacgcgttcagcgcgtggcatcaagaggagccaaatgtgcaccttgtaatagtgggacccgaagtggacccagtctttacacgggaagtgaaggccaaggtgaaaagggctgcaggcgtgaggcttatcggcgagatgccccaggaggacctgcacgcggtggttaagaattgctttgcagtggttaattcctccgtttccgagggcatgagcgctgctatcctagaagccatggatctcgaagttcccgtgctggcacggaacatccccgggaacgcagccgtggtgaaacacgaggtaacaggattgctcttttcaaaccctcaggagtttgtccacttggctaagagactagtctctgatcccgctcttgagaaggagatcgtagtgaatggtagagagtacgtaagaatgtatcatagttggcaagtagagcgagatacctaccagcagctgatccgaaaacttgaaggcagtacagaagattag

SEQ ID NO: 333599 - DNA, 792 bp, Artificial Sequence
  derived and/or modified sequence
atgggtagagttcttgaagaagcacgattcgcagtggcctttacagaatcaatgaaagagatggcccaagcgcaatggaaagcacgccagatcagcctagcagtcactagcgccgtccccgttcagccacatgccaagggaaaagtgtatgtgcaatctcagggaatcgcgaccacccccaatgctgcctttaattggaataccttcctccagcggtcggaaatcaatcagagcgccgataacctgcacatttttttgctcatatgcggtctgcgccaggtgaaagacccattgtacttggttgacgctttttctgcttggcatcaggaggagcctaacgtacacttggtgattgtgggtccagaagtagaccccgtctttacgagggaagtgaaggccaaggtcaaacgagccgcaggagttagattaattggagagatgccccaggaagatctccacgcagttgtcaagaactgctttgcagttgtaaattcgtcagtttctgaggggatgtctgccgctattctggaggcaatggatctcgaagttcctgttctcgccagaaatatccctggcaacgctgcggtcgtcaaacacgaggtgactggcttgctgtttagcaatccacaagaatttgtgcatctagcgaaaagactcgtgagtgatcctgcccttgaaaaggaaatcgtcgtgaatggaagagagtacgtacgtatgtaccatagctggcaagttgaacgagatacataccagcagctcataaggaagctggaaggcagcactgaggattag

SEQ ID NO: 333600 - DNA, 792 bp, Artificial Sequence
  derived and/or modified sequence
atgggcagagtgctggaggaggccagattcgccgtggccttcaccgagagcatgaaggagatggcccaggcccagtggaaggccagacagatcagcctggccgtgaccagcgccgtgcccgtgcagccccacgccaagggcaaggtgtacgtgcagagccagggcatcgccaccacccccaacgccgccttcaactggaacaccttcctgcagagaagcgagatcaaccagagcgccgacaacctgcacatcttcctgctgatctgcggcctgagacaggtgaaggaccccctgtacctggtggacgccttcagcgcctggcaccaggaggagcccaacgtgcacctggtgatcgtgggccccgaggtggaccccgtgttcaccagagaggtgaaggccaaggtgaagagagccgccggcgtgagactgatcggcgagatgccccaggaggacctgcacgccgtggtgaagaactgcttcgccgtggtgaacagcagcgtgagcgagggcatgagcgccgccatcctggaggccatggacctggaggtgcccgtgctggccagaaacatccccggcaacgccgccgtggtgaagcacgaggtgaccggcctgctgttcagcaacccccaggagttcgtgcacctggccaagagactggtgagcgaccccgccctggagaaggagatcgtggtgaacggcagagagtacgtgagaatgtaccacagctggcaggtggagagagacacctaccagcagctgatcagaaagctggagggcagcaccgaggactag

SEQ ID NO: 333601 - DNA, 792 bp, Artificial Sequence
  derived and/or modified sequence
atgggtagagttctggaagaagcccggttcgcagtagcattcactgaaagtatgaaggagatggcccaggcccagtggaaggcccgccagattagcctagcagtcacctcggccgtcccagtgcaaccacacgcgaaaggaaaagtttatgttcagtctcagggcatcgctacaacacctaacgctgcctttaactggaataccttcctgcagcgctccgaaatcaaccagagcgcggacaatcttcatatctttctactgatatgtggtcttcgccaggtgaaagaccccctctacctggtggacgccttctccgcctggcatcaagaggaaccaaatgtgcacctagtgatcgtcggacccgaggttgaccccgtcttcacacgggaggtcaaggccaaagtaaagcgcgcggctggggtccgactcataggagaaatgcctcaggaagacctccatgccgtggttaaaaactgtttcgcagtcgtcaattccagcgtgtccgagggcatgtcagcagccatcctggaagcaatggacctggaggtgccggttctcgcacgcaacatcccagggaacgcggccgtcgtcaaacacgaggtaaccggcctgttattctctaacccccaagaattcgtgcacctggctaaacgcctggtgtccgaccccgcacttgagaaagagatcgtcgttaacggccgggagtatgtaaggatgtatcacagctggcaggtagaaagggatacttatcagcagttgattcgtaagcttgaagggtctacggaagactag

SEQ ID NO: 333602 - DNA, 792 bp, Artificial Sequence
  derived and/or modified sequence
atgggccgggtgctggaggaggccaggtttgctgtggccttcacagagagcatgaaggagatggcccaggcccagtggaaggcccggcagatcagcctggccgtgaccagcgctgtgcctgtgcagccccacgccaagggcaaggtgtatgtgcagagccagggcatcgccaccaccccaaatgctgccttcaactggaacaccttcctgcagaggtctgagatcaaccagagcgctgacaacctgcacatcttcctgctgatctgtggcctgcggcaggtgaaggaccccctgtacctggtggatgccttcagcgcctggcaccaggaggagcccaacgtgcacctggtgattgtgggccctgaggtggaccctgtgttcacccgggaggtgaaggccaaggtgaagagagctgctggggtgcggctcatcggggagatgccccaggaggacctgcatgctgtggtgaagaactgctttgctgtggtgaacagctctgtgtctgagggcatgtctgctgccatcctggaggccatggacctggaggtgcctgtgctggccaggaacatccctggaaatgctgctgtggtgaagcatgaggtgacaggcctgctcttcagcaacccccaggagtttgtgcacctggccaagaggctggtgtctgaccctgccctggagaaggagatcgtggtgaatggccgggagtatgtgaggatgtaccacagctggcaggtggagcgggacacctaccagcagctgatcaggaagctggagggcagcacagaggactag

SEQ ID NO: 333603 - RNA, 792 nt, Artificial Sequence
  derived and/or modified sequence
augggacggguccuggaagaggcuagauuugccguugcauuuacagaguccaugaaagagauggcccaagcacaguggaaggcaaggcagauuucccuugcgguuacaagugcuguuccggugcagccccacgccaaggggaaaguguauguucagucacagggaaucgcaaccacacccaacgcagcauucaacuggaacacuuuucuccagcgaucugaaauuaaucagucugccgacaaucugcacauuuuucuguugauuugcggacugaggcagguuaaagaccccuuguaccugguggacgcguucagcgcguggcaucaagaggagccaaaugugcaccuuguaauagugggacccgaaguggacccagucuuuacacgggaagugaaggccaaggugaaaagggcugcaggcgugaggcuuaucggcgagaugccccaggaggaccugcacgcggugguuaagaauugcuuugcagugguuaauuccuccguuuccgagggcaugagcgcugcuauccuagaagccauggaucucgaaguucccgugcuggcacggaacauccccgggaacgcagccguggugaaacacgagguaacaggauugcucuuuucaaacccucaggaguuuguccacuuggcuaagagacuagucucugaucccgcucuugagaaggagaucguagugaaugguagagaguacguaagaauguaucauaguuggcaaguagagcgagauaccuaccagcagcugauccgaaaacuugaaggcaguacagaagauuag

SEQ ID NO: 333604 - RNA, 792 nt, Artificial Sequence
  derived and/or modified sequence
auggguagaguucuugaagaagcacgauucgcaguggccuuuacagaaucaaugaaagagauggcccaagcgcaauggaaagcacgccagaucagccuagcagucacuagcgccguccccguucagccacaugccaagggaaaaguguaugugcaaucucagggaaucgcgaccacccccaaugcugccuuuaauuggaauaccuuccuccagcggucggaaaucaaucagagcgccgauaaccugcacauuuuuuugcucauaugcggucugcgccaggugaaagacccauuguacuugguugacgcuuuuucugcuuggcaucaggaggagccuaacguacacuuggugauuguggguccagaaguagaccccgucuuuacgagggaagugaaggccaaggucaaacgagccgcaggaguuagauuaauuggagagaugccccaggaagaucuccacgcaguugucaagaacugcuuugcaguuguaaauucgucaguuucugaggggaugucugccgcuauucuggaggcaauggaucucgaaguuccuguucucgccagaaauaucccuggcaacgcugcggucgucaaacacgaggugacuggcuugcuguuuagcaauccacaagaauuugugcaucuagcgaaaagacucgugagugauccugcccuugaaaaggaaaucgucgugaauggaagagaguacguacguauguaccauagcuggcaaguugaacgagauacauaccagcagcucauaaggaagcuggaaggcagcacugaggauuag

SEQ ID NO: 333605 - protein, 382 aa, Artificial Sequence
  derived and/or modified sequence
MQNGLNGQVDVSLASAASAVESLKPALLAGQPLVYVPSASLFMLYGSLQEGPASGSGSERDDRSSEAPATVELSSAPSAQKRLCEERKPQEEDEPATKRQSREYEDGPLSLVMPKKPSDSTDLASPKTMGNRASIPLKDIHVNGQLPAAEEISGKATANSLVSSEWGNPSRNTDVEKPSKENESTKEPSLLQYLCVQSPAGLNGFNVLLSGSQTPPTVGPSSGQLPSFSVPCMVLPSPPLGPFPVLYSPAMPGPVSSTLGSIAQLLVGPTAVVNPKSSTLPSADPQLQSQPSLNLSPVMSRSHSVVQQPESPVYVGHPVSVVKLHQSPVPVTPKSIQRTHRETFFKTPGSLGDPVLKRRERNQSRNTSSAQRRLEIPSGGAD

SEQ ID NO: 333606 - protein, 115 aa, Artificial Sequence
  derived and/or modified sequence
MEVNCLTLKDLISPRQPRLDFAVEDGENAQKENIFVDRSRMAPKTPIKNEPIDLSKQKKFTPERNPITPVKFVDRQQAEPWTPTANLKMLISAASPDIRDREKKKGLFRPIENKD

SEQ ID NO: 333607 - DNA, 348 bp, Artificial Sequence
  derived and/or modified sequence
atggaagtgaactgtctgacattgaaggacctgatttctccccgccagcccaggctagactttgcagttgaagacggagagaacgcccaaaaagagaacattttcgtcgaccgctcccgcatggcacctaaaaccccaattaagaatgaacctatagacttatctaagcagaaaaaattcactcccgaacggaatccaattacccctgtcaagttcgtcgaccgccagcaggctgaaccatggactccaactgcgaaccttaagatgctgatcagcgcagccagtccggacatacgggacagggagaaaaagaagggcctgtttagacctatcgagaataaagattag

SEQ ID NO: 333608 - DNA, 348 bp, Artificial Sequence
  derived and/or modified sequence
atggaggtgaactgcctgaccctgaaggacctgatcagcccccggcagccccggctggactttgctgtggaggatggagaaaatgcccagaaggagaacatctttgtggacaggagcaggatggcccccaagacccccatcaagaatgagcccatcgacctgagcaagcagaagaagttcaccccagagaggaaccccatcacccctgtgaagtttgtggaccggcagcaggccgagccctggacccccacagccaacctgaagatgctgatctctgctgccagcccagacatccgggaccgggagaagaagaagggcctcttccggcccatcgagaacaaggactag

SEQ ID NO: 333609 - DNA, 348 bp, Artificial Sequence
  derived and/or modified sequence
atggaggtgaactgcctgaccctgaaggacctgatcagcccccggcagccccgcttggacttcgcggtggaggatggcgaaaacgctcagaaagaaaatatcttcgtcgatcgctcccggatggcccccaagaccccgatcaagaacgagcccatcgatctaagcaaacagaaaaagttcactccggaacgcaacccgataacacctgttaagttcgtggacaggcaacaggccgaaccctggacccctacagcaaatctgaagatgctaatctctgccgcttctcccgacatcagggaccgtgagaagaagaaggggttgtttcggccaattgagaacaaggattag

SEQ ID NO: 333610 - DNA, 348 bp, Artificial Sequence
  derived and/or modified sequence
atggaggtcaactgcctcacgctgaaagatctgatcagcccacgacagcccaggttggatttcgccgtcgaggacggagaaaatgcccagaaggagaatatctttgttgatcgtagccggatggcccctaagactcccatcaaaaacgaacccatcgacctgtcaaaacagaagaaattcacgcccgagcgaaaccccatcacacccgttaaatttgtggataggcagcaggccgaaccatggacacccacggcgaatctcaagatgctgatatcagctgcttctcctgatatcagagatagagagaagaagaaggggctattccgcccaattgagaataaagactag

SEQ ID NO: 333611 - DNA, 348 bp, Artificial Sequence
  derived and/or modified sequence
atggaggtgaactgcctgaccctgaaggacctgatcagccccagacagcccagactggacttcgccgtggaggacggcgagaacgcccagaaggagaacatcttcgtggacagaagcagaatggcccccaagacccccatcaagaacgagcccatcgacctgagcaagcagaagaagttcacccccgagagaaaccccatcacccccgtgaagttcgtggacagacagcaggccgagccctggacccccaccgccaacctgaagatgctgatcagcgccgccagccccgacatcagagacagagagaagaagaagggcctgttcagacccatcgagaacaaggactag

SEQ ID NO: 333612 - DNA, 570 bp, Artificial Sequence
  derived and/or modified sequence
gttgcgctcggccggtctgagcgctggcgctgcccggacgccgcggggtccccgccagcccagggcactcggcgcggggatctgcgcgcctcgctctcccttcccgatgccgccgcccggctgctgatcgccgcaccaccttccctcatcggcttgggtccgtggaggtccctgcagaggcaggaagcctccttaggaaagcagggtgtaattgtgcattacagatggaggtaaattgtttaacactaaaagacctgatcagccccaggcagcccagactagattttgcagttgaagatggggaaaatgcacaaaaggaaaatatatttgttgatcgatcaaggatggccccgaagactccaataaaaaatgaaccaattgatttatcgaagcaaaaaaaatttactccagaaagaaatcccattactccagttaagtttgttgacagacagcaagcggaaccatggacacccacagctaacctgaagatgctcattagtgctgccagcccagatataagggaccgggagaagaaaaagggactattccgacccattgaaaacaaggacg

SEQ ID NO: 333613 - DNA, 1149 bp, Artificial Sequence
  derived and/or modified sequence
atgcagaatggattgaatgggcaggtggacgtcagtttggcaagcgctgcctctgccgtggagtcactgaagcctgctcttctggcaggccagcccttagtctacgtcccctcggcctctctgtttatgctgtatggctcacttcaagaggggcccgcatccggctcagggtccgagcgggacgatcgatcaagcgaggcccctgccactgtggagctcagctcggcccccagcgcccaaaaaaggctatgtgaggaaaggaaaccccaggaagaggacgaacctgctaccaagcgccagtcacgtgagtacgaggacgggccactctcgctggtcatgccaaaaaaaccatctgacagcaccgatcttgcctctccaaaaactatgggcaacagggcctcaatcccgctgaaagatattcatgtgaatgggcagcttcctgccgctgaggaaatttcaggtaaggcgaccgctaactctctcgtcagtagtgagtggggtaacccctcacgcaacacagacgtggagaaacccagtaaggaaaatgaaagtaccaaggagcctagtctgctgcaatacctctgcgtgcaatccccggccggcctcaatgggtttaacgtccttctgagcggctcccagacccctccgacagtgggccctagttcggggcagctgccttccttttcagtgccttgcatggtcctccccagccctcccctgggaccctttccggtgctctatagtccagcgatgcctggacccgtgtcaagcactttagggagtattgcacagttacttgttggccctacagccgtcgtgaaccccaaaagctcaacactgcccagcgccgatccgcagctccaaagccagcctagtctgaacttgtcccccgtgatgtctagatctcacagcgtggtccaacaacccgaaagcccagtatatgtgggacatcctgttagcgtcgtcaaactgcaccaaagccccgtgcctgtcaccccgaaaagcattcagcgaacacacagggaaactttttttaaaacccctggctcccttggagatcctgtactgaagcggcgtgaacgcaatcagtcacgcaatacgagttcagcccagcgtcgcttagaaatcccctccggcggagccgattag

SEQ ID NO: 333614 - DNA, 1149 bp, Artificial Sequence
  derived and/or modified sequence
atgcagaatggcctgaatggccaggtggatgtgtccctggccagcgctgccagcgctgtggagagcctgaagccagccctgctggccggccagcccctggtgtatgtgcccagcgccagcctcttcatgctgtatggcagcctgcaggagggccctgccagcggcagcggcagcgagagagatgacaggagcagcgaggccccagccaccgtggagctgagcagcgcccccagcgcccagaagaggctgtgtgaggagaggaagccccaggaggaggatgagcccgccaccaagaggcagagccgggagtatgaagatggccccctgagcctggtgatgcccaagaagcccagcgacagcacagacctggccagccccaagaccatgggcaacagagccagcatccccctgaaggacatccacgtgaatggccagctgcctgctgctgaggagatcagcggcaaggccacagccaacagcctggtgagcagcgagtggggcaaccccagcaggaacacagatgtggagaagcccagcaaagaaaatgaaagcaccaaggagcccagcctgctgcagtacctgtgtgtgcagagccctgctggcctgaatggcttcaacgtgctgctgagcggcagccagaccccacccaccgtgggccccagcagcggccagctgcccagcttctctgtgccctgcatggtgctgcccagcccccccctgggccccttccctgtgctgtacagccctgccatgcctggccctgtgagcagcaccctgggcagcatcgcccagctgctggtgggccccacagctgtggtgaaccccaagagcagcaccctgcccagcgctgacccccagctgcagagccagcccagcctgaacctgagccctgtgatgagccgcagccacagcgtggtgcagcagcctgagagccctgtgtatgtgggccaccctgtgtctgtggtgaagctgcaccagagccctgtgcctgtgacccccaagagcatccagaggacccaccgggagaccttcttcaagaccccaggcagcctgggggaccctgtgctgaagaggcgggagaggaaccagagcaggaacaccagcagcgcccagaggcggctggagatccccagcggcggcgctgactag

SEQ ID NO: 333615 - DNA, 1149 bp, Artificial Sequence
  derived and/or modified sequence
atgcagaacggcctgaacggccaggtggacgtgagcctggccagcgcagcttcagcagtggaatcgttgaaacccgccctgttggccggccaacccctggtttatgtacctagcgcttctctttttatgctatacggaagcctacaggagggtccagcgagcgggtctgggtctgagagggatgacaggtccagtgaagctcccgccaccgtggagctgtcctcagccccaagcgcgcagaagcgcctgtgcgaagagagaaagcctcaggaagaagacgagcctgcgacaaagcggcagtctcgcgaatacgaagacggtccgctgtctctcgtgatgcctaaaaaacccagcgactctacggatcttgcgagccccaagactatgggcaacagggcctcaatacctctgaaggatatccacgtcaacggacagctgcctgccgcagaagagatcagcggcaaggctactgctaatagtttagtgtcctcagagtgggggaatccttcaagaaacacagatgttgaaaagccttctaaggaaaacgagagtactaaagaaccttccctacttcaatacctgtgcgtacagtctcctgctggtcttaacggattcaacgtgctactgagcgggagccaaaccccacctacggtgggcccatcaagtggacaactcccgtccttctctgtgccctgcatggtgttaccttcaccacctctgggtccgttcccagttctgtactcacccgctatgcccggaccagtgtcctctacactcggatcgatcgctcaactgcttgtgggaccaactgcagtagtgaacccaaagtcgagtacccttccttcagcagacccacagctgcagtcacaaccgtctctcaacttgtccccggtgatgtctaggagtcactccgtcgttcagcagccagaaagccctgtctacgttggacacccagtctcggtcgtaaagctgcaccagagccctgtgccggtgacacccaagtctattcaaaggactcacagggagacttttttcaagacccctggatcactgggggatcctgttcttaaaaggcgtgaacgcaaccagtcccgcaataccagctcagcccagcgaaggctggaaatcccttccggtggcgccgactag

SEQ ID NO: 333616 - DNA, 1149 bp, Artificial Sequence
  derived and/or modified sequence
atgcaaaacgggctaaatggccaggtggatgtcagcctagcatctgctgcttcagctgtggagtccttaaaaccggcattgctggccggacagcctctcgtgtatgtcccctcggcttcactctttatgctttatggatctctgcaggagggacctgccagtggttccggctctgaaagagatgaccgttcctctgaagccccagccaccgtggagctctctagcgcgccatcagcgcagaaaagattgtgtgaagagcggaagccacaggaggaggacgagccagcgacgaaacggcagtcacgggagtatgaggacggacctctttcgctggttatgcccaaaaaacccagcgattctacagatcttgccagccccaagactatgggtaatagggcttcaatccctctgaaagacatccacgttaacggtcagctccctgctgccgaggaaatcagtggaaaggcaactgcaaattccctcgtaagtagcgagtggggtaacccttcccggaacaccgacgtggaaaagccttcgaaggaaaatgaatctacaaaggagccaagtttgctgcaatatctgtgtgtccaatcaccggcaggcttgaacggtttcaacgtcctactctcaggatcgcaaaccccacccacagtgggcccatcttctggccaactcccttcttttagtgtgccgtgcatggtcctaccatcacctccactgggcccattccctgtactctacagccctgccatgcccggacccgtttccagtaccttgggctcaatagcccaactgttggtcggacctacagcggtggtgaatcctaagtctagcacccttccctcagctgatcctcagttgcagtcacaacccagcctcaacttaagtcccgttatgtcaaggagtcacagtgtcgtacagcaacctgaaagccccgtgtacgtggggcacccagtgtctgtagtcaaactccatcagagtccagtcccagtgacaccaaagtcaatccagaggactcaccgtgagacttttttcaaaacccctggttcactgggtgaccccgtgcttaagcggcgagagcggaaccagtcgagaaacacaagctcagctcagcgaaggctggagatcccctctgggggagcggactag

SEQ ID NO: 333617 - DNA, 1149 bp, Artificial Sequence
  derived and/or modified sequence
atgcagaacggcctgaacggccaggtggacgtgagcctggccagcgccgccagcgccgtggagagcctgaagcccgccctgctggccggccagcccctggtgtacgtgcccagcgccagcctgttcatgctgtacggcagcctgcaggagggccccgccagcggcagcggcagcgagagagacgacagaagcagcgaggcccccgccaccgtggagctgagcagcgcccccagcgcccagaagagactgtgcgaggagagaaagccccaggaggaggacgagcccgccaccaagagacagagcagagagtacgaggacggccccctgagcctggtgatgcccaagaagcccagcgacagcaccgacctggccagccccaagaccatgggcaacagagccagcatccccctgaaggacatccacgtgaacggccagctgcccgccgccgaggagatcagcggcaaggccaccgccaacagcctggtgagcagcgagtggggcaaccccagcagaaacaccgacgtggagaagcccagcaaggagaacgagagcaccaaggagcccagcctgctgcagtacctgtgcgtgcagagccccgccggcctgaacggcttcaacgtgctgctgagcggcagccagaccccccccaccgtgggccccagcagcggccagctgcccagcttcagcgtgccctgcatggtgctgcccagcccccccctgggccccttccccgtgctgtacagccccgccatgcccggccccgtgagcagcaccctgggcagcatcgcccagctgctggtgggccccaccgccgtggtgaaccccaagagcagcaccctgcccagcgccgacccccagctgcagagccagcccagcctgaacctgagccccgtgatgagcagaagccacagcgtggtgcagcagcccgagagccccgtgtacgtgggccaccccgtgagcgtggtgaagctgcaccagagccccgtgcccgtgacccccaagagcatccagagaacccacagagagaccttcttcaagacccccggcagcctgggcgaccccgtgctgaagagaagagagagaaaccagagcagaaacaccagcagcgcccagagaagactggagatccccagcggcggcgccgactag

SEQ ID NO: 333618 - DNA, 3949 bp, Artificial Sequence
  derived and/or modified sequence
ctgttgctcagacggacctgcaggcattctccatgcagaacggtctgaatggacaagtggatgtctcacttgcttctgcagcctctgctgtggagagcctgaagccagcactccttgctggccagcctctagtgtatgtgccctctgcctcactgttcatgctgtatggaagtctgcaggagggaccagcgtcagggtcagggtcagagagggatgacagaagctcagaagccccagccacagtagagctgtcatctgcaccctcagctcagaagcgcctctgtgaggagaggaaacctcaggaggaggatgagccagccactaaaaggcaaagtagggaatatgaagacggcccgctgtcgcttgtcatgcccaagaaaccctcagattccacagaccttgcctctcccaagactatgggtaacagggcatctatacccctcaaagacattcatgtgaatggccaactccctgctgcagaagagatttcaggaaaggcaacagcaaactctcttgtttcttctgagtggggaaatccttcaagaaatacagatgttgaaaagccttcaaaagaaaatgaaagcaccaaagagccttctttgctacaatatctttgtgtgcagtctcctgcaggattaaatggtttcaatgtacttttatctggcagtcaaaccccccctactgtgggcccgtcctcaggtcagctgccgtctttcagtgtcccttgcatggtcttaccatctccacctctgggcccttttcctgttctctattctcctgcaatgccgggcccggtttcttctactcttggatcaatagcccagcttctcgtcggccccacagctgtggttaatccaaagtcgtccacactcccttctgcagaccctcagcttcagagtcagccctcactaaacctaagtccagtgatgtcaaggtcacacagtgtcgtccaacaacctgagtcccccgtttacgtgggacatccagtctcagtagtaaaattacatcagtcaccagttccagtgacccccaagagcatccaacgcacacatcgtgagacgtttttcaagacacccggcagccttggagaccctgtcctgaagagaagagaaaggaaccagtcacgaaacaccagctcggcccagaggagactagaaatccccagcggcggcgctgactaacctgccgctttgccaggtgggggtgggatcaaacgccctgagagtcccggatgtccgaggcgggatgcaaaccatcccgtcctgagcacgggtccttcctctctctttcatccacacttctgttaacttcccaccaccatcaatcatctgatttcctgaaagtaattaattgtgcatttaataccagttagagttccgactctgcatggtgtcacagtgaaagcgccgactgacttatggttttgattcaagaatcgtcttattctggaagtagatctgaataggctaccggagccttgtttttctaaaggggggcgctgtctagcacttaactagggtaagcattcttaacatgtatttccacttgccctgagtaaatctgtggtgagagaagcttcctttctgcagtttaaaaaagctactgcttccttaggcttcatcaggaagccaccttcagttgtgaatcctatggtgttatttattttgttcctgaaatgggatttagtgcaaaaagtttacaactacagtctttaacacatttttttcagggtatgacgacttgaatgtttatacttttattctataatttgccctgcacttattttacaacctagtaataatgtggataaatgtatctacatgacacatgtcaagaccaaaataactgtgaatgacacaccttgctgtaaatgaactgtgctaaccctgactgtgggcttgagaacaaagatgaactctagaactctagcagcctaactgctgcttctcaaataactgtgtgaacagtgagatattactgtttgtttctaaaaatcctactgtgcccagtttccttcactacatgccctgcattttttatttaaatatttagctgtagcgccatcagatatggatgccttctaacaattgctgtttgtaaaataaatcaggatggtagaaagtgattatatggaaaattggaacctggatgagaccttttcgttgaattctgaagagtaatgatgtgaaaattgatacagggcaagagatgattcttttgtttttcttctacttcatgtccagaagagtaagagggaaaatggacatatgtttcatatccaagggtattcaaactgtagttagttggtacctctgaaaaatgagaatggtgagcgcacgggttggttgttctagcatgaatacaattctggaaactgttatgcaatttcccttttttaacccacattactttaggggtgcattaagtcgccaaactatactagttctttgtattcctagacttgctgatatttacctctctcttgtctcttcagagtaaatggttcccttctttccttcctactttccttcattctctcttccttccctccttcctacttcttttcttccttcctcttcctctcttaaaactatcttagatgtagaatcctggtgtagggttttattttatttttattttttgacccaataaaatgttatatgaaagaatgaaaatattaatttaagagactctgggagtctgaataaagtagctttatattaactacaggataatattagccttattacccccacaagattttttaaaacttgaggtaggtagctacattaaataaatttgctacttatataaaaatttttatcaacactaaacttttaaagtttacaagttttttttttcttttttacagtcttctatagagttaggttaaaaatgtggttctaaccatcaacaattgcatggttaaatgaccctgaactaaaactgatgggttccctatcaaaacaaataaaaatatacctttttcaggtttcaatctgtgcagggtatatgcatgttaattctaccatgcttaagaacttccacaaaatatttcatggagaggtctgcatttagacggaaacagaaattgcttttcccctcactgttcctgaatgctctatacttgttttaacatttttgctatctttttttattattctgatcatgatatgaccatttaacctcagaattcataattcctgaggggtgttaagaagcagtcccattggtgaggatattatgacttggtgaccattcttaggagtagaaaaccaaggacaattgcttctgtattcagtatccacttcttaatgtggctttatatgtaaaaataataatgcagtggttgtttctgtcaggaaaataaatcttacagaacaactggtggaattgaagctgctgcgctagacttggatattttgggtagtgaagaagcaatggcaatcttgagtctattattgtataatttagtaaaagaaaaaaataatcgttggtggtcctactaagagaatgcagcttttttgagttgtcacagaggctgtgtgtgccctacactgaccagggtttgtaaaaccctttcattctggtacaagagtcgggggtataacttttatacttgaatctacctaccaagtttacatttctcaattcctttttgtaaggtgctatttctgtatttaaataactttcttttaacgtaaagctgctttctgcttatcttattgcactgctagttgtatgtaggtattaattttattgctgcttactgcttttgttttcttattatttagctctgctctttttcctaatggctatattatctatagctatttacttgtaactgtactacatgtaaactgattttttgttctgattttttttctaatatttttaggaaaatattaagctttataaaatagcaataaaaaataattcatttaagaag

SEQ ID NO: 333619 - protein, 345 aa, Artificial Sequence
  derived and/or modified sequence
MSENELDTTLHLKCKLGMKSILPIFRCLNSLERNIEKCRIFTRSDKCKVVIQFFYRHGIKRTHNICFQESQPLQVIFDKNVCTNTLMIQPRLLADAIVLFTSSQEEVTLAVTPLNFCLKSSNEESMDLSNAVHSEMFVGSDEFDFFQIGMDTEITFCFKELKGILTFSEATHAPISIYFDFPGKPLALSIDDMLVEANFILATLADEQSRASSPQSLCLSQKRKRSDLIEKKAGKNVTGQALECISKKAAPRRLYPKETLTNISALENCGSPAMKRVDGDVSEVSESSVSNTEEVPGSLCLRKFSCMFFGAVSSDQQEHFNHPFDSLARASDSEEDMNNGSFSIF

SEQ ID NO: 333620 - DNA, 1718 bp, Artificial Sequence
  derived and/or modified sequence
aggaaaattctagaagtttgagtttgtgtgcttactagcaaccactttcagcgtttctgcaaagctagagaagggttcccagtgccgattccgacactgtgaagaggcccttggcagtgacactgtgtgctcattatggagagagaggaaatgtttagatccactttgcagatttagacacatggaaatgcagcaaaactgcagcatttcatgcttctgggaaactcagcctcttggttgtgtgaagatcagctgtatcttttatcacagcaaacctcgaaatatcaatggattatttttgccaccaagtagcaatatcacactacagaaagaaattcaggaaggaattccactccagtcccagagtcaagaacctctgaaacctcaggaaaatatatcacgacccatccaccatcctttagttttaaaaactaattttgaggaagaagaggaagtagatgaacaaaatgatgcttctagtttatggacaaagacccctgaagaaattgaagaaaaaagagcaataaaggagatgtgttataaatctggggaatactacagatttcatactcctccagatattttgtcatcaaaaagcatgacacctacagcagaaaaacagttagaaaagcctttggaaaatggcagtgaattgcaagaaggagatagtcttacagttccgacaaaacttagccaatatgaaaggcaaggtgaaataaaaacatcattgcatgggaaaccaaagactgacattgctgcttttgaaaatggaggaggtgactgttatgttccacagagggtcatatttcttggagtcgatgaaagtgaagctttaactgaagagaaagaaatcaccatatcaaaatgttcaaatactaaagataacaaggacagtcctcatccaaagcattccctaactacccgactagtacctacaacgcatgtattaaatgctactgagaatatcagtatgaagtgcagagaggacccctcttcaatgaatgatgtccagccagtgaagaagcctcattttaaaggtgtgaagaaaagaaaatggatttatgatgaaccacagaactttcctaactctggaatgcagagagcagtacaggccccaagaccccaaaataaaatgagttatcaccgcaataataaaaatcgaaatgcggagaatgcatcctatatccacgttcaaagagatgctgtcaggactgtcgcgttgaatgcaccttcccgcagcaggcccacgcatgggtcctacaataaagtccatgctaacagggaacccaaacccaacctcagtccagacaaatatacgtcaacatcatataatgattcagcctggcgaaaacgaattcctttttcaaaaacatattcaaaaagtgaaaagatatatccagagccaagaagaaatgggagcaagtaaacctggaggttgagagagagaaaaatgagaaaaaattgccagacatcatctgatttacaatcaaaaatgaaaattcaaagaatgagatactcaagtactccatgttatgtagtggatagccaaagatgataaaaatgcaaattctgaaaataagatgcaggaagtacattgtgctctttcaaaactgataaaaatgcaaattaccaacagctgccagtgtatttatgtaggtctggaattcattccgtgcattactccaaacattttaataaaatttaaaagtttgacaatt

SEQ ID NO: 333621 - DNA, 599 bp, Artificial Sequence
  derived and/or modified sequence
agtttattgacttgaaaacccctgcctactaacccgtgctatgagagtatatggatctactttaacaagggggagagagtgaagatggaagtaggagagagataaaagataaagaacaaccatggaacatgtgtcaaaagagggaagaatgttatccacctctcttcccacacaacaggggcttgtagtttttaccaaatggttcccagtgccgattccgacactgtgaagaggcccttggcagtgacactgtgtgctcattatggagagagaggaaatgtttagatccactttgcagatttagacacatggaaatgcagcaaaactgcagcatttcatgcttctgggaaactcagcctcttggttgtgtgaagatcagctgtatcttttatcacagcaaacctcgaaatatcaatggattatttttgccaccaagtagcaatatcacactacagaaagaaattcaggaaggaattccactccagtcccagagtcaagaacctctgaaacctcaggaaaatatatcacgacccatccaccatcctttagttttaaaaactaattttgaggaagaagaggaagtagatgaacaaaatggt

SEQ ID NO: 333622 - DNA, 294 bp, Artificial Sequence
  derived and/or modified sequence
atggagatgcagcagaactgcagcatcagctgcttctgggagacccagcccctgggctgcgtgaagatcagctgcatcttctaccacagcaagcccagaaacatcaacggcctgttcctgccccccagcagcaacatcaccctgcagaaggagatccaggagggcatccccctgcagagccagagccaggagcccctgaagccccaggagaacatcagcagacccatccaccaccccctggtgctgaagaccaacttcgaggaggaggaggaggtggacgagcagaacggctag

SEQ ID NO: 333623 - DNA, 294 bp, Artificial Sequence
  derived and/or modified sequence
atggaaatgcagcagaattgcagtatcagctgcttctgggaaacccagccgttgggctgtgttaagattagctgtatcttttaccatagtaagccccgcaacatcaatggattgttcctgcccccatctagcaacatcaccctccagaaagaaatccaggagggtatcccgttgcagtctcagagtcaagagccgttgaagcctcaggaaaatatcagccgccccattcatcaccctttagtactgaagacaaactttgaagaggaggaggaggtggatgagcaaaatgggtag

SEQ ID NO: 333624 - DNA, 294 bp, Artificial Sequence
  derived and/or modified sequence
atggagatgcagcagaactgcagcatcagctgcttctgggagacccagcccctgggctgtgtgaagatcagctgcatcttctaccacagcaagcccaggaacatcaatggcctcttcctgccccccagcagcaacatcaccctgcagaaggagatccaggagggcatccccctgcagagccagagccaggagcccctgaagccccaggagaacatcagccggcccatccaccaccccctggtgctgaagaccaactttgaggaggaggaggaggtggatgagcagaatggatag

SEQ ID NO: 333625 - DNA, 294 bp, Artificial Sequence
  derived and/or modified sequence
atggagatgcagcagaactgcagcatcagctgcttctgggagacccaacccttggggtgtgttaaaatctcgtgtattttttaccatagcaaacccagaaatataaacgggctgttccttcccccttcttctaacataacgcttcaaaaagagattcaagaaggaatcccactgcagagccaatcacaggaacccctgaagccccaagaaaatatatccagaccaattcatcaccctctggtgctgaaaactaactttgaagaggaggaagaggtcgatgagcagaacggttag

SEQ ID NO: 333626 - DNA, 294 bp, Artificial Sequence
  derived and/or modified sequence
atggaaatgcaacagaactgctcaatatcatgtttctgggaaacgcagccgctgggttgtgtgaaaatttcttgcatcttctaccactctaagcccaggaatatcaatggactttttttgccgcctagctccaatatcactctacagaaggaaatacaggagggcatcccattgcagtctcagtctcaggaacccctgaaaccccaggagaacatctcccggccaatacatcacccgctggtcctgaagacgaattttgaagaagaagaagaagtggatgagcagaatgggtag

SEQ ID NO: 333627 - protein, 247 aa, Artificial Sequence
  derived and/or modified sequence
MAKERGLISPSDFAQLQKYMEYSTKKVSDVLKLFEDGEMAKYVQGDAIGYEGFQQFLKIYLEVDNVPRHLSLALFQSFETGHCLNETNVTKDVVCLNDVSCYFSLLEGGRPEDKLEFTFKLYDTDRNGILDSSEVDKIILQMMRVAEYLDWDVSELRPILQEMMKEIDYDGSGSVSQAEWVRAGATTVPLLVLLGLEMTLKDDGQHMWRPKRFPRPVYCNLCESSIGLGKQGLSCNRPITCVGARRL

SEQ ID NO: 333628 - protein, 116 aa, Artificial Sequence
  derived and/or modified sequence
MAKERGLISPSDFAQLQKYMEYSTKKVSDVLKLFEDGEMAKYVQGDAIGYEGFQQFLKIYLEVDNVPRHLSLALFQSFETGHCLNETNVTKDVVCLNDVSCYFSLLEGGRPEDKLE

SEQ ID NO: 333629 - protein, 147 aa, Artificial Sequence
  derived and/or modified sequence
MAKERGLISPSDFAQLQKYMEYSTKKVSDVLKLFEDGEMAKYVQGDAIGYEGFQQFLKIYLEVDNVPRHLSLALFQSFETGHCLNETNVTKDVVCLNDVSCYFSLLEGGRPEDKLEFTFKLYDTDRNGILDSSEVDKIILQMMRVAE

SEQ ID NO: 333630 - protein, 133 aa, Artificial Sequence
  derived and/or modified sequence
MAKERGLISPSDFAQLQKYMEYSTKKVSDVLKLFEDGEMAKYVQGDAIGYEGFQQFLKIYLEVDNVPRHLSLALFQSFETGHCLNETNVTKDVVCLNDVSCYFSLLEGGRPEDKLEFTFKLYDTDRNGILDSS

SEQ ID NO: 333631 - protein, 107 aa, Artificial Sequence
  derived and/or modified sequence
MAKERGLISPSDFAQLQKYMEYSTKKVSDVLKLFEDGEMAKYVQGDAIGYEGFQQFLKIYLEVDNVPRHLSLALFQSFETGHCLNETNVTKDVVCLNDVSCYFSLLE

SEQ ID NO: 333632 - DNA, 591 bp, Artificial Sequence
  derived and/or modified sequence
agctgcgaccgcgagccctctcaagcaaggtagagaccccgcgagccccccagcgccccaccctcccccatcggaaaaggacaggggtagggaagccgaggacccacgggctgcgttcgtgctgctgggtcgggaaggaggaagcgtgacagctggagcgggcctaccctctgaagaggtccaagcaacggaagtactactacgaagctgcctttctggccatccttgagaaaaatagacagatggccaaggagaggggcctaataagccccagtgattttgcccagctgcaaaaatacatggaatactccaccaaaaaggtcagtgatgtcctaaagctcttcgaggatggcgagatggctaaatatgtccaaggagatgccattgggtacgagggattccagcaattcctgaaaatctatctcgaagtggataatgttcccagacacctaagcctggcactgtttcaatcctttgagactggtcactgcttaaatgagacaaatgtgacaaaagatgtggtgtgtctcaatgatgtttcctgctacttttcccttctggagggtggtcggccagaagacaagttagaat

SEQ ID NO: 333633 - DNA, 556 bp, Artificial Sequence
  derived and/or modified sequence
attactgagcgcttgctgcctgtaaaacagtcctcagggagccaagagaagttccgaggcacagtccctctcatccccaggaactcctcgtacgtccaggacctgcgagggaaaagggcgcaaggcccacctgcacccaaaaagggggccttataaatgaagaaaggaagaatatccaggctctggcctgcacccagatctcagagcggcttggtgacgtggagcagacaaactccaggaacgcactggggcgcacaagtgtttctagggacggttggagaccctatctaaccctaagaaggcctaccctctgaagaggtccaagcaacggaagtactactacgaagctgcctttctggccatccttgagaaaaatagacagatggccaaggagaggggcctaataagccccagtgattttgcccagctgcaaaaatacatggaatactccaccaaaaaggtcagtgatgtcctaaagctcttcgaggatggcgagatggctaaatatgtccaaggagatgccattgggtacgagggattccagcaattcctgaaa

SEQ ID NO: 333634 - DNA, 567 bp, Artificial Sequence
  derived and/or modified sequence
gactggggaaaataggtctaaaaggaaagaggaacgtgaagaaggcctaccctctgaagaggtccaagcaacggaagtactactacgaagctgcctttctggccatccttgagaaaaatagacagatggccaaggagaggggcctaataagccccagtgattttgcccagctgcaaaaatacatggaatactccaccaaaaaggtcagtgatgtcctaaagctcttcgaggatggcgagatggctaaatatgtccaaggagatgccattgggtacgagggattccagcaattcctgaaaatctatctcgaagtggataatgttcccagacacctaagcctggcactgtttcaatcctttgagactggtcactgcttaaatgagacaaatgtgacaaaagatgtggtgtgtctcaatgatgtttcctgctacttttcccttctggagggtggtcggccagaagacaagttagaattcaccttcaagctgtacgacacggacagaaatgggatcctggacagctcagaagtggacaaaattatcctacagatgatgcgagtggctgaat

SEQ ID NO: 333635 - DNA, 605 bp, Artificial Sequence
  derived and/or modified sequence
gtcagaagcgctagaggtcgttgcgtggcgtgggtggctcggggagtgggtggctgagcggagctggggtccctggccagaggcggaacaaaatggggtcatggccaggaagacgcgctaacgcagcctaccctctgaagaggtccaagcaacggaagtactactacgaagctgcctttctggccatccttgagaaaaatagacagatggccaaggagaggggcctaataagccccagtgattttgcccagctgcaaaaatacatggaatactccaccaaaaaggtcagtgatgtcctaaagctcttcgaggatggcgagatggctaaatatgtccaaggagatgccattgggtacgagggattccagcaattcctgaaaatctatctcgaagtggataatgttcccagacacctaagcctggcactgtttcaatcctttgagactggtcactgcttaaatgagacaaatgtgacaaaagatgtggtgtgtctcaatgatgtttcctgctacttttcccttctggagggtggtcggccagaagacaagttagaattcaccttcaagctgtacgacacggacagaaatgggatcctggacagctca

SEQ ID NO: 333636 - DNA, 564 bp, Artificial Sequence
  derived and/or modified sequence
agctcgggctccagctccagcgccggcgcttcagctgcgaccgcgagccctctcaagcaagatataacttccccaagtcacacagtggtatcagagctaagaatgggacccagatatgactgatctagttctgttccaaaaccgtgctgtattatattaacgcctaccctctgaagaggtccaagcaacggaagtactactacgaagctgcctttctggccatccttgagaaaaatagacagatggccaaggagaggggcctaataagccccagtgattttgcccagctgcaaaaatacatggaatactccaccaaaaaggtcagtgatgtcctaaagctcttcgaggatggcgagatggctaaatatgtccaaggagatgccattgggtacgagggattccagcaattcctgaaaatctatctcgaagtggataatgttcccagacacctaagcctggcactgtttcaatcctttgagactggtcactgcttaaatgagacaaatgtgacaaaagatgtggtgtgtctcaatgatgtttcctgctacttttcccttctggagg

SEQ ID NO: 333637 - DNA, 548 bp, Artificial Sequence
  derived and/or modified sequence
agaagcagagctgccgccggcgcgggaagaagatgaggagcgcagcaaatggagaaaatgtgtccaaagccccggacatattcgagggagggtggagcaggttatggtgaactggaaacctagaaacgggcctctccaacttcgaagttcccagagtcgggggcgccgggcgcgggcgcggcgggcaggctggggtggggggcgggcagctatgtcgtcaggaacggggcggccccgctgcggccgcgtctgcctggcccgtcccctccagcccagctcgggctccagctccagcgccggcgcttcagctgcgaccgcgagccctctcaagcaaggcctaccctctgaagaggtccaagcaacggaagtactactacgaagctgcctttctggccatccttgagaaaaatagacagatggccaaggagaggggcctaataagccccagtgattttgcccagctgcaaaaatacatggaatactccaccaaaaaggtcagtgatgtcctaaagctcttcgaggatggcgagatggctaaatatgtccaa

SEQ ID NO: 333638 - DNA, 569 bp, Artificial Sequence
  derived and/or modified sequence
attttcaatgaagggtaggagggagttagacaggggttggggcggggccagtgagcaggatgcctgggtctccagttcctgccagtgagtccctaggcctccatctctctcccttgctgtaccaccttcaccaccatccatgcgaccccaagagccttaatgactctagaagagactccaggcaggggaagctgaaaggacctttcactccctacttttggccagggccttctgtgccacctgccaagaccagcagatataacttccccaagtcacacagtggtatcagagctaagaatgggacccagatatgactgatctagttctgttccaaaaccgtgctgtattatattaacgcctaccctctgaagaggtccaagcaacggaagtactactacgaagctgcctttctggccatccttgagaaaaatagacagatggccaaggagaggggcctaataagccccagtgattttgcccagctgcaaaaatacatggaatactccaccaaaaaggtcagtgatgtcctaaagctcttcgaggatggcgagatggctaaatatgtccaa

SEQ ID NO: 333639 - DNA, 497 bp, Artificial Sequence
  derived and/or modified sequence
agccctctcaagcaaggcctaccctctgaagaggtccaagcaacggaagtactactacgaagctgcctttctggccatccttgagaaaaatagacagatggccaaggagaggggcctaataagccccagtgattttgcccagctgcaaaaatacatggaatactccaccaaaaaggtcagtgatgtcctaaagctcttcgaggatggcgagatggctaaatatgtccaaggagatgccattgggtacgagggattccagcaattcctgaaaatctatctcgaagtggataatgttcccagacacctaagcctggcactgtttcaatcctttgagactggtcactgcttaaatgagacaaatgtgacaaaagatgtggtgtgtctcaatgatgtttcctgctacttttcccttctggagggtggtcggccagaagacaagttagaattcaccttcaagctgtacgacacggacagaaatgggatcctggacagctcag

SEQ ID NO: 333640 - DNA, 505 bp, Artificial Sequence
  derived and/or modified sequence
gctcgggctccagctccagcgccggcgcttcagctgcgaccgcgagccctctcaagcaaggtagagaccccgcgagccccccagcgccccaccctcccccatcggaaaaggacaggggtagggaagccgaggacccacgggctgcgttcgtgctgctgggtcgggaaggaggaagcgtgacagctggagcggatataacttccccaagtcacacagtggtatcagagctaagaatgggacccagatatgactgatctagttctgttccaaaaccgtgctgtattatattaacgcctaccctctgaagaggtccaagcaacggaagtactactacgaagctgcctttctggccatccttgagaaaaatagacagatggccaaggagaggggcctaataagccccagtgattttgcccagctgcaaaaatacatggaatactccaccaaaaaggtcagtgatgtcctaaagctcttcgaggatggcgagatggctaaatatgtccaa

SEQ ID NO: 333641 - protein, 563 aa, Artificial Sequence
  derived and/or modified sequence
MSVLKKNRRKDSDTPQEPSEKAKEQQAEAELRKLRQQFRKMVESRKSFKFRNQQKIASQYKEIKTLKTEQDEITLLLSLMKSSRNMNRSEKNYMELRLLLQTKEDYEALIKSLKVLLAELDEKILQMEKKIANQKQIFAKMQEANNPRKLQKQIHILETRLNLVTVHFDKMLTTNAKLRKEIEDLRFEKAAYDNVYQQLQHCLLMEKKTMNLAIEQSSQAYEQRVEAMARMAAMKDRQKKDTSQYNLEIRELERLYAHESKLKSFLLVKLNDRNEFEEQAKREEALKAKKHVKKNRGESFESYEVAHLRLLKLAESGNLNQLIEDFLAKEEKNFARFTYVTELNNDMEMMHKRTQRIQDEIILLRSQQKLSHDDNHSVLRQLEDKLRKTTEEADMYESKYGEVSKTLDLLKNSVEKLFKKINCDATKILVQLGETGKVTDINLPQYFAIIEKKTNDLLLLETYRRILEVEGAEAEIPPPFINPFWGGSALLKPPEPIKVIPPVLGADPFSDRLDDVEQPLDHSSLRQLVLDNYILKENRSKEVRGDSLPEKVDDFRSRKKVTM

SEQ ID NO: 333642 - DNA, 1692 bp, Artificial Sequence
  derived and/or modified sequence
atgagcgtgctgaagaagaacagaagaaaggacagcgacaccccccaggagcccagcgagaaggccaaggagcagcaggccgaggccgagctgagaaagctgagacagcagttcagaaagatggtggagagcagaaagagcttcaagttcagaaaccagcagaagatcgccagccagtacaaggagatcaagaccctgaagaccgagcaggacgagatcaccctgctgctgagcctgatgaagagcagcagaaacatgaacagaagcgagaagaactacatggagctgagactgctgctgcagaccaaggaggactacgaggccctgatcaagagcctgaaggtgctgctggccgagctggacgagaagatcctgcagatggagaagaagatcgccaaccagaagcagatcttcgccaagatgcaggaggccaacaaccccagaaagctgcagaagcagatccacatcctggagaccagactgaacctggtgaccgtgcacttcgacaagatgctgaccaccaacgccaagctgagaaaggagatcgaggacctgagattcgagaaggccgcctacgacaacgtgtaccagcagctgcagcactgcctgctgatggagaagaagaccatgaacctggccatcgagcagagcagccaggcctacgagcagagagtggaggccatggccagaatggccgccatgaaggacagacagaagaaggacaccagccagtacaacctggagatcagagagctggagagactgtacgcccacgagagcaagctgaagagcttcctgctggtgaagctgaacgacagaaacgagttcgaggagcaggccaagagagaggaggccctgaaggccaagaagcacgtgaagaagaacagaggcgagagcttcgagagctacgaggtggcccacctgagactgctgaagctggccgagagcggcaacctgaaccagctgatcgaggacttcctggccaaggaggagaagaacttcgccagattcacctacgtgaccgagctgaacaacgacatggagatgatgcacaagagaacccagagaatccaggacgagatcatcctgctgagaagccagcagaagctgagccacgacgacaaccacagcgtgctgagacagctggaggacaagctgagaaagaccaccgaggaggccgacatgtacgagagcaagtacggcgaggtgagcaagaccctggacctgctgaagaacagcgtggagaagctgttcaagaagatcaactgcgacgccaccaagatcctggtgcagctgggcgagaccggcaaggtgaccgacatcaacctgccccagtacttcgccatcatcgagaagaagaccaacgacctgctgctgctggagacctacagaagaatcctggaggtggagggcgccgaggccgagatccccccccccttcatcaaccccttctggggcggcagcgccctgctgaagccccccgagcccatcaaggtgatcccccccgtgctgggcgccgaccccttcagcgacagactggacgacgtggagcagcccctggaccacagcagcctgagacagctggtgctggacaactacatcctgaaggagaacagaagcaaggaggtgagaggcgacagcctgcccgagaaggtggacgacttcagaagcagaaagaaggtgaccatgtag

SEQ ID NO: 333643 - DNA, 1993 bp, Artificial Sequence
  derived and/or modified sequence
agaacgcccgggcgtggggctgggggtgtggcgcagcgaggccgcgcagcaagcagtcctcccggcaccgtcggaagcgcagttgcagcagccgtcggacaagcggccggagcagccacggacaagcagtccgggccccgccactgggcattgcagagagacagagagagagaggaaggctcactggctttgagctctctgggtacagtgtctgagtggaggcaaagtgcggttccttcaagatgtctgtgttgaagaagaacaggagaaaagactccgacactccccaggaaccttcggagaaggccaaagagcagcaggcggaggcagagctccggaagctaaggcagcagttcaggaagatggtggaaagccggaagtcttttaagttccgaaaccagcagaagattgcgagtcagtacaaggagatcaagaccctgaagacagagcaggatgagatcaccctactgttgagtctcatgaaatcctcgaggaacatgaatcggagtgagaagaactacatggagctgcgactcctgctccaaactaaggaggactatgaggcattgattaaatccctgaaagtgctgttggctgaactggatgagaagattcttcagatggaaaaaaaaatcgcaaaccaaaaacagattttcgcaaaaatgcaggaggccaataacccccggaaactgcagaaacagattcacattttggaaacccgtttgaatctcgtcactgttcactttgacaagatgctgaccactaatgccaagctccggaaggagattgaagacctacgatttgagaaggctgcttatgacaatgtctaccagcagctccagcactgcctgttgatggagaagaaaaccatgaacttggccattgagcaatcttctcaggcctatgagcagagggtggaggccatggctcgaatggctgccatgaaagaccgccagaagaaggacacctctcagtacaacctggagatccgagagctggagcgtctctatgcccatgagagcaagctcaagtccttcctgctcgtcaagctgaatgatcgcaatgaattcgaggagcaggccaaaagggaggaagctctcaaggcaaagaagcatgtcaagaagaacaggggagagagttttgagagctatgaggtggcccacctccggctgctgaagctggctgagagtgggaacctaaaccagctcattgaagattttctggccaaggaggagaagaattttgctcggttcacgtatgtcacggagctcaacaacgacatggagatgatgcacaagaggacccaacgaatccaggacgagatcatcctcttgcgatcccagcagaaattgtcccacgatgacaaccactctgtcctgagacagctggaggataaactgaggaagaccacggaggaggcagatatgtatgagagcaagtacggggaggtcagcaagaccttggatctattgaagaactcagtggagaaactgttcaagaagataaactgtgacgccaccaagatcctggtgcagttaggggagacggggaaagtcactgacatcaaccttccgcagtattttgccatcattgaaaagaagaccaacgacctgctgctgttggagacctacaggcgcatcctggaagtggaaggggcagaggctgagatcccgccacccttcatcaaccctttctggggtggctctgccctcctcaagcccccagaacccatcaaagtcatccccccagtgctgggggctgaccccttcagcgacaggttggatgatgtggaacagcccctggaccacagcagccttcggcagctggttctcgacaattatatcctgaaggagaatcggagtaaggaagtgcgcggagacagcctgcctgagaaggtggatgacttcagatccaggaagaaagtaaccatgtgaggtgcatgcatggggccacctttgcaacataaccgaaagaataaatgttttgttctgta

SEQ ID NO: 333644 - DNA, 1692 bp, Artificial Sequence
  derived and/or modified sequence
atgagcgtgctgaaaaagaatagaaggaaggattccgataccccacaggaaccatctgagaaggctaaagagcagcaagcagaggcggagttgcgtaaactccgtcaacagtttcgaaaaatggtcgagtctaggaagtccttcaagttccgcaatcagcagaagatagctagccagtacaaggagatcaaaactctcaaaactgagcaggacgaaatcaccctgctcctctctttaatgaaatccagcagaaatatgaaccgctccgagaaaaattatatggagctgcggcttttgctgcagaccaaggaagattatgaggccctgattaagagtctgaaagttctgctcgcagaattagatgagaaaatactgcaaatggagaaaaagatagcaaaccagaaacagatcttcgccaagatgcaggaggcaaacaatcctcggaaattgcagaagcagatacatattctggagacccgcctgaatctggtgactgtgcattttgataaaatgctgactactaacgccaagctgcggaaagaaatcgaggacctgcgtttcgaaaaagccgcctacgacaacgtgtaccagcagttgcagcattgcctgctgatggagaaaaaaactatgaacctagcgattgagcagtcttcccaggcctatgaacagcgagtagaggcaatggcccggatggccgctatgaaagatcgacagaaaaaggatacaagtcagtacaacttagagatcagagagctcgagcgattgtacgctcacgagtcgaagttgaaaagtttcctgcttgtcaaactgaacgaccgtaatgagttcgaagaacaggccaaaagggaagaggcgttgaaagccaagaaacatgttaagaaaaacagaggagaatcctttgaaagttacgaggtggcccacctgcgactccttaagctggctgaaagcggaaacctcaatcagctgatcgaggattttttggccaaagaggaaaagaactttgcaaggtttacttatgtgacagagctgaacaacgatatggagatgatgcataagagaacgcaaaggattcaggatgagataatcctgctacgctctcagcagaagctgagccacgatgataaccatagtgtcttacggcaattagaggataaactcaggaaaactacagaggaggctgacatgtacgaatcgaagtatggcgaggtgtctaagaccctggacctgctgaagaactcagtggagaaactgtttaagaagataaactgcgatgccactaagattttggtacagctaggcgagacggggaaggtaacggatattaatttgccccagtatttcgctatcatcgagaagaagacgaatgacctgcttctcctggaaacctaccggcggattcttgaggtggagggggctgaggccgagatcccccctccattcataaatcctttttggggagggagtgcgctgctgaaacccccggaacctataaaggtgattccaccagtgctgggcgctgaccccttctctgatcggctggacgacgtggagcaacccctggaccacagcagtctccggcagcttgtgttggataactacatcctcaaagagaaccgctccaaagaggtccgcggtgacagcttaccagagaaggtcgacgactttcgaagcagaaagaaagtcaccatgtag

SEQ ID NO: 333645 - DNA, 1692 bp, Artificial Sequence
  derived and/or modified sequence
atgtctgtgctgaagaagaacagaaggaaggacagcgacaccccccaggagcccagcgagaaggccaaggagcagcaggccgaggccgagctgaggaagctgcggcagcagttcaggaagatggtggagagcaggaagagcttcaagttcaggaaccagcagaagatcgccagccagtacaaggagatcaagaccctgaagacagagcaggatgagatcaccctgctgctgagcctgatgaagagcagcaggaacatgaacagaagtgagaagaactacatggagctgcggctgctgctgcagaccaaggaggactatgaggccctgatcaagagcctgaaggtgctgctggccgagctggatgagaagatcctgcagatggagaagaagatcgccaaccagaagcagatctttgccaagatgcaggaggccaacaaccccaggaagctgcagaagcagatccacatcctggagacccggctgaacctggtgacagtgcactttgacaagatgctgaccaccaatgccaagctgaggaaggagattgaggacctgcgctttgagaaggccgcctatgacaacgtgtaccagcagctgcagcactgcctgctgatggagaagaagaccatgaacctggccatcgagcagagcagccaggcctatgagcagagggtggaggccatggccaggatggccgccatgaaggaccggcagaagaaggacaccagccagtacaacctggagatccgggagctggagcggctgtatgcccacgagagcaagctgaagagcttcctgctggtgaagctgaatgacagaaatgaatttgaggagcaggccaagcgggaggaggccctgaaggccaagaagcacgtgaagaagaacagaggagagagctttgagagctatgaggtggcccacctgcggctgctgaagctggccgagagcggcaacctgaaccagctgattgaggacttcctggccaaggaggagaagaactttgcccgcttcacctacgtgacagagctgaacaatgacatggagatgatgcacaagaggacccagaggatccaggatgagatcatcctgctgcggagccagcagaagctgagccatgatgacaaccacagcgtgctgcggcagctggaggacaagctgaggaagaccacagaggaggccgacatgtatgagagcaagtacggggaggtgtccaagaccctggacctgctgaagaacagcgtggagaagctgttcaagaagatcaactgtgatgccaccaagatcctggtgcagctgggggagaccgggaaggtgacagacatcaacctgccccagtactttgccatcatcgagaagaagaccaatgacctgctgctgctggagacctaccgccgcatcctggaggtggagggcgctgaggccgagatccccccacccttcatcaaccccttctggggcggcagcgccctgctgaagcccccagagcccatcaaggtgattcctcctgtgctgggcgctgaccccttcagtgaccggctggatgatgtggagcagcccctggaccacagcagcctgcggcagctggtgctggacaactacatcctgaaggaaaatagaagcaaggaggtgcggggggacagcctgcctgagaaggtggatgacttccgcagcaggaagaaggtgaccatgtag

SEQ ID NO: 333646 - DNA, 1692 bp, Artificial Sequence
  derived and/or modified sequence
atgagcgtgctgaagaagaaccggcggaaggacagcgacaccccccaagaaccttccgagaaagccaaagagcaacaggcagaggccgagctcaggaagctaagacagcagttccgtaagatggtggaaagcaggaagagcttcaaattccgcaatcagcagaaaattgctagccaatataaagagatcaaaacacttaaaaccgaacaggatgaaatcacacttttactaagtttaatgaaatccagcagaaatatgaacagatcagaaaaaaactatatggaactgcgcctcctgttgcagactaaggaagattatgaggcactcatcaagtccttaaaagtgctgttagcggagcttgatgaaaaaatcctccagatggagaaaaaaatcgctaaccagaagcaaatttttgcgaaaatgcaggaggccaataaccccagaaaactccaaaaacagattcacatcctcgaaacaagattaaatcttgtgaccgtgcacttcgataaaatgttgaccacgaacgctaaactgagaaaggaaatcgaagacctgaggtttgaaaaagccgcatatgacaatgtctatcagcagctccagcactgtcttctgatggagaagaaaactatgaacctggccatagaacagagttcacaagcttatgaacagcgggtggaggccatggctcgcatggctgcaatgaaagaccgtcaaaaaaaggatacctcacaatataatctagagataagggaattagagaggctatacgctcacgaaagcaagttaaagtcattcctactggtcaaactaaacgatcggaacgagtttgaagaacaggctaagcgtgaagaggccctgaaagcaaagaagcatgtgaagaaaaataggggcgaatcgttcgaaagctacgaggtcgctcacctcagactgctcaagctggcagagagcggcaacctgaaccagctcattgaagactttctggccaaagaggagaaaaacttcgcacgtttcacatacgtcacagagctgaataatgatatggagatgatgcataagaggacgcagaggattcaggatgagatcatcttgctgaggtcgcagcagaaacttagccatgatgataaccactccgtactgaggcaactggaggacaaactcaggaagaccacagaggaagccgatatgtatgagagcaagtatggggaagtgagcaaaacccttgatcttcttaagaatagcgttgagaaattgtttaaaaaaattaattgtgacgccacaaagatccttgtccagttgggggaaacaggcaaggtcaccgatattaatttgcctcaatacttcgctatcatagagaagaagactaatgatttgctgctcctcgagacttaccggcggatcctcgaggtggagggggctgaggccgaaattccccccccatttattaatcccttttgggggggcagtgccttgcttaaaccacctgagccaatcaaggtgattccgccggttctcggagccgaccctttttccgatcggcttgacgatgtcgaacagccactggaccacagcagtcttagacagttggttctcgataattatatccttaaggagaacagatcaaaagaggtaagaggagacagtctccctgagaaggtcgatgactttagatccagaaagaaagtgaccatgtag

SEQ ID NO: 333647 - DNA, 1692 bp, Artificial Sequence
  derived and/or modified sequence
atgagtgtcctaaagaagaacaggcggaaggattcagacaccccgcaggagccatcggagaaagccaaagagcagcaggctgaagccgaactgaggaagctacgccagcaattcagaaagatggtcgagtccaggaaaagttttaagttcagaaaccagcaaaaaatagcatcccagtataaggaaattaagacactaaagacagaacaggacgagatcaccctgctcctatcactgatgaagtcatcgaggaatatgaacaggtcagagaagaattatatggaactgcggctgctgctgcaaaccaaggaggactacgaagcactcattaaaagcctaaaggtactgctggcagaactagacgagaagatcctgcaaatggagaagaagatcgcaaatcagaaacagatcttcgccaagatgcaagaagcaaataacccaagaaagctgcagaaacagatccacatactggagaccagactgaatctggtcactgtgcattttgataagatgctgaccacaaacgccaaactgcgcaaggagatcgaagacttgaggttcgaaaaggcggcttatgataatgtatatcagcagctgcagcactgcctattgatggagaagaaaacaatgaatctggcaatcgagcaaagttctcaggcttacgagcagcgagtggaagctatggcacgtatggctgcaatgaaagacagacagaagaaggatacaagccagtacaatctggaaatacgcgaattggagcgtctgtacgcgcatgagagcaaacttaagtccttcctgctggtgaaattgaacgatcggaacgaatttgaagagcaggcaaagcgcgaagaagcactgaaagcaaaaaagcatgttaagaaaaacaggggggagagtttcgaatcttacgaggtcgcacatttgaggttgctgaagctggcggaaagtggaaatctgaaccagcttatcgaggatttccttgccaaagaagaaaagaactttgcacggttcacatatgttactgaattaaataacgacatggaaatgatgcacaaaagaacccagaggatacaggacgaaataatactacttcggagccagcagaaattatcccacgatgataatcacagcgtcctgcgacagctggaggataagctgcggaaaaccaccgaggaggctgatatgtacgagagtaaatacggagaagtatcaaaaacactggacctccttaaaaacagtgtagagaaactgttcaaaaagattaactgcgacgccaccaagattctggtgcaactgggcgagaccggaaaagttactgacatcaacctccctcagtattttgctatcattgagaagaagacgaatgacttgctgctgttggaaacatacaggaggatattggaagttgagggcgcagaagcggagatccctccaccatttattaaccccttttggggagggtccgctctgcttaaaccccctgagccaatcaaagtgattccccctgtacttggcgcagatcccttctcagatcgtttggatgacgtagaacaacccctggaccactcctccctgagacagctggtcctggataattacatcctcaaagaaaataggagcaaggaggtcagaggtgattcgctgcccgaaaaagtggatgattttcgctcccgaaagaaggtcaccatgtag

SEQ ID NO: 333648 - protein, 347 aa, Artificial Sequence
  derived and/or modified sequence
MRVVVIGAGVIGLSTALCIHERYHSVLQPLDIKVYADRFTPLTTTDVAAGLWQPYLSDPNNPQEADWSQQTFDYLLSHVHSPNAENLGLFLISGYNLFHEAIPDPSWKDTVLGFRKLTPRELDMFPDYGYGWFHTSLILEGKNYLQWLTERLTERGVKFFQRKVESFEEVAREGADVIVNCTGVWAGALQRDPLLQPGRGQIMKVDAPWMKHFILTHDPERGIYNSPYIIPGTQTVTLGGIFQLGNWSELNNIQDHNTIWEGCCRLEPTLKNARIIGERTGFRPVRPQIRLEREQLRTGPSNTEVIHNYGHGGYGLTIHWGCALEAAKLFGRILEEKKLSRMPPSHL

SEQ ID NO: 333649 - protein, 197 aa, Artificial Sequence
  derived and/or modified sequence
MRVVVIGAGVIGLSTALCIHERYHSVLQPLDIKVYADRFTPLTTTDVAAGLWQPYLSDPNNPQEADWSQQTFDYLLSHVHSPNAENLGLFLISGYNLFHEAIPDPSWKDTVLGFRKLTPRELDMFPDYGYGWFHTSLILEGKNYLQWLTERLTERGVKFFQRKVESFEEVAREGADVIVNCTGVWAGALQRDPLLQP

SEQ ID NO: 333650 - DNA, 594 bp, Artificial Sequence
  derived and/or modified sequence
atgcgagtggtcgtgattggcgcaggagtgatcggcctgtcaacggccctttgtatccacgaacgatatcactctgtgttgcagccgttggacattaaggtgtatgccgaccgctttactccgctaaccacgacagacgttgctgccgggctgtggcaaccgtacttaagtgacccgaacaaccctcaggaagcagactggtcacaacaaacatttgattacttgctgtcccacgtccactctccaaatgctgagaatctgggtctttttctcattagtggatataacttgttccacgaggccatcccggaccctagttggaaggataccgtgctcggcttccggaagttgacgcctcgcgagctcgatatgttccctgattatggatatgggtggttccacacttctctgatcctcgagggaaagaattacctgcagtggctgactgagcgcctgacagaacggggcgtgaaattcttccagagaaaggtggagagttttgaagaagtcgcgcgggagggcgccgacgtcattgttaactgtactggggtttgggccggagctttgcaacgcgatccactcctgcagccatag

SEQ ID NO: 333651 - DNA, 1044 bp, Artificial Sequence
  derived and/or modified sequence
atgagagtcgtggtgataggagctggagtgatcggactgagtaccgctctgtgcatccacgaaagataccactctgtactgcagccgctggatattaaggtctacgccgaccgttttactcctctgacaacgactgacgtggccgcagggctgtggcaaccctatttaagtgatcccaacaacccacaagaggccgactggagtcaacagacgtttgactacctactctcgcacgtgcactctccaaatgccgagaacctgggactgtttctgatctcggggtataacctattccatgaagccattcccgatcctagttggaaggacaccgtacttgggtttcgcaagctcacaccaagagagctcgacatgttcccagattatggatatggatggtttcacacttccttaatactggagggtaagaactatcttcagtggctgaccgaacgtctcaccgagaggggggtgaaatttttccagagaaaggtcgagtcattcgaagaagtggcgagggaaggtgctgatgtgatcgtgaattgtaccggcgtgtgggccggcgcactacaaagagatccgctccttcaacctgggcgaggacaaattatgaaggtggacgccccttggatgaaacacttcattttgacccatgacccggaaagaggtatttacaattccccgtacataatacctgggacgcagactgttacacttggcggcatcttccagttgggtaattggagcgagctgaataatatacaggaccacaacacgatctgggagggatgttgccgattggagccaaccctcaaaaacgcgcgtatcatcggcgaacgcaccggttttcgtccagtaagaccgcaaatccgcctggaacgggaacaattgagaacagggccatctaacaccgaggtgattcacaattacggacacggagggtacggccttactattcactggggatgtgccttggaagcggccaaactttttggccgtatccttgaggagaagaagctttcccggatgccaccttctcacctttag

SEQ ID NO: 333652 - DNA, 594 bp, Artificial Sequence
  derived and/or modified sequence
atgagggtggtggtgattggagctggggtgattggcctgagcacagccctgtgcatccacgagcgctaccacagcgtgctgcagcccctggacatcaaggtgtatgctgaccgcttcacccccctgaccaccacagatgtggccgccggcctgtggcagccctacctgagtgaccccaacaacccccaggaggccgactggagccagcagacctttgactacctgctgagccacgtgcacagccccaatgctgagaacctgggcctcttcctgatcagcggctacaacctcttccacgaggccatcccagaccccagctggaaggacacagtgctgggcttcaggaagctgaccccccgggagctggacatgtttcctgactatggctacggctggttccacaccagcctcatcctggagggcaagaactacctgcagtggctgacagagcggctgacagagcggggcgtgaagttcttccagaggaaggtggagagctttgaggaggtggcccgggagggcgcagatgtgattgtgaactgcaccggggtgtgggccggggccctgcagagggaccccctgctgcagccctag

SEQ ID NO: 333653 - DNA, 1044 bp, Artificial Sequence
  derived and/or modified sequence
atgagggtggtggtgattggagctggggtgattggcctgagcacagccctgtgcatccacgagcgctaccacagcgtgctgcagcccctggacatcaaggtgtatgctgaccgcttcacccccctgaccaccacagatgtggccgccggcctgtggcagccctacctgagtgaccccaacaacccccaggaggccgactggagccagcagacctttgactacctgctgagccacgtgcacagccccaatgctgagaacctgggcctcttcctgatcagcggctacaacctcttccacgaggccatcccagaccccagctggaaggacacagtgctgggcttcaggaagctgaccccccgggagctggacatgtttcctgactatggctacggctggttccacaccagcctcatcctggagggcaagaactacctgcagtggctgacagagcggctgacagagcggggcgtgaagttcttccagaggaaggtggagagctttgaggaggtggcccgggagggcgcagatgtgattgtgaactgcaccggggtgtgggccggggccctgcagagggaccccctgctgcagcccggccggggccagatcatgaaggtggatgccccctggatgaagcacttcatcctgacccatgaccctgagcggggcatctacaacagcccctacatcatccctggcacccagacagtgaccctgggcggcatcttccagctgggcaactggagcgagctgaacaacatccaggaccacaacaccatctgggagggctgctgccgcctggagcccaccctgaagaatgcccgcatcatcggggagaggacaggcttccggcctgtgcggccccagatccggctggagcgggagcagctgaggacaggccccagcaacacagaggtgatccacaactacggccatggaggctacggcctgaccatccactggggctgtgccctggaggccgccaagctgtttggccgcatcctggaggagaagaagctgagcaggatgccacccagccacctgtag

SEQ ID NO: 333654 - DNA, 594 bp, Artificial Sequence
  derived and/or modified sequence
atgcgggtggtggtgatcggcgccggcgtgatcggcctgagcaccgcactgtgcatccacgaacggtatcactctgtcttgcagcctctggatatcaaagtttatgcggaccgttttacgccccttaccaccaccgatgtggccgccggcctttggcagccctatctctcagaccccaacaatccacaagaggcagattggtctcagcagacatttgactatcttctcagccatgtccattctcctaacgcagaaaaccttgggctgttcctgatctctggttacaacctgttccatgaagccatccccgaccctagttggaaggatacagtgctgggcttcagaaagctcaccccccgggaacttgatatgtttcccgactacggctacggctggtttcacaccagtctcattttggaaggcaaaaactatctgcagtggctaacagagcgcttaacagaaagaggagtgaagttttttcagcgcaaagtagaaagcttcgaggaggtggcaagagaaggggccgatgtcattgtgaattgcaccggcgtctgggccggcgccttacaaagggacccattgctgcagccatag

SEQ ID NO: 333655 - DNA, 1044 bp, Artificial Sequence
  derived and/or modified sequence
atgcgggtggtggtgatcggcgccggcgtgatcggcctgagcaccgctttatgtatccacgaacggtatcactcagtgctccagcctctggacatcaaggtatacgcggaccgcttcacaccattaaccaccaccgacgttgccgctggcttgtggcagccttacctgagcgatcctaataatccacaggaggccgactggagccagcagacctttgattacctgttatcgcacgtacactcacccaacgcggagaatttgggtctctttctcatttcaggctacaacctctttcatgaggcaatcccagatccgtcatggaaggacaccgtgttaggcttcagaaaactcacgccccgggagctggacatgttcccagactacggctacggatggtttcacacctctctcatcttagaaggcaaaaattatcttcaatggctgacggagcgtctcaccgagcgtggcgtcaaattcttccagaggaaagtagagagcttcgaagaagtggcaagagaaggggccgacgttattgtgaactgcaccggagtgtgggccggcgcactccagagagacccccttctgcagcccggcagaggccagatcatgaaagtggatgccccctggatgaaacactttattctcactcatgatccggaaagaggcatctataactctccatacatcattcctgggactcagactgttactctcggtggcatctttcagcttggaaactggtctgaactgaacaacatccaagaccacaatacaatctgggaaggctgttgtcgcctggaaccaaccttaaaaaacgctagaattataggagaacgtaccggatttcggcccgtgcgcccccagattaggctggagcgggagcagttgcgaacaggtccttctaataccgaggtgatccacaactacggccatggaggctacgggctgactatccattggggatgcgctctggaggccgctaaacttttcggccggattttggaggagaaaaaactctctaggatgccgccctcccatctctag

SEQ ID NO: 333656 - DNA, 594 bp, Artificial Sequence
  derived and/or modified sequence
atgagagtggtggtcatcggagcaggagtcatcggcctatccacagctctctgcatccacgaacggtatcactctgtgctgcagccgctcgatattaaggtgtacgcagaccgcttcaccccgcttaccactaccgatgtagcagcagggctctggcagccctatctaagcgaccccaataacccccaggaagcagattggtctcagcagacctttgattacctcctatcacacgtccatagcccaaatgccgagaatctgggtctgttcctcatctccggctataatctctttcacgaggcaatccctgatcctagctggaaggacacggtgcttggatttaggaaactcacacccagggagctcgacatgtttcctgattacggctatggctggtttcacactagcctcattctggaaggtaaaaactacctgcagtggttgactgagaggctaacagaacgcggagtgaagttctttcagagaaaagtggagagctttgaggaggtggctcgggaaggggcagacgtgatagttaactgcacgggagtttgggcgggagctctgcaacgggacccccttttgcagccttag

SEQ ID NO: 333657 - DNA, 1044 bp, Artificial Sequence
  derived and/or modified sequence
atgcgcgttgtggtcatcggtgccggtgtaatcggccttagcactgccctctgtatccacgagcggtatcattccgtgttgcagccactcgacatcaaagtttacgcagaccgattcacccctctgactactactgacgttgccgcaggactgtggcaaccgtacctgagtgaccctaataaccctcaggaggcagattggtcccagcagaccttcgattacctgctcagtcacgtgcactcacctaatgcggagaacttgggcctgttcctaatatctgggtacaatttgttccacgaggccatcccggatcccagctggaaggataccgtgctcgggtttaggaaactgacccccagggagttagacatgttccccgactatggatatggctggttccacacttctctgatactggaaggaaaaaattacttgcagtggttgacagagaggctgactgaacggggagtgaaattttttcagagaaaagtggaaagctttgaggaggtagccagggagggcgcagatgtgatcgtgaactgcactggtgtgtgggccggagcactgcaacgcgatcctctccttcaacctggtcgtggccagattatgaaggtggatgcaccctggatgaagcactttatcctaacgcatgatcctgaaagaggcatttacaattctccttatatcatcccaggtacgcagacggtcacgctaggcggaatctttcaattgggaaattggtctgagctgaacaatatacaagaccacaatacaatctgggagggctgctgtagattggaacctactctcaagaatgctcggataattggcgagaggacaggcttccggccagttcgacctcaaattaggctagagcgggagcagttaagaaccggtcctagcaacactgaagttatccataattacggtcacggcggatacggattgactattcactgggggtgtgctctggaagctgctaaactattcggcaggatcctggaagaaaagaaactaagcaggatgccccctagccatctgtag

SEQ ID NO: 333658 - DNA, 1756 bp, Artificial Sequence
  derived and/or modified sequence
agtgcagtgccgagccccacccctcaagccgtgccctgtccatagctccagactttgaccctgcactccagtccgggctggcggacagagggctggaaacaagacgctccagaatcaggagcttcccctcaggaaatagcatcctgtgtccccgcactgcagttgtctggtctctccagcagtttggtacttccggctgctgcaatgcgtgtggtggtgattggagcaggagtcatcgggctgtccaccgccctctgcatccatgagcgctaccactcagtcctgcagccactggacataaaggtctacgcggaccgcttcaccccactcaccaccaccgacgtggctgccggcctctggcagccctacctttctgaccccaacaacccacaggaggcggactggagccaacagacctttgactatctcctgagccatgtccattctcccaacgctgaaaacctgggcctgttcctaatctcgggctacaacctcttccatgaagccattccggacccttcctggaaggacacagttctgggatttcggaagctgacccccagagagctggatatgttcccagattacggctatggctggttccacacaagcctaattctggagggaaagaactatctacagtggctgactgaaaggttaactgagaggggagtgaagttcttccagcggaaagtggagtcttttgaggaggtggcaagagaaggcgcagacgtgattgtcaactgcactggggtatgggctggggcgctacaacgagaccccctgctgcagccaggccgggggcagatcatgaaggtggacgccccttggatgaagcacttcattctcacccatgacccagagagaggcatctacaattccccgtacatcatcccagggacccagacagttactcttggaggcatcttccagttgggaaactggagtgaactaaacaatatccaggaccacaacaccatttgggaaggctgctgcagactggagcccacactgaagaatgcaagaattattggtgaacgaactggcttccggccagtacgcccccagattcggctagaaagagaacagcttcgcactggaccttcaaacacagaggtcatccacaactatggccatggaggctacgggctcaccatccactggggatgtgccctggaggcagccaagctctttgggagaatcctggaagaaaagaaattgtccagaatgccaccatcccacctctgaagactccagtgactgctgcctccccccacaagaactcccttctcccctcagccaatgaatcaatgtgctccttcataagccattgcttctccctcacttctttcctcaaagaagcatgaggtgagagaaagccacaaagtcagtgcctggagaagggttcagcccaacatggggcccctctcatcactgaaatccctctaccttctctgggtctggcattataaagaacagctgaggctgtcattccatgagtcttcagaagaaaggacagctcagaaaatcaaagaggccaactgcccagagccacagaaaatggaggataattgaggctaagtaacctgattacaagttgtactaacatattaaaggttctgaaaagtcctgcagcaaagacaactatctgatgttgtttaacccagtgcttgctaaacctatctggctatggaactcttttgcccagagcacccatgaatgccatgacacaaatctgagaaaatgctggaacaga

SEQ ID NO: 333659 - DNA, 640 bp, Artificial Sequence
  derived and/or modified sequence
gagagatccagcctctcaaacatccagcagagagaccataggctgctgcaatgcgtgtggtggtgattggagcaggagtcatcgggctgtccaccgccctctgcatccatgagcgctaccactcagtcctgcagccactggacataaaggtctacgcggaccgcttcaccccactcaccaccaccgacgtggctgccggcctctggcagccctacctttctgaccccaacaacccacaggaggcggactggagccaacagacctttgactatctcctgagccatgtccattctcccaacgctgaaaacctgggcctgttcctaatctcgggctacaacctcttccatgaagccattccggacccttcctggaaggacacagttctgggatttcggaagctgacccccagagagctggatatgttcccagattacggctatggctggttccacacaagcctaattctggagggaaagaactatctacagtggctgactgaaaggttaactgagaggggagtgaagttcttccagcggaaagtggagtcttttgaggaggtggcaagagaaggcgcagacgtgattgtcaactgcactggggtatgggctggggcgctacaacgagaccccctgctgcagcc

SEQ ID NO: 333660 - DNA, 594 bp, Artificial Sequence
  derived and/or modified sequence
atgagagtggtggtgatcggcgccggcgtgatcggcctgagcaccgccctgtgcatccacgagagataccacagcgtgctgcagcccctggacatcaaggtgtacgccgacagattcacccccctgaccaccaccgacgtggccgccggcctgtggcagccctacctgagcgaccccaacaacccccaggaggccgactggagccagcagaccttcgactacctgctgagccacgtgcacagccccaacgccgagaacctgggcctgttcctgatcagcggctacaacctgttccacgaggccatccccgaccccagctggaaggacaccgtgctgggcttcagaaagctgacccccagagagctggacatgttccccgactacggctacggctggttccacaccagcctgatcctggagggcaagaactacctgcagtggctgaccgagagactgaccgagagaggcgtgaagttcttccagagaaaggtggagagcttcgaggaggtggccagagagggcgccgacgtgatcgtgaactgcaccggcgtgtgggccggcgccctgcagagagaccccctgctgcagccctag

SEQ ID NO: 333661 - DNA, 1044 bp, Artificial Sequence
  derived and/or modified sequence
atgagagtggtggtgatcggcgccggcgtgatcggcctgagcaccgccctgtgcatccacgagagataccacagcgtgctgcagcccctggacatcaaggtgtacgccgacagattcacccccctgaccaccaccgacgtggccgccggcctgtggcagccctacctgagcgaccccaacaacccccaggaggccgactggagccagcagaccttcgactacctgctgagccacgtgcacagccccaacgccgagaacctgggcctgttcctgatcagcggctacaacctgttccacgaggccatccccgaccccagctggaaggacaccgtgctgggcttcagaaagctgacccccagagagctggacatgttccccgactacggctacggctggttccacaccagcctgatcctggagggcaagaactacctgcagtggctgaccgagagactgaccgagagaggcgtgaagttcttccagagaaaggtggagagcttcgaggaggtggccagagagggcgccgacgtgatcgtgaactgcaccggcgtgtgggccggcgccctgcagagagaccccctgctgcagcccggcagaggccagatcatgaaggtggacgccccctggatgaagcacttcatcctgacccacgaccccgagagaggcatctacaacagcccctacatcatccccggcacccagaccgtgaccctgggcggcatcttccagctgggcaactggagcgagctgaacaacatccaggaccacaacaccatctgggagggctgctgcagactggagcccaccctgaagaacgccagaatcatcggcgagagaaccggcttcagacccgtgagaccccagatcagactggagagagagcagctgagaaccggccccagcaacaccgaggtgatccacaactacggccacggcggctacggcctgaccatccactggggctgcgccctggaggccgccaagctgttcggcagaatcctggaggagaagaagctgagcagaatgccccccagccacctgtag

SEQ ID NO: 333662 - protein, 169 aa, Artificial Sequence
  derived and/or modified sequence
MAAESLPFSFGTLSSWELEAWYEDLQEVLSSDENGGTYVSPPGNEEEESKIFTTLDPASLAWLTEEEPEPAEVTSTSQSPHSPDSSQSSLAQEEEEEDQGRTRKRKQSGHSPARAGKQRMKEKEQENERKVAQLAEENERLKQEIERLTREVEATRRALIDRMVNLHQA

SEQ ID NO: 333663 - DNA, 927 bp, Artificial Sequence
  derived and/or modified sequence
gaggtcagagacttaagtctaaggcactgagcgtatcatgttaaagatgagcgggtggcagcgacagagccaaaatcagagctggaacctgaggagagagtgttcaagaaggaagtgtatcttcatacatcaccacacctgaaagcagatgtgcttttccagactgatccaactgcagagatggcagctgagtcattgcctttctccttcgggacactgtccagctgggagctggaagcctggtatgaggacctgcaagaggtcctgtcttcagatgaaaatgggggtacctatgtttcacctcctggaaatgaagaggaagaatcaaaaatcttcaccactcttgaccctgcttctctggcttggctgactgaggaggagccagaaccagcagaggtcacaagcacctcccagagccctcactctccagattccagtcagagctccctggctcaggaggaagaggaggaagaccaagggagaaccaggaaacggaaacagagtggtcattccccagcccgggctggaaagcagcgcatgaaggagaaagaacaggagaatgaaaggaaagtggcacagctagctgaagagaatgaacggctcaagcaggaaatcgagcgcctgaccagggaagtagaggcgactcgccgagctctgattgaccgaatggtgaatctgcaccaagcatgaacaattgggagcatcagtcccccacttgggccacactacccacctttcccagaagtggctactgactaccctctcactagtgccaatgatgtgaccctcaatcccacatacgcagggggaaggcttggagtagacaaaaggaaaggtctcagcttgtatatagagattgtacatttatttattactgtccctatctattaaagtgactttctatgagccaaaaaaaaaaaaaaaaaa

SEQ ID NO: 333664 - DNA, 906 bp, Artificial Sequence
  derived and/or modified sequence
gaggtcagagacttaagtctaaggcactgagcgtatcatgttaaagatgagcgggtggcagcgacagagccaaaatcagagctggaacctgaggagagagtgttcaagaaggaagtgtatcttcatacatcaccacacctgaaagcagatgtgcttttccagactgatccaactgcagagatggcagctgagtcattgcctttctccttcgggacactgtccagctgggagctggaagcctggtatgaggacctgcaagaggtcctgtcttcagatgaaaatgggggtacctatgtttcacctcctggaaatgaagaggaagaatcaaaaatcttcaccactcttgaccctgcttctctggcttggctgactgaggaggagccagaaccagcagaggtcacaagcacctcccagagccctcactctccagattccagtcagagctccctggctcaggaggaagaggaggaagaccaagggagaaccaggaaacggaaacagagtggtcattccccagcccgggctggaaagcagcgcatgaaggagaaagaacaggagaatgaaaggaaagtggcacagctagctgaagagaatgaacggctcaagcaggaaatcgagcgcctgaccagggaagtagaggcgactcgccgagctctgattgaccgaatggtgaatctgcaccaagcatgaacaattgggagcatcagtcccccacttgggccacactacccacctttcccagaagtggctactgactaccctctcactagtgccaatgatgtgaccctcaatcccacatacgcagggggaaggcttggagtagacaaaaggaaaggtctcagcttgtatatagagattgtacatttatttattactgtccctatctattaaagtgactttctatga

SEQ ID NO: 333665 - protein, 620 aa, Artificial Sequence
  derived and/or modified sequence
MSRPGHGGLMPVNGLGFPPQNVARVVVWEWLNEHSRWRPYTATVCHHIENVLKEDARGSVVLGQVDAQLVPYIIDLQSMHQFRQDTGTMRPVRRNFYDPSSAPGKGIVWEWENDGGAWTAYDMDICITIQNAYEKQHPWLDLSSLGFCYLIYFNSMSQMNRQTRRRRRLRRRLDLAYPLTVGSIPKSQSWPVGASSGQPCSCQQCLLVNSTRAASNAILASQRRKAPPAPPLPPPPPPGGPPGALAVRPSATFTGAALWAAPAAGPAEPAPPPGAPPRSPGAPGGARTPGQNNLNRPGPQRTTSVSARASIPPGVPALPVKNLNGTGPVHPALAGMTGILLCAAGLPVCLTRAPKPILHPPPVSKSDVKPVPGVPGVCRKTKKKHLKKSKNPEDVVRRYMQKVKNPPDEDCTICMERLVTASGYEGVLRHKGVRPELVGRLGRCGHMYHLLCLVAMYSNGNKDGSLQCPTCKAIYGEKTGTQPPGKMEFHLIPHSLPGFPDTQTIRIVYDIPTGIQGPEHPNPGKKFTARGFPRHCYLPNNEKGRKVLRLLITAWERRLIFTIGTSNTTGESDTVVWNEIHHKTEFGSNLTGHGYPDASYLDNVLAELTAQGVSEAAAKA

SEQ ID NO: 333666 - DNA, 1863 bp, Artificial Sequence
  derived and/or modified sequence
atgtcgagaccaggccatggaggcctgatgcctgtaaacgggctcgggtttcctccccaaaacgtcgcacgagtcgttgtatgggaatggctcaatgagcattctaggtggcgaccgtatactgcgacagtttgccaccatattgagaatgtgctgaaggaggatgcccgcgggagcgtggttctgggtcaggtagatgcccagctagtgccttatatcattgatctacagtcgatgcaccaattccggcaggacacgggcaccatgcgccctgtgcgtaggaatttctacgatccgtcatcagctccaggcaagggaatcgtgtgggagtgggaaaacgatggaggcgcctggacagcctacgacatggatatttgcatcacaatccagaacgcctatgagaagcaacatccatggctagacctatcttccctggggttctgttacttgatctacttcaattccatgtctcaaatgaataggcagaccaggagacgccgtcgccttagaagacgcctggatctggcatacccactgaccgtaggaagcattccgaaaagtcagtcctggcctgtcggagcatcttcaggccagccttgttcatgtcagcagtgtctgctggtcaatagcacccgggccgctagcaacgctatcctggccagtcaaaggaggaaggccccaccagccccgccgttgcctccacctccgccccctggaggaccccccggagccctagctgtaaggcccagcgccacctttaccggtgcggctttatgggccgcaccagcagcaggaccagcggagccagccccaccccccggcgcgccgcctcgcagcccaggtgccccgggaggcgcccggactccaggacagaataatctgaataggccaggcccccagcggaccacctctgtctcagcccgtgcttctattcctcccggcgtcccagctctgccagtgaaaaatctgaatggcacaggcccagtacatcccgccctggccggtatgaccggaatcttgctttgcgccgcaggcttacccgtatgtttgaccagagcccctaagccaatccttcatccgccccccgtgtctaagtcagatgttaaacctgtgccgggggtccctggggtttgcagaaaaaccaaaaaaaagcacctcaagaagagtaaaaaccccgaagacgtggtccggagatacatgcagaaagtcaaaaaccccccagatgaggactgtactatctgtatggaacgtctcgtcacagcttctgggtacgagggcgtgttgagacataaaggggttcgccccgagctcgtgggccgactgggacggtgtggccatatgtaccatttgctgtgtttggttgcaatgtactcgaatggcaacaaggacgggtccctgcagtgcccaacctgcaaggcaatttatggagaaaaaacaggcactcagcctcctggtaagatggagttccatctgattccccattccctgcctgggtttcccgatactcagaccatccgcatcgtgtacgacatcccaaccggcattcaggggccggaacacccgaaccctggcaaaaagtttacagcacgcggcttccctcgccactgctatctgccaaacaatgagaagggaaggaaggtgctaagactgctaatcacagcttgggagcggagactaatctttactataggaactagcaataccaccggcgaatccgacacggtggtttggaatgagatccatcacaagaccgagttcgggagcaacctgaccggacacgggtatcctgacgcctcatacctcgacaatgtgctggcagagctcactgcccaaggggtcagcgaggcagcagccaaggcatag

SEQ ID NO: 333667 - DNA, 1863 bp, Artificial Sequence
  derived and/or modified sequence
atgagccggcccggccacggcggcctgatgcctgtgaatggcctgggcttccccccccagaatgtggcccgggtggtggtgtgggagtggctgaatgagcacagccgctggaggccctacacagccaccgtgtgccaccacattgaaaatgtgctgaaggaggatgcccggggctctgtggtgctgggccaggtggatgcccagctggtgccctacatcatcgacctgcagagcatgcaccagttccggcaggacaccggcaccatgaggcctgtgagaagaaacttctatgaccccagcagcgcccctggaaaaggaattgtgtgggagtgggagaatgatggaggagcctggacagcctatgacatggacatctgcatcaccatccagaatgcctatgagaagcagcacccctggctggacctgagcagcctgggcttctgctacctgatctacttcaacagcatgagccagatgaaccggcagaccaggagaagaagaaggctgcggcggcggctggacctggcctaccccctgactgtgggcagcatccccaagagccagagctggcctgtgggcgccagcagcggccagccctgcagctgccagcagtgcctgctggtgaacagcaccagggctgccagcaatgccatcctggccagccagaggaggaaggcccccccagccccacccctgcccccacctcctcctcctgggggccccccaggggccctggccgtgcggcccagcgccaccttcaccggggccgccctgtgggccgccccagctgctggccctgctgagcccgcccctcctcctggggccccacccaggagccctggggcccctggaggagcccggaccccaggccagaacaacctgaacagacctggcccccagaggaccacctctgtgtctgcccgggccagcatccccccaggagtgcctgccctgcctgtgaagaacctgaatggcaccggccctgtgcacccagccctggccggcatgacaggcatcctgctgtgtgccgccggcctgcctgtgtgcctgacccgggcccccaagcccatcctgcaccccccacctgtgtccaagagtgatgtgaagcctgtgcctggggtgcctggggtgtgcaggaagaccaagaagaagcacctgaagaagagcaagaacccagaagatgtggtgcggcgctacatgcagaaggtgaagaaccccccagatgaggactgcaccatctgcatggagcggctggtgacagccagcggctatgagggcgtgctgcggcacaagggcgtgcggcctgagctggtgggccgcctgggccgctgtggccacatgtaccacctgctgtgcctggtggccatgtacagcaatggaaacaaggatggcagcctgcagtgccccacctgcaaggccatctatggagagaagacaggcacccagcccccaggcaagatggagttccacctgatcccccacagcctgcccggcttcccagacacccagaccatcagaattgtgtatgacatccccaccggcatccagggccctgagcaccccaaccctgggaagaagttcaccgcccggggcttccccaggcactgctacctgcccaacaatgaaaaaggaaggaaggtgctgcggctgctgatcacagcctgggagaggaggctcatcttcaccatcggcaccagcaacaccactggagagagtgacacagtggtgtggaatgagatccaccacaagacagaatttggcagcaacctgactggacatggctacccagatgccagctacctggacaacgtgctggccgagctgacagcccagggcgtgtctgaggccgccgccaaggcctag

SEQ ID NO: 333668 - DNA, 1863 bp, Artificial Sequence
  derived and/or modified sequence
atgagccggcccggccacggcggcctgatgcccgtgaacggcctgggtttcccgccacagaatgttgcccgcgtggtagtgtgggagtggctgaatgagcactctagatggcgtccttatacagctactgtgtgtcaccacattgaaaatgttctgaaggaagatgcaagaggctcagtagtgctcggccaggtggacgctcagctcgtgccttatatcatcgatctgcagtcaatgcaccagtttcgccaggatactggaacgatgcgaccggtgcgccgaaatttctatgaccccagctcggcaccaggcaagggtatagtgtgggaatgggagaacgacggcggagcttggacagcatacgacatggacatttgcattaccattcagaatgcctacgagaagcagcacccttggctcgacctgtcctccctggggttctgttacctcatctacttcaactccatgtcacagatgaataggcagacacgaaggcgaagacgtcttagacgccgcctggacctcgcctatccccttactgtcggttccataccaaaatctcagagttggcccgtcggcgcgtcatctggccagccgtgctcatgccagcaatgcctgctggtcaatagtacccgggcggcttctaatgccattctcgcttcgcagcggcgaaaggccccaccggctcctcctctcccgccaccccctccacctggcggaccacctggagcacttgccgtacgaccatctgccacctttacaggtgcagccttatgggctgcacccgccgccgggcccgcagagcccgcaccccctcccggagctcctcccagatctcctggcgctcccggaggagcccggacccctgggcagaacaacctgaatcggcctgggcctcagcgcacaacttctgtttcagccagagcctctatcccacctggagtgcccgccctaccagtcaagaacctgaacggcaccgggcccgtgcacccagcgctcgccggcatgactggtatcctactgtgtgcggctggccttcccgtgtgcttaacccgggcccctaaaccgatcttacatccaccgccagtgtccaaatccgatgtcaagccagtgcccggggtcccgggcgtgtgccgtaaaacaaagaaaaagcacttgaaaaaatccaaaaatccggaagacgtggtgcgccgctacatgcagaaagtcaaaaacccacccgatgaagattgtaccatctgcatggaacgtctggttacagcaagcggctacgagggtgtcctccggcacaagggcgtgcgccccgagctggtcggaagacttggcagatgcgggcacatgtaccatctcttgtgcttagtggccatgtactcaaacggaaacaaggacgggagccttcaatgcccgacgtgcaaggctatttatggtgagaaaactggcacccaacctccaggaaagatggagttccacctgatcccacatagcctgcctggattccccgatacccaaacgatccgtatcgtttacgacatccccaccgggatccaaggtcccgaacatcccaatcccggaaagaagttcacagcgcgcgggtttccgcgccactgctacttgccaaacaacgagaagggacgtaaagtgttgaggctacttattaccgcttgggagcggaggctaatattcacaatagggacctctaacacgacgggtgagtctgatacagtggtgtggaacgaaatccaccataaaacagaatttggcagcaacctgaccggacatgggtaccccgatgccagctatctggacaacgttctcgcagaactcaccgcccagggcgtgagtgaggctgctgccaaggcttag

SEQ ID NO: 333669 - DNA, 1863 bp, Artificial Sequence
  derived and/or modified sequence
atgtcacgccctgggcacggaggcctgatgcctgtcaacggcctgggatttccccctcagaacgtggctagggtcgtggtgtgggaatggctgaatgagcatagccgatggagaccatataccgccaccgtttgccatcatatcgaaaacgtgctcaaagaagacgctagggggtctgttgtcctgggccaagtcgacgcgcagctagtgccatatattatcgatctccagagcatgcaccagtttcggcaggacactggtaccatgcgccctgttcgtagaaacttctacgacccgagcagtgctccaggcaaaggcattgtctgggaatgggagaatgacgggggtgcgtggaccgcctatgatatggatatctgtatcacaatccagaacgcatatgagaagcagcatccctggctagatctcagctccttggggttctgctaccttatttatttcaatagtatgagccagatgaatagacagaccaggaggaggcgacggttaagaaggcgcttagacctagcttatccccttaccgtcgggagcatccccaagagccaatcttggcccgtgggcgctagctcaggccagccctgttcttgccaacagtgcctcttggtcaattctaccagggccgcttcaaacgcaatcttagccagccaaagaagaaaggcccctccagccccaccccttcctccccctcctccgcctggcggaccaccgggagctctggctgtcaggccctccgccacctttacaggcgcagccctgtgggctgccccagcagcagggccagccgagccagcccctcccccaggcgctccaccaaggtctccaggagcccctggaggggcacgaacaccaggccagaataacttgaatcggccaggtccccagagaacaacttcagtgtccgcgcgagcctctatccctcctggggtgcccgcacttcctgtaaagaacctaaacggaacgggcccagtccaccctgccttggcaggaatgaccgggatcctgctctgcgcagcagggctcccagtctgtctgacaagggccccaaaacctatcctgcaccctccacccgtctctaagagtgatgttaagcctgtccctggtgtaccgggagtttgtagaaagacgaagaaaaaacacctgaaaaaatctaaaaacccagaagacgtggttcgcaggtacatgcagaaggtcaagaatccacccgatgaagactgcacgatttgcatggaaaggctggtgactgcctccggttatgagggtgtgttgcgtcataagggggtgcggccagaattggtgggtcggctcgggagatgcgggcacatgtaccatcttctgtgcctggtagcgatgtattctaacggaaacaaagatgggtctctgcagtgtcctacttgtaaggcaatttatggcgaaaaaacaggcacccagccccctgggaaaatggaattccaccttattcctcacagcctgcccggttttcctgatacccagactatcaggatcgtttacgacattcctacaggcatccaaggacccgaacacccgaaccccggaaaaaaattcaccgccagaggctttcctcgtcactgctacctgccaaataatgagaagggaagaaaagtactccgcttgctgatcacagcctgggagcggagacttatttttaccatcggaaccagtaatactacaggagagtcagatacagtggtgtggaacgaaattcaccacaaaaccgaatttggctctaacctgaccgggcacggataccctgacgcgtcatacctagataatgtacttgccgaactcacggcacagggcgtgtcggaagctgctgccaaagcttag

SEQ ID NO: 333670 - DNA, 1863 bp, Artificial Sequence
  derived and/or modified sequence
atgagcagacccggccacggcggcctgatgcccgtgaacggcctgggcttccccccccagaacgtggccagagtggtggtgtgggagtggctgaacgagcacagcagatggagaccctacaccgccaccgtgtgccaccacatcgagaacgtgctgaaggaggacgccagaggcagcgtggtgctgggccaggtggacgcccagctggtgccctacatcatcgacctgcagagcatgcaccagttcagacaggacaccggcaccatgagacccgtgagaagaaacttctacgaccccagcagcgcccccggcaagggcatcgtgtgggagtgggagaacgacggcggcgcctggaccgcctacgacatggacatctgcatcaccatccagaacgcctacgagaagcagcacccctggctggacctgagcagcctgggcttctgctacctgatctacttcaacagcatgagccagatgaacagacagaccagaagaagaagaagactgagaagaagactggacctggcctaccccctgaccgtgggcagcatccccaagagccagagctggcccgtgggcgccagcagcggccagccctgcagctgccagcagtgcctgctggtgaacagcaccagagccgccagcaacgccatcctggccagccagagaagaaaggccccccccgccccccccctgccccccccccccccccccggcggcccccccggcgccctggccgtgagacccagcgccaccttcaccggcgccgccctgtgggccgcccccgccgccggccccgccgagcccgcccccccccccggcgccccccccagaagccccggcgcccccggcggcgccagaacccccggccagaacaacctgaacagacccggcccccagagaaccaccagcgtgagcgccagagccagcatcccccccggcgtgcccgccctgcccgtgaagaacctgaacggcaccggccccgtgcaccccgccctggccggcatgaccggcatcctgctgtgcgccgccggcctgcccgtgtgcctgaccagagcccccaagcccatcctgcaccccccccccgtgagcaagagcgacgtgaagcccgtgcccggcgtgcccggcgtgtgcagaaagaccaagaagaagcacctgaagaagagcaagaaccccgaggacgtggtgagaagatacatgcagaaggtgaagaacccccccgacgaggactgcaccatctgcatggagagactggtgaccgccagcggctacgagggcgtgctgagacacaagggcgtgagacccgagctggtgggcagactgggcagatgcggccacatgtaccacctgctgtgcctggtggccatgtacagcaacggcaacaaggacggcagcctgcagtgccccacctgcaaggccatctacggcgagaagaccggcacccagccccccggcaagatggagttccacctgatcccccacagcctgcccggcttccccgacacccagaccatcagaatcgtgtacgacatccccaccggcatccagggccccgagcaccccaaccccggcaagaagttcaccgccagaggcttccccagacactgctacctgcccaacaacgagaagggcagaaaggtgctgagactgctgatcaccgcctgggagagaagactgatcttcaccatcggcaccagcaacaccaccggcgagagcgacaccgtggtgtggaacgagatccaccacaagaccgagttcggcagcaacctgaccggccacggctaccccgacgccagctacctggacaacgtgctggccgagctgaccgcccagggcgtgagcgaggccgccgccaaggcctag

SEQ ID NO: 333671 - DNA, 3455 bp, Artificial Sequence
  derived and/or modified sequence
gcgagaagccccactgaagccgggcgcagggtctgggacgcagttgggagtgcaaagggctggctgagagccgcaggagcagcaggctgtggcccaggcctcctgggtgacaggccctgtctggcggggaagagggaccaagagacaacacggaagaggctggacctcgaacaggggcggctgcctcactccctacctgagccagccgagggggccaaggactttagagctgtttcctccggcataagagagacacttgctttccagggcagcaccctttatcggagaaggctctacagggaaggggtctttgcagcctggatggccatcccacattcctttaacggaggtctctaggcctcagagagaacccagagttagaaaggaggccagacggtccttgctgtccccctggggagagaggaagttgccgcctgctgccaggcccaggaggagctgggcctgcaatagtgggggacctggcccctgaggcagtggcggccatgtcacggccaggccacggtgggctgatgcctgtgaatggtctgggcttcccaccgcagaacgtggcccgggtggtggtgtgggagtggctgaatgagcacagccgctggcggccctacacggccaccgtgtgccaccacattgagaacgtgctgaaggaggacgctcgcggttccgtggtcctggggcaggtggacgcccagcttgtgccctacatcatcgacctgcagtccatgcaccagtttcgccaggacacaggcaccatgcggcccgtgcggcgcaacttctacgacccgtcgtcggcgccgggcaagggcatcgtgtgggagtgggagaacgacggcggcgcatggacggcctacgatatggacatctgcatcaccatccagaacgcctacgagaagcagcacccgtggctcgacctctcatcgctaggcttctgctacctcatctacttcaacagcatgtcgcagatgaaccgccagacgcgccggcgccgccgcctgcgccgccgcctggacctcgcctacccgctcaccgtgggctccatccctaagtcgcagtcgtggcccgtgggcgccagctcgggccagccctgctcctgccagcagtgcctgctggtcaacagcacgcgcgccgcctccaacgccatcctggcctcgcagcgccgcaaggcgccccccgcgcccccgctgccgccgccgccgccacctggagggcctccaggcgcgcttgccgtgcgccccagcgccaccttcacaggcgccgcgctctgggcagcgcccgccgccggccccgccgagcccgcgccgcctcccggggcgcccccacggagcccgggcgcccccggcggagcgcgcaccccggggcagaacaacctcaaccggcccgggccccagcgcaccaccagcgtgagcgcgcgcgcctccatcccgccgggggtccccgcactcccggtgaagaacttgaatggtactgggccggtccatccggccctggcagggatgaccgggatactgctgtgcgcggccgggctgcccgtgtgcctgacgcgggcccccaagcccatcctgcacccgccgcccgtgagcaagagcgacgtgaagcccgtgcctggcgtgcccggggtgtgccgcaagaccaagaagaagcaccttaaaaagagtaagaatcccgaggatgtggttcgaagatacatgcagaaggtgaaaaacccacctgatgaggactgcaccatctgcatggagcgactggtcacagcatcaggctacgagggcgtgcttcggcacaagggcgtgcggcctgagctcgtgggccgcctgggccgctgtggccacatgtaccacctgctgtgcctcgtggccatgtactccaatggcaacaaggatggcagcctgcagtgccccacctgcaaggccatctacggggagaagacgggtacgcagccgcctgggaagatggagttccacctcatcccccactcgctgcccggcttccctgatacccagaccatccgcatcgtctatgacatccccacaggcatccagggccctgagcaccccaaccccgggaagaagttcaccgcaagaggattccctcgccactgctatctacccaacaacgagaaaggccggaaggtgctgcggctgctcatcacggcctgggagagaagactcatcttcactatcggcacgtccaacaccacgggcgagtcggacaccgtggtgtggaacgagatccaccacaagaccgagtttggatccaacctcacgggccacggctacccggacgctagctacctagacaacgtgctggctgagctcacagcccagggcgtatccgaggctgcagccaaggcttgaggcccaaggctgcccaccttccctcctgctttgcccctggtccggcaaatgcctccttcgccaggtgtgtcctggtagcccaggttcagggctggggaggagcctgcggaaggggccgcagccattcaggggacctgcctggtggcagctgggatgaagagagatggcatgtcaggctggccccgaatcatagctccctgagagggccaagcagagagtactggaaacctccctaccaaaaagacagagacccgccccctcacacacaaacacacatgtcctgttgaactcatgcacgcacacccacgtgcctgtacttgcccccaggctggaagagaagagacagaaagaccccatgacccccccatgtggatccccatctgtgtctcagttgcatctgtacagccttgtctgcaaactggaggatgcggggcaagcccttaggggcctgccagggctcggggggcaaagagggactcgggaaactcagtgtaccccagatgcctcacccattccgtgtcatcacccatgtctgccacccactgattgggcaattgtgggcccatggggtggaagcccccagatgactgagcagttctacaaaagaatggccagcacgagcggggactagagggtcctgattttgtgtctgtgcctcttcatctctctggactctgatctccttctcccttcccatctccaggccttctgtctgtcccagataaaggcgctgttctcccatcctccctaccccatcctctccaccaaatcgctcccaattttgagagccaaaggctggcgcttctgacttcaggagcgaaaggaggaggcctagtttgggccgatgtattttaaagcagagtggacagcagagagtcaatttccctttcgttgggagtgggcagtggggtggctaattgtcttcggccaaccaggggcctgttgcccaggcaactcaccagctccgcctctgctgattggctgccacggtgggagtcagccaagatttaaagggatgccagcgattgctcttttcaaaacctaccagtcccactgtgggtggagaaataaatggtctttctcctcctc

SEQ ID NO: 333672 - protein, 952 aa, Artificial Sequence
  derived and/or modified sequence
MMMRYHQAIQSHSFLLVQFHLPTITSNTVCRIICVKVMGCPWTLIRQMIIINWCFHCYLDSQMKWTLLLTYALSYQMKASTSCNLKKILKSSPVPATNNQVPTAMSSSSTPQSQGPPPTVSQMLSVKRQQQQQHSPAPPPQQVQVQVQQPQQVQMQVQPQQSNAGVGQPASGESSLIKQLLLPKRGPSTPGGKLILPAPQIPPPNNARAPSPQVVYQVASNQAAGFGVQGQTPAQQLLVGQQNVQLVPSAMPPSGGVQTVPISNLQILPGPLISNSPATIFQGTSGNQVTITVVPNTSFAPATVSQGNATQLIAPAGITMSGTQTGVGLPVQTLPATQASPAGQSSCTTATPPFKGDKIICQKEEEAKEATGLHVHERKIEVMENPSCRRGATNTSNGDTKENEMHVGSLLNGRKYSDSSLPPSNSGKIQSETNQCSLISNGPSLELGENGASGKQNSEQIDMQDIKSDLRKPLVNGICDFDKGDGSHLSKNIPNHKTSNHVGNGEISPMEPQGTLDITQQDTAKGDQLERISNGPVLTLGGSSVSSIQEASNAATQQFSGTDLLNGPLASSLNSDVPQQRPSVVVSPHSTTSVIQGHQIIAVPDSGSKVSHSPALSSDVRSTNGTAECKTVKRPAEDTDRETVAGIPNKVGVRIVTISDPNNAGCSATMVAVPAGADPSTVAKVAIESAVQQKQQHPPTYVQNVVPQNTPMPPSPAVQVQGQPNSSQPSPFSGSSQPGDPMRKPGQNFMCLWQSCKKWFQTPSQVFYHAATEHGGKDVYPGQCLWEGCEPFQRQRFSFITHLQDKHCSKDALLAGLKQDEPGQAGSQKSSTKQPTVGGTSSTPRAQKAIVNHPSAALMALRRGSRNLVFRDFTDEKEGPITKHIRLTAALILKNIGKYSECGRRLLKRHENNLSVLAISNMEASSTLAKCLYELNFTVQSKEQEKDSEMLQ

SEQ ID NO: 333673 - protein, 740 aa, Artificial Sequence
  derived and/or modified sequence
MTHMLNAAADRVKWTRSSAAKRAACLVAAAYALKTLYPIIGKRLKQSGHGKKKAAAYPAAENTEILHCTETICEKPSPGVNADFFKQLLELRKILFPKLVTTETGWLCLHSVALISRTFLSIYVAGLDGKIVKSIVEKKPRTFIIKLIKWLMIAIPATFVNSAIRYLECKLALAFRTRLVDHAYETYFTNQTYYKVINMDGRLANPDQSLTEDIMMFSQSVAHLYSNLTKPILDVMLTSYTLIQTATSRGASPIGPTLLAGLVVYATAKVLKACSPKFGKLVAEEAHRKGYLRYVHSRIIANVEEIAFYRGHKVEMKQLQKSYKALADQMNLILSKRLWYIMIEQFLMKYVWSSSGLIMVAIPIITATGFADGEDGQKQVMVSERTEAFTTARNLLASGADAIERIMSSYKEVTELAGYTARVYNMFWVFDEVKRGIYKRTAVIQESESHSKNGAKVELPLSDTLAIKGKVIDVDHGIICENVPIITPAGEVVASRLNFKVEEGMHLLITGPNGCGKSSLFRILSGLWPVYEGVLYKPPPQHMFYIPQRPYMSLGSLRDQVIYPDSVDDMHDKGYTDQDLERILHNVHLYHIVQREGGWDAVMDWKDVLSGGEKQRMGMARMFYHKPKYALLDECTSAVSIDVEGKIFQAAKGAGISLLSITHRPSLWKYHTHLLQFDGEGGWRFEQLDTAIRLTLSEEKQKLESQLAGIPKMQQRLNELCKILGEDSVLKTIKNEDETS

SEQ ID NO: 333674 - DNA, 2223 bp, Artificial Sequence
  derived and/or modified sequence
atgactcacatgctcaacgccgccgcagaccgggtaaagtggactcgtagcagcgccgccaagcgggccgcatgcctcgtcgccgctgcctatgcccttaagacactctaccccatcattggaaagagactcaaacagtccgggcacgggaaaaagaaggctgcggcatatccggctgccgagaatacagaaatccttcattgtacagaaactatatgtgagaagcccagtccaggggtgaacgctgactttttcaagcaactgcttgagctgcggaaaattctctttcctaagttagtgacgacagaaaccggttggctctgtctccacagcgtagcgctaattagcagaacctttctgtccatttacgtcgcgggtctagatgggaaaatcgtgaagagtatcgtcgagaagaaacctagaacatttattatcaagctcattaaatggctgatgatcgctataccagctacttttgtaaatagcgctatcaggtacctggagtgcaaattagccctggcctttagaacccgcctggtggaccatgcatacgagacttacttcactaatcagacgtactataaagtgattaatatggacgggagattggcgaaccccgatcagagcttgactgaagatattatgatgtttagccaatcagtagcacacctgtatagtaacctgactaaaccgattctcgacgttatgcttacttcttatacactgatccaaacagcaacatccagaggagcaagtcctatcgggcctacgttgcttgccggtctggtcgtgtatgccacggctaaagtcctcaaagcttgctctccaaagttcggcaagctggtggctgaagaagcacaccgaaaagggtatttgcgttacgtccatagtaggatcatcgccaatgtcgaggagattgccttttacagagggcataaagttgagatgaaacaactgcaaaaaagctacaaggctctagccgatcaaatgaacctcattctaagtaaaaggttatggtatattatgatcgagcagttcctcatgaaatatgtgtggtcaagctcaggactgatcatggtggccatccctataatcacagctacaggattcgcggacggcgaggacggccagaaacaggtgatggtctctgaacgtacggaggcattcaccactgctagaaacctccttgccagtggagctgacgctatagagaggataatgagttcttataaggaggttacagaactggctgggtatacagctcgagtttataatatgttctgggtttttgatgaggtgaagcgcggtatctacaagcgcacagctgtcatccaagagtctgagtctcacagtaaaaacggcgccaaagtggagctgcctttatccgatacacttgccattaaaggaaaagtcatcgacgtggaccacggcataatctgcgagaatgtgcccataattacaccagccggcgaagtggtggcatccagactgaacttcaaagtagaggaggggatgcatctgcttataaccggtcccaacggttgtggaaagagctccctgttcagaatactctccgggctttggccagtgtacgaaggtgtgttatacaagccaccacctcagcacatgttctacattccacaacgcccctacatgagtttgggtagcctgcgggatcaggtgatctaccctgattctgtagacgacatgcacgacaagggctacacggaccaggatctcgaacgaatcttacacaacgtgcatctctaccatatcgtgcaaagggagggcgggtgggacgcagtgatggactggaaagatgtgctgtcaggcggggagaagcaacgaatgggcatggcccggatgttctaccataaacccaaatacgcgttgttggatgagtgtacctccgcagtatcaatcgacgtggaggggaagatctttcaggcggccaagggagcaggcatcagcctgctctccatcactcatcgaccgtccttgtggaaataccacacccacttactgcagttcgatggagagggaggttggaggttcgagcaactggacactgctatacgtctgaccttaagtgaggagaaacagaaactcgaaagccagttggccggcatccccaagatgcaacagcgcctgaatgaactgtgcaagatcctgggagaagattctgtgcttaagacaatcaaaaatgaggatgaaacgagctag

SEQ ID NO: 333675 - DNA, 2223 bp, Artificial Sequence
  derived and/or modified sequence
atgacccacatgctgaatgctgctgctgacagagtgaagtggaccaggagcagcgctgccaagagagctgcctgcctggtggccgccgcctatgccctgaagaccctgtaccccatcatcggcaagaggctgaagcagagcggccacggcaagaagaaggctgctgcctacccagctgctgaaaatacagagatcctgcactgcacagagaccatctgtgagaagcccagccctggggtgaatgctgacttcttcaagcagctgctggagctgaggaagatcctcttccccaagctggtgaccacagagaccggctggctgtgcctgcacagcgtggccctgatcagcaggaccttcctgagcatctacgtggccggcctggatggcaagatcgtgaagagcatcgtggagaagaagcccaggaccttcatcatcaagctgatcaagtggctgatgattgccatcccagccacctttgtgaacagcgccatccgctacctggagtgcaagctggccctggccttccgcacccggctggtggaccacgcctatgagacctacttcaccaaccagacctactacaaggtgatcaacatggatggccgcctggccaacccagaccagagcctgacagaggacatcatgatgttcagccagagcgtggcccacctgtacagcaacctgaccaagcccatcctggatgtgatgctgaccagctacaccctcatccagacagccaccagcagaggagccagccccatcggccccaccctgctggccggcctggtggtgtatgccacagccaaggtgctgaaggcctgcagccccaagtttgggaagctggtggccgaggaggcccacaggaagggctacctgcgctacgtgcacagccgcatcatcgccaacgtggaggagatcgccttctaccggggccacaaggtggagatgaagcagctgcagaagagctacaaggccctggccgaccagatgaacctgatcctgagcaagaggctgtggtacatcatgattgagcagttcctgatgaagtatgtgtggagcagcagcggcctcatcatggtggccatccccatcatcacagccaccggctttgctgatggagaagatggccagaagcaggtgatggtgtctgagaggacagaggccttcaccacagccaggaacctgctggccagcggggctgatgccatcgagcgcatcatgagcagctacaaggaggtgacagagctggccggctacacagcccgggtgtacaacatgttctgggtgtttgatgaggtgaagaggggcatctacaagaggacagctgtgatccaggagagcgagagccacagcaagaatggagccaaggtggagctgcccctgagtgacaccctggccatcaagggcaaggtgattgatgtggaccacggcatcatctgtgaaaatgtgcccatcatcaccccagctggggaggtggtggccagccggctgaacttcaaggtggaggagggcatgcacctgctgatcaccggccccaacggctgcggcaagagcagcctcttccgcatcctgagcggcctgtggcctgtgtatgaaggagtgctgtacaagcccccaccccagcacatgttctacatcccccagaggccctacatgagcctgggcagcctgcgggaccaggtgatctacccagacagcgtggatgacatgcatgacaagggctacacagaccaggacctggagcgcatcctgcacaacgtgcacctgtaccacatcgtgcagcgggagggcggctgggatgctgtgatggactggaaggatgtgctgagcggcggggagaagcagaggatgggcatggccaggatgttctaccacaagcccaagtatgccctgctggatgagtgcaccagcgctgtgtccattgatgtggagggcaagatcttccaggccgccaagggggccggcatcagcctgctgagcatcacccaccggcccagcctgtggaagtaccacacccacctgctgcagtttgatggagagggcggctggaggtttgagcagctggacacagccatccggctgaccctgtctgaggagaagcagaagctggagagccagctggccggcatccccaagatgcagcagaggctgaatgagctgtgcaagatcctgggggaggacagcgtgctgaagaccatcaagaatgaagatgagaccagctag

SEQ ID NO: 333676 - DNA, 2223 bp, Artificial Sequence
  derived and/or modified sequence
atgacccacatgctgaacgccgccgccgaccgggtgaagtggacccgttcttctgccgccaagcgtgccgcatgtcttgtggctgcggcctacgccctaaagaccctgtaccccattataggaaagaggctcaaacagtcgggccatgggaagaagaaagccgccgcctatcccgccgcagagaacactgagatactacattgtaccgaaacaatctgcgagaagccttccccaggagtgaatgccgacttcttcaagcagttgcttgagctgcgcaaaattttatttccaaaattggtgaccaccgaaaccggttggctgtgcctgcactcagtcgccctgatctccaggactttcctaagtatttacgttgccggcctggatggtaaaattgtgaagagcatcgtggaaaaaaaaccacgtaccttcattattaaacttattaagtggctgatgatagccattcccgcgacttttgtgaactcggcaattaggtatttggagtgcaagctcgcgctggcatttcgcactaggctcgtggatcacgcctatgaaacatactttaccaatcaaacgtattacaaggtgatcaacatggatggcaggctcgcgaatcctgatcagtctctgacagaggacattatgatgttcagccagtccgtcgcccacctttactctaacctgaccaagccaatattggacgtgatgctgacttcctacacgttgatccagaccgccacttctagaggggccagtccaatcggcccgacattgctggccggactggtagtgtacgcgaccgccaaggtgcttaaggcttgtagccctaaatttggtaaacttgtggctgaagaggctcaccggaaggggtacttgagatacgtgcactcgcggatcatcgctaacgtcgaggaaatcgcattttacagggggcacaaagtggagatgaagcagctacagaaatcttacaaagctctcgctgaccagatgaacctgatcctgagcaaacggctatggtacatcatgatcgaacaatttctgatgaagtatgtctggtcatctagcggactcattatggtggccattccaatcatcacggccacaggctttgcagacggggaagatggacagaaacaggtcatggtgtctgagcgcaccgaagccttcaccacagctcggaatcttcttgcatcgggggcagatgccattgagcgcataatgagcagctataaagaagtgaccgaactggcaggctacacagcacgggtgtacaacatgttttgggtgtttgacgaagtgaaaaggggcatttacaaaaggacagcagtgatccaggaatcagaatcccactccaaaaacggggctaaggtagaactgcctctgagcgacaccctggccattaaaggaaaagtgattgatgttgatcatgggatcatctgtgaaaatgtgccaatcatcactcccgctggcgaggtcgtggcatctagactgaatttcaaagttgaggaaggcatgcatctgctcatcaccggccctaatggatgtggcaaatcgtccctgtttcgaatattgagcggcctttggccagtgtatgaaggtgtcctgtacaaacccccgccccagcacatgttctatattccccagcgtccatacatgagcctgggatcactccgggatcaagtgatctatcctgacagtgtggacgatatgcatgataagggctataccgatcaggatctggaaagaattttacataacgttcacctgtatcacatagtgcaacgcgagggtgggtgggatgctgtgatggattggaaagacgtcctgagcggcggggagaagcaacgtatgggaatggcgagaatgttctaccacaagccaaagtacgcgttgttggatgagtgcactagtgcagtgtcaatcgacgtagagggcaagatttttcaggccgcaaagggcgcaggaatctccctgctttctatcacccaccggccatcgttgtggaaataccacacacacctcttacagtttgacggagagggtgggtggcggttcgagcagctggacaccgccattagacttacactttcagaggagaagcaaaaattggagtcccagctagctgggatcccaaaaatgcagcagcgcttgaacgagctgtgcaagatcctgggcgaagattccgtgctgaagaccattaaaaacgaggacgagactagctag

SEQ ID NO: 333677 - DNA, 2223 bp, Artificial Sequence
  derived and/or modified sequence
atgacccacatgctgaacgccgctgcagaccgtgtcaaatggacacgcagttctgctgctaagcgggcagcttgcctagtcgcggcagcctatgcgctgaaaacactctaccccatcattggcaagcggctgaaacagtccggtcacgggaaaaagaaggctgccgcttatccggctgctgagaatactgagattctccattgtacagaaacaatctgcgagaaaccctcccccggtgttaacgctgacttttttaaacaactcctcgagctgcgcaaaattctgttccctaagttggtgaccacggaaacagggtggctgtgtctgcacagcgtggctttgatatcgcgtaccttcctgtcaatctatgtcgccggacttgacggaaaaattgtgaagtcaatcgtggaaaagaagccaagaaccttcatcattaaactgatcaagtggcttatgatcgcgataccagctaccttcgtgaacagcgcaatcagatatctggagtgcaagttggcactggcttttcgaactcgcctcgttgatcacgcctacgagacctattttaccaaccagacctattataaggtcataaatatggacgggagactggcgaatcctgatcagagtctgaccgaggatattatgatgtttagccaatcagtggcccatctttatagtaatctcaccaaacctatactggatgtcatgctgacctcatataccctgatacaaacggccacctcgaggggggcttcccccattgggccaaccctgcttgcaggcttagtggtatatgctacggcaaaggtcctgaaggcctgttctcccaagttcggcaagctggttgccgaggaagcacatcgcaaaggctatctgcggtacgtacactccaggataatcgccaacgtggaggagatagctttctatagaggtcacaaagtagaaatgaagcagcttcagaagtcatataaagcactagctgaccagatgaacctgatcctctccaagcgtttgtggtacatcatgatcgaacagtttcttatgaaatacgtttggtcctcaagtggactcatcatggtggcaattcctataataacggctaccgggttcgccgatggtgaggatggacagaaacaggtgatggtctctgaacgtacggaagcatttactactgcaaggaatctgttggccagcggcgcagacgccatagagcgaattatgagctcctataaggaagtcacagaacttgcgggatacactgctcgagtttataatatgttctgggtcttcgatgaagtgaagcggggaatctacaaaaggacagcagtcatccaggagtccgagtcacactccaagaacggggctaaagtggaattgccattgagtgataccctcgcaatcaagggcaaggtgatcgatgtggatcacggtataatctgtgagaatgtcccaattataactccagctggggaggtcgtggcttcccgcttgaattttaaggtcgaggaggggatgcatctgctcataactggccctaatgggtgtggcaagtcctccctcttcaggatcctttccgggctttggcctgtgtacgagggcgttctgtataagccacctcctcagcatatgttttacatccctcaacgtccctatatgagtctcgggtctctcagagaccaggtgatctatcccgatagcgtcgacgatatgcacgacaaagggtatacagaccaggacttagaacgtatactacataacgtccatctgtaccatatcgtccagagggaggggggttgggatgctgtcatggattggaaagacgtcctgtctggcggtgagaagcagcgcatgggcatggcacgcatgttctaccataagcctaagtacgccctacttgacgagtgtactagcgcagtctccatcgatgtagaaggtaaaatttttcaagctgcaaaaggagccggtatctcccttctaagcattacgcaccgaccgtccctttggaagtaccacacccacctcttacagtttgacggcgagggcggttggcggtttgagcagcttgacacagccattcgactgaccttgtccgaggaaaagcagaagttagaaagtcagctcgccggaattcctaaaatgcaacagcggctcaatgaactgtgcaagatactgggcgaagactccgtattgaagacaataaagaacgaggatgagacaagttag

SEQ ID NO: 333678 - DNA, 6238 bp, Artificial Sequence
  derived and/or modified sequence
aaaacacaacagtggaagagaaacgctgcagactatgggacgctgtaggactttctaaaacatttgctggggatttctgtgaagcatgatcttttaaaacgaattcttttggaagccggtttgggtaactgggaaaatgacacatatgctaaatgcagcagctgatcgagtgaaatggaccagatcgagtgctgctaagagggctgcctgcctggtggctgcggcatatgctctgaaaaccctctatcccatcattggcaagcgtttaaagcaatctggccacgggaagaaaaaagcagcagcttaccctgctgcagagaacacagaaatactgcattgcaccgagaccatttgtgaaaaaccttcgcctggagtgaatgcagatttcttcaaacagctactagaacttcggaaaattttgtttccaaaacttgtgaccactgaaacagggtggctctgcctgcactcagtggctctaatctcaagaacctttctttctatctatgtggctggtctggatggaaaaatcgtgaaaagcattgtggaaaagaagcctcggactttcatcatcaaattaatcaagtggcttatgattgccatccctgctaccttcgtcaacagtgcaataaggtacctggaatgcaaattggctttggccttcagaactcgcctagtagaccacgcctatgaaacctattttacaaatcagacttattataaagtgatcaatatggatgggaggctggcaaaccctgaccaatctcttacggaggatattatgatgttctcccaatctgtggctcacttgtattccaatctgaccaaacctattttagatgtaatgctgacctcctatacactcattcaaactgctacatccagaggagcaagcccaattgggcccaccctactagcaggacttgtggtgtatgccactgctaaagtgttaaaagcctgttctcccaaatttggcaaactggtggcagaggaagcacatagaaaaggctatttgcggtatgtgcactcgagaattatagccaatgtagaagaaattgccttttacagaggacataaggtagaaatgaaacaacttcagaaaagttacaaagctttagcagatcagatgaacctcattttatccaaacgtttgtggtacatcatgatagaacagttcctgatgaagtatgtttggagcagcagtggactaattatggtggctatacctattatcactgcaactggctttgcagatggtgaggatggccaaaagcaagttatggttagtgaacggacagaagcctttaccactgctcgaaatttactggcctctggagctgatgctattgaaaggattatgtcttcatacaaagaggtcactgaattagcaggctacactgctcgagtgtacaatatgttttgggtctttgatgaagtaaaaagaggcatttataagagaactgctgtcattcaagaatctgaaagccatagcaagaatggagctaaggtagaattacctctcagtgacacattggcaattaaaggaaaagttattgatgtggatcacggaattatttgtgaaaatgttcccataattacaccagcaggagaagtggtggcttccaggctaaacttcaaagtagaagaaggaatgcatcttttgataactggtcccaatggttgtgggaaaagttctctcttcagaattctaagtgggctctggcctgtgtatgaaggagtcctctataaaccacctcctcaacatatgttttatattccacaaaggccatatatgtctcttggaagtcttcgggatcaagtcatttaccctgattcagtggatgatatgcatgataaaggttatacagaccaagatctggaacgtatcctacacaatgtccatctctatcacatagttcaaagagaaggaggatgggatgctgttatggactggaaagatgtcctgtcaggaggggaaaagcaaagaatgggcatggctcgtatgttttatcataaaccaaaatatgccttgctggatgaatgtaccagtgctgtcagcattgatgtcgaaggaaagatatttcaggctgcaaaaggggctggaatttccttactgtctataacacacagaccttctctttggaaataccacacacatttattacagtttgatggtgaaggaggttggcgctttgaacaattggatactgctatccgtttgacattgagtgaagaaaaacaaaagctagaatctcagctagctggaattcccaaaatgcagcagagactcaatgaactatgtaaaattttgggagaagactcagtgctgaaaacaattaaaaatgaagatgagacatcttaatttgttttgacatattttaaaagttaattattagataaaggctcaaagacattctgttatactgcatgaagtatgttaagctaagcacagagaaaaaaaggcagcaagacatgttttataagattttagcattaaggaagtatatgatctgacttttcagaagaaaataaacaaatgcattatgtaaggtcagtcattatgacttatactaattcctagtgaaggcctaatgcacttgtaaaacaggattttctaggtgaattcatgatgaataccagatttactatgtatatgtggtgtgtctgaagttcttaacaaacatgggcaatattctggaaatgaaacaagttaaactgagcagcatttgggttgataccaagtgcataagattcaaactttgagtgacatttagtccatttatggttgatattaggtttaatagctagaattcaaattgattattgctagtggccaactaaacctgtacaaaatagctgacagttttataaataatttcaatataaaaattgttttaatggcatttgttgaaagaaaaaagcatggctaaaatgtataaaatgccatatttttaaattttggactttaagcatcttaatgagggcatataacaaattaattttagtacaaatcttaaatatttttaataaatcctttcattttaaaaagagaattgccaatacagaaaaggagtatccaaacaatgtctcaacctgataatttccttagcagaattacctattgcaacttctgttcagaaatacacagcttgtttttttgcccaaggatgagtctacattttaagaactgcaatggtataaaggaacttaaggattctgagaatcatagtaataacatacattggaatagtactttataatttacaatccccatttacatcatttcaccttaatgttgatgacaatgttttgaaacaaatactatttttcctactttgcttttgagaaaattgacactcagacttgccctaatcatgcactttacttaaggaaagatcgagaaatcaaatgaagttctcctgactctctggtttagtgctcttttgttattatcctttaaatcaaactgggctataatagcaataaaagttagacgaagtgtagaaaataaaataaatttcataatgttagtcttattgttatttggttattgtttacaagaaatgaaaattaagtacaaagtgcaaagatcattgttctgcggcttaaaatgaaatgagaaagttagtaaatcattcagcaactatgcagtcttactcaatattaatgtacctctaaggcattagcaatgagaagggcaaataattatggttttggtaaagttaatatttattgaacataatgagaaataatctatatggactagtcatatgaaatagattttattctatttgtgtgcactggagctggaaagccaagactgaaactttatctcttgctgcctgtgataccacattgacataccagaagaatattggaatgatcagttgttagtggcctaggattttatttgcctgttgagacacagccataatagatgttaagtctgtgattcttagacttttcaggtgatagagtacctggaagtcattcataatgatcgttatagaacatcataacatttctacattttcaattctgccatgatagctagtgtatttttaattttcaataaatgtaaccaacttacatgaaggaatgcaatataaaattataatcagtacatttgtccaacgttttcattagtattatcacctacttattcatcagttactaatatttcctgttagaaaagtgaggcaggaattaaagatttttttttaagaagcatggaaccaaaacttaaacttgctaaaaattattcattaatcttttctacataagtgattatccagtttatactgctacaagggcaaaagtctgaggcaagtgttttaagttaacttttaaaggtacaagaagaaaatgaaaaatcctcatgtgaaagatgtgtataattttcatgccttaattttcataatataaaaataaaacataattttaaaacaacctgataattttgttttgaaacattgaaaagaatgccaaaacaaatattagatttgtaattagtcagtatttaatatattttacccatgagctaaagcaaaaaagactcattatttatgatgcacaggattcaaagatgcctaaaattctgtattaaaaactatgtacactgtaatttaaatgttaaagttctaatatgcacatgttttccatgagctttttgtgcctatttgttttctgaatttatttttcaggaccaacatccttaacttggaagggaaaacatctctgatttgaacttgtatttatgtaccattcaattgtttccaaatggtccaatgggtataccatattttactactcttatattttacggaaaacatgaaaaagactgagaaactagccatttttgaatacagcaagggatagatgaggaaaggaaaaaagaaagaatatttcaagtttcaaactacttttaccatgttatatctatttgcccaaacgtttgacatatttttggtcaaacaaaaagctataagtttatggagcttgagtttaaaatgtgcattctttaggttaactcttaaacttgaaaaataagttggattctatgaaaacgttgcattatatttctacagcatgtaatgttatgccaagcatgagtctaaaacagtttgtgttcttgtaagcaggataatgtgtaataatccctctgaaataatctcaagaagaatgatataccttaaaactcaactcaaatttacatttgtttacagtgggaatggttttctcttgatagaaatttggtttttgtctcaagttttggtctgtcagtaaaggcataaatgaatatcctagtttttatttgaaacattggttccaagtatagtttcatatttggcaatagattcatcttattctaatatgtttggaatagctttttgattcaatgagtctaggaaaatctgttacacattgaaacccaagtccagagaatgttacacacttctaatatatgcataaaatgatggtaaaggttattaaatcattgatttaaaaagatgactttgatataattactttatgggcaaaattgtcctcatttagaagtgaaaagtactttcacatagcctaggctatttacagttctgattatatacatttagatatgttgaatatgttttggggttgaatatgttttgccacatgagcgccttcaggtggatgtataaaatatttttttaaaaaccaatttcttcttcattgttgatgcttttcctgactaccaagttcagggctggtttacatttcatattgtgaaattttcaaaaccaatggtctatttataagccagaattgtattaatgaaaatgaatgagaaaaatgtccttaaaggtaaaaatcattatgtagctaaatgaaattgtggctgtgtgtgagtacattataatataatttccatctgatgtgtatttacttgaactcatcattccttatgaattccttaaccattaagaaaaagactagattaatcaaaggaattacaaattattccatttttacaaaataccctgtttctatactgcaaatggccatgttgggtatatgtctatatacgccttacttagacattgtattgtatataaccgtgtgtagaactatagacaatagtcaccaaatagttatttaaatattaattttctttattaatacaacacatttaataagtatctacctatgccaggcactgtgctaagttctattactaaataaaatttggtccctgtccgaa

SEQ ID NO: 333679 - DNA, 2223 bp, Artificial Sequence
  derived and/or modified sequence
atgacccacatgctgaacgccgccgccgacagagtgaagtggaccagaagcagcgccgccaagagagccgcctgcctggtggccgccgcctacgccctgaagaccctgtaccccatcatcggcaagagactgaagcagagcggccacggcaagaagaaggccgccgcctaccccgccgccgagaacaccgagatcctgcactgcaccgagaccatctgcgagaagcccagccccggcgtgaacgccgacttcttcaagcagctgctggagctgagaaagatcctgttccccaagctggtgaccaccgagaccggctggctgtgcctgcacagcgtggccctgatcagcagaaccttcctgagcatctacgtggccggcctggacggcaagatcgtgaagagcatcgtggagaagaagcccagaaccttcatcatcaagctgatcaagtggctgatgatcgccatccccgccaccttcgtgaacagcgccatcagatacctggagtgcaagctggccctggccttcagaaccagactggtggaccacgcctacgagacctacttcaccaaccagacctactacaaggtgatcaacatggacggcagactggccaaccccgaccagagcctgaccgaggacatcatgatgttcagccagagcgtggcccacctgtacagcaacctgaccaagcccatcctggacgtgatgctgaccagctacaccctgatccagaccgccaccagcagaggcgccagccccatcggccccaccctgctggccggcctggtggtgtacgccaccgccaaggtgctgaaggcctgcagccccaagttcggcaagctggtggccgaggaggcccacagaaagggctacctgagatacgtgcacagcagaatcatcgccaacgtggaggagatcgccttctacagaggccacaaggtggagatgaagcagctgcagaagagctacaaggccctggccgaccagatgaacctgatcctgagcaagagactgtggtacatcatgatcgagcagttcctgatgaagtacgtgtggagcagcagcggcctgatcatggtggccatccccatcatcaccgccaccggcttcgccgacggcgaggacggccagaagcaggtgatggtgagcgagagaaccgaggccttcaccaccgccagaaacctgctggccagcggcgccgacgccatcgagagaatcatgagcagctacaaggaggtgaccgagctggccggctacaccgccagagtgtacaacatgttctgggtgttcgacgaggtgaagagaggcatctacaagagaaccgccgtgatccaggagagcgagagccacagcaagaacggcgccaaggtggagctgcccctgagcgacaccctggccatcaagggcaaggtgatcgacgtggaccacggcatcatctgcgagaacgtgcccatcatcacccccgccggcgaggtggtggccagcagactgaacttcaaggtggaggagggcatgcacctgctgatcaccggccccaacggctgcggcaagagcagcctgttcagaatcctgagcggcctgtggcccgtgtacgagggcgtgctgtacaagccccccccccagcacatgttctacatcccccagagaccctacatgagcctgggcagcctgagagaccaggtgatctaccccgacagcgtggacgacatgcacgacaagggctacaccgaccaggacctggagagaatcctgcacaacgtgcacctgtaccacatcgtgcagagagagggcggctgggacgccgtgatggactggaaggacgtgctgagcggcggcgagaagcagagaatgggcatggccagaatgttctaccacaagcccaagtacgccctgctggacgagtgcaccagcgccgtgagcatcgacgtggagggcaagatcttccaggccgccaagggcgccggcatcagcctgctgagcatcacccacagacccagcctgtggaagtaccacacccacctgctgcagttcgacggcgagggcggctggagattcgagcagctggacaccgccatcagactgaccctgagcgaggagaagcagaagctggagagccagctggccggcatccccaagatgcagcagagactgaacgagctgtgcaagatcctgggcgaggacagcgtgctgaagaccatcaagaacgaggacgagaccagctag

SEQ ID NO: 333680 - DNA, 528 bp, Artificial Sequence
  derived and/or modified sequence
atgaccgagcaggagaccctggccctgctggaggtgaagagagaccccggcgtgagagccgagcccgtgatgctgttctgccccagcgccctgtggggcgccaccgccggcggcggcgacccccccgccatctgcggccccgtgggccccgccctgtacagcctgctgctgcagcccggcagagccttccacctgcccgcccccggctacccccagaccgcccccagcgcccactggagcctgtgcagactgcccgccgacctgctggccgacctgtgcagaggccccctgctgcccagactgagactgagacccgacgtgagcgccaccgccgtggacgccgacgtggagcccctgctgcacgtgagaggcggcgccggcgcccacgcccactgccacagagagccccccggcctgcccggccccagacccctgggcctgagactgcaggccccccccctgggcctgagcctgagcgccctggccctgggcgtgggcggcagcggcctgggcctgacccacctgtag

SEQ ID NO: 333681 - DNA, 399 bp, Artificial Sequence
  derived and/or modified sequence
atgaccgagcaggagaccctggccctgctggaggtgaagagagaccccggcgtgagagccgagcccgtgatgctgttctgccccagcgccctgtggggcgccaccgccggcggcggcgacccccccgccatctgcggccccgtgggccccgccctgtacagcctgctgctgcagcccggcagagccttccacctgcccgcccccggctacccccagaccgcccccagcgcccactggagcctgtgcagactgcccgccgacctgctggccgacctgtgcagaggccccctgctgcccagactgagactgagacccgacgtgagcgccaccgccgtggacgccgacgtggagcccctgctgcacgtgagaggcggcgccggcgcccacgcccactgctag

SEQ ID NO: 333682 - DNA, 528 bp, Artificial Sequence
  derived and/or modified sequence
atgacagaacaggagaccctggccctgttagaagtgaagcgcgatccaggggtgagggccgagccagtgatgctcttttgtcctagtgcgttatggggagctaccgccggaggcggggatcccccagccatctgcgggccggtcggcccagccttatacagcttgctgctgcagccaggccgggcattccatctcccagcacccggatatccccaaaccgccccttccgctcactggtcactctgccgcttaccggctgatctattggcagacctatgcagagggcctttgctacctcgcctgcgtctcaggccggatgtgtctgctaccgctgttgatgctgacgtagagcctctgctgcatgtgcgagggggggcaggagctcacgcgcactgccaccgcgaaccacccggcctgccaggccctcggccacttggtttgcgactgcaggcccccccactcggcctgagcctttctgcactggctctgggagtcggagggtcaggcctgggtctcacgcacctgtag

SEQ ID NO: 333683 - DNA, 450 bp, Artificial Sequence
  derived and/or modified sequence
atgaagcctgccggtaacgggttcccttctcctctggccggaccagggtcacgtcggggatgcgtgccaggcctgaccacctggatcagagcacgggctagggaaacaggttcgcgaaggggccgaaatgtgttctcgcctgagagggcggctggcagtggtggctgtttttgttctgggcgaatcccgcgtgtgagcgccgtagacgctcttcgcgtggccggtgctaggcgcgcagctgtgtctcgcggaaaggccggagttccactccggtacagggaacggcatcttgagcttagcgagtggcccaggaaacccgctcgtgcccatttccctgctagaactggctgttggtggttttggtggctcctgtctgggggaacacctggcaccagcaaaggtggtttcatttggttatatttaacttggcagtttttgctgaataagtag

SEQ ID NO: 333684 - DNA, 270 bp, Artificial Sequence
  derived and/or modified sequence
gtgaggaccaggcaggagggcctcgcctcgaggcgagatggccgcacggtctctagcccgcagggctctcagagtcgcaggcggtgacgcccggtcggggggcccggtcgcaagggacacacagctgggggcgcaatggcgctggatcgccgaaggtctggttgaaaacttgaacccgcctggagcggatgcctaagaaaatgcaggcccgctgaagcctccccgccgggccctgggccctgaaagcctccggcagtttcccgtgacccc

SEQ ID NO: 333685 - DNA, 890 bp, Artificial Sequence
  derived and/or modified sequence
cccggaaagccaggttgggtcactgctgggaggtatgaggtgagactcgggtttgcaggcagggcaagttgtggggaggtgggggtggccccctatttgttgggggcagacctgccatttgaaagccaccatcctcatgtgtagccctcacatgggagaacaggattggacctgcagggatcctggctgggagcagaacctgcgtcagctcagagtcctgtgggaagggaacggctttatcgcagcctttcgcttttatttttgcacattcgctttttatttgccggtggtgctgctgacgggccctcggagcggggctgtgtctggacacttctgggagccttggacggctctggagaggaggcaggagctgcccaggaaggagcttaattccgtcgcttctgagctgtctgcacggcaggaggagagtgaacattctcataaacatttaattgaactccgccgggaatttaagaaaaatgtacctgaggaaatcagagagatggtggctcctgtattaaaaagcttccaagccgaggtggtggcccttagtaagagaagtcaggaggcggaggctgcttttctgagtgtttacaagcaattaattgaagcaccagaccccgtgcctgtgtttgaggcggcacgcagcctagacgacagactgcagccccccagctttgaccccagtgggcagccccggcgagacctccacacttcgtggaagaggaaccccgagctcctcagccccaaagagcagagagaggggacgtcgcctgccgggcccacgctgaccgagggaagccgcctcccaggcattcccgggaaagccctcctgacagaaaccttgctgcagagaaatgaggcggaaaaacaaaagggccttcaagaag

SEQ ID NO: 333686 - protein, 124 aa, Artificial Sequence
  derived and/or modified sequence
MVAPVLKSFQAEVVALSKRSQEAEAAFLSVYKQLIEAPDPVPVFEAARSLDDRLQPPSFDPSGQPRRDLHTSWKRNPELLSPKEQREGTSPAGPTLTEGSRLPGIPGKALLTETLLQRNEAEKQ

SEQ ID NO: 333687 - DNA, 375 bp, Artificial Sequence
  derived and/or modified sequence
atggtcgcccctgtgctgaaatcattccaggctgaagtggtagctctgagtaagcgttctcaagaggctgaggcagctttcttatcagtgtataagcaactgatcgaggctccagacccagtgcctgtttttgaggccgcacgatccctggacgataggctgcagcccccgtctttcgatccatccggccaaccgaggagagacttacacacgtcctggaagaggaaccctgagttactgagcccaaaggagcaaagggagggtacctcacctgccgggcccacgttgaccgaagggagtcgcctgcctgggattcctggaaaagcacttctgacagagaccttgttacagagaaacgaggcagagaaacagtag

SEQ ID NO: 333688 - DNA, 375 bp, Artificial Sequence
  derived and/or modified sequence
atggtggcccctgtgctgaagagcttccaggccgaggtggtggccctgagcaagaggagccaggaggccgaggccgccttcctgtctgtgtacaagcagctgattgaggccccagaccctgtgcctgtgtttgaggccgcccggagcctggatgaccggctgcagccccccagctttgaccccagcggccagccccggcgggacctgcacacctcctggaagagaaatcctgagctgctgagccccaaggagcagcgggagggcaccagccctgctggccccaccctgacagagggcagccggctgcccggcatccctgggaaggccctgctgacagagaccctgctgcagagaaatgaagctgagaagcagtag

SEQ ID NO: 333689 - DNA, 375 bp, Artificial Sequence
  derived and/or modified sequence
atggtggcccccgtgctgaagagcttccaggccgaggtggtggccctgtccaaacggtcccaggaagccgaagcagctttcttgagcgtgtataaacaattaattgaggctccagatcctgtgcctgtctttgaggcagcgcggagcttggacgacagactccagccaccatccttcgaccccagtgggcagcctagaagagatctgcacacaagttggaaacggaatccagaactgctgtccccaaaggagcagcgagagggcacttcaccggccggaccgaccctgacagagggaagtaggctgccgggcatccccgggaaggctttgctcacggaaacattgttacagaggaacgaggccgagaaacaatag

SEQ ID NO: 333690 - DNA, 375 bp, Artificial Sequence
  derived and/or modified sequence
atggtggcccctgttttaaagagtttccaggccgaggttgtggccctatccaagaggtcacaggaagccgaagcagcttttctaagcgtatataagcaactgattgaggcccctgacccagttcctgtcttcgaggcggcacggtccctcgatgacagactccagcctccatcgtttgacccaagcggccagcccagaagagacctgcatacatcatggaaaagaaatcccgaattgctttccccaaaggagcagcgcgagggaacttccccagccggtccaaccttgacagagggaagtcgactgccgggaatccctgggaaggctctgttgaccgagactttactccaaagaaatgaggctgagaaacagtag

SEQ ID NO: 333691 - DNA, 375 bp, Artificial Sequence
  derived and/or modified sequence
atggtggcccccgtgctgaagagcttccaggccgaggtggtggccctgagcaagagaagccaggaggccgaggccgccttcctgagcgtgtacaagcagctgatcgaggcccccgaccccgtgcccgtgttcgaggccgccagaagcctggacgacagactgcagccccccagcttcgaccccagcggccagcccagaagagacctgcacaccagctggaagagaaaccccgagctgctgagccccaaggagcagagagagggcaccagccccgccggccccaccctgaccgagggcagcagactgcccggcatccccggcaaggccctgctgaccgagaccctgctgcagagaaacgaggccgagaagcagtag

SEQ ID NO: 333692 - DNA, 4737 bp, Artificial Sequence
  derived and/or modified sequence
caactctctccccctctcagccacttcctgtctccagtatgtccctggcgcggcccggctggccgtctgcgcaccctctctcccctcggctctttcctaggaaagctgagcctcatagcttccgggagaaggttttccggaagaaacctccagtctgtgcagtatgtaaggtgaccatcgatgggacaggcgtttcgtgcagagtctgcaaggtggcgacgcacagaaaatgtgaagcaaaggtgacttcagcctgtcaggccttgcctcccgtggagttgcggcgaaacacggccccagtcaggcgcatagagcacctgggatccaccaaatctctgaaccactcaaagcagcgcagcactctgcccaggagcttcagcctggacccgctcatggagcggcgctgggacttagacctcacctacgtgacggagcgcatcttggccgccgccttccccgcgcggcccgatgaacagcggcaccggggccacctgcgcgagctggcccatgtgctgcaatccaagcaccgggacaagtacctgctcttcaacctttcagagaaaaggcatgacctgacccgcttaaaccccaaggttcaagacttcggctggcctgagctgcatgctccacccctggacaagctgtgctccatctgcaaagccatggagacatggctcagtgctgacccacagcacgtggtcgtactatactgcaagggaaacaagggcaagcttggggtcatcgtttctgcctacatgcactacagcaagatctctgcaggggcggaccaggcactggccactcttaccatgcggaaattctgcgaggacaaggtggccacagaactgcagccctcccagcgtcgatatatcagctacttcagtgggctgctatctggctccatcagaatgaacagcagccctctcttcctgcactatgtgctcatccccatgctgccagcctttgaacctggcacaggcttccagcccttccttaaaatctaccagtccatgcagcttgtctacacatctggagtctatcacattgcaggccctggtccccagcagctttgcatcagcctggagccagccctcctcctcaaaggcgatgtcatggtaacatgttatcacaagggtggccggggcacagaccggaccctcgtgttccgagtccagttccacacctgcaccatccacggaccacagctcactttccccaaggaccagcttgacgaggcctggactgatgagaggttccccttccaagcctccgtggagtttgtcttctcctccagccccgagaagatcaaaggcagcactccacggaacgacccctcggtctctgtcgactacaacaccactgagccagccgtgcgctgggactcctatgagaacttcaaccagcaccacgaggacagtgtggatggctccttgacccacacccggggtcccctggatggcagtccttatgcccaggtgcagcggcctccccggcagacccccccggcaccctctccagagcctccaccaccccccatgctctctgtcagcagcgactcaggccattcctccacgctgaccacagagccggctgctgagtcccctggccggccgccccctacagctgctgaacggcaggagctggatcgcctcctaggaggctgcggagtggccagtgggggccggggagctgggcgcgagacggccatcctagatgacgaagagcagcccactgtgggcggaggcccccacctcggagtgtatccaggccataggcctggcctcagccgccactgctcctgccgccagggctaccgggagccctgcggggttcccaatgggggctactaccggccagagggaaccctggagaggaggcgactggcctacgggggctatgagggatccccccagggctacgccgaggcctcgatggagaagaggcgcctctgccgatcgctgtcagaggggctatacccctacccacctgagatggggaaaccagccactggggactttggctaccgcgccccaggctaccgggaggtggtcatcctggaggaccctgggctgcctgccctatacccatgcccagcctgcgaggagaagctggcgctgcctacagcagccttgtatggactgcggctggagagggaggctggagaagggtgggcaagtgaggctggcaagcctctcctgcacccagtgcggcctgggcacccgctgcctctgctcttgcctgcctgtgggcatcaccatgccccgatgcctgactacagctgcctgaagccacccaaggcaggcgaggaagggcacgagggctgctcctacaccatgtgccccgaaggcaggtatgggcatccagggtaccctgccctggtgacatacagctatggaggagcagttcccagttactgcccagcatatggccgtgtgcctcatagctgtggctctccaggagagggcagagggtatcccagccctggtgcccactccccacgggctggctccatttccccgggcagcccgccctatccacaatctaggaagctgagctacgagatccctacggaggagggaggggacaggtacccattgcctgggcacctggcctcagcaggacctttggcatctgcagagtcgctggagccggtgtcctggagggagggccccagtgggcacagcacactgcctcggtctccccgagatgccccatgcagtgcttcgtcagagttgtctggtccctccacgcccctgcacaccagcagtccagtccagggcaaggaaagcacccggcgacaggacaccaggtcccccacctcagcgcccactcagagactgagtcctggcgaggccttgccccctgtttcccaggcaggcaccggaaaggcccctgagctgccgtcgggaagtgggcctgagcctctggcccctagcccagtctctccgaccttccctcccagctcgcccagtgactggcctcaggaaaggagtccagggggccactcagatggcgccagtcctcggagccctgtgcccaccacacttcctggcctccgccacgccccctggcaaggccctcgaggcccccccgacagcccagatgggtctcccctcactcctgtgccttcccagatgccctggcttgtggccagcccagagccgcctcagagctcacctacacctgctttccccctggctgcctcctatgacaccaatggccttagccagcccccacttcctgagaaacgccacctgcccgggccggggcaacagccaggaccctggggcccagagcaggcatcatcgccagccagaggcatcagtcaccatgtcaccttcgcacctctgctctcagataatgtcccccaaaccccagagcctcctacacaagagagccaaagcaatgtcaagtttgtccaggatacatccaagttctggtacaagccacacctgtcccgtgaccaagccattgccctgctgaaggacaaggaccctggggccttcctgatcagggacagtcattcattccaaggagcttatgggctggccctcaaggtggccacaccgccacccagtgcccagccctggaaaggggaccccgtggaacagctggtccgccatttcctcatcgagactgggcccaaaggggtgaagatcaagggctgccccagtgagccctactttggcagcctgtccgccttggtctcccagcactccatctcccccatctccctgccctgctgcctgcgcattcccagcaaagatcctctggaagagaccccagaggctccagtgcccaccaacatgagcacagcggcagacctcctgcgtcagggtgctgcctgcagcgtgctctacttgacctcagtggagacagagtcactgacgggcccccaagctgtggcccgggccagctctgcagctctgagctgtagcccccgcccgacaccagctgttgtccacttcaaggtgtcagcccagggcattacactgacggacaaccaaaggaagctcttctttcgccgccattatccagtgaacagcatcaccttctccagcactgaccctcaagaccggagatggaccaacccagacgggaccacctccaagatctttggtttcgtggccaagaagccgggaagcccctgggagaatgtgtgtcacctctttgcagagcttgacccagatcagcctgctggcgccattgtcaccttcatcaccaaagttctactgggccagagaaaatgaaggaaggccacaagctcagagcccacatcaacactgcccccctcccagcaccccacagccctcacatcccctggcctggacccaggagacccaggagaaagcaccctcccttaggaatgaggagtgggcatcaggcctgggacactgctctccttccccgcccccagcctgctaagttaagtggacaggcccacaagatgaccttgcatgtgagcagatggcagagatgggtgtgtgaggggtgaggaggcatcagcagttgagccccgaaggagatcaggcagccccacctgcaggagaacgtcagccctccaggggatcagcccctgccagttccacccagctgcaggtgccagcacggcagggatgggagaggggtggggagcgagtcactgcctcctctgagcagagattcagagtaggatcacatgaataggggaaaaaagagagtctatttttgtctaataataaagaatttctataaact

SEQ ID NO: 333693 - protein, 1113 aa, Artificial Sequence
  derived and/or modified sequence
MIAVSFKCRCQILRRLTKDESPYTKSASQTKPPDGALAVRRQSIPEEFKGSTVVELMKKEGTTLGLTVSGGIDKDGKPRVSNLRQGGIAARSDQLDVGDYIKAVNGINLAKFRHDEIISLLKNVGERVVLEVEYELPPVSVQGSSVIFRTVEVTLHKEGNTFGFVIRGGAHDDRNKSRPVVITCVRPGGPADREGTIKPGDRLLSVDGIRLLGTTHAEAMSILKQCGQEAALLIEYDVSVMDSVATASGPLLVEVAKTPGASLGVALTTSMCCNKQVIVIDKIKSASIADRCGALHVGDHILSIDGTSMEYCTLAEATQFLANTTDQVKLEILPHHQTRLALKGPDHVKIQRSDRQLTWDSWASNHSSLHTNHHYNTYHPDHCRVPALTFPKAPPPNSPPALVSSSFSPTSMSAYSLSSLNMGTLPRSLYSTSPRGTMMRRRLKKKDFKSSLSLASSTVGLAGQVVHTETTEVVLTADPVTGFGIQLQGSVFATETLSSPPLISYIEADSPAERCGVLQIGDRVMAINGIPTEDSTFEEASQLLRDSSITSKVTLEIEFDVAESVIPSSGTFHVKLPKKHNVELGITISSPSSRKPGDPLVISDIKKGSVAHRTGTLELGDKLLAIDNIRLDNCSMEDAVQILQQCEDLVKLKIRKDEDNSDEQESSGAIIYTVELKRYGGPLGITISGTEEPFDPIIISSLTKGGLAERTGAIHIGDRILAINSSSLKGKPLSEAIHLLQMAGETVTLKIKKQTDAQSASSPKKFPISSHLSDLGDVEEDSSPAQKPGKLSDMYPSTVPSVDSAVDSWDGSAIDTSYGTQGTSFQASGYNFNTYDWRSPKQRGSLSPVTKPRSQTYPDVGLSYEDWDRSTASGFAGAADSAETEQEENFWSQALEDLETCGQSGILRELEATIMSGSTMSLNHEAPTPRSQLGRQASFQERSSSRPHYSQTTRSNTLPSDVGRKSVTLRKMKQEIKEIMSPTPVELHKVTLYKDSDMEDFGFSVADGLLEKGVYVKNIRPAGPGDLGGLKPYDRLLQVNHVRTRDFDCCLVVPLIAESGNKLDLVISRNPLASQKSIDQQSLPGDWSEQNSAFFQQPSHGGNLETREPTNTL

SEQ ID NO: 333694 - protein, 1128 aa, Artificial Sequence
  derived and/or modified sequence
MIAVSFKCRCQILRRLTKDESPYTKSASQTKPPDGALAVRRQSIPEEFKGSTVVELMKKEGTTLGLTVSGGIDKDGKPRVSNLRQGGIAARSDQLDVGDYIKAVNGINLAKFRHDEIISLLKNVGERVVLEVEYELPPVSVQGSSVIFRTVEVTLHKEGNTFGFVIRGGAHDDRNKSRPVVITCVRPGGPADREGTIKPGDRLLSVDGIRLLGTTHAEAMSILKQCGQEAALLIEYDVSVMDSVATASGPLLVEVAKTPGASLGVALTTSMCCNKQVIVIDKIKSASIADRCGALHVGDHILSIDGTSMEYCTLAEATQFLANTTDQVKLEILPHHQTRLALKGPDHVKIQRSDRQLTWDSWASNHSSLHTNHHYNTYHPDHCRVPALTFPKAPPPNSPPALVSSSFSPTSMSAYSLSSLNMGTLPRSLYSTSPRGTMMRRRLKKKDFKSSLSLASSTVGLAGQVVHTETTEVVLTADPVTGFGIQLQGSVFATETLSSPPLISYIEADSPAERCGVLQIGDRVMAINGIPTEDSTFEEASQLLRDSSITSKVTLEIEFDVAESVIPSSGTFHVKLPKKHNVELGITISSPSSRKPGDPLVISDIKKGSVAHRTGTLELGDKLLAIDNIRLDNCSMEDAVQILQQCEDLVKLKIRKDEDNSDEQESSGAIIYTVELKRYGGPLGITISGTEEPFDPIIISSLTKGGLAERTGAIHIGDRILAINSSSLKGKPLSEAIHLLQMAGETVTLKIKKQTDAQSASSPKKFPISSHLSDLGDVEEDSSPAQKPGKLSDMYPSTVPSVDSAVDSWDGSAIDTSYGTQGTSFQASGYNFNTYDWRSPKQRGSLSPVTKPRSQTYPDVGLSYEDWDRSTASGFAGAADSAETEQEENFWSQALEDLETCGQSGILRELEEKADRRVSLRNMTLLATIMSGSTMSLNHEAPTPRSQLGRQASFQERSSSRPHYSQTTRSNTLPSDVGRKSVTLRKMKQEIKEIMSPTPVELHKVTLYKDSDMEDFGFSVADGLLEKGVYVKNIRPAGPGDLGGLKPYDRLLQVNHVRTRDFDCCLVVPLIAESGNKLDLVISRNPLASQKSIDQQSLPGDWSEQNSAFFQQPSHGGNLETREPTNTL

SEQ ID NO: 333695 - DNA, 3342 bp, Artificial Sequence
  derived and/or modified sequence
atgatcgcggtgtccttcaagtgcaggtgtcagattctgcgacgactgacaaaagatgagtctccttatacaaagagcgcgtcacagactaaacctcccgatggagccctggcagtgcgcagacagtctataccagaggagttcaagggctccactgtcgtggaactgatgaaaaaggaagggaccaccctcggcctcaccgtgagcggtggcatcgacaaggatggcaaacctcgtgtatcaaacctgcgtcagggagggattgccgctcggtccgaccagctggacgttggggactatatcaaagccgtaaacggaatcaaccttgcaaagtttagacacgacgaaatcatctccttgctgaaaaatgtgggcgagcgggtcgttctcgaggtggagtacgaactaccccccgtgagtgtccaggggtcttctgtgatcttcaggacagtagaagtcacgttacacaaggagggcaatacattcggctttgttatcagggggggcgcacatgacgataggaacaagagccggccggtcgttatcacttgtgttagaccaggaggtccagctgatcgggagggtacaattaagccgggcgatagacttctgagtgtggacggcattagattgctgggaaccacacacgctgaagcaatgagcatactgaaacagtgcggtcaagaggcggccttgctcatcgagtatgacgttagtgttatggacagcgtcgccacagctagcgggccgctcctcgtggaagtagccaaaaccccaggcgcatccctcggtgtggccttgaccacctccatgtgttgtaataagcaggttattgtcatcgacaagattaagagtgcgtctattgccgatcggtgcggtgcactgcacgtaggggatcatatcctatccattgatgggacttcaatggagtattgtaccttggccgaggctactcagtttcttgctaacacgacggatcaggttaaattggaaatcctgcctcaccatcaaacccggctggcactaaaagggcctgatcacgtcaaaatccaacggagcgatagacaactgacctgggactcttgggcttcaaaccacagctcattgcacactaaccaccattacaacacataccaccctgatcactgccgagtccctgcccttacatttccaaaagcccctccgcccaattccccaccagcactcgtgtctagttccttttcccccacatctatgagcgcatactctctatcgtccctgaacatgggaacactgcctagaagtctgtactcgacaagcccgcggggcacgatgatgcgccgccggctgaaaaagaaagattttaagagctcattaagcctggcttcatctactgtgggcctggccggccaggtcgtccacaccgaaaccacagaggttgtgctcacagccgacccagtgactggcttcggtatacaactgcagggcagtgtgttcgctacagagactctatcttcaccacctctcatcagttacatcgaggccgactctcccgccgagcggtgcggcgtcctacagatcggggatagagtcatggctattaatgggattcccacagaggattcgacctttgaagaggccagccagctgctccgcgacagttcgatcacctcaaaagtaaccctcgagattgagttcgatgtcgctgagtccgtaattccatcctctggtacctttcacgttaaactgcccaagaagcacaacgtagaattgggcatcactatttcctctcccagctctcgcaaaccaggggatccactcgtcattagcgacattaaaaaaggttccgtcgctcaccgaacagggaccctggaactgggcgataaactccttgcaattgacaatattcgactcgataactgcagtatggaggacgctgttcaaattctgcaacagtgcgaagatttggtgaagctgaagattagaaaagatgaagataacagcgatgaacaagagtcctcgggagccatcatctataccgttgaacttaagaggtatggaggcccactcggcataaccatctccgggaccgaggagcccttcgatccaatcataatctctagccttactaaaggaggactggccgaaagaactggcgccatccatataggcgatcggatccttgccatcaattctagctccctgaaagggaaacccttatccgaggctatccaccttttgcagatggctggcgagactgttaccctgaagattaaaaagcagaccgacgcccaaagcgcttcatctccaaagaagttcccaatctcttctcatttatcagacttgggcgatgtggaagaagacagctctcctgcgcagaagcccgggaaactctccgacatgtaccctagcacagttccatcagtagacagcgctgtcgactcctgggacggctctgcgattgacacaagctatgggacccaggggactagttttcaagcatccgggtataatttcaacacctacgattggagatcaccgaagcagcgaggatcgctctcaccggtgaccaagccgcgctcgcagacttaccccgacgtaggattgtcctacgaagactgggacagaagcaccgcgagcggatttgcaggagccgctgattccgctgagacagagcaagaagagaacttctggtcacaagcactcgaagaccttgaaacatgcggccaaagtggtattctgagggaactggaggctactattatgtcagggtcgacaatgagcttgaaccacgaagcgccaacgccaagaagccagctgggaaggcaggcctccttccaagaacgcagcagctcgcgcccccactacagccaaactacccgtagcaacacattacccagtgatgtggggcggaaatctgtgacgttgcgaaagatgaagcaagagatcaaggagatcatgtcaccaactccagtggagctgcataaggtgactctttataaagactcagacatggaagatttcggattttccgtcgccgacgggctgctcgaaaaaggggtctacgtgaaaaatattcgtcccgccggaccaggtgatctggggggccttaagccgtacgatcgccttctacaggtaaaccacgtacggactagggattttgattgctgtctggtagtgcccctgatagccgaatctgggaacaagctcgatttggttatctcacgcaaccctttggctagccagaaatcaattgaccagcagagccttccgggggattggtccgagcaaaactctgcattcttccagcaacccagtcatggggggaacctggaaacccgggaacccactaatacactgtag

SEQ ID NO: 333696 - DNA, 3387 bp, Artificial Sequence
  derived and/or modified sequence
atgatcgccgtgagcttcaaatgtcgttgtcaaatactgaggcgcctgacaaaagatgagagcccctacactaagagcgcctcccaaactaagccccccgatggagccctcgcagtgcggaggcagtctataccggaggaattcaaagggagtactgtggtggagttaatgaagaaggaaggcaccacactgggcctcacggtgtctggcgggatcgacaaagacggcaagccccgcgtgagcaacctcaggcaggggggaatcgctgcacggtctgatcaacttgacgttggtgactacattaaagccgtcaatgggatcaacctggctaaatttcggcacgacgaaattatttccctgctgaagaacgtgggcgagagagtagtgctggaagtggagtatgaactgccaccagttagcgtgcaggggagtagcgttatcttccgcactgtggaggtcacacttcacaaggaaggtaatacttttggctttgtgattcgcggcggagctcacgacgaccgtaataagtcccggcctgtggtgattacctgcgtaagacctggtggtccagcggaccgcgaggggacaattaaaccgggcgataggttgctgtcagtggacggaattagactactggggacaacccatgctgaggccatgagtattctcaaacagtgtggacaggaggccgcactgctgatcgaatatgatgtgtccgtaatggactccgtagctaccgctagcggaccgctgctagtggaggtggcgaagacccccggcgcgtctttgggggtggcgttgactacctcaatgtgttgcaataagcaggtcattgtgattgataaaataaagagtgcctcgattgccgaccgatgtggcgccctacatgtcggggatcacatcctgtccatcgacggcacttctatggaatactgcactttggctgaggcaacgcagtttctagcaaatacgactgatcaggttaagctggagattctgccccatcaccagactagacttgctctcaagggtcctgatcatgttaaaatacaacgaagcgacagacaactgacatgggacagctgggcttctaaccactcatctcttcatactaatcaccattataatacgtaccatccggatcattgcagggtgcccgccttgacgttcccgaaggctccaccacctaattccccaccagctcttgtaagtagctccttttcaccgacatctatgtccgcctactctctgagttccctgaacatgggaaccctgccacgctcactttattcaaccagcccccgcggaacaatgatgcggagacgcctgaaaaaaaaggactttaaaagcagcttgtcacttgcctctagcactgtgggcctcgccgggcaagtcgtgcataccgaaactaccgaggtggttctcactgctgaccccgtcaccggatttggaattcagctccaaggaagcgtcttcgccaccgaaaccctcagcagcccccccctcatctcctacatcgaggcagacagtccagccgaacggtgtggagtcttgcagattggagaccgcgtgatggcaatcaacggtataccaacagaggacagcacatttgaggaggccagccagttgcttagagattccagcattacaagcaaagttaccctcgagatcgagtttgacgtcgcggagtcagtgatcccttcatctggcacctttcatgtaaagctgccaaaaaagcacaatgttgaactgggaattacaataagttccccgtcaagccgcaaacccggcgacccactggttatctctgacattaagaaggggtccgtagctcatagaaccggcacactggagctgggagacaagctgcttgccatcgacaatattcggcttgacaactgctctatggaagatgctgtccagatcctccaacagtgcgaggacctagttaagctcaaaattagaaaagatgaggacaactcagatgagcaggaaagtagcggagctatcatttataccgttgaactcaagagatacggtggaccactaggaatcaccatatcaggtaccgaggagccattcgacccaataattatttcttccctgacaaagggtggcctagcggaacggaccggcgccatccatattggtgatagaattctagctataaactcgtcgtcactgaaaggtaagcccctgtccgaagcgatccatctgctccagatggccggtgagaccgttaccttaaaaatcaagaagcagaccgacgcccagagtgcctcgagcccaaaaaagttccctataagttctcacctgtccgatctcggcgatgttgaagaagactcctcaccagctcagaagccaggcaagctgagcgacatgtatccatcaacagtcccctccgtggactcagctgtggacagttgggacggaagtgcaattgataccagctatggcacacagggcaccagtttccaggcttcaggatataattttaatacttacgactggcgtagtcctaagcagagaggctcactgtccccggtgacaaagccccgcagccagacttacccggatgttgggttaagttacgaggattgggaccgctcaactgcgtctggcttcgccggtgctgctgatagtgctgaaactgagcaagaggagaacttctggagccaggcactagaggaccttgaaacatgtggtcagtcggggatcctgagagagctagaagagaaggcagatagacgcgtgagcctgcgaaatatgactctgcttgctaccattatgagtggatctaccatgagcctcaatcacgaggccccgacccctagatcgcagctagggcggcaggcatcctttcaagagcgcagtagctccaggcctcactattcgcaaacgacgagatcgaacacactgcctagcgatgtcggacgtaagtccgtaaccctgaggaaaatgaaacaggagattaaggaaattatgtcccccacccctgtagaactgcacaaagtgacactttacaaggacagcgatatggaagactttggcttctccgtagcagacggactgctcgaaaaaggagtgtacgtgaaaaatattcgccctgctggccccggggacttgggagggctgaaaccctatgatcgcctgctgcaggtgaaccacgtgagaacccgagatttcgattgctgcctggttgttcccctgatcgcagagagcggaaataagttggacctggtcatcagtcgcaaccctttggcctcacagaaatcaatcgaccagcaaagtctgccaggcgactggagcgagcagaatagcgccttctttcaacagccctctcatggagggaacctggaaacacgggagcctacaaatacactttag

SEQ ID NO: 333697 - DNA, 5171 bp, Artificial Sequence
  derived and/or modified sequence
gtgattgtgaagggggaggaggctgtggcaggcaggggtggtagtagtagtgaatgacacagatttgccagatgacatgtagcggacctctgcatcagccaagaggaattaagctttgtcactccccactgggactacctttctcctggtatgtgcgcaaggaattcatatgctgctgctgctgcagccaccagagcagagagccttgagtacactttgccacagaaagcagtgagcaagaatgatagctgtctcttttaaatgccgttgtcaaattctgaggcgacttactaaagatgagagtccctacactaaatccgccagccagacaaagccgcctgatggagcgttggctgtgaggagacagagcatcccagaggaattcaagggctccacagtcgtcgagctgatgaagaaggaaggcactaccctgggtctgacggtatcgggaggaattgataaggatggcaagccaagagtatctaatctgcggcaaggaggaattgctgctagaagtgaccagctggatgtgggtgactacatcaaagcagtgaatggaatcaacctggccaaattccgccatgacgagatcatcagcttgctgaagaatgtgggagaaagagtggttcttgaagtagagtacgagcttccaccggtctctgtgcaaggatcaagtgttattttccgaacagtggaggtcacattacataaagaaggcaatacctttggttttgtaattcgagggggagcacatgatgatagaaataaatctcgtccagttgtgataacatgtgttcgtcctggagggcctgctgacagagagggcacgatcaaacccggtgacaggttgctcagtgtggatggaattcggcttcttggaactacgcatgctgaagccatgagtattcttaaacaatgtggacaagaagcagcactgctgatagaatatgatgtctcagtaatggactctgtggcaacagcatccgggccactactagtcgaagttgccaaaactcctggtgccagccttggggttgccctaactacctcgatgtgctgtaacaaacaagtcattgtcatagacaaaatcaaatctgcaagtattgcagacagatgtggcgcattgcatgtgggagatcacatcctctccatcgatggaaccagcatggagtactgtacacttgcagaagcaacccagttcctggccaacaccactgaccaggtcaagcttgagatccttccccatcatcagacccggctggccctaaaggggcccgaccatgtgaaaattcagaggagcgacaggcaacttacctgggattcctgggccagcaaccacagcagccttcacaccaaccatcactataacacgtaccaccctgaccattgcagagtaccagccctgacattcccgaaagcacctcctccaaacagccctccagctttggtgtcttcatccttctctcctacctccatgagtgcatacagcctgagttccctgaacatggggactctacctcgaagcctctactccaccagcccacgtggaaccatgatgaggaggagactgaaaaagaaagacttcaaaagctcattgtccttagcctccagcacagtaggattggctgggcaggttgttcacacagaaaccacagaggttgtgctgacggcagatcctgtcacaggatttgggatccaactgcagggcagtgtgtttgccacagaaactctctcttctccacctctgatttcctatatcgaagctgacagcccagcagagagatgtggggtgctacagattggagacagagtgatggccatcaatggaattccaacagaagacagcaccttcgaagaagccagtcagctcctccgagactcttcaatcacgagcaaggtcacactggaaatcgagtttgatgttgcagagtctgtcatcccaagtagtggaacatttcatgtaaagctgcctaagaagcacaatgtggaacttggaataaccataagttcaccatccagtagaaaaccaggagaccccctcgtcatttcagatatcaagaaagggagtgtggcacacagaactgggaccctggaacttggggataaattgctcgcaatagataatatccggctggacaactgttccatggaagatgcagttcagatcctccagcaatgtgaagacctggtgaagctcaaaatccgcaaagatgaagataattcagatgagcaagaaagttccggagcaattatttacaccgtggagcttaaacgctacggggggccccttggcatcacaatttcaggaactgaagagccgtttgatcctataatcatttcaagcctcactaaagggggattagctgaaagaactggcgcaatccacataggagaccgaatcctagccatcaatagcagcagcttgaaagggaagcctctgagtgaagccatccatttgttacagatggcaggagagactgtcaccttgaaaattaagaaacagacagatgcccagtcagcatcgagccccaagaagttccctatttctagccatttgagtgacctgggggatgtggaggaggactcctcaccagcacagaagccaggcaagctctccgacatgtacccctccacggtgcccagtgtggacagtgctgtggattcatgggatgggtctgcaatagacaccagctatggaactcaaggcactagttttcaggcctcaggatacaatttcaacacctatgactggaggagtccaaaacagagaggcagcttgtccccagtcactaagcctcgaagccagacttacccagatgtggggctgagttatgaagactgggaccggtccacagccagtggttttgcaggggctgccgatagtgcagagacagaacaagaggagaacttctggtctcaagcgctggaggatttggaaacctgcggacagtcaggaattctgagagaactggaggcaacaatcatgtcggggagcacgatgagtttgaatcatgaggctccaacacctcgcagtcagctggggcgacaggccagcttccaggagcgcagcagctcgcggccgcactacagccaaacaactcggagcaacaccctgccttcagatgtgggtaggaagtcagtaaccctgagaaaaatgaaacaagaaataaaggagatcatgtctccaactcctgtggagctgcacaaggtgaccttgtacaaggactctgacatggaggactttgggttcagtgtagcagatggcttactggagaaaggagtgtatgtcaaaaatattcgcccagctgggccaggagatcttggtggcttaaagccctatgacaggctcttacaggtgaatcatgtccgaaccagagactttgactgctgccttgttgtgcccctcatagcagaatccgggaataagctggacctggttattagtagaaacccactggcttcacagaagtctatagaccaacagagtctaccaggagattggagtgaacagaacagtgcttttttccagcagcctagccacggtggtaatttggagacacgagaacccactaatacattatagcaacgctttttataaagcaggacaaaagacaatatctacatggtgctaaaaatcctttaagatttctgtgacctttgaagcacagataatcaatcaacgtggcattaactgcaagcacaggggtcttttaaatctctctcatggctcatgttcacttcccttttcaagttgaagaggtttcttttttggtgaccactatggtatatggtgggcaatgccctgccagtcccaacggtagagaaaaataggccgtcccccacaactctacaattaacatcagaggaaattttttacaagttcatcttactatcactttttaaaaagagaaacatctgtttgaaaatattctctgtgatgatttccttaattcactttgaaatcagtttcttactatgaagtcattaatgtaagaacttggccaacaaagcttttcttctcataggctggctctactaggggaactagtgtttggtaaactgctgggactaccacaatgggaggggtacaggtataaaattaagttatcttaaaatgtttcagcaatgatgcacgtaggagaccataataggtggtggtaaatgttttgcccacgtataggaatgattttaactaagatgtatgctattccctatgcaacaaattatcaaacaggatatgtcttgtgacctgttttttttttaaggacacatttttaatagctgaaaatctctgataatgaattagagtgtgtagtaaacatgagaattagttatattatcttatttttaaaattcaagactaagaacttcagagaatgaagagtctattaaaatgaggttcatcttaatgataggcaaaccaaactcatactgcttgacatgttttgaaaactggtaatattgagggtgtacagcacatgtacttaaaaatgacactggactatcttttgctctgagccatgccacttaccgaaattgtaaatacatttttcacaaatgcattgccaattattaccatccctcaaagcaataaattgtgacagttgctttaaatgtttgtcagcaactgttttcatttgttcagatattttgaatagctacactaataactgttattatttggtgaacataaaaaaataaatagatctgtatattgatggtagactctccatattgaaatgattattttccaaacattttcattttggtcaataattcaaactaccacttaggcaaagtattcgaacactgtgtcctttgtttaaggaaatataaaaaaaaaatcacctttctttttgtgcaaaaaaaatattatttcaatcacatttcagaaccgccagggcaagaaagtataaagcaggatcatgttaagaaaaaagaaaaaaagatcatgagtcacttaaatatgtatttttatttgtaacaaacaagtattaaactgtaaagtatttttgtacaaatttaatactttaatagcatggtatttatcgtctatgtatggttttggggaattcaaaattgttcaaatatttgtatggaaaaaaataaaaccctctaccaaatggaataaacagtgattttaaaaagccaaataaagaggatatgcatta

SEQ ID NO: 333698 - DNA, 5216 bp, Artificial Sequence
  derived and/or modified sequence
gtgattgtgaagggggaggaggctgtggcaggcaggggtggtagtagtagtgaatgacacagatttgccagatgacatgtagcggacctctgcatcagccaagaggaattaagctttgtcactccccactgggactacctttctcctggtatgtgcgcaaggaattcatatgctgctgctgctgcagccaccagagcagagagccttgagtacactttgccacagaaagcagtgagcaagaatgatagctgtctcttttaaatgccgttgtcaaattctgaggcgacttactaaagatgagagtccctacactaaatccgccagccagacaaagccgcctgatggagcgttggctgtgaggagacagagcatcccagaggaattcaagggctccacagtcgtcgagctgatgaagaaggaaggcactaccctgggtctgacggtatcgggaggaattgataaggatggcaagccaagagtatctaatctgcggcaaggaggaattgctgctagaagtgaccagctggatgtgggtgactacatcaaagcagtgaatggaatcaacctggccaaattccgccatgacgagatcatcagcttgctgaagaatgtgggagaaagagtggttcttgaagtagagtacgagcttccaccggtctctgtgcaaggatcaagtgttattttccgaacagtggaggtcacattacataaagaaggcaatacctttggttttgtaattcgagggggagcacatgatgatagaaataaatctcgtccagttgtgataacatgtgttcgtcctggagggcctgctgacagagagggcacgatcaaacccggtgacaggttgctcagtgtggatggaattcggcttcttggaactacgcatgctgaagccatgagtattcttaaacaatgtggacaagaagcagcactgctgatagaatatgatgtctcagtaatggactctgtggcaacagcatccgggccactactagtcgaagttgccaaaactcctggtgccagccttggggttgccctaactacctcgatgtgctgtaacaaacaagtcattgtcatagacaaaatcaaatctgcaagtattgcagacagatgtggcgcattgcatgtgggagatcacatcctctccatcgatggaaccagcatggagtactgtacacttgcagaagcaacccagttcctggccaacaccactgaccaggtcaagcttgagatccttccccatcatcagacccggctggccctaaaggggcccgaccatgtgaaaattcagaggagcgacaggcaacttacctgggattcctgggccagcaaccacagcagccttcacaccaaccatcactataacacgtaccaccctgaccattgcagagtaccagccctgacattcccgaaagcacctcctccaaacagccctccagctttggtgtcttcatccttctctcctacctccatgagtgcatacagcctgagttccctgaacatggggactctacctcgaagcctctactccaccagcccacgtggaaccatgatgaggaggagactgaaaaagaaagacttcaaaagctcattgtccttagcctccagcacagtaggattggctgggcaggttgttcacacagaaaccacagaggttgtgctgacggcagatcctgtcacaggatttgggatccaactgcagggcagtgtgtttgccacagaaactctctcttctccacctctgatttcctatatcgaagctgacagcccagcagagagatgtggggtgctacagattggagacagagtgatggccatcaatggaattccaacagaagacagcaccttcgaagaagccagtcagctcctccgagactcttcaatcacgagcaaggtcacactggaaatcgagtttgatgttgcagagtctgtcatcccaagtagtggaacatttcatgtaaagctgcctaagaagcacaatgtggaacttggaataaccataagttcaccatccagtagaaaaccaggagaccccctcgtcatttcagatatcaagaaagggagtgtggcacacagaactgggaccctggaacttggggataaattgctcgcaatagataatatccggctggacaactgttccatggaagatgcagttcagatcctccagcaatgtgaagacctggtgaagctcaaaatccgcaaagatgaagataattcagatgagcaagaaagttccggagcaattatttacaccgtggagcttaaacgctacggggggccccttggcatcacaatttcaggaactgaagagccgtttgatcctataatcatttcaagcctcactaaagggggattagctgaaagaactggcgcaatccacataggagaccgaatcctagccatcaatagcagcagcttgaaagggaagcctctgagtgaagccatccatttgttacagatggcaggagagactgtcaccttgaaaattaagaaacagacagatgcccagtcagcatcgagccccaagaagttccctatttctagccatttgagtgacctgggggatgtggaggaggactcctcaccagcacagaagccaggcaagctctccgacatgtacccctccacggtgcccagtgtggacagtgctgtggattcatgggatgggtctgcaatagacaccagctatggaactcaaggcactagttttcaggcctcaggatacaatttcaacacctatgactggaggagtccaaaacagagaggcagcttgtccccagtcactaagcctcgaagccagacttacccagatgtggggctgagttatgaagactgggaccggtccacagccagtggttttgcaggggctgccgatagtgcagagacagaacaagaggagaacttctggtctcaagcgctggaggatttggaaacctgcggacagtcaggaattctgagagaactggaggagaaagctgacaggcgtgtgtctttgagaaacatgactctcttggcaacaatcatgtcggggagcacgatgagtttgaatcatgaggctccaacacctcgcagtcagctggggcgacaggccagcttccaggagcgcagcagctcgcggccgcactacagccaaacaactcggagcaacaccctgccttcagatgtgggtaggaagtcagtaaccctgagaaaaatgaaacaagaaataaaggagatcatgtctccaactcctgtggagctgcacaaggtgaccttgtacaaggactctgacatggaggactttgggttcagtgtagcagatggcttactggagaaaggagtgtatgtcaaaaatattcgcccagctgggccaggagatcttggtggcttaaagccctatgacaggctcttacaggtgaatcatgtccgaaccagagactttgactgctgccttgttgtgcccctcatagcagaatccgggaataagctggacctggttattagtagaaacccactggcttcacagaagtctatagaccaacagagtctaccaggagattggagtgaacagaacagtgcttttttccagcagcctagccacggtggtaatttggagacacgagaacccactaatacattatagcaacgctttttataaagcaggacaaaagacaatatctacatggtgctaaaaatcctttaagatttctgtgacctttgaagcacagataatcaatcaacgtggcattaactgcaagcacaggggtcttttaaatctctctcatggctcatgttcacttcccttttcaagttgaagaggtttcttttttggtgaccactatggtatatggtgggcaatgccctgccagtcccaacggtagagaaaaataggccgtcccccacaactctacaattaacatcagaggaaattttttacaagttcatcttactatcactttttaaaaagagaaacatctgtttgaaaatattctctgtgatgatttccttaattcactttgaaatcagtttcttactatgaagtcattaatgtaagaacttggccaacaaagcttttcttctcataggctggctctactaggggaactagtgtttggtaaactgctgggactaccacaatgggaggggtacaggtataaaattaagttatcttaaaatgtttcagcaatgatgcacgtaggagaccataataggtggtggtaaatgttttgcccacgtataggaatgattttaactaagatgtatgctattccctatgcaacaaattatcaaacaggatatgtcttgtgacctgttttttttttaaggacacatttttaatagctgaaaatctctgataatgaattagagtgtgtagtaaacatgagaattagttatattatcttatttttaaaattcaagactaagaacttcagagaatgaagagtctattaaaatgaggttcatcttaatgataggcaaaccaaactcatactgcttgacatgttttgaaaactggtaatattgagggtgtacagcacatgtacttaaaaatgacactggactatcttttgctctgagccatgccacttaccgaaattgtaaatacatttttcacaaatgcattgccaattattaccatccctcaaagcaataaattgtgacagttgctttaaatgtttgtcagcaactgttttcatttgttcagatattttgaatagctacactaataactgttattatttggtgaacataaaaaaataaatagatctgtatattgatggtagactctccatattgaaatgattattttccaaacattttcattttggtcaataattcaaactaccacttaggcaaagtattcgaacactgtgtcctttgtttaaggaaatataaaaaaaaaatcacctttctttttgtgcaaaaaaaatattatttcaatcacatttcagaaccgccagggcaagaaagtataaagcaggatcatgttaagaaaaaagaaaaaaagatcatgagtcacttaaatatgtatttttatttgtaacaaacaagtattaaactgtaaagtatttttgtacaaatttaatactttaatagcatggtatttatcgtctatgtatggttttggggaattcaaaattgttcaaatatttgtatggaaaaaaataaaaccctctaccaaatggaataaacagtgattttaaaaagccaaataaagaggatatgcatta

SEQ ID NO: 333699 - DNA, 3342 bp, Artificial Sequence
  derived and/or modified sequence
atgattgctgtgtccttcaagtgccgctgccagatcctgcggcggctgaccaaggatgagagcccctacaccaagagcgccagccagaccaagcccccagatggagccctggccgtgcggcggcagagcatccctgaggagttcaagggcagcacagtggtggagctgatgaagaaggagggcaccaccctgggcctgactgtgtctgggggcatcgacaaggatggcaagccccgggtgagcaacctgcggcagggcggcattgctgcccggagtgaccagctggatgtgggggactacatcaaggctgtgaatggcatcaacctggccaagttcagacatgatgagatcatcagcctgctgaagaatgtgggggagcgggtggtgctggaggtggagtatgagctgccccctgtgtctgtgcagggcagcagcgtcatcttcagaacagtggaggtgaccctgcacaaggagggcaacaccttcggcttcgtcatccggggcggggcccatgatgacaggaacaagagcaggcctgtggtgatcacctgtgtgcggcctgggggccctgctgaccgggagggcaccatcaagccaggggaccggctgctgtctgtggatggcatccggctgctgggcaccacccatgctgaggccatgagcatcctgaagcagtgtggccaggaggccgccctgctgattgaatatgatgtgtctgtgatggattctgtggccacagccagcggccccctgctggtggaggtggccaagacccctggggccagcctgggcgtggccctgaccacctccatgtgctgcaacaagcaggtgattgtcatcgacaagatcaagagcgccagcattgctgacagatgtggggccctgcacgtgggggaccacatcctgagcattgatggcacctccatggagtactgcaccctggccgaggccacccagttcctggccaacaccacagaccaggtgaagctggagatcctgccccaccaccagacccggctggccctgaagggccctgaccacgtgaagatccagaggagtgaccggcagctgacctgggacagctgggccagcaaccacagcagcctgcacaccaaccaccactacaacacctaccacccagaccactgccgggtgcctgccctgaccttccccaaggcccccccacccaacagccccccagccctggtgagcagcagcttcagccccacctccatgtctgcctacagcctgagcagcctgaacatgggcaccctgcccaggagcctgtacagcaccagcccccggggcaccatgatgagaagaaggctgaagaagaaggacttcaagagcagcctgagcctggccagcagcacagtgggcctggccggccaggtggtgcacacagagaccacagaggtggtgctgacagctgaccctgtgactggatttggcatccagctgcagggctctgtgtttgccacagagaccctgagcagccccccactcatctcctacatcgaggccgacagccctgctgagcgctgtggggtgctgcagatcggggacagagtgatggccatcaatggcatccccacagaggacagcacctttgaggaggccagccagctgctgcgggacagcagcatcaccagcaaggtgaccctggagattgaatttgatgtggccgagagcgtcatccccagcagcggcaccttccacgtgaagctgcccaagaagcacaacgtggagctgggcatcaccatcagcagccccagcagcaggaagccaggggaccccctggtgatcagtgacatcaagaagggctctgtggcccacaggacaggcaccctggagctgggggacaagctgctggccatcgacaacatccggctggacaactgcagcatggaggatgctgtgcagatcctgcagcagtgtgaggacctggtgaagctgaagatcaggaaggatgaggacaacagtgatgagcaggagagcagcggggccatcatctacacagtggagctgaagagatatggaggccccctgggcatcaccatcagcggcacagaggagccctttgaccccatcatcatcagcagcctgaccaagggcggcctggccgagaggactggagccatccacatcggggaccgcatcctggccatcaacagcagcagcctgaagggcaagcccctgtctgaggccatccacctgctgcagatggccggggagaccgtgaccctgaagatcaagaagcagacagatgcccagagcgccagcagccccaagaagttccccatcagcagccacctgagtgacctgggagatgtggaggaggacagcagccctgcccagaagccaggcaagctgagtgacatgtaccccagcacagtgcccagcgtggacagcgctgtggacagctgggatggcagcgccatcgacaccagctatggcacccagggcaccagcttccaggccagcggctacaacttcaacacctatgactggaggagccccaagcagaggggcagcctgagccctgtgaccaagcccaggagccagacctacccagatgtgggcctgtcctatgaggactgggacaggagcacagccagcggctttgctggagctgctgacagcgctgagacagagcaggaggagaacttctggagccaggccctggaggacctggagacctgtggccagagcggcatcctgcgggagctggaggccaccatcatgagcggcagcaccatgagcctgaaccacgaggcccccacccccaggagccagctgggccggcaggccagcttccaggagaggagcagcagccggccccactacagccagaccaccaggagcaacaccctgcccagtgatgtgggcaggaagtctgtgaccctgaggaagatgaagcaggagatcaaggagatcatgagccccacccctgtggagctgcacaaggtgaccctgtacaaggacagcgacatggaggactttggcttctctgtggctgatggcctgctggagaagggcgtgtatgtgaagaacatccggcctgctggccctggggacctgggcggcctgaagccctatgaccggctgctgcaggtgaaccacgtgaggacccgggactttgactgctgcctggtggtgcccctgattgctgagagcggcaacaagctggacctggtgatcagcaggaaccccctggccagccagaagagcattgaccagcagagcctgcccggggactggagcgagcagaacagcgccttcttccagcagcccagccacggcggcaacctggagacccgggagcccaccaacaccctgtag

SEQ ID NO: 333700 - DNA, 3387 bp, Artificial Sequence
  derived and/or modified sequence
atgattgctgtgtccttcaagtgccgctgccagatcctgcggcggctgaccaaggatgagagcccctacaccaagagcgccagccagaccaagcccccagatggagccctggccgtgcggcggcagagcatccctgaggagttcaagggcagcacagtggtggagctgatgaagaaggagggcaccaccctgggcctgactgtgtctgggggcatcgacaaggatggcaagccccgggtgagcaacctgcggcagggcggcattgctgcccggagtgaccagctggatgtgggggactacatcaaggctgtgaatggcatcaacctggccaagttcagacatgatgagatcatcagcctgctgaagaatgtgggggagcgggtggtgctggaggtggagtatgagctgccccctgtgtctgtgcagggcagcagcgtcatcttcagaacagtggaggtgaccctgcacaaggagggcaacaccttcggcttcgtcatccggggcggggcccatgatgacaggaacaagagcaggcctgtggtgatcacctgtgtgcggcctgggggccctgctgaccgggagggcaccatcaagccaggggaccggctgctgtctgtggatggcatccggctgctgggcaccacccatgctgaggccatgagcatcctgaagcagtgtggccaggaggccgccctgctgattgaatatgatgtgtctgtgatggattctgtggccacagccagcggccccctgctggtggaggtggccaagacccctggggccagcctgggcgtggccctgaccacctccatgtgctgcaacaagcaggtgattgtcatcgacaagatcaagagcgccagcattgctgacagatgtggggccctgcacgtgggggaccacatcctgagcattgatggcacctccatggagtactgcaccctggccgaggccacccagttcctggccaacaccacagaccaggtgaagctggagatcctgccccaccaccagacccggctggccctgaagggccctgaccacgtgaagatccagaggagtgaccggcagctgacctgggacagctgggccagcaaccacagcagcctgcacaccaaccaccactacaacacctaccacccagaccactgccgggtgcctgccctgaccttccccaaggcccccccacccaacagccccccagccctggtgagcagcagcttcagccccacctccatgtctgcctacagcctgagcagcctgaacatgggcaccctgcccaggagcctgtacagcaccagcccccggggcaccatgatgagaagaaggctgaagaagaaggacttcaagagcagcctgagcctggccagcagcacagtgggcctggccggccaggtggtgcacacagagaccacagaggtggtgctgacagctgaccctgtgactggatttggcatccagctgcagggctctgtgtttgccacagagaccctgagcagccccccactcatctcctacatcgaggccgacagccctgctgagcgctgtggggtgctgcagatcggggacagagtgatggccatcaatggcatccccacagaggacagcacctttgaggaggccagccagctgctgcgggacagcagcatcaccagcaaggtgaccctggagattgaatttgatgtggccgagagcgtcatccccagcagcggcaccttccacgtgaagctgcccaagaagcacaacgtggagctgggcatcaccatcagcagccccagcagcaggaagccaggggaccccctggtgatcagtgacatcaagaagggctctgtggcccacaggacaggcaccctggagctgggggacaagctgctggccatcgacaacatccggctggacaactgcagcatggaggatgctgtgcagatcctgcagcagtgtgaggacctggtgaagctgaagatcaggaaggatgaggacaacagtgatgagcaggagagcagcggggccatcatctacacagtggagctgaagagatatggaggccccctgggcatcaccatcagcggcacagaggagccctttgaccccatcatcatcagcagcctgaccaagggcggcctggccgagaggactggagccatccacatcggggaccgcatcctggccatcaacagcagcagcctgaagggcaagcccctgtctgaggccatccacctgctgcagatggccggggagaccgtgaccctgaagatcaagaagcagacagatgcccagagcgccagcagccccaagaagttccccatcagcagccacctgagtgacctgggagatgtggaggaggacagcagccctgcccagaagccaggcaagctgagtgacatgtaccccagcacagtgcccagcgtggacagcgctgtggacagctgggatggcagcgccatcgacaccagctatggcacccagggcaccagcttccaggccagcggctacaacttcaacacctatgactggaggagccccaagcagaggggcagcctgagccctgtgaccaagcccaggagccagacctacccagatgtgggcctgtcctatgaggactgggacaggagcacagccagcggctttgctggagctgctgacagcgctgagacagagcaggaggagaacttctggagccaggccctggaggacctggagacctgtggccagagcggcatcctgcgggagctggaggagaaggctgaccggcgggtgtccctgaggaacatgaccctgctggccaccatcatgagcggcagcaccatgagcctgaaccacgaggcccccacccccaggagccagctgggccggcaggccagcttccaggagaggagcagcagccggccccactacagccagaccaccaggagcaacaccctgcccagtgatgtgggcaggaagtctgtgaccctgaggaagatgaagcaggagatcaaggagatcatgagccccacccctgtggagctgcacaaggtgaccctgtacaaggacagcgacatggaggactttggcttctctgtggctgatggcctgctggagaagggcgtgtatgtgaagaacatccggcctgctggccctggggacctgggcggcctgaagccctatgaccggctgctgcaggtgaaccacgtgaggacccgggactttgactgctgcctggtggtgcccctgattgctgagagcggcaacaagctggacctggtgatcagcaggaaccccctggccagccagaagagcattgaccagcagagcctgcccggggactggagcgagcagaacagcgccttcttccagcagcccagccatggaggcaacctggagacccgggagcccaccaacaccctgtag

SEQ ID NO: 333701 - DNA, 3342 bp, Artificial Sequence
  derived and/or modified sequence
atgatcgccgtgagcttcaagtgccggtgccagatcctgcggcggcttacgaaagacgaatcaccttatactaaatctgcttcacagactaagccaccagacggggctctggccgttcggcgccagagcatccctgaggagtttaaaggtagcacagtggtcgaactgatgaagaaggagggcaccaccctcgggctaaccgtttcgggcggtattgacaaagacggcaagcccagagtgtccaacctccgccagggtgggattgccgcacgcagcgatcaactcgacgtgggggattatatcaaggccgtcaatggaataaatctggccaagttccggcatgacgagataattagcctcctgaaaaatgtgggcgagagagtagttctggaagtggagtacgaacttccccctgtctctgtgcagggcagtagtgttatcttccgcacggttgaagtgactctgcataaggagggcaataccttcggatttgtcattcggggcggagcacatgacgatcgcaacaaatctcggccggtggtcataacctgcgtgaggcccggaggcccagctgaccgagaggggacaatcaagcccggcgatcgcctactgagtgtggacggcattcggctgctgggcactacacatgcagaagcgatgtcaattttgaagcaatgtggacaggaagcagctctactgatcgagtacgatgtgtcagtgatggattctgtcgcgaccgccagcggcccattattggtcgaggttgccaaaacaccaggagctagcctgggcgtggccctgacaacaagcatgtgctgcaataagcaggttatagtcatcgataagatcaaaagtgctagcatcgcagatagatgcggtgccctgcacgtgggcgatcacatcttgagcatcgacggaacctccatggaatattgcaccctggccgaagcaacgcagtttttggccaacactacagaccaggttaagctcgaaattctgccccaccaccagacacggctcgctctgaagggccccgaccacgtaaagatacagcgtagcgatcgacaactgacgtgggacagctgggcctctaatcactcttccttacacacaaatcatcactacaatacataccaccccgatcattgccgggtacccgccctgacattccccaaggcccctccgcctaattctcccccagcactggtgtcctcttccttcagtcccacctcaatgtcggcctattctctgtcttcactcaacatgggcacccttcctcgctctctctacagcacttccccccgagggactatgatgcgtcgccggctgaagaagaaggacttcaaaagctccctgagtttagccagctccacagtcggactggctggccaggttgtgcacaccgaaaccacggaggtggtactcactgccgacccagttacaggatttggcattcaactccagggaagcgtcttcgctaccgaaacactgagctctcccccgcttatcagctatatcgaagcggacagccccgcagagcggtgcggagttttgcaaatcggagaccgggtgatggcaatcaacgggatacccacggaggattctacctttgaagaggctagccaattgctgagggatagttcaattacctctaaagtgaccttagaaatcgagttcgacgtggcagagtcagtaatccctagcagcgggacgtttcatgtcaagttacccaagaaacacaacgttgagctgggcatcactatatcctcacccagcagtaggaaaccaggagatcctttggttatatctgacatcaaaaagggctcggtggctcaccgcacagggacactggagttaggagacaagctgctcgcaatcgacaacattcgattagacaattgttccatggaggatgcagttcagattctacagcaatgcgaagatctggtgaagctcaaaattcgcaaggacgaggacaacagcgacgagcaggagagcagcggtgccatcatctacaccgtggaattaaagaggtatgggggccccctgggcattaccataagcgggaccgaagaaccttttgatccaattattattagttcattgaccaaggggggtttggccgagcgtactggagcaattcatataggagaccgcatcctggctatcaattccagttctctgaaagggaaacccctttcagaagccatacacctgcttcaaatggctggcgaaaccgtcactctgaagataaagaagcagacggacgctcaaagcgcatcttcccccaaaaagtttccgatcagttcccacttatcagatcttggggatgtggaagaagatagttcacccgcccagaagcccggcaagttgtccgacatgtatccaagtaccgtgccctcagtcgacagtgctgtggatagctgggacggttctgccattgatacgtcttacggcacacagggcaccagctttcaggccagcggttacaatttcaatacctatgattggcgtagccctaaacagcggggatctctatctccagtcacaaaaccacgctctcagacataccctgacgtaggtctgagctatgaagactgggatcggtctaccgctagcggatttgcaggtgccgcagatagtgcagaaaccgagcaggaagagaacttctggtcgcaggcgctggaagacctggagacatgtgggcagagtgggatcctgcgggaactggaagctaccataatgagcgggtcaacgatgagtctgaaccatgaggctcctacgcctagatctcagctggggaggcaggccagcttccaggagcgatcatctagtaggccgcattactctcagaccaccaggtctaataccctacctagcgacgtgggtagaaagagcgtgacgctccggaaaatgaagcaagaaataaaagaaatcatgtcacctacacccgttgagctccacaaagtgacactctacaaggactcagatatggaggactttgggttttccgtcgccgacggacttttggaaaagggcgtgtacgtcaaaaacatccgccccgcgggccccggggatctgggtggactaaaaccatacgaccggctcttgcaggtcaatcatgtgagaacccgagactttgactgttgtctggttgtgcccctgatcgccgagtctgggaacaaactagacctggtgatctctagaaatccccttgcatcccagaagagtattgaccagcagtctctccctggggactggtctgagcagaacagcgcttttttccagcaaccttctcacgggggcaacctagaaacccgggagcccaccaacaccctgtag

SEQ ID NO: 333702 - DNA, 3387 bp, Artificial Sequence
  derived and/or modified sequence
atgatcgccgtgagcttcaagtgccggtgccagatcctgcggcggctgactaaggatgagtcaccatacactaaatccgctagccagacgaagccacctgacggagccctcgccgttcgtaggcaaagcatccccgaagagttcaaaggctctacagttgtggaactgatgaaaaaggagggcaccactctgggcctaacagtgtccgggggaatcgacaaggacggcaagcctcgggtgagtaaccttagacaaggtggtatcgcggcgcggtcagaccaattggacgtgggagattacataaaggcagtaaacggaatcaatctggccaaattccgacatgacgagatcatctccctgttgaaaaatgtcggggagagagtggtcctggaggtcgagtacgaactgccacccgtgtccgtgcaaggaagctcagtcatatttagaaccgttgaggtgacccttcacaaggagggaaacacattcggctttgttatcagaggaggggcccacgacgataggaataaatcaagacccgtcgttatcacatgcgtgaggcctggcggcccagctgacagggagggtactattaagccgggagataggcttctgagtgttgatggaattaggcttcttggaacaacccatgctgaagccatgagcatcctgaagcagtgcgggcaggaggcggctctactgatagagtatgatgtgagtgtaatggatagtgtggcaacggccagcggtcccctgctggtcgaggtggcaaagactccaggggcatccctgggggttgccctgacaacctccatgtgctgcaacaagcaggtgatcgtgatagacaagattaagagtgcttctattgccgataggtgcggtgctctgcatgtgggagaccacattctctccatcgatgggacatcaatggagtactgtaccttggcagaggctactcaatttctggcaaacaccacagaccaggtgaagctagaaattctgccacaccatcagacaaggctcgcccttaaaggaccagaccatgtgaaaatccagaggagtgataggcagctcacatgggactcatgggcctccaaccacagcagccttcatactaatcaccactacaacacgtaccatcctgatcattgtcgagtgcccgccctgacatttccgaaagcccccccccccaacagtcctccagcgctggtttcgtcctctttttcacccacatctatgtcagcttatagtctgtcgtccctgaacatgggtactttaccacgcagtctgtattctacttcacctcgcggaaccatgatgcgccggcgactcaaaaagaaggacttcaaatcgagcctttctctcgcttcctctaccgtagggctagctggacaggtggtgcatacagagaccactgaggtcgtgttgaccgcagatcccgtaacagggttcggcatccagcttcagggatcggtctttgcgacggaaacactcagctctcctcctttaatatcctatatcgaagctgatagccctgccgagcgttgcggagtccttcagattggtgatagagttatggccatcaatggaatccctaccgaagattctacctttgaggaagccagccagctcctgcgggatagtagcatcacctcaaaggtgacactggaaattgagttcgatgtggccgaaagcgtaatcccctctagcggcacgtttcacgtcaaacttcccaagaagcacaatgtagagctcggaatcactatctccagtccatcatccagaaagcctggcgatccccttgtgatctcagacatcaaaaaggggtcggtggcccatcggaccggaactctggagctcggggataagttgctggctatagacaatatccgtcttgataactgctccatggaagatgctgtgcaaatcctccagcaatgtgaggacctcgtaaaacttaaaatcagaaaggatgaggataatagtgatgagcaagagagctccggtgccattatctacaccgtcgagctgaagaggtacggcggccctttgggcatcactatcagcggaaccgaggagccattcgaccctattatcatatccagcctcactaaaggcggcctggctgaaagaacgggagctatccacataggggaccgaatcctggctataaactcatcgtcactcaagggcaaacccctgagcgaggccattcatctgctgcagatggcaggggaaacagtgactttgaagatcaaaaaacagaccgatgcacagtctgccagctctccaaaaaaatttcccatctcttcacacctgtccgatctgggagacgtagaagaagacagctcaccagcccaaaaacccggcaagctcagcgatatgtacccaagcaccgttcccagtgtggatagtgcagtagatagctgggacgggtccgcaatcgacactagttatgggacacagggtacttctttccaggcctcggggtataatttcaacacctacgattggagatcaccaaagcagagaggctcactcagccctgtaaccaaacctcgatcccagacttatcccgacgtgggacttagctatgaagactgggaccggtctaccgcatccgggtttgcaggcgctgccgactcagccgagacagaacaggaggagaacttctggtcccaggctcttgaggacttggagacttgcgggcagagtggcatcctgcgggagctcgaggagaaggctgatagacgggtcagtctgaggaacatgacccttctagccacaattatgagcggatcaaccatgtcgctgaatcacgaagcccctacgccgcgctcacagttgggacgccaggctagcttccaggagagaagtagctctaggccccattactcgcagaccacccgatccaatacactgcctagcgatgtgggccggaaatctgtaacactgcggaagatgaagcaggaaattaaggagattatgagtcccacgcctgtcgagctccataaagtgaccctgtacaaagactctgacatggaggactttggtttcagtgtcgccgacgggctcctggagaaaggggtctatgttaagaacattaggccggcaggtcctggtgacctgggcggactcaagccctacgaccgactccttcaggtaaaccatgtacgtacccgggacttcgattgctgtctggtcgttcccctcatcgctgagagtggaaacaagctagaccttgtgatttcaagaaacccactagcaagccagaaatctattgaccagcagagcctacccggcgattggtctgagcaaaactccgccttctttcaacaaccgtcccatgggggcaacttagaaacaagagagccaaccaataccctgtag

SEQ ID NO: 333703 - DNA, 3342 bp, Artificial Sequence
  derived and/or modified sequence
atgattgccgtatctttcaaatgtcggtgtcagattctgcggaggctgaccaaagacgagtcaccttatactaaaagcgcaagtcagacaaaacctcctgatggggcactcgcagtgcggcgtcaatctatccccgaagaatttaaagggtcgacagtggtcgaactcatgaagaaggagggtaccacattgggtctgaccgtgagcggtggaatagataaagacggaaagccaagggtgtcgaacttgcgtcaggggggaatagccgctcgctcagatcagctcgatgtgggagactatataaaagcagtgaacggcattaatctggcgaagttccgacatgacgagataattagcctcttaaaaaatgtaggagagagagtagtcttagaggtggagtacgaactccctccagtgagtgtacagggcagctctgtgatatttcgcacggtggaggtaaccttgcacaaggaagggaacacatttggttttgtgataagaggcggagcacacgacgacagaaacaagtccaggcctgttgttatcacctgtgtgcgaccaggtggtcccgctgaccgcgagggtaccatcaagccgggagaccgacttctgtcagtggacggcataaggctgctaggcactacacacgccgaggccatgtcgatcctcaagcaatgtggacaggaagcggctctcctgattgagtacgatgtttccgtgatggatagcgtagcaaccgcctccggaccgttgcttgtggaggttgccaagaccccgggtgctagtctgggcgtggcattgaccacttctatgtgctgtaacaagcaagtgattgttattgataagattaagtccgccagcatcgctgacagatgcggggctctgcatgtaggcgatcacatactgtcaatcgatggtacatctatggagtactgcaccctagctgaggctacgcagtttctggcaaatacaactgatcaagtaaagctggagatattgccccaccatcagacacgcctcgcactgaaaggacccgaccacgtgaaaattcagcgctcagacaggcaactaacttgggacagctgggccagcaatcatagttcgctccacacaaaccatcactacaatacctaccatcccgatcattgccgtgttcctgcccttacgttcccgaaggctcccccacctaattccccccctgccctggtgagctcgtcgttttcccccactagcatgagtgcttacagcttgtcttctctgaatatggggactttgcccaggagtctgtattcaaccagccccaggggtaccatgatgaggcgtaggctgaagaaaaaagactttaaatcctcccttagcttagcctcaagtacggtgggccttgcaggccaggtggtgcacaccgaaacgaccgaggtagtactcactgccgatcctgtaaccggattcgggattcagctccagggaagcgtgtttgccacagaaaccttatccagccccccattaattagctatatagaagcagacagtcccgctgaaagatgcggggtgttacagatcggcgacagggtgatggccatcaatggcattccaactgaagacagtacattcgaagaagcctcacagctgttgcgagactcctccataacaagcaaagtgactcttgaaattgagttcgacgtagctgagagtgtaattccaagttccggtacctttcacgtgaagcttccaaagaagcataacgtcgaactaggtatcaccatctcgagccccagctcaaggaaacctggggacccattagtaatctccgacattaagaagggttctgtggctcaccggaccggcacactggaactgggcgataagctgctcgccatcgacaacattcgcctggacaactgttccatggaagatgcagtacagattttacaacagtgtgaagatttagtgaaacttaagatacggaaggatgaagataactccgacgagcaggaaagtagcggggcaataatttacaccgtcgaactaaaacggtacggtggacccttaggcattaccatatctggaacggaggagcctttcgatcccatcataatcagcagcttaaccaaaggtgggttggcagaacgtaccggcgctatccacattggagaccgcattctggctatcaactcttcgagcttgaaaggtaaacccctgagcgaagccatacatcttttacaaatggccggtgagacggtcacacttaagattaagaaacagacggacgcccaatctgctagtagcccaaagaagttccccattagcagccacctatccgatctgggagatgttgaggaagactccagccccgcacagaaaccaggcaaactcagcgacatgtacccaagcaccgtgccttctgtcgattcagccgtagattcatgggatggctctgctattgacacaagttatgggactcagggcaccagcttccaagcctctggatataatttcaatacatatgattggaggagccctaaacagagagggtccctgtcccctgtaaccaagcctcggagccagacctaccccgacgtgggtctgtcttatgaggattgggaccggtccacggcatcaggcttcgccggagccgctgattccgcagaaacagaacaggaggagaacttctggagccaagccctcgaggatttagagacatgcggacagtcaggaatactacgggagcttgaggcgactataatgagtgggtccaccatgagcttaaatcatgaagctcctaccccccgtagccagctgggtcgccaggcatcgttccaggagcgcagctcctctcgcccacactattcacagacaactcggagcaatacccttccctcagacgtcgggcgaaaatctgtgaccctccgcaagatgaaacaggaaatcaaggaaataatgtctccgacccccgtcgagttgcacaaagtcacactgtacaaggacagcgacatggaggattttggtttttcggtggccgatggcctgttggaaaaaggtgtgtacgtgaagaatatccgacccgctgggcctggagaccttggaggtctcaaaccatacgatcgcctgctccaggttaatcatgtgaggactcgagattttgactgctgcctcgtcgttcctctcatagccgaatctggaaataagctcgacctcgtgatctctcgtaaccccctggcatcccaaaagagcattgaccaacagagtcttcctggcgactggtctgagcagaatagcgccttcttccagcaaccttctcacgggggaaacttggaaactagagagcccacaaacactctctag

SEQ ID NO: 333704 - DNA, 3387 bp, Artificial Sequence
  derived and/or modified sequence
atgatcgccgttagcttcaaatgtcgatgtcagattctgcgcaggctgactaaggatgaatctccctacaccaagagcgcatcccagaccaagcccccagatggggctctggcagtgaggcgtcagtccatcccagaagaattcaagggctcaaccgtggtcgagctgatgaaaaaggaagggaccactctggggttgacagtgtccggcggaatcgacaaagacggcaaaccccgtgtatctaacttgcgccagggaggcatcgccgcacgaagtgatcagctcgacgtcggagactacatcaaggctgtaaatggtatcaacttggcaaagttccgccatgacgaaattatcagccttctgaaaaatgtcggagaaagagtggtgctcgaggtggagtacgagcttcctcctgtctcagttcaaggcagctccgtcatcttcagaacggtggaagtcacattgcataaggagggcaacaccttcggatttgtgatcaggggcggagcgcacgatgaccgaaataagtcacggccagtggtgatcacttgcgtgcgccctgggggacctgctgaccgggagggcacaattaagccaggtgatagactcctgagtgtcgacgggatcagactcctgggtactacccacgccgaagctatgtcaattctgaagcagtgtggacaggaggcggctctcttaatcgaatacgacgtctctgtgatggatagcgtggccaccgctagtggccctctgttagtcgaagttgcaaagaccccaggggcttcattgggcgtggcactcactacaagcatgtgctgcaacaagcaggtaatcgtcattgataagatcaagtctgctagcattgccgatcggtgcggtgctttgcatgtgggtgatcacatactcagtattgatggtacaagtatggaatattgcacactcgcagaagctactcagtttctggctaataccactgaccaggtcaagctcgaaattctgcctcatcaccagaccagactggctctgaaaggtccagatcatgtgaaaatacagcgctctgatcggcaattgacatgggacagttgggcctccaaccatagttccctgcataccaatcatcactataatacctaccatccagaccactgtagggttcctgccctgacctttccgaaggcacctccccctaatagccccccagccctcgtgagctcatccttctcgcctaccagcatgtcagcctatagtctctcatccctgaacatgggcacgctccccaggtctctgtatagcacctcacccaggggcacgatgatgaggcgacggcttaagaagaaagattttaaatcatctctctctctggcaagctcaactgttggcctcgccggtcaggtcgtccacaccgagactacggaggtcgtgctgaccgcggaccccgtcactggctttggcatccagctgcaggggagtgtgtttgcgaccgaaaccctctcatctccccctctcatctcttacatcgaggcggactcccccgctgagaggtgcggcgtcctgcagatcggagatcgggtaatggcaatcaacggaatccccaccgaggactccacgtttgaggaagcatcccagctgctgcgcgatagctccattacgagcaaggtcaccctggagatcgaattcgacgtcgctgagagcgtgatccccagtagcggcacattccacgtcaagctccctaaaaaacacaacgtggaactaggcatcacgatcagctcaccttccagtaggaaacccggtgaccctttggtgatcagtgacatcaagaagggcagcgtggctcaccggaccggcacactggagctgggcgacaagttgctggcgatcgacaacatccgcctggataactgttccatggaagacgccgtgcagatcttgcaacagtgcgaggaccttgtcaagctcaagatccgcaaagacgaggataatagcgatgaacaggagtcaagtggagccatcatttacaccgtggagctcaagagatatggcggtcccctcgggataacgatcagtggcaccgaagaaccctttgaccctatcatcatttcatcattaactaagggcggactcgccgagcggacgggggctattcatatcggcgataggatcctcgctattaacagtagctcccttaaaggcaaaccccttagcgaagccatccacctgttacagatggctggtgagactgtcacattaaagatcaaaaagcagacagacgctcaatcagcgagctctccaaaaaaattccccatatccagtcacctgtcagatcttggggacgtggaagaggactccagcccagctcagaagccaggaaaattaagcgatatgtacccttccaccgtgcccagcgtagattcagccgtcgatagctgggacggctctgccatcgacacatcctacggaacccagggaacctcctttcaagcctctggctataactttaacacctacgattggagatcgcccaaacagcggggatcactctcaccggtcacaaagccgagatctcagacttatcctgacgtggggctgtcatacgaggattgggatcgctcgacagcatcaggtttcgctggcgctgccgatagcgcagaaactgaacaagaggagaacttctggagccaggcactggaggatctggaaacctgtgggcaaagcggcatcctgagggagctcgaagagaaggctgacagaagagtatcactgaggaatatgacgttgttagctactatcatgtcaggcagcacgatgagcctcaatcatgaggctccaacacctcggtcacagctgggaagacaagcctcctttcaggaaagatcctcctcccggcctcactattcccagactacgcggtccaacactctgccatccgacgtcggaagaaagagcgttaccttgagaaagatgaagcaggagattaaagagataatgtccccaacccccgtggaactacataaggtaacattatacaaggactctgacatggaagacttcgggtttagcgtggcagacggcctgctcgagaagggcgtttacgttaaaaatattaggcctgcgggtcccggtgatctcggcggtctcaagccttatgacaggttgctgcaggtgaatcatgtccgcactagggactttgattgttgtttggtcgtcccgttgattgcagaaagcggaaataaactggatttagtcatcagccgcaatccgctggctagccagaaatccatagaccaacaaagtctgccgggagactggtctgagcagaatagcgccttttttcaacaaccatcacatggaggaaacttggaaactagagagcccaccaacacactgtag

SEQ ID NO: 333705 - DNA, 3342 bp, Artificial Sequence
  derived and/or modified sequence
atgatcgccgtgagcttcaagtgcagatgccagatcctgagaagactgaccaaggacgagagcccctacaccaagagcgccagccagaccaagccccccgacggcgccctggccgtgagaagacagagcatccccgaggagttcaagggcagcaccgtggtggagctgatgaagaaggagggcaccaccctgggcctgaccgtgagcggcggcatcgacaaggacggcaagcccagagtgagcaacctgagacagggcggcatcgccgccagaagcgaccagctggacgtgggcgactacatcaaggccgtgaacggcatcaacctggccaagttcagacacgacgagatcatcagcctgctgaagaacgtgggcgagagagtggtgctggaggtggagtacgagctgccccccgtgagcgtgcagggcagcagcgtgatcttcagaaccgtggaggtgaccctgcacaaggagggcaacaccttcggcttcgtgatcagaggcggcgcccacgacgacagaaacaagagcagacccgtggtgatcacctgcgtgagacccggcggccccgccgacagagagggcaccatcaagcccggcgacagactgctgagcgtggacggcatcagactgctgggcaccacccacgccgaggccatgagcatcctgaagcagtgcggccaggaggccgccctgctgatcgagtacgacgtgagcgtgatggacagcgtggccaccgccagcggccccctgctggtggaggtggccaagacccccggcgccagcctgggcgtggccctgaccaccagcatgtgctgcaacaagcaggtgatcgtgatcgacaagatcaagagcgccagcatcgccgacagatgcggcgccctgcacgtgggcgaccacatcctgagcatcgacggcaccagcatggagtactgcaccctggccgaggccacccagttcctggccaacaccaccgaccaggtgaagctggagatcctgccccaccaccagaccagactggccctgaagggccccgaccacgtgaagatccagagaagcgacagacagctgacctgggacagctgggccagcaaccacagcagcctgcacaccaaccaccactacaacacctaccaccccgaccactgcagagtgcccgccctgaccttccccaaggcccccccccccaacagcccccccgccctggtgagcagcagcttcagccccaccagcatgagcgcctacagcctgagcagcctgaacatgggcaccctgcccagaagcctgtacagcaccagccccagaggcaccatgatgagaagaagactgaagaagaaggacttcaagagcagcctgagcctggccagcagcaccgtgggcctggccggccaggtggtgcacaccgagaccaccgaggtggtgctgaccgccgaccccgtgaccggcttcggcatccagctgcagggcagcgtgttcgccaccgagaccctgagcagcccccccctgatcagctacatcgaggccgacagccccgccgagagatgcggcgtgctgcagatcggcgacagagtgatggccatcaacggcatccccaccgaggacagcaccttcgaggaggccagccagctgctgagagacagcagcatcaccagcaaggtgaccctggagatcgagttcgacgtggccgagagcgtgatccccagcagcggcaccttccacgtgaagctgcccaagaagcacaacgtggagctgggcatcaccatcagcagccccagcagcagaaagcccggcgaccccctggtgatcagcgacatcaagaagggcagcgtggcccacagaaccggcaccctggagctgggcgacaagctgctggccatcgacaacatcagactggacaactgcagcatggaggacgccgtgcagatcctgcagcagtgcgaggacctggtgaagctgaagatcagaaaggacgaggacaacagcgacgagcaggagagcagcggcgccatcatctacaccgtggagctgaagagatacggcggccccctgggcatcaccatcagcggcaccgaggagcccttcgaccccatcatcatcagcagcctgaccaagggcggcctggccgagagaaccggcgccatccacatcggcgacagaatcctggccatcaacagcagcagcctgaagggcaagcccctgagcgaggccatccacctgctgcagatggccggcgagaccgtgaccctgaagatcaagaagcagaccgacgcccagagcgccagcagccccaagaagttccccatcagcagccacctgagcgacctgggcgacgtggaggaggacagcagccccgcccagaagcccggcaagctgagcgacatgtaccccagcaccgtgcccagcgtggacagcgccgtggacagctgggacggcagcgccatcgacaccagctacggcacccagggcaccagcttccaggccagcggctacaacttcaacacctacgactggagaagccccaagcagagaggcagcctgagccccgtgaccaagcccagaagccagacctaccccgacgtgggcctgagctacgaggactgggacagaagcaccgccagcggcttcgccggcgccgccgacagcgccgagaccgagcaggaggagaacttctggagccaggccctggaggacctggagacctgcggccagagcggcatcctgagagagctggaggccaccatcatgagcggcagcaccatgagcctgaaccacgaggcccccacccccagaagccagctgggcagacaggccagcttccaggagagaagcagcagcagaccccactacagccagaccaccagaagcaacaccctgcccagcgacgtgggcagaaagagcgtgaccctgagaaagatgaagcaggagatcaaggagatcatgagccccacccccgtggagctgcacaaggtgaccctgtacaaggacagcgacatggaggacttcggcttcagcgtggccgacggcctgctggagaagggcgtgtacgtgaagaacatcagacccgccggccccggcgacctgggcggcctgaagccctacgacagactgctgcaggtgaaccacgtgagaaccagagacttcgactgctgcctggtggtgcccctgatcgccgagagcggcaacaagctggacctggtgatcagcagaaaccccctggccagccagaagagcatcgaccagcagagcctgcccggcgactggagcgagcagaacagcgccttcttccagcagcccagccacggcggcaacctggagaccagagagcccaccaacaccctgtag

SEQ ID NO: 333706 - DNA, 3387 bp, Artificial Sequence
  derived and/or modified sequence
atgatcgccgtgagcttcaagtgcagatgccagatcctgagaagactgaccaaggacgagagcccctacaccaagagcgccagccagaccaagccccccgacggcgccctggccgtgagaagacagagcatccccgaggagttcaagggcagcaccgtggtggagctgatgaagaaggagggcaccaccctgggcctgaccgtgagcggcggcatcgacaaggacggcaagcccagagtgagcaacctgagacagggcggcatcgccgccagaagcgaccagctggacgtgggcgactacatcaaggccgtgaacggcatcaacctggccaagttcagacacgacgagatcatcagcctgctgaagaacgtgggcgagagagtggtgctggaggtggagtacgagctgccccccgtgagcgtgcagggcagcagcgtgatcttcagaaccgtggaggtgaccctgcacaaggagggcaacaccttcggcttcgtgatcagaggcggcgcccacgacgacagaaacaagagcagacccgtggtgatcacctgcgtgagacccggcggccccgccgacagagagggcaccatcaagcccggcgacagactgctgagcgtggacggcatcagactgctgggcaccacccacgccgaggccatgagcatcctgaagcagtgcggccaggaggccgccctgctgatcgagtacgacgtgagcgtgatggacagcgtggccaccgccagcggccccctgctggtggaggtggccaagacccccggcgccagcctgggcgtggccctgaccaccagcatgtgctgcaacaagcaggtgatcgtgatcgacaagatcaagagcgccagcatcgccgacagatgcggcgccctgcacgtgggcgaccacatcctgagcatcgacggcaccagcatggagtactgcaccctggccgaggccacccagttcctggccaacaccaccgaccaggtgaagctggagatcctgccccaccaccagaccagactggccctgaagggccccgaccacgtgaagatccagagaagcgacagacagctgacctgggacagctgggccagcaaccacagcagcctgcacaccaaccaccactacaacacctaccaccccgaccactgcagagtgcccgccctgaccttccccaaggcccccccccccaacagcccccccgccctggtgagcagcagcttcagccccaccagcatgagcgcctacagcctgagcagcctgaacatgggcaccctgcccagaagcctgtacagcaccagccccagaggcaccatgatgagaagaagactgaagaagaaggacttcaagagcagcctgagcctggccagcagcaccgtgggcctggccggccaggtggtgcacaccgagaccaccgaggtggtgctgaccgccgaccccgtgaccggcttcggcatccagctgcagggcagcgtgttcgccaccgagaccctgagcagcccccccctgatcagctacatcgaggccgacagccccgccgagagatgcggcgtgctgcagatcggcgacagagtgatggccatcaacggcatccccaccgaggacagcaccttcgaggaggccagccagctgctgagagacagcagcatcaccagcaaggtgaccctggagatcgagttcgacgtggccgagagcgtgatccccagcagcggcaccttccacgtgaagctgcccaagaagcacaacgtggagctgggcatcaccatcagcagccccagcagcagaaagcccggcgaccccctggtgatcagcgacatcaagaagggcagcgtggcccacagaaccggcaccctggagctgggcgacaagctgctggccatcgacaacatcagactggacaactgcagcatggaggacgccgtgcagatcctgcagcagtgcgaggacctggtgaagctgaagatcagaaaggacgaggacaacagcgacgagcaggagagcagcggcgccatcatctacaccgtggagctgaagagatacggcggccccctgggcatcaccatcagcggcaccgaggagcccttcgaccccatcatcatcagcagcctgaccaagggcggcctggccgagagaaccggcgccatccacatcggcgacagaatcctggccatcaacagcagcagcctgaagggcaagcccctgagcgaggccatccacctgctgcagatggccggcgagaccgtgaccctgaagatcaagaagcagaccgacgcccagagcgccagcagccccaagaagttccccatcagcagccacctgagcgacctgggcgacgtggaggaggacagcagccccgcccagaagcccggcaagctgagcgacatgtaccccagcaccgtgcccagcgtggacagcgccgtggacagctgggacggcagcgccatcgacaccagctacggcacccagggcaccagcttccaggccagcggctacaacttcaacacctacgactggagaagccccaagcagagaggcagcctgagccccgtgaccaagcccagaagccagacctaccccgacgtgggcctgagctacgaggactgggacagaagcaccgccagcggcttcgccggcgccgccgacagcgccgagaccgagcaggaggagaacttctggagccaggccctggaggacctggagacctgcggccagagcggcatcctgagagagctggaggagaaggccgacagaagagtgagcctgagaaacatgaccctgctggccaccatcatgagcggcagcaccatgagcctgaaccacgaggcccccacccccagaagccagctgggcagacaggccagcttccaggagagaagcagcagcagaccccactacagccagaccaccagaagcaacaccctgcccagcgacgtgggcagaaagagcgtgaccctgagaaagatgaagcaggagatcaaggagatcatgagccccacccccgtggagctgcacaaggtgaccctgtacaaggacagcgacatggaggacttcggcttcagcgtggccgacggcctgctggagaagggcgtgtacgtgaagaacatcagacccgccggccccggcgacctgggcggcctgaagccctacgacagactgctgcaggtgaaccacgtgagaaccagagacttcgactgctgcctggtggtgcccctgatcgccgagagcggcaacaagctggacctggtgatcagcagaaaccccctggccagccagaagagcatcgaccagcagagcctgcccggcgactggagcgagcagaacagcgccttcttccagcagcccagccacggcggcaacctggagaccagagagcccaccaacaccctgtag

SEQ ID NO: 333707 - protein, 129 aa, Artificial Sequence
  derived and/or modified sequence
MVLIDMSVDLSTQVVDHYENPRNVGSLDKTSKNVGTGLVGAPACGDVMKLQIQVDEKGKIVDARFKTFGCGSAIASSSLATEWVKGKTVEEALTIKNTDIAKELCLPPVKLHCSKSVLFPAEEKTQLSP

SEQ ID NO: 333708 - DNA, 390 bp, Artificial Sequence
  derived and/or modified sequence
atggtacttatcgacatgagcgtggatctgagcacgcaggtggtagaccattacgaaaatccgcgaaacgtgggctcactggacaagacctccaaaaatgtgggcaccggactggttggggcccccgcctgcggcgatgtcatgaaacttcaaatccaggtggacgaaaagggaaaaatcgttgacgctagatttaagacctttgggtgtggcagcgccatcgcatcttcctctcttgctacagagtgggtgaaaggcaagaccgtggaggaagccttaaccatcaaaaatacagatatcgcaaaggagctatgtctgccgcctgtgaagctccattgtagcaagtcggtcctgttccctgcagaggagaagacacagttaagcccctag

SEQ ID NO: 333709 - DNA, 1168 bp, Artificial Sequence
  derived and/or modified sequence
aggcgcaagccggcaagatggcggcggctggggctttccgtctgaggcgggcggcatcggctctgctgctgcggagcccccgcctgcccgcccgggagctgtcggccccggcccgactctatcacaagaaggtatctcaaatctgtgaagtattgtagaggagacacaaaaggaattgggggtcacaaatggttctcattgacatgagtgtagacctttctactcaggttgttgatcattatgaaaatcctagaaacgtggggtcccttgacaagacatctaaaaatgttggaactggactggtgggggctccagcatgtggtgacgtaatgaaattacagattcaagtggatgaaaaggggaagattgtggatgctaggtttaaaacatttggctgtggttccgcaattgcctccagctcattagccactgaatgggtgaaaggaaagacggtggaggaagccttgactatcaaaaacacagatatcgccaaggagctctgccttcctcccgtgaaactgcactgctccaaatctgtgctgtttccagcagaggagaaaactcagctttcgccataatcctgtttcctgtgtatttcttcacttcctgtctggatggtattcctgtcgggtgctggctgaagatgcaatcaaggccgccctggctgattacaaattgaaacaagaacccaaaaaaggagaggcagagaagaaatgagccctccctcggcgaagcctccagcaggccacaccagctgtttcccacctgctgtgcagtcaccttagatgttcagaagccgcttcctctccactgaagagctatgagatacgcacaatacttgctgttcacgttatgactctcatgcaagcaaaatacacagtttcattgttctgaatcctgtggtttctttcagcccacttttatcgccttaacctagttaatgtatattttgaattgtgtgtatgacctcagaactgaaattgataatgaagttgcaagttttgatagcccgtgaagtgcataagtatctaattttacctgaattgatttggggggaaattaccagtagaatgccttggtctgaatatttgatagaaccaattgttgtacataaaacagattgcgcatatatatatatgtataaaaaataataaaataatggaagatg

SEQ ID NO: 333710 - DNA, 390 bp, Artificial Sequence
  derived and/or modified sequence
atggtgctgattgacatgtctgtggacctgagcacccaggtggtggaccactatgagaaccccagaaatgtgggcagcctggacaagaccagcaagaatgtgggcaccggcctggtgggcgccccagcctgtggagatgtgatgaagctgcagatccaggtggatgagaagggcaagatcgtggatgcccgcttcaagaccttcggctgcggcagcgccatcgccagcagcagcctggccacagagtgggtgaagggcaagacagtggaggaggccctgaccatcaagaacacagacatcgccaaggagctgtgcctgccccctgtgaagctgcactgcagcaagtctgtgctcttccctgctgaggagaagacccagctgagcccctag

SEQ ID NO: 333711 - DNA, 390 bp, Artificial Sequence
  derived and/or modified sequence
atggtgctgatcgacatgagcgtggacctgagcacccaggtggtggaccactacgaaaatcccaggaacgtggggtctctcgacaaaacctctaagaatgtcggcactggactggtgggggcgcccgcttgcggggatgtgatgaaactccaaatccaagtggacgagaagggaaagatcgttgacgcaaggttcaaaactttcggttgtggcagcgcgatagctagcagctctcttgctactgagtgggtgaaagggaaaactgtggaagaggcattgacaattaagaatacagatatagcgaaggagctttgtctgccacccgttaaactgcactgttccaagtctgtcctgttcccggccgaagaaaagactcagttaagtccatag

SEQ ID NO: 333712 - DNA, 390 bp, Artificial Sequence
  derived and/or modified sequence
atggtattaatcgacatgagtgtggacctgtcaacgcaggttgtagatcattatgaaaaccctcgtaatgtgggcagcctggataagacatcaaagaatgtcggcacgggtcttgtaggagcccctgcatgcggtgacgtgatgaaacttcagatccaggtggatgaaaaaggcaaaattgtcgacgcacgattcaagactttcggatgtgggagcgcaatcgcatctagcagcctggcgaccgagtgggtaaagggcaagaccgtagaggaagccctgaccatcaaaaatacagatattgcgaaagaactctgcctgccacctgtgaaactccactgtagcaagagtgtgctatttcctgccgaggaaaagacacagctgtcaccctag

SEQ ID NO: 333713 - DNA, 390 bp, Artificial Sequence
  derived and/or modified sequence
atggtgctgatcgacatgagcgtggacctgagcacccaggtggtggaccactacgagaaccccagaaacgtgggcagcctggacaagaccagcaagaacgtgggcaccggcctggtgggcgcccccgcctgcggcgacgtgatgaagctgcagatccaggtggacgagaagggcaagatcgtggacgccagattcaagaccttcggctgcggcagcgccatcgccagcagcagcctggccaccgagtgggtgaagggcaagaccgtggaggaggccctgaccatcaagaacaccgacatcgccaaggagctgtgcctgccccccgtgaagctgcactgcagcaagagcgtgctgttccccgccgaggagaagacccagctgagcccctag

SEQ ID NO: 333714 - DNA, 6321 bp, Artificial Sequence
  derived and/or modified sequence
atgcaggccttcccacaagggcccggcagcatgacaaggtgaaggcagagtatgtgcatctcaaccatccgctcaccctcgtgaccagagagcgcgatttggccgtgaaggagaaacaccagctccaagccaagctggagaacctagaacaggtcctgaagcatatgcgagaggcggctgaacggcggcagcagctgcagttggagcatgaccaggccctggctgttctcagtgccaagcagcaggaaattgaccttctgcagaagtccaaggttcgagagctggaagagaaatgccggactcaaagtgagcagttcaacctgctgtcccgggacctggagaagttccggcagcacgctggcaagattgacctgctgggtggcagcgcggtggcccccctggacatctccacggcccccagcaagcctttcccacagttcatgaatggcctagccacctccctcggcaaaggtcaggagagcgctattggaggcagctctgcgatcggtgaatatatccggccccttccgcagcctggtgacaggccggagcctctgtccgccaagcccaccttcctgtcgagatccggtagcgcaagatgcagatctgagtcagacatggagaatgaacggaattccaatacctccaagcagagatactcggggaaggtccacctctgtgttgcccgctatagttacaaccccttcgatggaccgaacgagaaccccgaagctgagctgcccctcacggcgggaaaatacctctacgtctatggagacatggatgaggatgggttctatgaaggagagctcctcgatggccagaggggtctggtgccctccaacttcgtggactttgtgcaggacaacgagtcgcggttggcaagcacgctggggaacgagcaggatcagaacttcatcaaccattccggcatcggcctggagggagagcacatcctggacctccactccccaacccacatagatgcgggcatcaccgacaacagtgccgggaccctggacgtgaacatcgacgacatcggagaagacatcgtgccttaccctagaaaaatcaccctcatcaaacaactcgccaaaagtgttattgtgggctgggagcccccggcggtgccaccaggatggggaacggtgagcagctacaacgtcctggtggacaaggagacacgcatgaacctcacgctggggagcagaactaaagccctcatcgagaagctcaacatggcagcctgcacctaccgcatctccgtgcagtgcgtcaccagcaggggcagctcggatgagctgcagtgcacgctgctggtgggcaaggacgtggtggtggccccctcccacctgcgggtggacaacatcacgcagatctccgcccagctctcctggctacccaccaacagcaactacagccacgtcatcttcctcaacgaggaggagttcgacatcgtcaaggccgccaggtacaagtaccagttcttcaatctcaggcccaacatggcctataaggtgaaggttctggccaaaccccaccagatgccgtggcagctcccgctggagcaaagggagaagaaggaggcctttgtggagttctccacgttgcctgcaggacccccagcacccccacaagatgttaccgtccaggctggggtgacccccgccaccatccgggtctcctggagaccacctgtgctgacgcccaccgggctgtccaatggcgcaaacgttaccggctacggcgtgtatgccaaagggcagagggtggctgaagtcatcttccccacggcagacagcacggccgtggagcttgtgcggctgcggagcctggaggccaagggcgtgaccgtgcggaccctctccgcccagggcgagtccgtggactctgcagttgctgccgttccccccgagctcctggtgcctcctaccccccacccgagacctgcaccccaatcaaagccattagcaagttctggagtccccgaaaccaaagacgagcacctgggtccccacgccaggatggatgaggcctgggagcagagccgtgcacctggccctgtgcatgggcacatgctggagccgcccgtgggccccggaaggcggtcgccctcacccagccgcatcctgccacagccacagggcaccccggtgtccaccaccgtcgccaaggccatggcccgggaggccgcgcagagggtggccgagagcagcaggttagagaaaaggagcgtcttcctagagagaagcagcgcggggcagtacgccgcctcagacgaggaggacgcctatgactctccagacttcaagaggaggggcgcctcggtggacgacttcctgaaaggctctgaacttggcaagcagccgcactgttgccatggagacgagtaccacacagagagcagccgggggtctgacctctcagacatcatggaggaggacgaggaggagctgtattctgaaatgcagctggaagatgggggaaggaggcggcccagcggcacgtcccacaatgccctcaagattttagggaacccagcctctgcaggacgggtggatcacatgggccggaggtttccccgtggcagcgctggtcctcagaggtcccggcccgtgacagtcccatccatcgacgattacgggcgagaccgcctttctccagacttctatgaagagtcagaaactgaccctggtgccgaagagctcccggcccggatctttgtggctctctttgactacgacccgctcaccatgtccccaaacccagatgctgcagaggaggagcttccctttaaagaaggccagatcatcaaggtttatggtgataaagacgctgatggattctaccgtggggaaacctgtgcccggcttggccttattccttgtaacatggtctctgagatacaagcagatgatgaggagatgatggatcagcttcttagacagggctttctccctctgaatacacctgtggagaaaatagagagaagcaggagaagtggcaggcgtcattcggtatcgacgcggagaatggtggccctgtatgactacgaccccagagaaagctcgcccaacgtcgatgtcgaggccgaacttacattttgcacaggagatattattacagtttttggtgaaattgatgaagatggattttattatggggagctgaatgggcagaaaggccttgtgccctcaaacttcttggaagaagtgcctgatgacgtagaagtctatctttctgatgctccatcccactactctcaagatacgccaatgcgctcaaaggcaaaaaggaagaagagtgttcatttcacaccttaatcaggcaatgtagccttcacgtaagtgagcaactgaagataccgataaagataccaacttaagctaccttaaccgggccagtgtggtagacttaaggcttcattgtggggttaaaaaaaaaaaaagatacaaagaaatatgtctcaaaaaactattggacctaaataattagaatattacttggtctcagttgtaaagcaactgaatttatagtgaagcaaatcatctttaataatcatttcctactatttgcattaagaatatttgaaaggccaacattgggaacatatttcttaacaagctaactgtgtgtttacatagagagagctgcatattgcattgttagccactcttggaaaaagcacaacctaacaaacatgtttactataggaagctttactttagaaacttaacccaaggtcaagcagatgagtagtgaacacaggtgatcgagtgttggctctgaacactccaaacactggctcgagtggccagaacgtgttttccttaagtaaccctgcctctaccttacgagagagctatgctcctcctcaaagcacaatcatcctgtgacagaagttgctgcaacacgcgtttgttgttggtataccaatgcaatactaagttgatgaagcacgcagctcaaatgatcacattagatggaatagatggtatcttcaggtgtactttgggatgctttactaggtgttttccattagaattagaccttgattttaaatccaagcaagcttgaagccccttggcttacagcatttgcctgctgaatactaaacactcacatggcaagagttgctctggagaggtagggccagaggaatgctgctgcactgccaactcaggcacatgcttagctgtaaagggaagcgaggtgaagtcgtcctgcagcgtattagagtaaaagtctacccctctgaagcactattaagcgcttaacgtatatttaaatactaccatgtgctatctactgaggaagattcatgttcaattatttggaaataatgcaagcatccactaagggcctttaagctttctttgattataattaaggttcattttagtttttttttttctttcaaccagtgtgccatctccaatatttctatagtataccaaccaccccaggaatgcactttaacaatatcaggattttatataaccaaatagtttcaaatacaacaaaattccctttatgaactttcgctttttaagactactgatgggtactcggccaactttactatcaacctaatttcagatcatgtctcccctgcccttagtcttcatttatgaagtgaattattacctgccttagctttgccaaagcaacggccaccccgcactccctcgagacagagaaacggaacccacacatttatgtctggggcctctctctggcgtgctgtgggagaggacctttgcttctcatggcatacttcaacaactgaaagaacaaatgaacccccctgacctttcctggtgggaaacggggacagtacgatgttaccaagtgaattctgttgttggcgctcacacactcaataaactgtaacactgtacctactaggttcctcctgagggttcaggtacagcaaggagagctccatcccccacagtccatctccattcggggtcacctacgtcatctatgggttctggtagtcctgggagaggcagggaaatgtcctcgaaaaagaaaaaggggctgctttccaaaggcaagaaactgctgaaaaagctgggtgcagtgaaatgattcatgtgcttccggacaactgccaaatctatgtaattttctttaattccaaactagggctttcatgactcaagtacttcctaaaaaaacccaatcttctcccctgacaccagtagagaaatgcacttttgcactaccaaccactttaaaccaaccacgagaacaaagaggagcggttgctctctgtcaccgctggcagtctgctctcattgtccaagctctgatttgggaggtgggaggggacgtcttattaacaaacgggggcgcatagctatcacctgtagctccctccctacctgtaattccagtctttgtgcatttgtcatctgcccttaaaggaatgattttcaacctttctcccttctcaaaatgcttgcctcataatgcataactttcactttgactctggtcttgaaattcctagtttaattcgccttgatgttctgccttataaatgcacaatgatttgtactgtctaataaaaacagtgtatactttgtatgtgtcgtgcattcagtggtcttcatcctgacacagtggtttgagatcaagttgtacaggctgtgcattttaagatactagtttcagtctttcaaagccagccaggctacacacagaaaatgtttactcaatcattcaaaaaagagaaaaggagagaaagtaactttgtttggtaaagcaccagtactccaaccttccagaaagccgattatcttcattgcttttaatgttctattctgtggcatatggttttctgttactttcgttgtcaaaatgccatacccaaatacacagcaatgaatggcacacaagtaatccacataatgcataagccacaccaaaaccagactcaatttaaatctgctccaaatgagtccatacccatcttcatcattggcatttgaacaaaagacttacttacaaagttgctggcagatgtatttgatggttactcttttgtaattcttgtccacttgtaaattgtttttactctttatacatacttttcagactgcctttcttttgtaatttatggacggtttataaatgaatgacaaagctttccccattgtgtcttcaaaaacgctattataaattgtaatataatagtatgtggtagatttattattaaaggaaatccatgtgtggttaagctctgtgtgggtgtgtgcatgtgcacagttagtgtaaaatattttctagaaataaaatttgttattttat

SEQ ID NO: 333715 - protein, 645 aa, Artificial Sequence
  derived and/or modified sequence
MNGLATSLGKGQESAIGGSSAIGEYIRPLPQPGDRPEPLSAKPTFLSRSGSARCRSESDMENERNSNTSKQRYSGKVHLCVARYSYNPFDGPNENPEAELPLTAGKYLYVYGDMDEDGFYEGELLDGQRGLVPSNFVDFVQDNESRLASTLGNEQDQNFINHSGIGLEGEHILDLHSPTHIDAGITDNSAGTLDVNIDDIGEDIVPYPRKITLIKQLAKSVIVGWEPPAVPPGWGTVSSYNVLVDKETRMNLTLGSRTKALIEKLNMAACTYRISVQCVTSRGSSDELQCTLLVGKDVVVAPSHLRVDNITQISAQLSWLPTNSNYSHVIFLNEEEFDIVKAARYKYQFFNLRPNMAYKVKVLAKPHQMPWQLPLEQREKKEAFVEFSTLPAGPPAPPQDVTVQAGVTPATIRVSWRPPVLTPTGLSNGANVTGYGVYAKGQRVAEVIFPTADSTAVELVRLRSLEAKGVTVRTLSAQGESVDSAVAAVPPELLVPPTPHPRPAPQSKPLASSGVPETKDEHLGPHARMDEAWEQSRAPGPVHGHMLEPPVGPGRRSPSPSRILPQPQGTPVSTTVAKAMAREAAQRVAESSRLEKRSVFLERSSAGQYAASDEEDAYDSPDFKRRGASVDDFLKGSELGKQMAS

SEQ ID NO: 333716 - protein, 645 aa, Artificial Sequence
  derived and/or modified sequence
MNGLATSLGKGQESAIGGSSAIGEYIRPLPQPGDRPEPLSAKPTFLSRSGSARCRSESDMENERNSNTSKQRYSGKVHLCVARYSYNPFDGPNENPEAELPLTAGKYLYVYGDMDEDGFYEGELLDGQRGLVPSNFVDFVQDNESRLASTLGNEQDQNFINHSGIGLEGEHILDLHSPTHIDAGITDNSAGTLDVNIDDIGEDIVPYPRKITLIKQLAKSVIVGWEPPAVPPGWGTVSSYNVLVDKETRMNLTLGSRTKALIEKLNMAACTYRISVQCVTSRGSSDELQCTLLVGKDVVVAPSHLRVDNITQISAQLSWLPTNSNYSHVIFLNEEEFDIVKAARYKYQFFNLRPNMAYKVKVLAKPHQMPWQLPLEQREKKEAFVEFSTLPAGPPAPPQDVTVQAGVTPATIRVSWRPPVLTPTGLSNGANVTGYGVYAKGQRVAEVIFPTADSTAVELVRLRSLEAKGVTVRTLSAQGESVDSAVAAVPPELLVPPTPHPRPAPQSKPLASSGVPETKDEHLGPHARMDEAWEQSRAPGPVHGHMLEPPVGPGRRSPSPSRILPQPQGTPVSTTVAKAMAREAAQRVAESSRLEKRSVFLERSSAGQYAASDEEDAYDSPDFKRRGASVDDFLKGSELGKQMVS

SEQ ID NO: 333717 - DNA, 1938 bp, Artificial Sequence
  derived and/or modified sequence
atgaacgggttagcaaccagtcttgggaagggccaagagagcgcaattggggggtcatctgccatcggagagtacattcggcctctgccccagcccggggacaggcccgagccccttagcgccaagccaacctttttgagcaggtcgggatcggcaagatgcaggtcagagtctgacatggaaaacgaaagaaacagcaacacatcgaaacagcgctactctggcaaagtgcatttgtgtgttgccagatactcctacaatcctttcgacggccccaatgagaatccagaagcagagcttccccttaccgcgggtaagtacttgtatgtatatggtgacatggacgaggatggcttctacgagggagaactgctggatggccagcggggtctggtgccttctaattttgtggacttcgtgcaggataacgaaagcagactagcctctactttaggaaatgagcaggaccaaaatttcattaatcattcaggtatcggtctggaaggggagcatattttggacctgcacagcccaacacacatcgacgctggaatcaccgataactccgctggtaccctcgacgtcaacatcgatgatatcggagaggatatcgtaccctacccccgcaagattactttgatcaagcaattagccaaaagtgtcattgttggctgggagccccctgccgtgcccccgggttggggaacagtaagttcctacaacgtcctcgtggacaaggagacccgaatgaatctcaccctgggaagtcgcacaaaggcactgatcgaaaaactgaatatggcagcctgtacctatcgcatctcagtgcagtgtgtaacaagccggggcagtagtgacgagttacagtgcacactgcttgtaggcaaggacgtcgtggtggccccaagccatttacgggtagataatataacccagatttctgcccagttaagttggctgcccactaattcaaactattctcacgtaatctttctgaatgaagaagagttcgacatcgttaaggccgctaggtataagtaccagtttttcaatctacgccctaacatggcctataaagtgaaggtgctcgcgaagccccaccagatgccttggcagctccccctcgaacagagggagaaaaaggaagcctttgtggaattttcaacactccctgcgggaccaccagctccgccgcaagatgtaactgtgcaggccggagtgactccagccacaattagggtaagctggaggcctcccgttctgactccaaccggtctctcaaacggtgcgaacgtgacgggttacggagtgtatgcgaagggccagcgcgtggcagaggtgatcttcccaacagcagactcaactgctgtcgagctggtgcgcctgcgatcattagaggcaaagggagtgaccgtgagaaccttatccgctcagggtgagtctgtggactccgcagttgcggctgtgcctcctgagcttttggtcccacccacgcctcaccctcgtcccgcgccccagtccaaaccactcgcttccagcggagtgcccgaaactaaggatgaacacctggggccacatgctagaatggacgaagcttgggagcaaagccgagctcctggcccggtccatggccacatgctggagcctccggtgggacctggccgccggtccccgtccccctcccggatcctgccccaaccacagggcacaccagtgtcgacaactgtggccaaggcgatggccagagaagccgctcagcgcgtggctgaaagcagtcgtctagagaagcgttctgtgtttttagagagatcctcagccggccagtacgcagcttcggacgaagaagacgcttatgatagccctgattttaagagacggggcgcttccgttgatgatttcctgaaaggttccgagcttggaaagcagatggcctcttag

SEQ ID NO: 333718 - DNA, 1938 bp, Artificial Sequence
  derived and/or modified sequence
atgaatggattagcaacatcactgggtaaaggccaggaaagcgcaatcggggggagttcagccataggagaatacattcgcccactacctcagcctggagaccgaccagagcctctcagcgctaaacctacattcctatcaagatccgggagcgcacggtgccgctccgagtccgacatggaaaacgagcggaactccaacacctcaaaacagcggtacagcgggaaagtgcatttgtgcgtggcccgctatagctacaatcccttcgacggccctaacgagaaccctgaagccgaactgccactgactgccggaaagtacctgtacgtgtacggggatatggatgaggatgggttctacgagggagaacttctcgacggacagagaggacttgttcccagtaatttcgtggacttcgttcaggacaacgagagccgcctcgcctcgacgttgggcaacgaacaggatcagaatttcatcaaccatagcgggattggactcgagggagagcatattctcgatctgcattcacccacacacattgacgccgggatcacagacaactctgccggcacattagacgtcaatatagacgatatcggggaagacatcgtgccatatccgaggaaaattactcttataaaacaactggccaagtcagtgatcgtggggtgggagccacctgccgttccacctggatggggtactgtgagctcgtacaacgttctggtagacaaagagacacgaatgaaccttactctgggtagcaggaccaaagccctaattgaaaagcttaacatggcagcttgtacctacagaatctcggtccagtgcgtgaccagtagaggttcaagcgatgaactgcaatgcaccttactcgtgggcaaagatgttgtcgttgccccatcccacctgcgggtagataatatcacccagatctctgcccagctatcctggttgcctacaaattctaattattctcatgtcatcttcttaaacgaggaagagttcgacatcgtgaaagctgcacgctacaaatatcagttttttaacctcaggcctaacatggcttacaaagtgaaggttttggctaaaccacatcaaatgccatggcagttgcccctggagcagcgggaaaaaaaagaggcttttgtggagttctctactttgccagctggtccacccgcccctcctcaggacgtcaccgttcaggcgggggttacacccgccaccatacgagtctcctggagacctcctgttctgacccccaccggcctgagcaacggcgccaacgtgaccggctatggcgtgtacgccaaaggccagcgtgtggcagaggttatctttccaactgcagatagtacagccgttgagcttgtgaggctgagaagcttggaagccaagggcgtgactgtgcggaccctttctgctcagggcgaatccgtcgacagcgcagtcgctgccgtgcctcctgaactcctggtcccacccacccctcatccaaggcccgccccccagtcaaaacccctggcgtcctccggcgtgcctgagacaaaggacgaacacttgggacctcacgcacgcatggacgaagcctgggagcagtcgagagcgccggggccagtgcacgggcacatgttggagcccccagtggggccaggccgccggtctcccagtccaagcagaatcctgccccagccccaggggactcctgtgtccacaactgtggccaaggcaatggcccgagaagccgcccagcgggttgcagagtcttcgcgtctggagaagagaagcgtattcctcgaaaggtcgtccgccgggcagtacgcagcaagcgacgaagaggacgcgtatgacagtcctgacttcaaaagacggggcgccagtgtggacgactttctaaaaggttcagaattgggaaagcagatggtgagctag

SEQ ID NO: 333719 - DNA, 1938 bp, Artificial Sequence
  derived and/or modified sequence
atgaatggcctggccaccagcctgggcaagggccaggagagcgccatcggcggcagcagcgccatcggggagtacatccggcccctgccccagcccggggacaggcctgagcccctgagcgccaagcccaccttcctgagccgcagcggcagcgcccgctgccgctctgagagtgacatggagaatgaaagaaacagcaacaccagcaagcagcgctacagcggcaaggtgcacctgtgtgtggcccgctacagctacaacccctttgatggccccaatgaaaatcctgaggccgagctgcccctgacagctgggaagtacctgtatgtgtatggagacatggatgaagatggcttctatgaaggagagctgctggatggccagaggggcctggtgcccagcaactttgtggactttgtgcaggacaatgaaagccggctggccagcaccctgggcaatgagcaggaccagaacttcatcaaccacagcggcatcggcctggagggggagcacatcctggacctgcacagccccacccacattgatgctggcatcacagacaacagcgctggcaccctggatgtgaacattgatgacatcggggaggacatcgtgccctaccccaggaagatcaccctcatcaagcagctggccaagagcgtcatcgtgggctgggagcccccagctgtgcccccaggctggggcaccgtgtcctcctacaacgtgctggtggacaaggagaccaggatgaacctgaccctgggcagcaggaccaaggccctgattgagaagctgaacatggccgcctgcacctaccgcatctctgtgcagtgtgtgaccagccggggcagcagtgatgagctgcagtgcaccctgctggtgggcaaggatgtggtggtggcccccagccacctgcgggtggacaacatcacccagatcagcgcccagctgtcctggctgcccaccaacagcaactacagccacgtgatcttcctgaatgaggaggagtttgatattgtgaaggccgcccgctacaagtaccagttcttcaacctgcggcccaacatggcctacaaggtgaaggtgctggccaagccccaccagatgccctggcagctgcccctggagcagcgggagaagaaggaggcctttgtggagttcagcaccctgcctgctggccccccagccccaccccaggatgtgacagtgcaggccggcgtgaccccagccaccatccgggtgtcctggaggcctcctgtgctgacccccaccggcctgagcaatggagccaacgtgacaggctatggagtgtatgccaagggccagagggtggccgaggtgatcttccccacagctgacagcacagctgtggagctggtgcggctgcggagcctggaggccaagggcgtgacagtgaggaccctgagcgcccagggcgagagcgtggacagcgctgtggccgctgtgcccccagagctgctggtgccccccaccccccaccccaggcctgccccccagagcaagcccctggccagcagtggagtgcctgagaccaaggatgagcacctgggcccccacgccaggatggatgaggcctgggagcagagccgggcccctggccctgtgcacggccacatgctggagccccctgtgggccctggaagaagaagccccagccccagccgcatcctgccccagccccagggcacccctgtgtccaccaccgtggccaaggccatggcccgggaggccgcccagagggtggccgagagcagccggctggagaagaggagcgtcttcctggagaggagcagcgctggccagtatgctgccagtgatgaagaagatgcctatgacagcccagacttcaagagaagaggagcctctgtggatgacttcctgaagggcagcgagctgggcaagcagatggccagctag

SEQ ID NO: 333720 - DNA, 1938 bp, Artificial Sequence
  derived and/or modified sequence
atgaatggcctggccaccagcctgggcaagggccaggagagcgccatcggcggcagcagcgccatcggggagtacatccggcccctgccccagcccggggacaggcctgagcccctgagcgccaagcccaccttcctgagccgcagcggcagcgcccgctgccgctctgagagtgacatggagaatgaaagaaacagcaacaccagcaagcagcgctacagcggcaaggtgcacctgtgtgtggcccgctacagctacaacccctttgatggccccaatgaaaatcctgaggccgagctgcccctgacagctgggaagtacctgtatgtgtatggagacatggatgaagatggcttctatgaaggagagctgctggatggccagaggggcctggtgcccagcaactttgtggactttgtgcaggacaatgaaagccggctggccagcaccctgggcaatgagcaggaccagaacttcatcaaccacagcggcatcggcctggagggggagcacatcctggacctgcacagccccacccacattgatgctggcatcacagacaacagcgctggcaccctggatgtgaacattgatgacatcggggaggacatcgtgccctaccccaggaagatcaccctcatcaagcagctggccaagagcgtcatcgtgggctgggagcccccagctgtgcccccaggctggggcaccgtgtcctcctacaacgtgctggtggacaaggagaccaggatgaacctgaccctgggcagcaggaccaaggccctgattgagaagctgaacatggccgcctgcacctaccgcatctctgtgcagtgtgtgaccagccggggcagcagtgatgagctgcagtgcaccctgctggtgggcaaggatgtggtggtggcccccagccacctgcgggtggacaacatcacccagatcagcgcccagctgtcctggctgcccaccaacagcaactacagccacgtgatcttcctgaatgaggaggagtttgatattgtgaaggccgcccgctacaagtaccagttcttcaacctgcggcccaacatggcctacaaggtgaaggtgctggccaagccccaccagatgccctggcagctgcccctggagcagcgggagaagaaggaggcctttgtggagttcagcaccctgcctgctggccccccagccccaccccaggatgtgacagtgcaggccggcgtgaccccagccaccatccgggtgtcctggaggcctcctgtgctgacccccaccggcctgagcaatggagccaacgtgacaggctatggagtgtatgccaagggccagagggtggccgaggtgatcttccccacagctgacagcacagctgtggagctggtgcggctgcggagcctggaggccaagggcgtgacagtgaggaccctgagcgcccagggcgagagcgtggacagcgctgtggccgctgtgcccccagagctgctggtgccccccaccccccaccccaggcctgccccccagagcaagcccctggccagcagtggagtgcctgagaccaaggatgagcacctgggcccccacgccaggatggatgaggcctgggagcagagccgggcccctggccctgtgcacggccacatgctggagccccctgtgggccctggaagaagaagccccagccccagccgcatcctgccccagccccagggcacccctgtgtccaccaccgtggccaaggccatggcccgggaggccgcccagagggtggccgagagcagccggctggagaagaggagcgtcttcctggagaggagcagcgctggccagtatgctgccagtgatgaagaagatgcctatgacagcccagacttcaagagaagaggagcctctgtggatgacttcctgaagggcagcgagctgggcaagcagatggtgtcctag

SEQ ID NO: 333721 - DNA, 1938 bp, Artificial Sequence
  derived and/or modified sequence
atgaacggcctggccaccagcctgggcaagggccaggagagcgccatcgggggaagctctgccatcggggaatacatcagacctctcccgcagccaggtgacagaccggaacctctgagtgccaagcccacattcctttcccggagcgggtcagcaagatgtcggtccgagagtgatatggaaaacgaaagaaattcaaacaccagcaaacagcgatacagtgggaaagtgcacctgtgtgtcgcccgctattcctacaacccatttgacggacctaatgagaaccccgaggcagaactgcccttgactgccggcaaatatctgtacgtttacggtgacatggatgaagacggcttctacgagggggaacttttggacggacagcgaggactcgttccttccaacttcgtcgactttgtgcaagataatgagagtcgattggcttccacactgggcaacgagcaggaccagaatttcattaatcactctggcatcggcttagagggagagcacattctcgacttgcatagtcccacgcacatcgatgccggcataactgataactcggccgggacgctggatgtgaacatcgacgacatcggcgaagatattgtcccttatcctcggaaaatcactctgattaaacagctagccaagtccgtgattgtgggctgggagccgcccgcagtgcctcccggttgggggaccgttagtagctacaatgtactggtggataaagagacaaggatgaacttgactttggggtcacggaccaaagcgttaattgagaagcttaatatggccgcgtgtacgtacagaatctccgtgcagtgtgtcacgtcgcgaggttcaagtgatgagctgcaatgcacccttttagtaggaaaggacgtggtggtcgccccctcccatctgagggtggacaacattacccagattagcgcacagctgtcctggttgccgacaaacagcaattattctcacgtcatcttcctgaacgaagaagagttcgatatcgtgaaagccgcacgttacaaatatcagttctttaatctgcggccaaatatggcatacaaagttaaggttttggctaaacctcaccaaatgccatggcagctgccccttgaacaacgcgagaagaaggaggcattcgttgagttttcgacactcccggccggaccgcctgcaccaccccaagacgtcaccgtccaggctggcgtgaccccagcgacaattcgggtgtcctggaggcctcccgtgctaactcctacggggctaagcaatggagccaatgtgactggctatggcgtctacgctaaaggacagagggtcgccgaagtgattttccctacggccgactctactgccgttgagttggtcaggttacggagtctcgaagccaagggtgttacggtacggacactgagtgcccagggtgagtccgtggattccgcagtcgctgctgtgcctccggagctgctcgtcccacctactccccacccacggcccgcaccccagtctaagccactggcctcctccggcgtgccagagactaaggacgagcacctgggccctcacgctcggatggatgaggcctgggaacagtcaagggctcctggaccagtccacggccacatgctggagccccccgttgggccaggtcgacgttccccatctcctagtcggattctccctcagccacagggtacaccagtttctacgactgtcgccaaagctatggctagagaggctgcacagcgcgtcgcggagagcagccgcctggagaaaagatctgtgttcctcgagcggagcagtgctggacagtacgcagcttccgatgaggaagatgcatacgattcccccgacttcaagcgacgcggcgcttctgtggacgatttcctcaaggggtccgaacttggaaagcagatggcttcatag

SEQ ID NO: 333722 - DNA, 1938 bp, Artificial Sequence
  derived and/or modified sequence
atgaacggcctggccaccagcctgggcaagggccaggagagcgccatcgggggctcaagcgcaatcggtgagtatatcagaccattaccccagccaggagaccgacctgaacctttgtctgccaagccaactttcctgagcaggagcggctcagctcggtgtcgctcagagagcgacatggaaaacgaaaggaacagcaacacaagcaagcaacgctactcaggaaaagttcatctttgtgtggcaagatattcttataatcctttcgatggtcctaatgaaaaccctgaggctgagctcccattgaccgcaggaaaatatttgtatgtgtacggagatatggacgaagacggattctatgaaggagagctgctggatggccagcgtggattggtaccaagtaattttgtcgattttgtacaggataacgaatccagactggcctccactctgggcaatgaacaggaccagaacttcatcaaccactcagggatcggcctggaaggtgagcacatactggacttgcattctccaacacatattgatgcaggtatcactgataattcagccggcactctcgatgtaaacatcgacgacatcggcgaagacatcgttccataccctagaaagatcacactgatcaaacagctcgccaaatctgttatagtgggctgggagccacctgccgtccctccagggtggggcaccgtgtcctcatacaacgtgctggtagataaggagacaaggatgaacttgactcttgggagtcgaactaaggccctgatcgagaaactgaatatggcagcttgtacttatcggatatctgtgcagtgcgtcacttccagaggctcaagcgacgagttgcaatgtaccttgttagtcggaaaagatgttgtagtggctccctcgcacctcagggtcgacaacattacgcaaatcagcgcccagctgtcttggctccccacgaacagcaattatagtcatgtaatttttctgaatgaggaggaatttgatattgttaaggcagctcggtacaagtatcagttctttaatctacgcccgaacatggcatacaaagtgaaggtgctcgcaaagcctcaccaaatgccctggcagcttcccctggagcagagagaaaagaaggaggcattcgttgaattctccacactgcctgccggccctccagcccctccacaggatgtgacggttcaggcgggtgtcactccagctacaatccgcgtgtcatggcgacccccggtcctaactcctactggattgtcgaatggcgccaatgtgaccggctacggtgtctatgcaaagggccagagggttgccgaggtgatatttcctacagccgactcgaccgcagtagagctggtgcggttgaggtccctggaggcaaagggcgtgacagtcaggaccttgtccgcgcaaggcgaatccgtcgacagcgcagtagccgctgtgccaccggaactcctagtgccaccaacaccacatcctcgccctgcgccacagtccaagccactggcaagttccggcgttcccgagaccaaagacgagcatctgggtccacacgctaggatggatgaagcctgggagcagagccgtgccccaggtccagtgcacgggcacatgctcgagccacctgtcgggcctggaaggcgctccccttcccctagccggattctgccacagccacaggggacgcccgtaagtaccactgtggccaaggctatggcccgagaggcggcacagcgggtggcagagagcagtcgactggaaaagcgttccgttttcctcgagaggtcctccgcaggccaatatgctgcctccgatgaagaggacgcatacgactcacccgatttcaaacgtaggggcgccagcgtagatgacttcctgaagggatctgaacttgggaagcagatggtgtcctag

SEQ ID NO: 333723 - DNA, 1938 bp, Artificial Sequence
  derived and/or modified sequence
atgaatgggttggcgacctcactgggaaaaggccaggagtcagcgatagggggatcaagcgccattggggaatacatcagaccactgccacaacccggtgatcggccagaaccgctttcagcgaagcctaccttcctgagccgaagcggatctgcccgatgtcggagcgagagcgacatggagaacgagcggaactctaatacgagcaagcagagatatagcggaaaggtgcacctctgcgtagcccgttattcctacaacccatttgacgggcctaatgagaatcccgaagcagagctgcccctgaccgctgggaaatatctttatgtgtatggtgatatggacgaagacgggttttatgagggggagctgctcgatggacagcgcggactggtgccttctaacttcgtggatttcgtgcaggataacgagtcacgcttagcctccacattaggaaatgagcaggatcagaactttataaaccattccggcatcggtctggagggcgagcacatcctggatttgcacagcccgacacacatcgatgccggaattactgacaactcggccggtacattggatgtgaatatagacgatataggggaagacatagtgccataccctagaaagatcaccctgattaagcaattagccaagtcagtgatcgtcgggtgggagcctcccgctgtcccaccagggtggggaaccgtgtctagctataatgtgctagtggataaggagacccgtatgaacctgaccctcgggtcccgtacgaaggcactcatcgagaaacttaatatggccgcttgtacataccgaatttccgtgcagtgcgtcacttcccggggatcctccgacgagctacagtgtacactgctagtcggtaaggacgtggtggtcgcccctagtcatctacgtgtggataacattacccaaatctccgcacaattatcctggctgcctaccaattctaactactcgcacgtaattttcttaaacgaagaggagttcgatatcgtgaaggcggctcgctacaaatatcagttctttaatctgaggcccaacatggcttataaggtgaaggtgctggctaagccgcatcagatgccgtggcagctgcccctggagcagcgagagaagaaagaagcctttgtggagttttctacactgcctgctggtcctcctgcgccacctcaggacgtcactgtacaggctggtgttacacccgctacgatccgggtctcctggcgtcctcccgtgttgaccccaactggccttagtaacggcgctaacgtcacaggctacggggtgtacgccaaaggtcagcgtgtcgcagaggtgatcttccctactgcagattctaccgccgtagagttagttagactgagaagtcttgaggccaagggcgtgacagtgcggacactgtctgcgcagggcgagtctgtggatagtgccgtggcggctgtcccccctgagctcctggtgccacctacaccccatccacgacctgctccgcaaagcaaaccattagcaagctctggtgttcccgaaaccaaagacgagcaccttggaccacacgcgaggatggacgaggcctgggaacagtctcgggcaccaggtcctgttcatggccatatgctggagccacccgtcggcccagggagacgatctccctcacccagtaggatcctgccccaaccccagggcacgcccgtgtctactactgtggccaaagcaatggccagagaagctgcccagcgggttgccgaaagtagccgactggaaaaacgaagtgtttttctcgagcgctcaagtgccggacagtacgccgcatccgacgaagaagacgcctacgactctcccgacttcaaacgcaggggggcaagtgtcgatgattttttgaaaggatccgagctgggaaaacaaatggcttcttag

SEQ ID NO: 333724 - DNA, 1938 bp, Artificial Sequence
  derived and/or modified sequence
atgaatgggcttgccaccagtctgggcaaggggcaggagtctgcgattggcggatcgtctgctatcggcgagtatatccgcccactcccccagcccggagataggcctgaacctctctccgccaaaccgacctttctctcaaggtccggatctgcacggtgtcgctcggagagcgatatggaaaacgagcgaaacagcaatacaagtaagcagagatacagcggtaaggtacacctctgcgtggccagatattcttacaatccctttgacggtcccaatgaaaaccccgaagcagaactaccgctcaccgctgggaagtatctttatgtatatggagacatggatgaggatggattctacgaaggtgagctgctcgatggacagcgcggacttgtgcccagcaactttgtagattttgtccaggacaatgagtcccgattagcgtctactctgggcaacgagcaggatcagaatttcattaaccatagtggaataggattggagggcgagcatatcttggatctgcactctcctactcacatcgacgcgggaattacggacaattcagcaggaaccctggacgttaatatcgatgatattggtgaggacatcgtcccatatccaaggaagatcacacttatcaaacaactcgcaaaatctgtgatcgtgggctgggagccccctgcggtgccccctggctggggtaccgtgagttcgtacaatgtgctggtggataaggaaactagaatgaacctcacactgggtagccgaaccaaagcactgatcgagaaactgaatatggctgcctgcacctaccggataagcgtgcaatgcgtgacatctcggggatcctctgacgaactgcagtgcacactgctcgttggcaaggacgtggttgttgctcccagccatctcagagtcgataatatcacccagataagcgctcaactctcctggctccctacaaattcaaactactcacatgtgatcttcctcaacgaggaagagtttgatatcgttaaggccgcacggtataaataccaatttttcaatctgagacccaacatggcctacaaggtgaaagtcctggccaaacctcatcagatgccttggcagctgcctctggagcagcgtgagaagaaggaagccttcgttgaatttagtacgctccccgcaggtcctccggctccaccccaggacgtgacagtacaggccggagtgacacctgcaaccatcagggtgagctggcgccctccagtgctgacaccaacggggctttcaaatggcgctaacgtgactggctacggggtgtacgccaaagggcaacgagtggcggaagtaatttttccgacagctgactcaactgcagttgaacttgttcgcctcagatccctggaggcgaagggagtgacagtgagaactctcagcgcccaaggcgagtctgtagatagcgctgtagctgccgtgccaccagaactcctggtgcctcccaccccacatccacgccctgcaccccagagtaagcccctggcctctagcggcgtccctgagacgaaggacgaacatctcggacctcatgctcggatggatgaggcttgggaacaatcacgggctcctgggcctgtgcacggccacatgctcgagcctcctgtggggccagggcgacgaagtccctccccatcgagaatactgccccaaccgcagggtaccccggtgagtacaaccgtggcgaaagcgatggcgagagaggctgcacagcgcgtagcagagtcttcccgattggagaagaggtccgtgtttctcgagaggagttccgctggacagtacgcagcctcagatgaggaggacgcatatgactcacccgacttcaaacgtcgaggcgcatccgtcgatgatttccttaagggttcagagttgggaaagcagatggtttcctag

SEQ ID NO: 333725 - DNA, 2375 bp, Artificial Sequence
  derived and/or modified sequence
atgcaggccttcccacaagggcccggcagcatgacaaggtgaaggcagagtatgtgcatctcaaccatccgctcaccctcgtgaccagagagcgcgatttggccgtgaaggagaaacaccagctccaagccaagctggagaacctagaacaggtcctgaagcatatgcgagaggcggctgaacggcggcagcagctgcagttggagcatgaccaggccctggctgttctcagtgccaagcagcaggaaattgaccttctgcagaagtccaaggttcgagagctggaagagaaatgccggactcaaagtgagcagttcaacctgctgtcccgggacctggagaagttccggcagcacgctggcaagattgacctgctgggtggcagcgcggtggcccccctggacatctccacggcccccagcaagcctttcccacagttcatgaatggcctagccacctccctcggcaaaggtcaggagagcgctattggaggcagctctgcgatcggtgaatatatccggccccttccgcagcctggtgacaggccggagcctctgtccgccaagcccaccttcctgtcgagatccggtagcgcaagatgcagatctgagtcagacatggagaatgaacggaattccaatacctccaagcagagatactcggggaaggtccacctctgtgttgcccgctatagttacaaccccttcgatggaccgaacgagaaccccgaagctgagctgcccctcacggcgggaaaatacctctacgtctatggagacatggatgaggatgggttctatgaaggagagctcctcgatggccagaggggtctggtgccctccaacttcgtggactttgtgcaggacaacgagtcgcggttggcaagcacgctggggaacgagcaggatcagaacttcatcaaccattccggcatcggcctggagggagagcacatcctggacctccactccccaacccacatagatgcgggcatcaccgacaacagtgccgggaccctggacgtgaacatcgacgacatcggagaagacatcgtgccttaccctagaaaaatcaccctcatcaaacaactcgccaaaagtgttattgtgggctgggagcccccggcggtgccaccaggatggggaacggtgagcagctacaacgtcctggtggacaaggagacacgcatgaacctcacgctggggagcagaactaaagccctcatcgagaagctcaacatggcagcctgcacctaccgcatctccgtgcagtgcgtcaccagcaggggcagctcggatgagctgcagtgcacgctgctggtgggcaaggacgtggtggtggccccctcccacctgcgggtggacaacatcacgcagatctccgcccagctctcctggctacccaccaacagcaactacagccacgtcatcttcctcaacgaggaggagttcgacatcgtcaaggccgccaggtacaagtaccagttcttcaatctcaggcccaacatggcctataaggtgaaggttctggccaaaccccaccagatgccgtggcagctcccgctggagcaaagggagaagaaggaggcctttgtggagttctccacgttgcctgcaggacccccagcacccccacaagatgttaccgtccaggctggggtgacccccgccaccatccgggtctcctggagaccacctgtgctgacgcccaccgggctgtccaatggcgcaaacgttaccggctacggcgtgtatgccaaagggcagagggtggctgaagtcatcttccccacggcagacagcacggccgtggagcttgtgcggctgcggagcctggaggccaagggcgtgaccgtgcggaccctctccgcccagggcgagtccgtggactctgcagttgctgccgttccccccgagctcctggtgcctcctaccccccacccgagacctgcaccccaatcaaagccattagcaagttctggagtccccgaaaccaaagacgagcacctgggtccccacgccaggatggatgaggcctgggagcagagccgtgcacctggccctgtgcatgggcacatgctggagccgcccgtgggccccggaaggcggtcgccctcacccagccgcatcctgccacagccacagggcaccccggtgtccaccaccgtcgccaaggccatggcccgggaggccgcgcagagggtggccgagagcagcaggttagagaaaaggagcgtcttcctagagagaagcagcgcggggcagtacgccgcctcagacgaggaggacgcctatgactctccagacttcaagaggaggggcgcctcggtggacgacttcctgaaaggctctgaacttggcaagcagatggcgtct

SEQ ID NO: 333726 - DNA, 3868 bp, Artificial Sequence
  derived and/or modified sequence
gtacactgcagttgtctccgaggtgaacctccggagccttggcacagctcgcttctaaagcttggaaatgacccgccacacctgaagcctgcaggtgctgaggccacattcgatcagacccaagctttgggagaccgctggggaaatttcccacttcctctcctgagaccaggaactcagcagagaaactttgtggaaaatgaactgaaggatgccacccagggagagtatctcctgagatcccatcatgcaggccttcccacaagggcccggcagcatgacaaggtgaaggcagagtatgtgcatctcaaccatccgctcaccctcgtgaccagagagcgcgatttggccgtgaaggagaaacaccagctccaagccaagctggagaacctagaacaggtcctgaagcatatgcgagaggcggctgaacggcggcagcagctgcagttggagcatgaccaggccctggctgttctcagtgccaagcagcaggaaattgaccttctgcagaagcctcagaaaaccaacctccagtgtccgcactttaggaagtgtcccatgctttcacagttgacgatgacgttcgttagcactcttggtttcaagcgacagaaaacccaaacaggaaattgtttttgtgcccatcactgaaaatgtggcttcagacatggctagatccagggctcaaatctgctggcctcagacccagtagaatccaaggcctccccgacatcaccaggacttggctgctctctgccctcctctggatcagcttcagccttggtttccctgtggagacccccagccactccagccctgaccctcctggtggcaaagtggctgcagcctcacctcctcccaagccaaagtccaatagaaaggggcttccctctcccgcagcattctcaggcagaggcccattgccctccgtaggccccacaccacccaggtcaccagtcgctgagggttcagactgtgcttggcacaggggaggtccagaccccagccagtccagaggttcttcccaggagaggagctcctgacgctggaggaagaggcctgaggaacaggcctgttacccagaggatccgctatccaggaggctcaggttgaggctaagaaggagcatgaaggcgcagtgcggctgctagagtccaaggttcgagagctggaagagaaatgccggactcaaagtgagcagttcaacctgctgtcccgggacctggagaagttccggcagcacgctggcaagattgacctgctgggtggcagcgcggtggcccccctggacatctccacggcccccagcaagcctttcccacagttcatgaatggcctagccacctccctcggcaaaggtcaggagagcgctattggaggcagctctgcgatcggtgaatatatccggccccttccgcagcctggtgacaggccggagcctctgtccgccaagcccaccttcctgtcgagatccggtagcgcaagatgcagatctgagtcagacatggagaatgaacggaattccaatacctccaagcagagatactcggggaaggtccacctctgtgttgcccgctatagttacaaccccttcgatggaccgaacgagaaccccgaagctgagctgcccctcacggcgggaaaatacctctacgtctatggagacatggatgaggatgggttctatgaaggagagctcctcgatggccagaggggtctggtgccctccaacttcgtggactttgtgcaggacaacgagtcgcggttggcaagcacgctggggaacgagcaggatcagaacttcatcaaccattccggcatcggcctggagggagagcacatcctggacctccactccccaacccacatagatgcgggcatcaccgacaacagtgccgggaccctggacgtgaacatcgacgacatcggagaagacatcgtgccttaccctagaaaaatcaccctcatcaaacaactcgccaaaagtgttattgtgggctgggagcccccggcggtgccaccaggatggggaacggtgagcagctacaacgtcctggtggacaaggagacacgcatgaacctcacgctggggagcagaactaaagccctcatcgagaagctcaacatggcagcctgcacctaccgcatctccgtgcagtgcgtcaccagcaggggcagctcggatgagctgcagtgcacgctgctggtgggcaaggacgtggtggtggccccctcccacctgcgggtggacaacatcacgcagatctccgcccagctctcctggctacccaccaacagcaactacagccacgtcatcttcctcaacgaggaggagttcgacatcgtcaaggccgccaggtacaagtaccagttcttcaatctcaggcccaacatggcctataaggtgaaggttctggccaaaccccaccagatgccgtggcagctcccgctggagcaaagggagaagaaggaggcctttgtggagttctccacgttgcctgcaggacccccagcacccccacaagatgttaccgtccaggctggggtgacccccgccaccatccgggtctcctggagaccacctgtgctgacgcccaccgggctgtccaatggcgcaaacgttaccggctacggcgtgtatgccaaagggcagagggtggctgaagtcatcttccccacggcagacagcacggccgtggagcttgtgcggctgcggagcctggaggccaagggcgtgaccgtgcggaccctctccgcccagggcgagtccgtggactctgcagttgctgccgttccccccgagctcctggtgcctcctaccccccacccgagacctgcaccccaatcaaagccattagcaagttctggagtccccgaaaccaaagacgagcacctgggtccccacgccaggatggatgaggcctgggagcagagccgtgcacctggccctgtgcatgggcacatgctggagccgcccgtgggccccggaaggcggtcgccctcacccagccgcatcctgccacagccacagggcaccccggtgtccaccaccgtcgccaaggccatggcccgggaggccgcgcagagggtggccgagagcagcaggttagagaaaaggagcgtcttcctagagagaagcagcgcggggcagtacgccgcctcagacgaggaggacgcctatgactctccagacttcaagaggaggggcgcctcggtggacgacttcctgaaaggctctgaacttggcaagcagatggtctcctaacagagctggaattagattgaaccgaggcctgaagaagacctgtttccacgcctttccccatgtgccacgttctcctcacctatccaggagtgaatcatcaccttccctgcaatctgctcagattacaaacccggaggaaaggctggagcacttgttctctgggtgaaggacccatacccccactggtttttgagatcggcattcagcgctgtcttatggcagccacagccccaggtggccccagagcccttgacatgtggccacctggggctgagtgtgactgaggccctgaatttttacttctataaaattagttccagattagtttacattctaattagtttacatgtaaacagccacacgtggctggtggccaccagtgctgacgcccagctctggatgaccacacctgctacaagagatgacttttctagagaagagtagaaacacagcggcagaaacacagctctgcacttccgagggcctcccactccttctgatgagactgcagaggaagtctgtttggccaagcatgctattaacacgttttcctgcttgttttgttttttaacagagcaaacaggtctgtttctattaaaattt

SEQ ID NO: 333727 - DNA, 1938 bp, Artificial Sequence
  derived and/or modified sequence
atgaacggcctggccaccagcctgggcaagggccaggagagcgccatcggcggcagcagcgccatcggcgagtacatcagacccctgccccagcccggcgacagacccgagcccctgagcgccaagcccaccttcctgagcagaagcggcagcgccagatgcagaagcgagagcgacatggagaacgagagaaacagcaacaccagcaagcagagatacagcggcaaggtgcacctgtgcgtggccagatacagctacaaccccttcgacggccccaacgagaaccccgaggccgagctgcccctgaccgccggcaagtacctgtacgtgtacggcgacatggacgaggacggcttctacgagggcgagctgctggacggccagagaggcctggtgcccagcaacttcgtggacttcgtgcaggacaacgagagcagactggccagcaccctgggcaacgagcaggaccagaacttcatcaaccacagcggcatcggcctggagggcgagcacatcctggacctgcacagccccacccacatcgacgccggcatcaccgacaacagcgccggcaccctggacgtgaacatcgacgacatcggcgaggacatcgtgccctaccccagaaagatcaccctgatcaagcagctggccaagagcgtgatcgtgggctgggagccccccgccgtgccccccggctggggcaccgtgagcagctacaacgtgctggtggacaaggagaccagaatgaacctgaccctgggcagcagaaccaaggccctgatcgagaagctgaacatggccgcctgcacctacagaatcagcgtgcagtgcgtgaccagcagaggcagcagcgacgagctgcagtgcaccctgctggtgggcaaggacgtggtggtggcccccagccacctgagagtggacaacatcacccagatcagcgcccagctgagctggctgcccaccaacagcaactacagccacgtgatcttcctgaacgaggaggagttcgacatcgtgaaggccgccagatacaagtaccagttcttcaacctgagacccaacatggcctacaaggtgaaggtgctggccaagccccaccagatgccctggcagctgcccctggagcagagagagaagaaggaggccttcgtggagttcagcaccctgcccgccggcccccccgcccccccccaggacgtgaccgtgcaggccggcgtgacccccgccaccatcagagtgagctggagaccccccgtgctgacccccaccggcctgagcaacggcgccaacgtgaccggctacggcgtgtacgccaagggccagagagtggccgaggtgatcttccccaccgccgacagcaccgccgtggagctggtgagactgagaagcctggaggccaagggcgtgaccgtgagaaccctgagcgcccagggcgagagcgtggacagcgccgtggccgccgtgccccccgagctgctggtgccccccaccccccaccccagacccgccccccagagcaagcccctggccagcagcggcgtgcccgagaccaaggacgagcacctgggcccccacgccagaatggacgaggcctgggagcagagcagagcccccggccccgtgcacggccacatgctggagccccccgtgggccccggcagaagaagccccagccccagcagaatcctgccccagccccagggcacccccgtgagcaccaccgtggccaaggccatggccagagaggccgcccagagagtggccgagagcagcagactggagaagagaagcgtgttcctggagagaagcagcgccggccagtacgccgccagcgacgaggaggacgcctacgacagccccgacttcaagagaagaggcgccagcgtggacgacttcctgaagggcagcgagctgggcaagcagatggccagctag

SEQ ID NO: 333728 - DNA, 1938 bp, Artificial Sequence
  derived and/or modified sequence
atgaacggcctggccaccagcctgggcaagggccaggagagcgccatcggcggcagcagcgccatcggcgagtacatcagacccctgccccagcccggcgacagacccgagcccctgagcgccaagcccaccttcctgagcagaagcggcagcgccagatgcagaagcgagagcgacatggagaacgagagaaacagcaacaccagcaagcagagatacagcggcaaggtgcacctgtgcgtggccagatacagctacaaccccttcgacggccccaacgagaaccccgaggccgagctgcccctgaccgccggcaagtacctgtacgtgtacggcgacatggacgaggacggcttctacgagggcgagctgctggacggccagagaggcctggtgcccagcaacttcgtggacttcgtgcaggacaacgagagcagactggccagcaccctgggcaacgagcaggaccagaacttcatcaaccacagcggcatcggcctggagggcgagcacatcctggacctgcacagccccacccacatcgacgccggcatcaccgacaacagcgccggcaccctggacgtgaacatcgacgacatcggcgaggacatcgtgccctaccccagaaagatcaccctgatcaagcagctggccaagagcgtgatcgtgggctgggagccccccgccgtgccccccggctggggcaccgtgagcagctacaacgtgctggtggacaaggagaccagaatgaacctgaccctgggcagcagaaccaaggccctgatcgagaagctgaacatggccgcctgcacctacagaatcagcgtgcagtgcgtgaccagcagaggcagcagcgacgagctgcagtgcaccctgctggtgggcaaggacgtggtggtggcccccagccacctgagagtggacaacatcacccagatcagcgcccagctgagctggctgcccaccaacagcaactacagccacgtgatcttcctgaacgaggaggagttcgacatcgtgaaggccgccagatacaagtaccagttcttcaacctgagacccaacatggcctacaaggtgaaggtgctggccaagccccaccagatgccctggcagctgcccctggagcagagagagaagaaggaggccttcgtggagttcagcaccctgcccgccggcccccccgcccccccccaggacgtgaccgtgcaggccggcgtgacccccgccaccatcagagtgagctggagaccccccgtgctgacccccaccggcctgagcaacggcgccaacgtgaccggctacggcgtgtacgccaagggccagagagtggccgaggtgatcttccccaccgccgacagcaccgccgtggagctggtgagactgagaagcctggaggccaagggcgtgaccgtgagaaccctgagcgcccagggcgagagcgtggacagcgccgtggccgccgtgccccccgagctgctggtgccccccaccccccaccccagacccgccccccagagcaagcccctggccagcagcggcgtgcccgagaccaaggacgagcacctgggcccccacgccagaatggacgaggcctgggagcagagcagagcccccggccccgtgcacggccacatgctggagccccccgtgggccccggcagaagaagccccagccccagcagaatcctgccccagccccagggcacccccgtgagcaccaccgtggccaaggccatggccagagaggccgcccagagagtggccgagagcagcagactggagaagagaagcgtgttcctggagagaagcagcgccggccagtacgccgccagcgacgaggaggacgcctacgacagccccgacttcaagagaagaggcgccagcgtggacgacttcctgaagggcagcgagctgggcaagcagatggtgagctag

SEQ ID NO: 333729 - protein, 270 aa, Artificial Sequence
  derived and/or modified sequence
MPQAFLLGSIHEPAGALMEPQPCPGSLAESFLEEELRLNAELSQLQFSEPVGIIYNPVEYAWEPHRNYVTRYCQGPKEVLFLGMNPGPFGMAQTGVPFGEVSMVRDWLGIVGPVLTPPQEHPKRPVLGLECPQSEVSGARFWGFFRNLCGQPEVFFHHCFVHNLCPLLFLAPSGRNLTPAELPAKQREQLLGICDAALCRQVQLLGVRLVVGVGRLAEQRARRALAGLMPEVQVEGLLHPSPRNPQANKGWEAVAKERLNELGLLPLLLK

SEQ ID NO: 333730 - protein, 172 aa, Artificial Sequence
  derived and/or modified sequence
MPQAFLLGSIHEPAGALMEPQPCPGSLAESFLEEELRLNAELSQLQFSEPVGIIYNPVEYAWEPHRNYVTRYCQGPKEVLFLGMNPGPFGMAQTGVPFGEVSMVRDWLGIVGPVLTPPQEHPKRPVLGLECPQSEVSGARFWGFFRNLCGQPEVFFHHCFVHNLCPLLFLAP

SEQ ID NO: 333731 - DNA, 813 bp, Artificial Sequence
  derived and/or modified sequence
atgccccaggccttcctgctgggcagcatccacgagcccgccggcgccctgatggagccccagccctgccccggcagcctggccgagagcttcctggaggaggagctgagactgaacgccgagctgagccagctgcagttcagcgagcccgtgggcatcatctacaaccccgtggagtacgcctgggagccccacagaaactacgtgaccagatactgccagggccccaaggaggtgctgttcctgggcatgaaccccggccccttcggcatggcccagaccggcgtgcccttcggcgaggtgagcatggtgagagactggctgggcatcgtgggccccgtgctgacccccccccaggagcaccccaagagacccgtgctgggcctggagtgcccccagagcgaggtgagcggcgccagattctggggcttcttcagaaacctgtgcggccagcccgaggtgttcttccaccactgcttcgtgcacaacctgtgccccctgctgttcctggcccccagcggcagaaacctgacccccgccgagctgcccgccaagcagagagagcagctgctgggcatctgcgacgccgccctgtgcagacaggtgcagctgctgggcgtgagactggtggtgggcgtgggcagactggccgagcagagagccagaagagccctggccggcctgatgcccgaggtgcaggtggagggcctgctgcaccccagccccagaaacccccaggccaacaagggctgggaggccgtggccaaggagagactgaacgagctgggcctgctgcccctgctgctgaagtag

SEQ ID NO: 333732 - DNA, 519 bp, Artificial Sequence
  derived and/or modified sequence
atgccccaggccttcctgctgggcagcatccacgagcccgccggcgccctgatggagccccagccctgccccggcagcctggccgagagcttcctggaggaggagctgagactgaacgccgagctgagccagctgcagttcagcgagcccgtgggcatcatctacaaccccgtggagtacgcctgggagccccacagaaactacgtgaccagatactgccagggccccaaggaggtgctgttcctgggcatgaaccccggccccttcggcatggcccagaccggcgtgcccttcggcgaggtgagcatggtgagagactggctgggcatcgtgggccccgtgctgacccccccccaggagcaccccaagagacccgtgctgggcctggagtgcccccagagcgaggtgagcggcgccagattctggggcttcttcagaaacctgtgcggccagcccgaggtgttcttccaccactgcttcgtgcacaacctgtgccccctgctgttcctggccccctag

SEQ ID NO: 333733 - DNA, 813 bp, Artificial Sequence
  derived and/or modified sequence
atgccacaggctttccttcttggctctattcatgaacctgccggagccctgatggaacctcagccatgtcccgggtctctggcggaatctttccttgaagaggagctaagactgaacgcagagctgtcgcagctgcagttcagcgaaccagttggaattatttacaatcccgtggagtacgcctgggagcctcatcggaattacgtaacacggtattgccagggccccaaagaggtgctgttcctggggatgaatcccggcccctttggaatggcccagactggcgtgccttttggtgaggtctccatggtgcgtgactggcttgggatcgttgggcctgtgctgaccccaccccaggagcatcctaaacgaccggttctcgggctcgagtgtccccagtctgaggtgtctggagctaggttctggggctttttcaggaacctgtgtgggcaaccagaagtgttcttccaccactgtttcgtacacaacttatgccctcttttgtttttagcaccgagtggtcgtaatctgacccctgcagagctgcctgcaaagcagcgggagcagcttctgggcatctgcgacgcggcactctgtcgacaagtacagctcctgggggtgaggcttgttgtgggcgtgggcaggctggccgaacagagagcaagacgcgctctcgctggcctgatgcctgaggttcaggtcgagggtctgctgcatcccagtccccgaaacccacaagccaataaaggatgggaagctgtggccaaggagagactgaacgagctgggattactgcccttgctcctaaaatag

SEQ ID NO: 333734 - DNA, 813 bp, Artificial Sequence
  derived and/or modified sequence
atgccccaggctttcttattaggctccatccatgaacccgccggggcactgatggaaccacagccttgtcctggctccctggctgagagttttttagaagaggagcttcggttgaatgcagaactaagccagctgcagttttctgagcccgttggaattatctataacccagtggaatacgcttgggaacctcatcgcaattacgtgactaggtactgccaaggacccaaggaagtgttgtttcttgggatgaaccccggcccttttggcatggcccaaactggagtcccttttggcgaggtgagcatggtgcgcgactggcttggtattgtcggacctgtgctgacaccccctcaggaacaccctaaacgaccagttcttggtctggagtgcccccagagcgaagtcagcggtgcacggttctgggggtttttcagaaacctatgtggacagcctgaggtctttttccaccattgcttcgtgcataacctgtgccctctcctgtttctggcaccaagtggacggaatctgacaccagctgaactgcctgctaagcagagggaacagttactcggaatctgtgatgcagcactctgtagacaggttcagctgcttggagtgcgcctggtagtaggagtcggccggttggccgagcaacgagctcggcgcgcactcgccggtcttatgcccgaagtgcaggtagagggcctcctgcatccatcgccacgcaatcctcaagcaaacaaagggtgggaagctgtggccaaagaacgcctaaacgagctgggcctcttgcccctcttgttgaagtag

SEQ ID NO: 333735 - DNA, 519 bp, Artificial Sequence
  derived and/or modified sequence
atgccccaggctttcctgcttggaagcatccacgaacccgccggggctctcatggaaccccagccctgtcctggaagcctggccgaatccttccttgaagaagaactgcggctgaacgcggagcttagccagctccaattctctgagcccgtcggtatcatatacaacccggttgaatacgcttgggagccacatcggaattatgtgacaaggtactgccaagggcctaaggaggttctgtttctgggcatgaacccggggcctttcgggatggcccagacaggcgttcctttcggtgaggtcagtatggttagggactggctaggcattgtaggtcctgtgttaactcctccgcaagaacaccccaagaggccagtgctcggccttgaatgtccacaaagtgaggtctccggggctaggttttggggcttcttccgcaacctgtgtgggcaacccgaggtcttcttccatcattgttttgtgcacaacctttgtcccctcctgtttctggcaccttag

SEQ ID NO: 333736 - DNA, 813 bp, Artificial Sequence
  derived and/or modified sequence
atgccacaagcctttctgctgggaagcatacacgaacccgctggggcccttatggaaccccaaccgtgccccgggagccttgcagaaagcttcctggaagaggagctgcgcttgaacgcagagctgagccagctgcaattctcagagccggtgggtatcatttacaacccagtcgagtacgcttgggagccacacagaaattacgtgaccagatactgccagggacctaaagaagtgcttttcctggggatgaatccaggccctttcggtatggcccagaccggagtaccttttggagaagtgagtatggtgcgggactggctcggaatagtcgggcccgttctcacgcctccacaggagcatccgaagcgacccgttctggggctggagtgcccacagtccgaagtgtcaggcgcaagattctgggggtttttccggaatctgtgcgggcaacccgaggtattcttccaccattgtttcgtgcataatctgtgtccactcctctttttggccccctccggtagaaacttgactcccgccgagctgcctgctaagcagagagagcagttgcttggcatttgcgatgcggcgctctgtcgacaagtccaactcctgggcgttcgactcgttgttggggtgggacggctggccgaacaacgcgcacgaagggccctcgcaggactgatgcctgaagtgcaggtcgagggacttttacatccatccccacgaaatccgcaagcaaacaagggatgggaggctgtggccaaggagcgactcaacgagctcggtctcttgccgctccttctgaaatag

SEQ ID NO: 333737 - DNA, 813 bp, Artificial Sequence
  derived and/or modified sequence
atgccccaggccttcctgctgggcagcatccacgagcctgctggggccctgatggagccccagccctgccccggcagcctggccgagagcttcctggaggaggagctgcggctgaatgctgagctgagccagctgcagttcagcgagcctgtgggcatcatctacaaccctgtggagtatgcctgggagccccacaggaactacgtgacccgctactgccagggccccaaggaggtgctcttcctgggcatgaaccctggccccttcggcatggcccagacaggagtgccctttggagaggtgtccatggtgcgggactggctgggcatcgtgggccctgtgctgaccccaccccaggagcaccccaagaggcctgtgctgggcctggagtgcccccagagcgaggtgtctggggcccgcttctggggcttcttcaggaacctgtgtggccagcctgaggtgttcttccaccactgctttgtgcacaacctgtgccccctgctcttcctggcccccagcggcaggaacctgaccccagctgagctgcctgccaagcagcgggagcagctgctgggcatctgtgatgctgccctgtgccggcaggtgcagctgctgggcgtgcggctggtggtgggcgtgggccgcctggccgagcagagggcccggcgggccctggccggcctgatgcctgaggtgcaggtggagggcctgctgcaccccagccccaggaacccccaggccaacaagggctgggaggccgtggccaaggagcggctgaatgagctgggcctgctgcccctgctgctgaagtag

SEQ ID NO: 333738 - DNA, 519 bp, Artificial Sequence
  derived and/or modified sequence
atgccccaggccttcctgctgggcagcatccacgagcctgctggggccctgatggagccccagccctgccccggcagcctggccgagagcttcctggaggaggagctgcggctgaatgctgagctgagccagctgcagttcagcgagcctgtgggcatcatctacaaccctgtggagtatgcctgggagccccacaggaactacgtgacccgctactgccagggccccaaggaggtgctcttcctgggcatgaaccctggccccttcggcatggcccagacaggagtgccctttggagaggtgtccatggtgcgggactggctgggcatcgtgggccctgtgctgaccccaccccaggagcaccccaagaggcctgtgctgggcctggagtgcccccagagcgaggtgtctggggcccgcttctggggcttcttcaggaacctgtgtggccagcctgaggtgttcttccaccactgctttgtgcacaacctgtgccccctgctcttcctggccccctag

SEQ ID NO: 333739 - DNA, 813 bp, Artificial Sequence
  derived and/or modified sequence
atgccccaggccttcctgctgggcagcatccacgagcccgccggcgccctgatggaaccccaaccctgcccaggatccttagctgagagtttcctggaagaagaacttcggctgaatgcggagctgagccaactccagttctcggaaccagtaggcataatttacaacccagttgaatatgcttgggaaccgcatcggaattatgtgacgcggtattgtcaggggccgaaggaggtattgttcctgggcatgaatcccgggccattcggcatggcacagactggcgtacctttcggggaagtcagcatggttagagactggctgggaatcgtaggtcctgtgctgacgcctcctcaggaacacccgaaacgaccagtcctcgggttagagtgccctcagtcggaggtgagcggtgctagattctggggctttttcaggaatctgtgtggccaaccagaagttttcttccaccactgtttcgtgcacaatctttgtcccctgctctttcttgcaccttctggccgcaacctgacgccagcagagctccctgcgaagcagagagaacagctgctgggcatctgcgacgccgcactgtgtcggcaagtacaactgttaggggttaggttggtggtcggagtgggccggctcgctgagcagcgggcaaggcgggcccttgccggactcatgcccgaggtgcaggtggagggcctgctacatccatctcccaggaacccacaagcaaataaaggctgggaggcagtcgccaaggagcgactgaacgaactgggcctattgccactccttctgaagtag

SEQ ID NO: 333740 - DNA, 813 bp, Artificial Sequence
  derived and/or modified sequence
atgccccaggccttcctgctgggcagcatccacgagcccgccggcgcactcatggagccccagccttgtccagggtccttagccgagtcattcctggaagaggagctaaggttaaacgcagaactgagccagctgcagttttctgagcccgtcggaattatatataatccagttgaatacgcatgggagccacatcggaattatgtcacaagatactgtcagggccctaaggaggtgctattcttgggaatgaatcctgggccctttggcatggcccagaccggtgtaccttttggggaagtttcaatggttcgggattggctgggaatcgttggacccgtacttaccccaccccaggagcacccaaagagacctgtgcttggtttggagtgcccccagtctgaggtctccggggctcgattctgggggttctttcggaacctctgtggacaacctgaggtattcttccatcactgctttgtgcacaacctgtgtcctctcctgtttctggccccatctgggcgcaacctgaccccggccgagctgcctgcgaaacagcgggagcagttgctggggatctgtgatgcggccctgtgcaggcaggtgcagctgctgggggtgcggctagtggtgggtgtcggacggctggctgaacagcgcgcccgccgcgcgctggcaggtctgatgcctgaggtgcaggtggaaggactgcttcacccttcgccaaggaatccacaggccaataagggctgggaggctgtggcgaaggagcgcctgaatgagctgggtctacttcccttgctcctgaaatag

SEQ ID NO: 333741 - DNA, 519 bp, Artificial Sequence
  derived and/or modified sequence
atgccccaggccttcctgctgggcagcatccacgagcccgccggcgctctgatggagcctcagccatgtcccggcagccttgcagagtccttcctggaagaggagttacgtctgaatgctgaactctcccagttgcagttcagcgaacccgtgggcataatttacaatcccgtagagtatgcttgggaacctcatcgtaactacgtcacgaggtactgccagggtcctaaggaggtactgtttctcgggatgaaccccggaccctttgggatggcccaaaccggtgtgccatttggcgaagtgtcaatggttcgcgactggctcggaatcgtgggaccagtgcttactccccctcaggagcaccccaagaggccagttttgggattggaatgcccacaatcagaggtctccggcgctcgcttttggggatttttcaggaacctttgcggccagccagaagtgttctttcatcactgcttcgtccacaacctctgtccactgctgttcttagctccgtag

SEQ ID NO: 333742 - DNA, 813 bp, Artificial Sequence
  derived and/or modified sequence
atgccccaggccttcctgctgggcagcatccacgagcccgccggcgcactgatggagccccagccttgccctggatccctcgccgagagcttcctcgaggaggagttgcgtctcaacgccgagctgagccagctgcagttttctgagcccgtcggaatcatttataatccagtggaatatgcttgggaaccccaccgaaattacgtaacgcgatactgtcagggccctaaggaggtgctctttcttggcatgaatccaggcccctttggaatggcccaaaccggagtgccatttggagaagtgagtatggtgagagactggctcggaattgtcgggcctgttctgaccccgccgcaggaacatcccaaaaggccggtactgggactggagtgcccgcagtccgaggtgtcaggagctcgcttttggggatttttcagaaatttgtgcggacaaccagaagtttttttccaccactgcttcgtgcataacctttgtcccctgctctttcttgctccctctggacggaacctaactccagccgaactgcccgctaagcaacgggaacagctgctgggaatctgcgatgccgcattgtgtcgtcaagtacaactgttgggggtgcgactggtcgtgggtgtgggccgcctcgcagagcagagagctcgaagagctctggctggactgatgccagaggtgcaggttgagggactgctgcacccgagcccacggaacccccaggccaacaaagggtgggaagccgtggcaaaggagcgacttaatgaactgggactcctcccacttttgcttaaatag

SEQ ID NO: 333743 - DNA, 813 bp, Artificial Sequence
  derived and/or modified sequence
atgcctcaggcctttttgctggggtctattcatgagccagcaggggctctcatggaaccacagccgtgccccggaagtctggcggagagttttttggaagaggagctgcgtctgaatgctgagctgtctcagctccagttcagcgagcccgttggaattatttataatcccgtggagtatgcctgggagccacatagaaattatgtgacccggtactgtcaggggcctaaggaggtgctcttccttgggatgaatcctggcccattcgggatggcccagacaggggtgccgttcggggaggtctcaatggtgcgggattggttaggtattgtggggccagttctcactcctccacaagagcatccgaaacgcccagtcctgggattggaatgcccacagtcagaggttagcggggcaaggttttgggggttctttaggaatctctgcggccaacccgaggtgttctttcaccactgctttgttcacaatctgtgccccctcctgtttcttgccccttctggccgaaatctgacaccagccgaactgcctgctaagcagcgcgaacagctgttaggaatttgcgatgctgccctgtgtaggcaggtccaacttctgggggtaaggttggtcgttggggtagggcgactcgccgagcagagagcgagaagagccctagccggattgatgcctgaggtccaagtcgaaggactcctacatcctagtcctcgtaaccctcaggcaaacaaaggctgggaggcagtggccaaagagaggctgaatgagctcggccttttgcccctgctactgaagtag

SEQ ID NO: 333744 - DNA, 813 bp, Artificial Sequence
  derived and/or modified sequence
atgccccaggcatttctgctgggttccattcacgagcctgccggtgcattaatggaaccgcagccatgtcccggatcacttgcagagtcattcctggaagaagagctgaggcttaatgcggagctgtcgcaactgcagttttcagagccagtcggtatcatctataatccggttgagtacgcttgggaaccccatcgtaactatgtgacccgttactgccaagggcctaaggaggtgctgtttctgggtatgaatcccggacctttcgggatggcccagaccggagtccccttcggcgaggtatctatggttagagattggttaggtatcgtcggtcctgtgcttactccaccccaagagcatcccaagcgacctgttctgggcctcgaatgccctcaatctgaggtgtcgggcgcacgtttctggggcttctttcgtaacctctgtggacagccggaggtatttttccaccactgcttcgtgcacaacctctgccctctgctattcctcgctcctagtggacgaaacctgacacctgcagagctgccggcaaagcagagggaacaactgctcggtatctgtgacgccgctctgtgccgccaggttcagcttctcggggttaggttggtggtgggagtgggacgtctcgcagagcagcgggctaggagggcattggctggcctgatgcccgaagtgcaggtggaaggcctcttgcatcctagcccgaggaatcctcaggccaacaaagggtgggaagctgtggctaaggaacggctcaacgaactgggcttgttgccactgctgctgaagtag

SEQ ID NO: 333745 - DNA, 519 bp, Artificial Sequence
  derived and/or modified sequence
atgccgcaggcatttctgctaggaagcattcacgaacccgctggtgccctgatggagccacagccatgtcctgggtctctcgctgaaagcttcctggaagaagagcttcgcctcaatgccgaactcagtcagctacagttctcggaacctgtcggcattatctacaatccggtagaatacgcttgggaaccacataggaattacgtgacgcggtattgccagggacccaaagaggttctgtttctgggcatgaaccccggacccttcgggatggcccaaaccggcgtgccatttggcgaggtaagtatggtccgggattggctggggattgtcggtcctgtgctgaccccaccacaggagcatcctaaaagacctgttctgggtctagaatgtccgcaaagcgaagtcagtggagctcgcttttggggcttctttcgcaacctgtgcggtcaaccggaggtgtttttccatcactgttttgttcataacctgtgtccactgctgtttctggcaccttag

SEQ ID NO: 333746 - DNA, 813 bp, Artificial Sequence
  derived and/or modified sequence
atgccccaggccttcttgctgggttccatacacgagccagcgggtgctctcatggaaccacagccatgtccagggtccctggccgagtctttcctcgaggaggagctaagattaaacgctgaactcagtcagctacaattttctgaacccgttggaattatttacaatcccgtggaatatgcatgggagccgcatcgaaactatgtgactcggtattgccaaggccctaaggaggtcctgtttctaggtatgaatcccggtccttttggcatggcacaaacaggagttcctttcggcgaggtcagcatggtgagggactggttgggcattgtcgggcctgtcctcacaccaccccaggaacacccgaaaaggccagtgctgggattggagtgtcctcagagcgaggtttctggggcacggttctggggcttcttccggaatctgtgcgggcagcctgaagtgttctttcatcactgtttcgtccataatctttgtcctctgctgttccttgcgccttccggcagaaacttaaccccagccgagctgcctgctaagcagcgggaacagctcctggggatctgcgatgcagctctctgccggcaggtccagctgttgggcgtgcggctggtggtgggggtcggacggctagctgagcagcgggcacggagggctctggcaggtctgatgcccgaggtgcaagtcgagggactcttgcaccccagcccccgaaatcctcaagccaacaagggctgggaagctgtggcaaaagaacgacttaacgagctcggactgctgccattgctcttgaaatag

SEQ ID NO: 333747 - DNA, 1571 bp, Artificial Sequence
  derived and/or modified sequence
aaacgggatggggagctggaccagcagattatgagcttacagaaagcctggcctacattttactctttttggatttcttcctcatcaagagactgctgcagtgcctgtcatgtgacagcggcatggacatatgccccaggctttcctgctggggtccatccatgagcctgcaggtgccctcatggagccccagccctgccctggaagcttggctgagagcttcctggaggaggagcttcggctcaatgctgagctgagccagctgcagttttcggagcctgtgggcatcatctacaatcccgtggagtatgcatgggagccacatcgcaactacgtgactcgctactgccagggccccaaggaagtactcttcctgggcatgaaccctggaccttttggcatggcccagactggggtgccctttggggaagtaagcatggtccgggactggttgggcattgtggggcctgtgctgacccctccccaagagcatcctaaacgaccagtgctgggactggagtgcccacagtcagaagtgagtggtgcccgattctggggctttttccggaacctctgtggacagcctgaggtcttcttccatcactgttttgtccacaatctatgccctctgcttttcctggctcccagcgggcgcaaccttactcctgctgagctgcctgccaagcagcgagaacagcttcttgggatctgtgatgcagccctctgccggcaggtgcagctgctgggggtgcggctggtggtgggagttgggcgactggcagagcagcgggcacgacgggctctggcaggcctgatgccagaggtccaggtggaagggctcctgcatccctctccccgtaacccacaggccaacaagggctgggaggcagtggccaaggaaagattgaatgagctggggctgctgccactgctgttgaaatgagtgcccttggggccttgcatgggacacattcaagacctcgaagtcattcttggccaagcagatgacaacacatctcctggactggagcaaaaggtccttctgtgcaccctggtcgctgggaaacgtattctttgatctgttgaactgtcttccaacctgccatggcagttttgacactactcctgtttgccctcctgattcctgctttctttaccttttaacattgcccctttcaggggaccccactttgtagggaatctgcagaaggtgtgcttttgcacttgcagactgctctacctcagtgtttccttgggagactttattcagctgagagtgccctagacagtaacttctaaggtcacgtttactatttcagaggaaatatcttgccaggatacctacccatccttatagaacagttacctttagctgacccctttcctcacagggaccaagacaaagcatgggacatgaaattaagagtgaacttcttatgggaggctgcagctggatcagaggaaaaatccagtgtgacagagtgcaagtcagaagacctggcttttcatcccagctttgaaacttggaactttttgattgacaaattaataaacctctctatgcctcaggc

SEQ ID NO: 333748 - DNA, 1082 bp, Artificial Sequence
  derived and/or modified sequence
agacggaattttgctctgaattccaggctggagtgcaatggcgcgatctcagctcactgcagcctccgcctcccgggttcaagcgattcttctgcctcagcctcccgagtgacagcggcatggacatatgccccaggctttcctgctggggtccatccatgagcctgcaggtgccctcatggagccccagccctgccctggaagcttggctgagagcttcctggaggaggagcttcggctcaatgctgagctgagccagctgcagttttcggagcctgtgggcatcatctacaatcccgtggagtatgcatgggagccacatcgcaactacgtgactcgctactgccagggccccaaggaagtactcttcctgggcatgaaccctggaccttttggcatggcccagactggggtgccctttggggaagtaagcatggtccgggactggttgggcattgtggggcctgtgctgacccctccccaagagcatcctaaacgaccagtgctgggactggagtgcccacagtcagaagtgagtggtgcccgattctggggctttttccggaacctctgtggacagcctgaggtcttcttccatcactgttttgtccacaatctatgccctctgcttttcctggctcccagcgggcgcaaccttactcctgctgagctgcctgccaagcagcgagaacagcttcttgggatctgtgatgcagccctctgccggcaggtgcagctgctgggggtgcggctggtggtgggagttgggcgactggcagagcagcgggcacgacgggctctggcaggcctgatgccagaggtccaggtggaagggctcctgcatccctctccccgtaacccacaggccaacaagggctgggaggcagtggccaaggaaagattgaatgagctggggctgctgccactgctgttgaaatgagtgcccttggggccttgcatgggacacattcaagacctcgaagtcattcttggccaagcagatgacaacacatctcctggactggagcaaaaggtccttctgtgcaccctggtcgctgggaaacgtattctttgatctgttg

SEQ ID NO: 333749 - DNA, 751 bp, Artificial Sequence
  derived and/or modified sequence
gggtggttagaatttctatattttggggtccctccctccgtatggggctggagtgcaatggcgcgatctcagctcactgcagcctccgcctcccgggttcaagcgattcttctgcctcagcctcccgacagattatgagcttacagaaagcctggcctacattttactctttttggatttcttcctcatcaagagactgctgcagtgcctgtcatgtgacagcggcatggacatatgccccaggctttcctgctggggtccatccatgagcctgcaggtgccctcatggagccccagccctgccctggaagcttggctgagagcttcctggaggaggagcttcggctcaatgctgagctgagccagctgcagttttcggagcctgtgggcatcatctacaatcccgtggagtatgcatgggagccacatcgcaactacgtgactcgctactgccagggccccaaggaagtactcttcctgggcatgaaccctggaccttttggcatggcccagactggggtgccctttggggaagtaagcatggtccgggactggttgggcattgtggggcctgtgctgacccctccccaagagcatcctaaacgaccagtgctgggactggagtgcccacagtcagaagtgagtggtgcccgattctggggctttttccggaacctctgtggacagcctgaggtcttcttccatcactgttttgtccacaatctatgccctctgcttttcctggctccca

SEQ ID NO: 333750 - DNA, 1503 bp, Artificial Sequence
  derived and/or modified sequence
gggtgggggaaaggaaccggaaacgggatggggagctggaccaggtgacagcggcatggacatatgccccaggctttcctgctggggtccatccatgagcctgcaggtgccctcatggagccccagccctgccctggaagcttggctgagagcttcctggaggaggagcttcggctcaatgctgagctgagccagctgcagttttcggagcctgtgggcatcatctacaatcccgtggagtatgcatgggagccacatcgcaactacgtgactcgctactgccagggccccaaggaagtactcttcctgggcatgaaccctggaccttttggcatggcccagactggggtgccctttggggaagtaagcatggtccgggactggttgggcattgtggggcctgtgctgacccctccccaagagcatcctaaacgaccagtgctgggactggagtgcccacagtcagaagtgagtggtgcccgattctggggctttttccggaacctctgtggacagcctgaggtcttcttccatcactgttttgtccacaatctatgccctctgcttttcctggctcccagcgggcgcaaccttactcctgctgagctgcctgccaagcagcgagaacagcttcttgggatctgtgatgcagccctctgccggcaggtgcagctgctgggggtgcggctggtggtgggagttgggcgactggcagagcagcgggcacgacgggctctggcaggcctgatgccagaggtccaggtggaagggctcctgcatccctctccccgtaacccacaggccaacaagggctgggaggcagtggccaaggaaagattgaatgagctggggctgctgccactgctgttgaaatgagtgcccttggggccttgcatgggacacattcaagacctcgaagtcattcttggccaagcagatgacaacacatctcctggactggagcaaaaggtccttctgtgcaccctggtcgctgggaaacgtattctttgatctgttgaactgtcttccaacctgccatggcagttttgacactactcctgtttgccctcctgattcctgctttctttaccttttaacattgcccctttcaggggaccccactttgtagggaatctgcagaaggtgtgcttttgcacttgcagactgctctacctcagtgtttccttgggagactttattcagctgagagtgccctagacagtaacttctaaggtcacgtttactatttcagaggaaatatcttgccaggatacctacccatccttatagaacagttacctttagctgacccctttcctcacagggaccaagacaaagcatgggacatgaaattaagagtgaacttcttatgggaggctgcagctggatcagaggaaaaatccagtgtgacagagtgcaagtcagaagacctggcttttcatcccagctttgaaacttggaactttttgattgacaaattaataaacctctctatgcctcagg

SEQ ID NO: 333751 - protein, 82 aa, Artificial Sequence
  derived and/or modified sequence
MPQAFLLGSIHEPAGALMEPQPCPGSLAESFLEEELRLNAELSQLQFSEPVGIIYNPVEYAWEPHRNYVTRYCQGPKEVLFL

SEQ ID NO: 333752 - protein, 96 aa, Artificial Sequence
  derived and/or modified sequence
MPQAFLLGSIHEPAGALMEPQPCPGSLAESFLEEELRLNAELSQLQFSEPVGIIYNPVEYAWEPHRNYVTRYCQGPKEVLFLGMNPGPFGMAQTGV

SEQ ID NO: 333753 - protein, 90 aa, Artificial Sequence
  derived and/or modified sequence
MPQAFLLGSIHEPAGALMEPQPCPGSLAESFLEEELRLNAELSQLQFSEPVGIIYNPVEYAWEPHRNYVTRYCQGPKEVLFLGMNPGPFG

SEQ ID NO: 333754 - protein, 108 aa, Artificial Sequence
  derived and/or modified sequence
MPQAFLLGSIHEPAGALMEPQPCPGSLAESFLEEELRLNAELSQLQFSEPVGIIYNPVEYAWEPHRNYVTRYCQGPKEVLFLGMNPGPFGMAQTGVPFGEVSMVRDWL

SEQ ID NO: 333755 - DNA, 249 bp, Artificial Sequence
  derived and/or modified sequence
atgccccaggccttcctgctgggcagcatccacgagcccgccggcgccctgatggagccccagccctgccccggcagcctggccgagagcttcctggaggaggagctgagactgaacgccgagctgagccagctgcagttcagcgagcccgtgggcatcatctacaaccccgtggagtacgcctgggagccccacagaaactacgtgaccagatactgccagggccccaaggaggtgctgttcctgtag

SEQ ID NO: 333756 - DNA, 291 bp, Artificial Sequence
  derived and/or modified sequence
atgccccaggccttcctgctgggcagcatccacgagcccgccggcgccctgatggagccccagccctgccccggcagcctggccgagagcttcctggaggaggagctgagactgaacgccgagctgagccagctgcagttcagcgagcccgtgggcatcatctacaaccccgtggagtacgcctgggagccccacagaaactacgtgaccagatactgccagggccccaaggaggtgctgttcctgggcatgaaccccggccccttcggcatggcccagaccggcgtgtag

SEQ ID NO: 333757 - DNA, 273 bp, Artificial Sequence
  derived and/or modified sequence
atgccccaggccttcctgctgggcagcatccacgagcccgccggcgccctgatggagccccagccctgccccggcagcctggccgagagcttcctggaggaggagctgagactgaacgccgagctgagccagctgcagttcagcgagcccgtgggcatcatctacaaccccgtggagtacgcctgggagccccacagaaactacgtgaccagatactgccagggccccaaggaggtgctgttcctgggcatgaaccccggccccttcggctag

SEQ ID NO: 333758 - DNA, 327 bp, Artificial Sequence
  derived and/or modified sequence
atgccccaggccttcctgctgggcagcatccacgagcccgccggcgccctgatggagccccagccctgccccggcagcctggccgagagcttcctggaggaggagctgagactgaacgccgagctgagccagctgcagttcagcgagcccgtgggcatcatctacaaccccgtggagtacgcctgggagccccacagaaactacgtgaccagatactgccagggccccaaggaggtgctgttcctgggcatgaaccccggccccttcggcatggcccagaccggcgtgcccttcggcgaggtgagcatggtgagagactggctgtag

SEQ ID NO: 333759 - DNA, 249 bp, Artificial Sequence
  derived and/or modified sequence
atgccacaggccttcctcctcgggagcattcacgagccagctggagcactcatggagccacagccatgccccgggtcactggcagagtccttcctcgaggaggaactgcggctcaatgcagaactgagccagttgcagttttccgagccagtgggaatcatttacaatcctgtggagtacgcctgggaaccccataggaattatgtcacccgttactgtcaagggccaaaggaagtgctcttcttatag

SEQ ID NO: 333760 - DNA, 291 bp, Artificial Sequence
  derived and/or modified sequence
atgccacaagcattccttctgggatcgatccatgagcccgccggggcactgatggaaccgcagccctgcccggggtctctagctgaaagcttcctggaggaggagctcagactgaacgccgaattaagtcagctgcaattctcagaacctgtggggattatttacaatccagtggaatacgcttgggagcctcatagaaactacgtgacaaggtattgtcagggtccaaaggaggtgctattcctggggatgaatccaggcccattcgggatggcacaaacaggagtctag

SEQ ID NO: 333761 - DNA, 273 bp, Artificial Sequence
  derived and/or modified sequence
atgccacaagcatttctgctgggaagcatccatgagcccgcaggcgcattaatggagccacagccgtgtcctggctctctcgcagagtccttccttgaggaggaactgcgactgaatgcggaattaagccagttgcagttttccgagcccgtgggcatcatctataatcctgtggaatatgcttgggagccccacaggaattacgtgacaaggtactgccagggccccaaggaggttctgtttctgggtatgaacccagggccatttggatag

SEQ ID NO: 333762 - DNA, 327 bp, Artificial Sequence
  derived and/or modified sequence
atgccacaggcattcctgctcgggtctattcacgaacctgccggcgcactaatggaacctcagccctgtccgggttctctcgccgaaagtttcctggaggaagaattgaggctgaatgccgagctgtctcaactgcaattttccgaaccagttggaataatctataatccggtcgagtacgcctgggagccccataggaactatgttacacggtactgccagggaccgaaagaagtactgtttttaggtatgaatcccggcccgttcggcatggcacagacaggagttcctttcggcgaggtgtccatggttagagattggctgtag

SEQ ID NO: 333763 - DNA, 249 bp, Artificial Sequence
  derived and/or modified sequence
atgccccaggccttcctgctgggcagcatccacgagcctgctggggccctgatggagccccagccctgccccggcagcctggccgagagcttcctggaggaggagctgcggctgaatgctgagctgagccagctgcagttcagcgagcctgtgggcatcatctacaaccctgtggagtatgcctgggagccccacaggaactacgtgacccgctactgccagggccccaaggaggtgctcttcctgtag

SEQ ID NO: 333764 - DNA, 291 bp, Artificial Sequence
  derived and/or modified sequence
atgccccaggccttcctgctgggcagcatccacgagcctgctggggccctgatggagccccagccctgccccggcagcctggccgagagcttcctggaggaggagctgcggctgaatgctgagctgagccagctgcagttcagcgagcctgtgggcatcatctacaaccctgtggagtatgcctgggagccccacaggaactacgtgacccgctactgccagggccccaaggaggtgctcttcctgggcatgaaccctggccccttcggcatggcccagacaggagtgtag

SEQ ID NO: 333765 - DNA, 273 bp, Artificial Sequence
  derived and/or modified sequence
atgccccaggccttcctgctgggcagcatccacgagcctgctggggccctgatggagccccagccctgccccggcagcctggccgagagcttcctggaggaggagctgcggctgaatgctgagctgagccagctgcagttcagcgagcctgtgggcatcatctacaaccctgtggagtatgcctgggagccccacaggaactacgtgacccgctactgccagggccccaaggaggtgctcttcctgggcatgaaccctggcccctttggatag

SEQ ID NO: 333766 - DNA, 327 bp, Artificial Sequence
  derived and/or modified sequence
atgccccaggccttcctgctgggcagcatccacgagcctgctggggccctgatggagccccagccctgccccggcagcctggccgagagcttcctggaggaggagctgcggctgaatgctgagctgagccagctgcagttcagcgagcctgtgggcatcatctacaaccctgtggagtatgcctgggagccccacaggaactacgtgacccgctactgccagggccccaaggaggtgctcttcctgggcatgaaccctggccccttcggcatggcccagacaggagtgccctttggagaggtgtccatggtgcgggactggctgtag

SEQ ID NO: 333767 - DNA, 249 bp, Artificial Sequence
  derived and/or modified sequence
atgccccaggccttcctgctgggcagcatccacgagcccgccggcgctttaatggaaccacagccatgtcccggttccctggctgagagttttctggaagaggaacttcgcctcaacgctgagctttctcagcttcaattttctgagcccgtgggaatcatatacaacccagtcgagtacgcctgggagcctcacagaaactatgttacgaggtattgccagggcccaaaggaagtgctattcctgtag

SEQ ID NO: 333768 - DNA, 291 bp, Artificial Sequence
  derived and/or modified sequence
atgccccaggccttcctgctgggcagcatccacgagcccgccggcgctttaatggagccccagccatgtcccgggagcctggcagaaagcttcctggaagaagagttgcgtctgaacgcagaactctctcagctgcagttttccgagcccgtgggcattatctacaatcccgtggagtatgcctgggagcctcataggaattatgtgactcggtattgtcagggtccaaaagaggtgctatttttaggcatgaaccctgggccttttggcatggcacagactggggtgtag

SEQ ID NO: 333769 - DNA, 273 bp, Artificial Sequence
  derived and/or modified sequence
atgccccaggccttcctgctgggcagcatccacgagcccgccggcgcactcatggagccccaaccttgtcctgggagcttagctgaaagttttctggaagaagaacttcgtctcaacgcagagttaagtcaattacagtttagcgagcccgtggggataatatataacccagtggaatacgcatgggagcctcacaggaactacgttacacgctattgtcagggacctaaagaagtcctgttccttggaatgaacccgggccctttcggctag

SEQ ID NO: 333770 - DNA, 327 bp, Artificial Sequence
  derived and/or modified sequence
atgccccaggccttcctgctgggcagcatccacgagcccgccggcgcacttatggagccacagccttgtccgggtagcctggcagaatcgttcttggaggaggagcttagattgaatgcggagcttagccagctgcagttttccgagccagtgggaatcatctataatccagttgaatacgcttgggagcctcacagaaattatgtcacccggtattgtcaggggcccaaggaagtgctcttcctggggatgaatcccggacccttcgggatggctcagactggggtgccgtttggagaggtgtctatggtcagagattggttgtag

SEQ ID NO: 333771 - DNA, 249 bp, Artificial Sequence
  derived and/or modified sequence
atgccccaagcttttctacttggctctatccatgaacccgctggggctttgatggagcctcagccttgtccaggttcgctggctgagtccttcttggaagaagaacttagacttaacgcagagctgtctcagctgcaattcagtgagcctgtggggattatttacaatcccgtggaatacgcgtgggaaccacatagaaactacgttactcggtattgccaggggcctaaagaggtcttgttcctgtag

SEQ ID NO: 333772 - DNA, 291 bp, Artificial Sequence
  derived and/or modified sequence
atgccccaagcctttttattagggtccattcatgaaccagccggagcccttatggaaccgcagccatgccctggatcactggcagagtcttttcttgaggaggaattaaggctcaacgccgaactgagtcagctccagtttagtgagcctgtggggatcatttacaacccggttgaatacgcctgggagccccaccgtaactacgtgacccggtattgccaggggcctaaagaggtgcttttcctgggcatgaatcctggacctttcggtatggcacagacaggtgtgtag

SEQ ID NO: 333773 - DNA, 273 bp, Artificial Sequence
  derived and/or modified sequence
atgccacaagcttttctcctgggctctattcatgaacccgctggcgctctcatggagccccagccctgccctggttcattggcagagtccttcctggaagaagagctgcggctgaacgccgagctgagtcagctgcaattctctgaacccgtgggcatcatctacaatcccgtggagtacgcttgggagcctcaccgtaactatgtcacaaggtattgccagggtcctaaggaggtgctgtttctgggaatgaaccccggtcccttcggctag

SEQ ID NO: 333774 - DNA, 327 bp, Artificial Sequence
  derived and/or modified sequence
atgccacaagctttcttgctcgggtccatacatgagcctgcaggagctctgatggagccacaaccatgccccggaagcctggcggagtcttttctcgaagaagagttgagactgaacgccgaactgagccaactgcaattctctgagcccgtgggtattatttataaccctgtcgaatatgcctgggaaccgcaccgcaactatgtcactaggtactgccagggtcctaaagaggtgctcttcctgggaatgaatcccggaccctttggaatggcccagaccggcgttccgtttggagaggtgagtatggtgcgggactggctttag

SEQ ID NO: 333775 - DNA, 541 bp, Artificial Sequence
  derived and/or modified sequence
aaacgggatggggagctggaccagcagattatgagcttacagaaagcctggcctacattttactctttttggatttcttcctcatcaagagactgctgcagtgcctgtcatatggggtctcattatgtcagccaggctggtcttgaactcctggcctcaagcaattcttctgccttggcctctcaaagtgctgggattacaggcatgagccactgtgcccagcacagaaggtagttttaaacaaaagtgaaaaagaagatggacattgctgagcaggtgacagcggcatggacatatgccccaggctttcctgctggggtccatccatgagcctgcaggtgccctcatggagccccagccctgccctggaagcttggctgagagcttcctggaggaggagcttcggctcaatgctgagctgagccagctgcagttttcggagcctgtgggcatcatctacaatcccgtggagtatgcatgggagccacatcgcaactacgtgactcgctactgccagggccccaaggaagtactcttcctg

SEQ ID NO: 333776 - DNA, 470 bp, Artificial Sequence
  derived and/or modified sequence
ggaagtagggggctgggaatccgggactgtgggggcaagttgacggctcccagggtcgtcggggctgagccgagagggtgattatgagcttacagaaagcctggcctacattttactctttttggatttcttcctcatcaagagactgctgcagtgcctgtcatgtgacagcggcatggacatatgccccaggctttcctgctggggtccatccatgagcctgcaggtgccctcatggagccccagccctgccctggaagcttggctgagagcttcctggaggaggagcttcggctcaatgctgagctgagccagctgcagttttcggagcctgtgggcatcatctacaatcccgtggagtatgcatgggagccacatcgcaactacgtgactcgctactgccagggccccaaggaagtactcttcctgggcatgaaccctggaccttttggcatggcccagactggggt

SEQ ID NO: 333777 - DNA, 572 bp, Artificial Sequence
  derived and/or modified sequence
aaaggaaccggaaacgggatggggagctggaccaggctggagtgcaatggcgcgatctcagctcactgcagcctccgcctcccgggttcaagcgattcttctgcctcagcctcccgaatggggtctcattatgtcagccaggctggtcttgaactcctggcctcaagcaattcttctgccttggcctctcaaagtgctgggattacaggcatgagccactgtgcccagcacagaaggtagttttaaacaaaagtgaaaaagaagatggacattgctgagcaggtgacagcggcatggacatatgccccaggctttcctgctggggtccatccatgagcctgcaggtgccctcatggagccccagccctgccctggaagcttggctgagagcttcctggaggaggagcttcggctcaatgctgagctgagccagctgcagttttcggagcctgtgggcatcatctacaatcccgtggagtatgcatgggagccacatcgcaactacgtgactcgctactgccagggccccaaggaagtactcttcctgggcatgaaccctggaccttttggca

SEQ ID NO: 333778 - DNA, 465 bp, Artificial Sequence
  derived and/or modified sequence
gggggaaaggaaccggaaacgggatggggagctggaccaggctggagtgcaatggcgcgatctcagctcactgcagcctccgcctcccgggttcaagcgattcttctgcctcagcctcccgagtgacagcggcatggacatatgccccaggctttcctgctggggtccatccatgagcctgcaggtgccctcatggagccccagccctgccctggaagcttggctgagagcttcctggaggaggagcttcggctcaatgctgagctgagccagctgcagttttcggagcctgtgggcatcatctacaatcccgtggagtatgcatgggagccacatcgcaactacgtgactcgctactgccagggccccaaggaagtactcttcctgggcatgaaccctggaccttttggcatggcccagactggggtgccctttggggaagtaagcatggtccgggactggttg

SEQ ID NO: 333779 - DNA, 489 bp, Artificial Sequence
  derived and/or modified sequence
atgaggcgtgtcgtacgccagtctaaattccgacatgtgtttggccaagctgtaaagaatgatcagtgctacgacgatattagggttagccgagtcacctgggacagtagcttttgcgctgtgaatcccagatttgtggctattatcatcgaagcgagcggcggcggcgccttccttgttctacccctccacaaaaccgggcgcatagataaaagctaccctactgtctgtggccacacaggccctgtattggacatagattggtgcccgcacaatgatcaggttatcgcatcaggcagcgaagactgcaccgtgatggtgtggcagattcccgaaaatgggctcactttgagtcttacagaacccgtcgtgatcttagagggacacagcaaacgggtgggaatcgttgcttggcacccaaccgcccgcaatgttcttctgtccgccgggtgcgacaatgcaattattatatggaatgtagggacctag

SEQ ID NO: 333780 - DNA, 546 bp, Artificial Sequence
  derived and/or modified sequence
atgcgacgggtggtgcggcaatccaaatttcgtcatgtgttcggacaagccgtgaagaacgaccaatgttacgacgatatcagagtctctagggtgacctgggatagctccttttgtgctgttaatccgcgttttgtcgctatcataattgaggctagcgggggaggcgcattcctggtccttccactacacaagacaggaagaattgacaagtcctacccaactgtatgtgggcataccgggccagtattggacattgattggtgcccccataacgatcaggtgatcgccagcggatcggaagactgcactgtgatggtctggcagatccccgagaatggcctcactctgtcgcttacagagcccgtggtgatcctggaaggacattccaagagagtggggatcgtagcatggcatcccactgcgagaaacgtacttctctcagctggttgcgataatgcaatcattatttggaatgtgggaactggtgaagcactgatcaaccttgacgatatgcatagtgatatgatctacaacgtgagttag

SEQ ID NO: 333781 - DNA, 510 bp, Artificial Sequence
  derived and/or modified sequence
atgcggagggtagttaggcagagcaagtttcgccatgtctttggtcaagctgtgaagaatgatcagtgttatgacgatattagggtctcgagagtgacttgggactcatctttttgcgcagtgaaccctaggttcgtggctattatcatcgaggcctccggaggaggagcgtttctggtactgcctttgcacaagaccggccgcattgataagtcctatcctactgtctgcggccacaccggtcccgtattagacatagattggtgcccacataacgaccaggtgatcgcctccggatccgaagactgtaccgtaatggtgtggcagatcccggagaatggcctgactctctctttgactgaaccggtggtcatcctggaaggtcactccaagagggtgggcatcgtggcttggcatcccaccgcgaggaatgtgttgctttcagctgggtgtgataatgcaatcatcatttggaatgtcggcacgggagaagccctgataaacctgtag

SEQ ID NO: 333782 - DNA, 456 bp, Artificial Sequence
  derived and/or modified sequence
atgcgcagagtcgttcggcagagtaagtttaggcacgtcttcggtcaagccgttaagaatgaccagtgctacgatgacatcagagtgtcgcgtgtgacctgggactcatctttctgcgctgtgaacccgcggttcgtggccattataattgaggcaagcggcggcggcgcgttcctcgtgttaccccttcataagaccggcaggatagataagtcttatcccactgtgtgcgggcacacgggtcccgtgctggatattgattggtgcccacataatgaccaggtgatcgcctcaggtagcgaggattgtactgttatggtttggcagatccccgaaaacggcctgacattatcacttacggaaccagtggtgatccttgaaggccatagcaaaagagtgggtatagtggcatggcaccccacggcacggaatgttctactgtctgcaggggggtag

SEQ ID NO: 333783 - DNA, 492 bp, Artificial Sequence
  derived and/or modified sequence
atgcgacgcgtcgtgcggcagtctaagtttaggcatgtgtttggacaggccgtgaagaatgatcagtgctacgatgacattagagtgagccgggtcacctgggactcctccttttgcgcggtgaatccacggttcgtggccattattatcgaggccagcggtggcggcgccttcctggtgctgcccctgcataagacaggcagaattgacaaaagctatcccaccgtctgtggccataccggaccagtacttgatatagattggtgtccgcataacgaccaggtgattgcctctggctccgaagactgcactgttatggtctggcagattccagaaaatgggctcaccctgagccttacagagcctgtggttatattggaaggccactccaaacgcgtgggaattgtggcctggcaccccacggcccgaaacgtgcttctgagcgcgggttgcgacaacgcaatcatcatctggaacgtgggcactggatag

SEQ ID NO: 333784 - DNA, 489 bp, Artificial Sequence
  derived and/or modified sequence
atgagaagagtggtgcggcagagcaagttccgccacgtgtttggccaggccgtgaagaatgaccagtgctatgatgacatccgggtgtcccgggtgacctgggacagcagcttctgtgctgtgaaccccaggtttgtggccatcatcatcgaggccagcggcggcggggccttcctggtgctgcccctgcacaagacaggaagaattgacaagagctaccccaccgtgtgtggccacacaggccctgtgctggacatcgactggtgcccccacaatgaccaggtgattgccagcggcagcgaggactgcaccgtgatggtgtggcagatcccagaaaatggcctgaccctgagcctgacagagcctgtggtgatcctggagggccacagcaagagggtgggcatcgtggcctggcaccccacagccagaaatgtgctgctgtctgctggctgtgacaatgccatcatcatctggaatgtgggcacctag

SEQ ID NO: 333785 - DNA, 546 bp, Artificial Sequence
  derived and/or modified sequence
atgagaagagtggtgcggcagagcaagttccgccacgtgtttggccaggccgtgaagaatgaccagtgctatgatgacatccgggtgtcccgggtgacctgggacagcagcttctgtgctgtgaaccccaggtttgtggccatcatcatcgaggccagcggcggcggggccttcctggtgctgcccctgcacaagacaggaagaattgacaagagctaccccaccgtgtgtggccacacaggccctgtgctggacatcgactggtgcccccacaatgaccaggtgattgccagcggcagcgaggactgcaccgtgatggtgtggcagatcccagaaaatggcctgaccctgagcctgacagagcctgtggtgatcctggagggccacagcaagagggtgggcatcgtggcctggcaccccacagccagaaatgtgctgctgtctgctggctgtgacaatgccatcatcatctggaatgtgggcaccggggaggccctgatcaacctggatgacatgcacagcgacatgatctacaacgtgtcctag

SEQ ID NO: 333786 - DNA, 510 bp, Artificial Sequence
  derived and/or modified sequence
atgagaagagtggtgcggcagagcaagttccgccacgtgtttggccaggccgtgaagaatgaccagtgctatgatgacatccgggtgtcccgggtgacctgggacagcagcttctgtgctgtgaaccccaggtttgtggccatcatcatcgaggccagcggcggcggggccttcctggtgctgcccctgcacaagacaggaagaattgacaagagctaccccaccgtgtgtggccacacaggccctgtgctggacatcgactggtgcccccacaatgaccaggtgattgccagcggcagcgaggactgcaccgtgatggtgtggcagatcccagaaaatggcctgaccctgagcctgacagagcctgtggtgatcctggagggccacagcaagagggtgggcatcgtggcctggcaccccacagccagaaatgtgctgctgtctgctggctgtgacaatgccatcatcatctggaatgtgggcaccggggaggccctgatcaacctgtag

SEQ ID NO: 333787 - DNA, 456 bp, Artificial Sequence
  derived and/or modified sequence
atgagaagagtggtgcggcagagcaagttccgccacgtgtttggccaggccgtgaagaatgaccagtgctatgatgacatccgggtgtcccgggtgacctgggacagcagcttctgtgctgtgaaccccaggtttgtggccatcatcatcgaggccagcggcggcggggccttcctggtgctgcccctgcacaagacaggaagaattgacaagagctaccccaccgtgtgtggccacacaggccctgtgctggacatcgactggtgcccccacaatgaccaggtgattgccagcggcagcgaggactgcaccgtgatggtgtggcagatcccagaaaatggcctgaccctgagcctgacagagcctgtggtgatcctggagggccacagcaagagggtgggcatcgtggcctggcaccccacagccagaaatgtgctgctgtctgctgggggctag

SEQ ID NO: 333788 - DNA, 492 bp, Artificial Sequence
  derived and/or modified sequence
atgagaagagtggtgcggcagagcaagttccgccacgtgtttggccaggccgtgaagaatgaccagtgctatgatgacatccgggtgtcccgggtgacctgggacagcagcttctgtgctgtgaaccccaggtttgtggccatcatcatcgaggccagcggcggcggggccttcctggtgctgcccctgcacaagacaggaagaattgacaagagctaccccaccgtgtgtggccacacaggccctgtgctggacatcgactggtgcccccacaatgaccaggtgattgccagcggcagcgaggactgcaccgtgatggtgtggcagatcccagaaaatggcctgaccctgagcctgacagagcctgtggtgatcctggagggccacagcaagagggtgggcatcgtggcctggcaccccacagccagaaatgtgctgctgtctgctggctgtgacaatgccatcatcatctggaatgtgggcaccggctag

SEQ ID NO: 333789 - DNA, 489 bp, Artificial Sequence
  derived and/or modified sequence
atgcggcgggtggtgcggcagagcaagttccggcacgtgttcggccaggcagtcaaaaatgaccagtgttacgatgacatcagagtatcaagggtgacctgggatagtagcttctgcgccgtgaatcctagattcgtcgccatcataatagaggcctccggcggcggggcatttttggtactcccgctccacaagactggaaggatcgacaaatcctaccccaccgtttgcggccacacgggaccagtgctggacatcgattggtgcccccataacgaccaggttatcgcctcagggtctgaggactgtacggtaatggtctggcaaatccctgagaatggactgaccttatccttgaccgaaccagttgttatcctcgagggacactcaaagagagtcggaatcgtcgcctggcatcctaccgcacgcaatgtgcttctcagtgctggttgcgataacgccattataatatggaatgtggggacctag

SEQ ID NO: 333790 - DNA, 546 bp, Artificial Sequence
  derived and/or modified sequence
atgcggcgggtggtgcggcagagcaagttccggcacgtgttcggccaggcagtgaagaatgaccagtgctacgatgacatccgtgttagtcgggtgacgtgggactcttctttttgtgcagtgaaccctcgattcgtggcaatcataatcgaggcctctggcggtggggcgtttctcgtgctgccattgcacaagacggggaggatagacaagtcttacccaactgtatgcgggcatacaggtcccgtgcttgacattgattggtgcccccataacgatcaggtaatagcctcagggtccgaagactgcaccgtaatggtgtggcagattcctgagaatggcttgacgctgagtctcacagagccagtcgttattctggaggggcatagcaagagggtgggcattgtggcttggcatcctactgctcgcaacgtgctgctgagcgccggttgtgacaacgctatcatcatttggaacgtgggcactggcgaggcactcatcaacctggacgacatgcactctgatatgatttataacgtgtcgtag

SEQ ID NO: 333791 - DNA, 510 bp, Artificial Sequence
  derived and/or modified sequence
atgcggcgggtggtgcggcagagcaagttccggcacgtgttcggccaggcagtgaagaatgaccagtgttacgacgacatcagagtctcccgcgtcacttgggattcttccttttgcgccgtgaacccaagatttgtggccattatcatcgaggcctcgggggggggcgccttcctcgttcttcccctgcacaagaccggcaggattgacaaaagctacccgactgtctgtggacacactggcccagtcctggatatagattggtgcccgcataatgatcaggtaatagcgtccggcagcgaggattgtaccgttatggtttggcagattcccgaaaacgggctgactctctctctcaccgagcctgtcgtgatcttggagggtcactccaagcgtgtgggcatcgtcgcctggcaccctactgccagaaacgttcttctctccgcaggctgcgataatgctatcatcatttggaatgtgggcacaggtgaagcactgatcaatctttag

SEQ ID NO: 333792 - DNA, 456 bp, Artificial Sequence
  derived and/or modified sequence
atgcggcgggtggtgcggcagagcaagttccggcacgtgttcggccaggcagtcaaaaacgaccagtgctacgacgacattcgcgtgtccagggtgacctgggatagctcgttctgcgctgtaaaccccaggttcgtggctattataattgaggcctctgggggaggggccttccttgttttacccctgcataagacgggtaggattgacaaatcctacccaaccgtttgtggccacactgggcctgttctggacattgattggtgtccacacaacgaccaggtcattgcatcgggctctgaagactgtacagtcatggtttggcagattcccgaaaatggcctaacattgagccttacggagcctgtggtgattctggagggccactcaaagcgtgtggggatcgtagcctggcatcccaccgccagaaatgtactattaagtgcaggcggttag

SEQ ID NO: 333793 - DNA, 492 bp, Artificial Sequence
  derived and/or modified sequence
atgcggcgggtggtgcggcagagcaagttccggcacgtgttcggccaagcagtgaagaacgatcagtgctatgatgacattcgggtttcaagggtaacatgggattctagtttctgcgcagtcaatcccaggttcgtcgctattatcatagaggccagcggcggcggagcctttcttgtcctcccgttgcacaagactggcaggatcgacaagtcctacccgaccgtgtgcggtcacactggtcctgtgctagatatcgactggtgcccccataacgatcaggttatagcgtccggctccgaagattgtaccgtgatggtgtggcagattcccgagaacgggctcaccttatccttgacagagcccgtggtcattctggaaggccactcaaaacgagttgggattgtcgcctggcacccaactgctcggaacgtgctactttcagccggatgcgataacgctatcattatttggaatgtgggaacaggatag

SEQ ID NO: 333794 - DNA, 489 bp, Artificial Sequence
  derived and/or modified sequence
atgcggcgagtggttcgccaatcaaaattccggcacgtgtttggtcaggccgtgaaaaacgatcagtgttatgatgacatacgtgtgagcagagtcacttgggattcaagcttttgtgcggttaacccaaggttcgtcgctataattatcgaagcgagtggaggtggcgctttcctggtcttgccactgcataagactgggagaatcgataaaagttaccctaccgtgtgcggacatactggcccagtcctggatatcgactggtgtcctcacaatgatcaggtgattgccagcggctccgaggactgtactgtgatggtctggcagattccggaaaacggcctcaccctgagcctgaccgagccagtcgtcatcttggaaggtcatagcaagcgcgtcggtatcgtggcttggcatcctactgccaggaacgtgctccttagcgccggttgtgataatgccatcattatttggaacgtgggcacttag

SEQ ID NO: 333795 - DNA, 546 bp, Artificial Sequence
  derived and/or modified sequence
atgaggagagtcgtccgacagtctaagtttagacacgtgtttggccaggctgtgaaaaatgatcaatgttacgacgatattcgtgtgtctagggtaacatgggattcctccttttgtgctgtgaaccctcgctttgttgctataatcattgaggcatccggcggaggtgccttcctggtactgccccttcataagacgggcaggatagacaagagctacccgaccgtgtgtggacatactggaccagtgctggatatcgactggtgcccacacaatgatcaggttatagcctcgggaagtgaagattgtactgtaatggtgtggcagattcctgaaaatggactgaccctgtcgctgacagaaccggtagtaatcttggagggtcacagcaagagagtgggtatagtggcctggcatccgaccgctaggaatgttctactgtccgccggatgcgataacgccatcatcatctggaatgtcggaacaggtgaagccctgataaatcttgacgatatgcacagtgatatgatatacaatgtctcctag

SEQ ID NO: 333796 - DNA, 510 bp, Artificial Sequence
  derived and/or modified sequence
atgcgcagggtcgtgaggcagagcaagtttagacatgtgttcggccaggcggtgaagaacgaccagtgttatgatgacattagggtgagccgtgtgacctgggactcttcattctgtgcagtgaaccctcggttcgtggcaataatcatcgaggcctcaggtggaggcgcttttctggtgcttcctctgcacaagacaggacgcatcgataaatcataccctaccgtctgcggccacacagggcctgtattggacattgattggtgtcctcataacgatcaggtcatcgctagtggcagtgaagactgtacagttatggtctggcagatcccagagaatggactgactctttctctgaccgaaccagtcgtgatcctggaagggcattccaagcgggtgggaatagtggcttggcaccccactgcgcgtaacgttttgctctctgcgggatgtgataatgctataatcatttggaatgtggggaccggggaagcccttatcaacctctag

SEQ ID NO: 333797 - DNA, 456 bp, Artificial Sequence
  derived and/or modified sequence
atgaggagggtagtcaggcagtccaaatttcgccacgtgttcggacaggccgtcaagaatgatcaatgctatgatgatattagagtctcacgagttacttgggactcttcgttctgtgcggtgaatcccagatttgtggctattattatcgaggccagtggcggaggagcctttctcgttctccccctgcacaagactgggcgaattgataaatcatatcctaccgtctgtggacacactggccctgtcttggacattgactggtgtccacataatgatcaggtcattgctagcggcagcgaggactgtaccgtaatggtgtggcagattcctgagaacggcctgacactgagcctgaccgaaccggtggtgatactggagggccactctaaaagagttggcattgtcgcttggcaccccactgcacgaaatgtattgctgtctgccggtgggtag

SEQ ID NO: 333798 - DNA, 492 bp, Artificial Sequence
  derived and/or modified sequence
atgagacgtgtggtccgccagagtaagttcagacatgtgtttggccaggctgtcaaaaacgaccagtgttatgatgacatccgggtttctagggttacatgggattcttctttctgcgccgtcaatcccagattcgtggcaattatcatcgaggcttcaggcggaggggcttttcttgtgctacctttacacaaaaccgggaggattgacaagtcttatccgactgtgtgtggacacaccggaccagtactggacatagactggtgcccacataacgatcaggttattgcatctggctcagaagattgcacagtgatggtgtggcagattccagaaaacggactgacgctgagtctaaccgagcctgtggtaattttggaggggcacagcaagagggttggaatcgtggcttggcaccctacagctaggaacgttctattgtctgcaggctgtgacaatgcaattatcatctggaatgtgggcaccggctag

SEQ ID NO: 333799 - DNA, 899 bp, Artificial Sequence
  derived and/or modified sequence
gctgcgccgaaatgactgaggatgaggtcagacgtggagggtgggaatgcagaaaccgagctctcccgcctgtccccaccggcgcacgctccccagctctccgtctctcaaatgatttgaatgtgttgggggaagtggcaggctgcggtgagagctgagaagaaaggggcttcctcttggagggaggcgctggccctggcatccttttttgggagtgttcaaaggattttgaacgctggaaaaggaatcgtaggctttactgcatcacgatttagaaacacatcctatatttggccgtaatgtaggctgcccttgttttgtggtgtctaaagtgcttgctctacatgttgcaaacgtgggattcagagtgcgaagcaaattgcaagttgttcatttcccccggcatgacacgatgaggcgagtggtacgacagagcaagtttcggcatgtatttgggcaagcggtgaaaaatgaccagtgctatgatgacatccgggtttctcgtgtgacctgggatagttccttttgtgctgtcaatcccagatttgttgccataatcatagaggcaagtgggggaggagcgttccttgtcctccctctgcacaagactggtcgaattgacaaatcttaccctacagtatgtggccacacaggaccagtgctggacatagactggtgcccacataacgatcaggtcattgccagcggttcagaggactgcacggtcatggtatggcagatcccagaaaatggactcaccctttccctgactgaacctgtggtgattttggaaggccactcaaagagagtcggcatcgtggcttggcatccaacggcccgcaatgtgcttcttagtgcaggctgtgataatgccattatcatctggaatgtgggaacag

SEQ ID NO: 333800 - DNA, 566 bp, Artificial Sequence
  derived and/or modified sequence
actaggcggtttggtaacacgatgaggcgagtggtacgacagagcaagtttcggcatgtatttgggcaagcggtgaaaaatgaccagtgctatgatgacatccgggtttctcgtgtgacctgggatagttccttttgtgctgtcaatcccagatttgttgccataatcatagaggcaagtgggggaggagcgttccttgtcctccctctgcacaagactggtcgaattgacaaatcttaccctacagtatgtggccacacaggaccagtgctggacatagactggtgcccacataacgatcaggtcattgccagcggttcagaggactgcacggtcatggtatggcagatcccagaaaatggactcaccctttccctgactgaacctgtggtgattttggaaggccactcaaagagagtcggcatcgtggcttggcatccaacggcccgcaatgtgcttcttagtgcaggctgtgataatgccattatcatctggaatgtgggaacaggggaagcccttataaacttggacgatatgcattcagacatgatttacaatgtgagctg

SEQ ID NO: 333801 - DNA, 567 bp, Artificial Sequence
  derived and/or modified sequence
gtcggatcgggggcccagggtgtccgagtgaactgggtgattcagaggtgtgtttccctaatagcggggcagctggcgagggacgcagtaaaaaggagcgaggtgcagacacgatgaggcgagtggtacgacagagcaagtttcggcatgtatttgggcaagcggtgaaaaatgaccagtgctatgatgacatccgggtttctcgtgtgacctgggatagttccttttgtgctgtcaatcccagatttgttgccataatcatagaggcaagtgggggaggagcgttccttgtcctccctctgcacaagactggtcgaattgacaaatcttaccctacagtatgtggccacacaggaccagtgctggacatagactggtgcccacataacgatcaggtcattgccagcggttcagaggactgcacggtcatggtatggcagatcccagaaaatggactcaccctttccctgactgaacctgtggtgattttggaaggccactcaaagagagtcggcatcgtggcttggcatccaacggcccgcaatgtgcttcttagtgcaggtggga

SEQ ID NO: 333802 - DNA, 547 bp, Artificial Sequence
  derived and/or modified sequence
aggctttcgaggtccggaacgctcctggccgggtgcggagccgcgggccgagacacgatgaggcgagtggtacgacagagcaagtttcggcatgtatttgggcaagcggtgaaaaatgaccagtgctatgatgacatccgggtttctcgtgtgacctgggatagttccttttgtgctgtcaatcccagatttgttgccataatcatagaggcaagtgggggaggagcgttccttgtcctccctctgcacaagactggtcgaattgacaaatcttaccctacagtatgtggccacacaggaccagtgctggacatagactggtgcccacataacgatcaggtcattgccagcggttcagaggactgcacggtcatggtatggcagatcccagaaaatggactcaccctttccctgactgaacctgtggtgattttggaaggccactcaaagagagtcggcatcgtggcttggcatccaacggcccgcaatgtgcttcttagtgcaggctgtgataatgccattatcatctggaatgtgggaacagggg

SEQ ID NO: 333803 - DNA, 489 bp, Artificial Sequence
  derived and/or modified sequence
atgagaagagtggtgagacagagcaagttcagacacgtgttcggccaggccgtgaagaacgaccagtgctacgacgacatcagagtgagcagagtgacctgggacagcagcttctgcgccgtgaaccccagattcgtggccatcatcatcgaggccagcggcggcggcgccttcctggtgctgcccctgcacaagaccggcagaatcgacaagagctaccccaccgtgtgcggccacaccggccccgtgctggacatcgactggtgcccccacaacgaccaggtgatcgccagcggcagcgaggactgcaccgtgatggtgtggcagatccccgagaacggcctgaccctgagcctgaccgagcccgtggtgatcctggagggccacagcaagagagtgggcatcgtggcctggcaccccaccgccagaaacgtgctgctgagcgccggctgcgacaacgccatcatcatctggaacgtgggcacctag

SEQ ID NO: 333804 - DNA, 546 bp, Artificial Sequence
  derived and/or modified sequence
atgagaagagtggtgagacagagcaagttcagacacgtgttcggccaggccgtgaagaacgaccagtgctacgacgacatcagagtgagcagagtgacctgggacagcagcttctgcgccgtgaaccccagattcgtggccatcatcatcgaggccagcggcggcggcgccttcctggtgctgcccctgcacaagaccggcagaatcgacaagagctaccccaccgtgtgcggccacaccggccccgtgctggacatcgactggtgcccccacaacgaccaggtgatcgccagcggcagcgaggactgcaccgtgatggtgtggcagatccccgagaacggcctgaccctgagcctgaccgagcccgtggtgatcctggagggccacagcaagagagtgggcatcgtggcctggcaccccaccgccagaaacgtgctgctgagcgccggctgcgacaacgccatcatcatctggaacgtgggcaccggcgaggccctgatcaacctggacgacatgcacagcgacatgatctacaacgtgagctag

SEQ ID NO: 333805 - DNA, 510 bp, Artificial Sequence
  derived and/or modified sequence
atgagaagagtggtgagacagagcaagttcagacacgtgttcggccaggccgtgaagaacgaccagtgctacgacgacatcagagtgagcagagtgacctgggacagcagcttctgcgccgtgaaccccagattcgtggccatcatcatcgaggccagcggcggcggcgccttcctggtgctgcccctgcacaagaccggcagaatcgacaagagctaccccaccgtgtgcggccacaccggccccgtgctggacatcgactggtgcccccacaacgaccaggtgatcgccagcggcagcgaggactgcaccgtgatggtgtggcagatccccgagaacggcctgaccctgagcctgaccgagcccgtggtgatcctggagggccacagcaagagagtgggcatcgtggcctggcaccccaccgccagaaacgtgctgctgagcgccggctgcgacaacgccatcatcatctggaacgtgggcaccggcgaggccctgatcaacctgtag

SEQ ID NO: 333806 - DNA, 456 bp, Artificial Sequence
  derived and/or modified sequence
atgagaagagtggtgagacagagcaagttcagacacgtgttcggccaggccgtgaagaacgaccagtgctacgacgacatcagagtgagcagagtgacctgggacagcagcttctgcgccgtgaaccccagattcgtggccatcatcatcgaggccagcggcggcggcgccttcctggtgctgcccctgcacaagaccggcagaatcgacaagagctaccccaccgtgtgcggccacaccggccccgtgctggacatcgactggtgcccccacaacgaccaggtgatcgccagcggcagcgaggactgcaccgtgatggtgtggcagatccccgagaacggcctgaccctgagcctgaccgagcccgtggtgatcctggagggccacagcaagagagtgggcatcgtggcctggcaccccaccgccagaaacgtgctgctgagcgccggcggctag

SEQ ID NO: 333807 - DNA, 492 bp, Artificial Sequence
  derived and/or modified sequence
atgagaagagtggtgagacagagcaagttcagacacgtgttcggccaggccgtgaagaacgaccagtgctacgacgacatcagagtgagcagagtgacctgggacagcagcttctgcgccgtgaaccccagattcgtggccatcatcatcgaggccagcggcggcggcgccttcctggtgctgcccctgcacaagaccggcagaatcgacaagagctaccccaccgtgtgcggccacaccggccccgtgctggacatcgactggtgcccccacaacgaccaggtgatcgccagcggcagcgaggactgcaccgtgatggtgtggcagatccccgagaacggcctgaccctgagcctgaccgagcccgtggtgatcctggagggccacagcaagagagtgggcatcgtggcctggcaccccaccgccagaaacgtgctgctgagcgccggctgcgacaacgccatcatcatctggaacgtgggcaccggctag

SEQ ID NO: 333808 - DNA, 498 bp, Artificial Sequence
  derived and/or modified sequence
tcgaaagagccacagcgtggtatgggatacatgccaaaaaggggccttgatgtcaacaagtgcgaaattgcacgcttctttaaactgcatgaacgcaagtgtgaaccaatcattatgacagttccaaggaagagtgacttgttccaggatgacctgtatccagatacagccggaccggaggccgcccttgaggcggaagaatggttcgaaggcaagaacgcagatcctattttgatttctctaaagcatggttacattccaggcaaaaatcgggatctgaaggtcgtaaagaagaatattctggatagcaaacctacagcaaataagaaatgcgacctcattagcattccgaaaaagaccactgataccgcatcagtccaaaacgaggctaagctggacgaaatcctgaaagagatcaaatccattaaagacaccatctgcaatcaggatgagaggatatccaagctggagcagcagatggcaaagatcgctgcttag

SEQ ID NO: 333809 - DNA, 498 bp, Artificial Sequence
  derived and/or modified sequence
agcaaggagccccagaggggcatgggctacatgcccaagaggggcctggatgtgaacaagtgtgaaattgcccgcttcttcaagctgcacgagaggaaatgtgagcccatcatcatgacagtgcccaggaagagtgacctcttccaggatgacctgtacccagacacagctggccctgaggccgccctggaggccgaggagtggtttgagggcaagaatgctgaccccatcctgatcagcctgaagcacggctacatccctgggaagaacagagacctgaaggtggtgaagaagaacatcctggacagcaagcccacagccaacaagaagtgtgacctgatcagcatccccaagaagaccacagacacagcctctgtgcagaatgaggccaagctggatgagatcctgaaggagatcaagagcatcaaggacaccatctgcaaccaggatgagcgcatcagcaagctggagcagcagatggccaagattgctgcctag

SEQ ID NO: 333810 - DNA, 498 bp, Artificial Sequence
  derived and/or modified sequence
agcaaggagccccagcggggcatgggctacatgcccaagcggggcttagacgtgaataagtgtgaaatcgctcggttttttaagctacacgagcgcaagtgcgagcccatcattatgaccgtgccgaggaagagtgatctgttccaggatgatctttatcccgatacagccgggcctgaggctgccctggaggctgaagaatggttcgaagggaagaacgctgacccaatacttatcagcctgaaacatggctacattccgggcaagaacagggacctgaaagtggtgaaaaaaaacatcctggactccaaaccaacggcaaataagaagtgtgacctgatctccattcccaagaaaaccactgacaccgcttccgtccagaacgaagcgaaactcgacgaaattttgaaggagatcaaatctattaaggacaccatctgcaaccaggatgagagaatttcaaagctcgagcagcagatggccaaaatagccgcctag

SEQ ID NO: 333811 - DNA, 498 bp, Artificial Sequence
  derived and/or modified sequence
tctaaagagccacagaggggtatggggtatatgccaaaaaggggcctggatgtgaacaagtgtgagatcgctaggttctttaagttacacgagaggaagtgcgaaccaatcatcatgaccgtacctcggaagtctgatctttttcaggatgacctctacccggacacggctgggcctgaagccgcattagaagcagaggaatggttcgaggggaagaacgctgacccaattcttatatctctcaaacatgggtatattccaggtaagaaccgcgatctaaaagtcgtaaagaagaatatactggatagcaagcctacagctaataagaagtgtgatttgatctcgatcccaaaaaagacgaccgataccgccagcgttcagaatgaagctaagctcgatgagatacttaaagagattaaaagcatcaaagacacaatttgcaaccaggatgagaggatttctaaattggaacagcagatggcaaagatcgctgcctag

SEQ ID NO: 333812 - DNA, 577 bp, Artificial Sequence
  derived and/or modified sequence
agcaaggagcctcagagagggatgggttacatgcccaagaggggacttgatgttaacaaatgtgagattgccagattcttcaaacttcatgagagaaagtgtgaacctattattatgactgttcccaggaagtctgaccttttccaagatgacctgtatcctgacacagcggggccagaggccgcgctggaggcagaagagtggttcgaaggcaagaatgcagacccaatcctcatctccttgaagcacgggtacattccaggcaaaaacagggatctcaaggtggtcaagaagaacattctggatagcaagcccactgcaaacaagaagtgcgacctgatcagcatccccaagaaaaccacagacacggccagtgtgcaaaatgaagccaagttggatgagattttaaaagagatcaaatctataaaagacacaatctgcaatcaagatgagcgtatttccaagttagaacagcagatggcaaagatagcagcctgaagaaattgggtgtttgtaccagaatggaattttgcttctcggttatcctgtgcttcagatgattataatctaacccaaa

SEQ ID NO: 333813 - DNA, 498 bp, Artificial Sequence
  derived and/or modified sequence
agcaaggagccccagagaggcatgggctacatgcccaagagaggcctggacgtgaacaagtgcgagatcgccagattcttcaagctgcacgagagaaagtgcgagcccatcatcatgaccgtgcccagaaagagcgacctgttccaggacgacctgtaccccgacaccgccggccccgaggccgccctggaggccgaggagtggttcgagggcaagaacgccgaccccatcctgatcagcctgaagcacggctacatccccggcaagaacagagacctgaaggtggtgaagaagaacatcctggacagcaagcccaccgccaacaagaagtgcgacctgatcagcatccccaagaagaccaccgacaccgccagcgtgcagaacgaggccaagctggacgagatcctgaaggagatcaagagcatcaaggacaccatctgcaaccaggacgagagaatcagcaagctggagcagcagatggccaagatcgccgcctag

SEQ ID NO: 333814 - protein, 237 aa, Artificial Sequence
  derived and/or modified sequence
MWLGRRALCALVLLLACASLGLLYASTRDAPGLRLPLAPWAPPQSPRRPELPDLAPEPRYAHIPVRIKEQVVGLLAWNNCSCESSGGGLPLPFQKQVRAIDLTKAFDPAELRAASATREQEFQAFLSRSQSPADQLLIAPANSPLQYPLQGVEVQPLRSILVPGLSLQAASGQEVYQVNLTASLGTWDVAGEVTGVTLTGEGQADLTLVSPGLDQLNRQLQLVTYSSRSYQTNTADT

SEQ ID NO: 333815 - protein, 205 aa, Artificial Sequence
  derived and/or modified sequence
MSFATKFSDYFLLIEDNVFFAPNFVTHIHSRVTTMKSNSWVLMEFSNMGFLGKLFHSRDLPLLAHFLLLFYKEKPLDSLISHFHTLLVQESPILCRPFLFYCRVSYTAFDHKQKATALQKKNADGPNNPPGAVFTDMQVSDVHFPWEAYTLDESFFWTHNISIGNHLTVILNHPANLSRVQVMTGSIVEWEVRPGEGAGGAGLPT

SEQ ID NO: 333816 - protein, 478 aa, Artificial Sequence
  derived and/or modified sequence
MFKFHQMKHIFEILDKMRCLRKRSTVSFLGVLVIFLLFMNLYIEDSYVLEGDKQLIRETSTHQLNSERYVHTFKDLSNFSGAINVTYRYLAATPLQRKRYLTIGLSSVKRKKGNYLLETIKSIFEQSSYEELKEISVVVHLADFNSSWRDAMVQDITQKFAHHIIAGRLMVIHAPEEYYPILDGLKRNYNDPEDRVKFRSKQNVDYAFLLNFCANTSDYYVMLEDDVRCSKNFLTAIKKVIASLEGTYWVTLEFSKLGYIGKLYHSHDLPRLAHFLLMFYQEMPCDWLLTHFRGLLAQKNVIRFKPSLFQHMGYYSSYKGTENKLKDDDFEEESFDIPDNPPASLYTNMNVFENYEASKAYSSVDEYFWGKPPSTGDVFVIVFENPIIIKKIKVNTGTEDRQNDILHHGALDVGENVMPSKQRRQCSTYLRLGEFKNGNFEMSGVNQKIPFDIHCMRIYVTKTQKEWLIIRSISIWTS

SEQ ID NO: 333817 - protein, 398 aa, Artificial Sequence
  derived and/or modified sequence
MFKFHQMKHIFEILDKMRCLRKRSTVSFLGVLVIFLLFMNLYIEDSYVLEGDKQLIRETSTHQLNSERYVHTFKDLSNFSGAINVTYRYLAATPLQRKRYLTIGLSSVKRKKGNYLLETIKSIFEQSSYEELKEISVVVHLADFNSSWRDAMVQDITQKFAHHIIAGRLMVIHAPEEYYPILDGLKRNYNDPEDRVKFRSKQNVDYAFLLNFCANTSDYYVMLEDDVRCSKNFLTAIKKVIASLEGTYWVTLEFSKLGYIGKLYHSHDLPRLAHFLLMFYQEMPCDWLLTHFRGLLAQKNVIRFKPSLFQHMGYYSSYKGTENKLKDDDFEEESFDIPDNPPASLYTNMNVFENYEASKAYSSVDEYFWGKPPSTGDVFVIVFENPIIIKKIKVNTGT

SEQ ID NO: 333818 - DNA, 3178 bp, Artificial Sequence
  derived and/or modified sequence
tttcttttttccagggtatcaacggtttctgtacagcacagattatgacagcgtctttcttaagattctgtggacctgactgacactagaaaagccgcagtagcatgtgacatggaagtttatattatcagggtgtgctcacctggttgcaaatttgagaccaaagttttactttaacacttggagctggtaaaggatgttttattcattgtgtttctgacagatggaacaagttaaggttaccttctcaatatgaggactaaagcttttagccaatatttgtggagaagacacatttaagattttcttttgcccatacatgcaatgttatggaggctgtgaccacattttaggcaagaaactgaaagaacatcaagcacctatctggatgtctccaaagcctcatctggataaaatatccaatctatttttcaatcagcctttttttttcctttttcaacctcagacaattgcttttggggtcctagagtcccttgaaagttatgatggaaataggagacctaaagttcaggtgactgaagggctgaagcaggaaggaaaaacgtctgggaggacaggtagacagaggaaagaggtctgaagaggcacatatcaaaagattcaagaaagctgaagggaagattgaaggtagtaaaaggatgaaggaggagcagaagcaatgggaaggaagagatctcagaggactcacttcgggaaaatcttcagtttcccaaagagatcctgaagtctcaaattatccttaacaaaaccatgaccacaagaaaggaagtggagtatacgatcagtgagagtttaagaagggggtttccgttgactaaaaagttaccgtgggagaaataggatcaaatagaacagagttgcctcacaaagaaccaaggaaaatatttcagctcagggattcaagaagtaaattcccactcaaagacagaaacaggaagtaagatttacaattcagccagtaccttcctaacagagaagcatgtgactataccaacttcttacaaaaagaaacaggactaactcagcctctgtatagtgtactcaggctctctcagccctcactgtgcttcaacagacttatcatttggagcactggctcaggagtcgaaatcaccaatggctcatccatcaatcaaccagaagtgaagacgaaagcttcaaagaagagaatgtttaaatttcatcaaatgaaacatatttttgaaatacttgataaaatgagatgcctgagaaaacgttctacagtgtcattcttgggagttcttgtcatttttctcctttttatgaacttgtacattgaagatagctatgttctggaaggagacaaacaacttataagggaaacatccacacatcaactgaattcagaacgctatgttcatactttcaaggatttatctaatttctcaggagccataaatgtcacctatcgctacctagctgccacacctttacaaagaaagcggtatcttacaattggactttcttcagtaaagcgaaaaaaaggaaactatttacttgagacaattaagtcaatttttgagcaatccagctatgaagagctgaaggaaatttcagtggtggttcacctagcagactttaattcttcctggcgtgatgccatggtccaggatattacacagaaatttgcgcaccatattattgcaggaagattaatggttatacatgctccagaggagtattacccaatcctagatggccttaaaagaaattacaatgatccagaagatagagtcaaatttcgttccaagcaaaatgtagattatgcttttctgcttaatttttgtgccaatacttcagactattatgtaatgcttgaagatgatgttcgatgttcaaaaaatttcttaactgccatcaagaaagtcattgcatccctagaaggaacttactgggtaactcttgaattctctaagcttggctacattggtaaactctatcattctcatgatctcccacgtttggcccattttttattaatgttttatcaagaaatgccttgtgattggctattgactcatttccgtggtctgttggctcagaaaaatgtgatccgttttaaaccatctctctttcagcacatgggctattattcatcatacaaagggacggagaataagctgaaggatgatgattttgaagaggagtcatttgacattcctgataacccccctgcaagtctgtacaccaacatgaatgtgtttgaaaattatgaagcaagcaaggcttacagtagtgttgatgagtacttttgggggaaaccaccttcaacaggagatgtttttgtgattgtatttgaaaatccaattataataaaaaaaattaaagtaaatactggaacagaagatcggcaaaatgatattttgcatcatggagccctagatgttggggaaaacgttatgcctagcaaacaaaggagacaatgttctacttacttaagactaggagaattcaaaaatggaaactttgaaatgtcaggtgtaaatcaaaaaattccatttgatatacattgtatgaggatatatgtcaccaaaacacaaaaggaatggctaattattaggagtattagcatttggacttcttagccaattaaatcagtatgttcagtttctgaagcagttcttcctgcttcgtcttttgctacctttgtcttttggagggaaagcaatggatgggatatgttaaaagaaacattaattacattggcagttttcatttatacattgttgacataattttactcttaatacacacttgtatttattttaacgtctgaagttgaatatcagtctatagctaatgctactttcatttatatttttaaatgttcttagttttaaaatttcaactgattgtcgaaagggtaatatgaaagattttaaatgaaaaaaatttgttggatgatgatttttgaaaaatagtcaccaactgtatatacttcctcaagaactgataattcattatatcatcagatagcttttattaagcatctgtgggaatatacagttgggggaatgataatctggtttattttttctgtaaacttaagtttccgttgacttctgtacatctacaatgaatacctcctcatagaagtggtgtctttacataattttttgtgtaggtgacactatgg

SEQ ID NO: 333819 - DNA, 1423 bp, Artificial Sequence
  derived and/or modified sequence
gcccaaggatcactcatgcttccaggctgcacagagcactgttggatctagctgaacgaattgttttctctgtctctgggtatcaacggtttctgtacagcacagattatgacagcgtctttcttaagagacaagttctcactacgttgcccaggctggtgtcaagctccgggcctcaagcgatcctcccacctcagcctcccaaagcgctgaaattacagacgaagagaatgtttaaatttcatcaaatgaaacatatttttgaaatacttgataaaatgagatgcctgagaaaacgttctacagtgtcattcttgggagttcttgtcatttttctcctttttatgaacttgtacattgaagatagctatgttctggaaggagacaaacaacttataagggaaacatccacacatcaactgaattcagaacgctatgttcatactttcaaggatttatctaatttctcaggagccataaatgtcacctatcgctacctagctgccacacctttacaaagaaagcggtatcttacaattggactttcttcagtaaagcgaaaaaaaggaaactatttacttgagacaattaagtcaatttttgagcaatccagctatgaagagctgaaggaaatttcagtggtggttcacctagcagactttaattcttcctggcgtgatgccatggtccaggatattacacagaaatttgcgcaccatattattgcaggaagattaatggttatacatgctccagaggagtattacccaatcctagatggccttaaaagaaattacaatgatccagaagatagagtcaaatttcgttccaagcaaaatgtagattatgcttttctgcttaatttttgtgccaatacttcagactattatgtaatgcttgaagatgatgttcgatgttcaaaaaatttcttaactgccatcaagaaagtcattgcatccctagaaggaacttactgggtaactcttgaattctctaagcttggctacattggtaaactctatcattctcatgatctcccacgtttggcccattttttattaatgttttatcaagaaatgccttgtgattggctattgactcatttccgtggtctgttggctcagaaaaatgtgatccgttttaaaccatctctctttcagcacatgggctattattcatcatacaaagggacggagaataagctgaaggatgatgattttgaagaggagtcatttgacattcctgataacccccctgcaagtctgtacaccaacatgaatgtgtttgaaaattatgaagcaagcaaggcttacagtagtgttgatgagtacttttgggggaaaccaccttcaacaggagatgtttttgtgattgtatttgaaaatccaattataataaaaaaaattaaagtaaatactggaac

SEQ ID NO: 333820 - protein, 366 aa, Artificial Sequence
  derived and/or modified sequence
MQPPLDLKQILPFPLEPAPTLGLFSNYSTMDPVQKAVLSHTFGGPLLKTKRPVISCNICQIRFNSQSQAEAHYKGNRHARRVKGIEAAKTRGREPGVREPGDPAPPGSTPTNGDGVAPRPVSMENGLGPAPGSPEKQPGSPSPPSIPETGQGVTKGEGGTPAPASLPGGSKEEEEKAKRLLYCALCKVAVNSLSQLEAHNKGTKHKTILEARSGLGPIKAYPRLGPPTPGEPEAPAQDRTFHCEICNVKVNSEVQLKQHISSRRHRDGVAGKPNPLLSRHKKSRGAGELAGTLTFSKELPKSLAGGLLPSPLAVAAVMAAAAGSPLSLRPAPAAPLLQGPPITHPLLHPAPGPIRTAHGPILFSPY

SEQ ID NO: 333821 - protein, 232 aa, Artificial Sequence
  derived and/or modified sequence
MQPPLDLKQILPFPLEPAPTLGLFSNYSTMDPVQKAVLSHTFGGPLLKTKRPVISCNICQIRFNSQSQAEAHYKGNRHARRVKGIEAAKTRGREPGVREPGDPAPPGSTPTNGDGVAPRPVSMENGLGPAPGSPEKQPGSPSPPSIPETGQGVTKGEGGTPAPASLPGGSKEEEEKAKRLLYCALCKVAVNSLSQLEAHNKGTKHKTILEARSGLGPIKAYPRLGPPTPGEP

SEQ ID NO: 333822 - protein, 165 aa, Artificial Sequence
  derived and/or modified sequence
MQPPLDLKQILPFPLEPAPTLGLFSNYSTMDPVQKAVLSHTFGGPLLKTKRPVISCNICQIRFNSQSQAEAHYKGNRHARRVKGIEAAKTRGREPGVREPGDPAPPGSTPTNGDGVAPRPVSMENGLGPAPGSPEKQPGSPSPPSIPETGQGVTKGEGGTPAPAS

SEQ ID NO: 333823 - protein, 145 aa, Artificial Sequence
  derived and/or modified sequence
MQPPLDLKQILPFPLEPAPTLGLFSNYSTMDPVQKAVLSHTFGGPLLKTKRPVISCNICQIRFNSQSQAEAHYKGNRHARRVKGIEAAKTRGREPGVREPGDPAPPGSTPTNGDGVAPRPVSMENGLGPAPGSPEKQPGSPSPPS

SEQ ID NO: 333824 - DNA, 2430 bp, Artificial Sequence
  derived and/or modified sequence
attgctctggagccagcaggggaagtgtgtacactatgtgcactgagggtgacacttctgagtgtgggggccctggctagggagtgggactggcaggcttgggtggggttcccaagctttaatcttcctaccccacagaatgttttctctgcccttcaggcagcctgagccgggcagggcccctgcctctgctacggcagcccccgatcatgcagcccccactggacctcaagcagatcctgcccttcccactcgagccagcccctacccttggcctcttcagcaactacagcaccatggaccctgtgcagaaggctgtgctctcccacacttttgggggacccttgctcaagaccaagcggcccgtcatttcctgtaatatctgtcaaatccgcttcaattctcagagccaggctgaggcgcactacaaaggtaatcgccacgcccgacgagtcaaaggcattgaggctgccaagaccagaggcagggagcctggcgtccgagaacctggagacccagctcccccaggcagcaccccaacaaatggggatggtgtagcaccccgtccagtttccatggagaatggactggggccagccccaggatccccagagaaacagcctggctccccatcccctcccagcattccggagactggtcagggtgtaaccaagggtgaaggggggactccagccccggcttccttgcctgggggtagcaaggaagaggaggagaaagccaagcggctgctctactgtgctctgtgcaaggtggctgtgaactccctgtcccagcttgaggcacataacaaaggtactaagcacaagacaattctggaggcccgaagtgggctcgggcccatcaaagcttaccctcggctggggcctcccaccccgggggaaccagaggctcctgcccaggaccgaactttccactgtgagatctgcaatgtcaaggtcaactcggaggtccaactgaaacagcacatctccagccggcggcaccgagacggcgtggccgggaagcccaacccactactgagccgtcacaagaagtctaggggcgccggggagctggcgggcacgctgactttctccaaggagctgcccaagtccctggcgggcggcctgctccccagccccctggcggtggctgcagtgatggcagcggcagcaggctcgccgctgtccctgcgcccggctccagccgcacctcttctccagggaccgccgatcactcaccctctgcttcacccggcccccggacccatccgaactgcgcacggacccatcctcttctccccgtactgacctcaaccctgaacccctcccattcaactccccacctccagccgggacccaggcgtccgggctcccagcccgcccctcctcccggcactccctaaatgatctctccttccccccccccaccccgagatacggggttccaggaaaggggaggggtagcgggggaggggggcttcagaagggggggaacaccccagatctcagggaaccccgccccctgcctttccctctcccctagaaaagggggggccgtctcacccccgagcccccttggagacaccccccctcccaaaagccatgtccatccagcccttccccccaaacctagcacaaaacggggttcacaagccatggtcggggtccgggggggacagaaatggattttcttggcaataagcggactctgggactccggctccctaccccaaactgaagcgcttccgtgaacacccccgtcctccgtagggggaggggagcaggcgggatcctgggtccctcataagcactttggttttaccgcctgcaacctcactgtgcccgccccgcaccatgccctagccccaggtctagccgggcccattgcagggggcagcacttgggggcatctccggcacttgggtgggaccaaggagatgccaccatagacctttccctcgccttcttcctccctagtccgggttccattcttttcaccagcacccatcgcccaaggggtaccgaggggggcaaggggtgtccagtccaagcccacccccgcctcgccttccgcaaaactgtgagcaaaaagcaatagaagcctcgcccccgcccttccccttcgcaggattcgccgagtctgtagcctccccgatccaagttcctagacctcatggctgtcccctcccaccagtcacctccactgcacaactcgggcgggggtgtgacacctctcccccacccccgactccgtggtttccgtatcgtcaacccttcagccgccgacccgggaggggtctggcctacactggtcttccccttcccatcaactctttctgcttgacaatgtagcaacccaggccccccacccacggtcctcccctttttcctctccctgacaataaagtctgaatttgttctgccctcc

SEQ ID NO: 333825 - DNA, 2494 bp, Artificial Sequence
  derived and/or modified sequence
gggcagaaccaagggaaggggacgctgtcaggcccaggcccctggggggccagggccaggccactgcctgggggcagcaggcatcagaaactaaaggatgaatcacccacttgactctcttcttcctggggcgataccaagctttaggatcccctgggggaaagcaaaaccagaagaagagggtggccaggggcttgaggctgggagtcctgctggttcagcaggcagcctgcagaaaaggcagcctgagccgggcagggcccctgcctctgctacggcagcccccgatcatgcagcccccactggacctcaagcagatcctgcccttcccactcgagccagcccctacccttggcctcttcagcaactacagcaccatggaccctgtgcagaaggctgtgctctcccacacttttgggggacccttgctcaagaccaagcggcccgtcatttcctgtaatatctgtcaaatccgcttcaattctcagagccaggctgaggcgcactacaaaggtaatcgccacgcccgacgagtcaaaggcattgaggctgccaagaccagaggcagggagcctggcgtccgagaacctggagacccagctcccccaggcagcaccccaacaaatggggatggtgtagcaccccgtccagtttccatggagaatggactggggccagccccaggatccccagagaaacagcctggctccccatcccctcccagcattccggagactggtcagggtgtaaccaagggtgaaggggggactccagccccggcttccttgcctgggggtagcaaggaagaggaggagaaagccaagcggctgctctactgtgctctgtgcaaggtggctgtgaactccctgtcccagcttgaggcacataacaaaggtactaagcacaagacaattctggaggcccgaagtgggctcgggcccatcaaagcttaccctcggctggggcctcccaccccgggggaaccagaggctcctgcccaggaccgaactttccactgtgagatctgcaatgtcaaggtcaactcggaggtccaactgaaacagcacatctccagccggcggcaccgagacggcgtggccgggaagcccaacccactactgagccgtcacaagaagtctaggggcgccggggagctggcgggcacgctgactttctccaaggagctgcccaagtccctggcgggcggcctgctccccagccccctggcggtggctgcagtgatggcagcggcagcaggctcgccgctgtccctgcgcccggctccagccgcacctcttctccagggaccgccgatcactcaccctctgcttcacccggcccccggacccatccgaactgcgcacggacccatcctcttctccccgtactgacctcaaccctgaacccctcccattcaactccccacctccagccgggacccaggcgtccgggctcccagcccgcccctcctcccggcactccctaaatgatctctccttccccccccccaccccgagatacggggttccaggaaaggggaggggtagcgggggaggggggcttcagaagggggggaacaccccagatctcagggaaccccgccccctgcctttccctctcccctagaaaagggggggccgtctcacccccgagcccccttggagacaccccccctcccaaaagccatgtccatccagcccttccccccaaacctagcacaaaacggggttcacaagccatggtcggggtccgggggggacagaaatggattttcttggcaataagcggactctgggactccggctccctaccccaaactgaagcgcttccgtgaacacccccgtcctccgtagggggaggggagcaggcgggatcctgggtccctcataagcactttggttttaccgcctgcaacctcactgtgcccgccccgcaccatgccctagccccaggtctagccgggcccattgcagggggcagcacttgggggcatctccggcacttgggtgggaccaaggagatgccaccatagacctttccctcgccttcttcctccctagtccgggttccattcttttcaccagcacccatcgcccaaggggtaccgaggggggcaaggggtgtccagtccaagcccacccccgcctcgccttccgcaaaactgtgagcaaaaagcaatagaagcctcgcccccgcccttccccttcgcaggattcgccgagtctgtagcctccccgatccaagttcctagacctcatggctgtcccctcccaccagtcacctccactgcacaactcgggcgggggtgtgacacctctcccccacccccgactccgtggtttccgtatcgtcaacccttcagccgccgacccgggaggggtctggcctacactggtcttccccttcccatcaactctttctgcttgacaatgtagcaacccaggccccccacccacggtcctcccctttttcctctccctgacaataaagtctg

SEQ ID NO: 333826 - DNA, 2369 bp, Artificial Sequence
  derived and/or modified sequence
ggcagaaccaagggaaggggacgctgtcaggcccaggcccctggggggccagggccaggccactgcctgggggcagcaggcatcagaaactaaaggcagcctgagccgggcagggcccctgcctctgctacggcagcccccgatcatgcagcccccactggacctcaagcagatcctgcccttcccactcgagccagcccctacccttggcctcttcagcaactacagcaccatggaccctgtgcagaaggctgtgctctcccacacttttgggggacccttgctcaagaccaagcggcccgtcatttcctgtaatatctgtcaaatccgcttcaattctcagagccaggctgaggcgcactacaaaggtaatcgccacgcccgacgagtcaaaggcattgaggctgccaagaccagaggcagggagcctggcgtccgagaacctggagacccagctcccccaggcagcaccccaacaaatggggatggtgtagcaccccgtccagtttccatggagaatggactggggccagccccaggatccccagagaaacagcctggctccccatcccctcccagcattccggagactggtcagggtgtaaccaagggtgaaggggggactccagccccggcttccttgcctgggggtagcaaggaagaggaggagaaagccaagcggctgctctactgtgctctgtgcaaggtggctgtgaactccctgtcccagcttgaggcacataacaaaggtactaagcacaagacaattctggaggcccgaagtgggctcgggcccatcaaagcttaccctcggctggggcctcccaccccgggggaaccagaggctcctgcccaggaccgaactttccactgtgagatctgcaatgtcaaggtcaactcggaggtccaactgaaacagcacatctccagccggcggcaccgagacggcgtggccgggaagcccaacccactactgagccgtcacaagaagtctaggggcgccggggagctggcgggcacgctgactttctccaaggagctgcccaagtccctggcgggcggcctgctccccagccccctggcggtggctgcagtgatggcagcggcagcaggctcgccgctgtccctgcgcccggctccagccgcacctcttctccagggaccgccgatcactcaccctctgcttcacccggcccccggacccatccgaactgcgcacggacccatcctcttctccccgtactgacctcaaccctgaacccctcccattcaactccccacctccagccgggacccaggcgtccgggctcccagcccgcccctcctcccggcactccctaaatgatctctccttccccccccccaccccgagatacggggttccaggaaaggggaggggtagcgggggaggggggcttcagaagggggggaacaccccagatctcagggaaccccgccccctgcctttccctctcccctagaaaagggggggccgtctcacccccgagcccccttggagacaccccccctcccaaaagccatgtccatccagcccttccccccaaacctagcacaaaacggggttcacaagccatggtcggggtccgggggggacagaaatggattttcttggcaataagcggactctgggactccggctccctaccccaaactgaagcgcttccgtgaacacccccgtcctccgtagggggaggggagcaggcgggatcctgggtccctcataagcactttggttttaccgcctgcaacctcactgtgcccgccccgcaccatgccctagccccaggtctagccgggcccattgcagggggcagcacttgggggcatctccggcacttgggtgggaccaaggagatgccaccatagacctttccctcgccttcttcctccctagtccgggttccattcttttcaccagcacccatcgcccaaggggtaccgaggggggcaaggggtgtccagtccaagcccacccccgcctcgccttccgcaaaactgtgagcaaaaagcaatagaagcctcgcccccgcccttccccttcgcaggattcgccgagtctgtagcctccccgatccaagttcctagacctcatggctgtcccctcccaccagtcacctccactgcacaactcgggcgggggtgtgacacctctcccccacccccgactccgtggtttccgtatcgtcaacccttcagccgccgacccgggaggggtctggcctacactggtcttccccttcccatcaactctttctgcttgacaatgtagcaacccaggccccccacccacggtcctcccctttttcctctccctgacaataaagtctgaatttgttctgccctccgcc

SEQ ID NO: 333827 - protein, 285 aa, Artificial Sequence
  derived and/or modified sequence
MQPPLDLKQILPFPLEPAPTLGLFSNYSTMDPVQKAVLSHTFGGPLLKTKRPVISCNICQIRFNSQSQAEAHYKGNRHARRVKGIEAAKTRGREPGVREPGDPAPPGSTPTNGDGVAPRPGTKHKTILEARSGLGPIKAYPRLGPPTPGEPEAPAQDRTFHCEICNVKVNSEVQLKQHISSRRHRDGVAGKPNPLLSRHKKSRGAGELAGTLTFSKELPKSLAGGLLPSPLAVAAVMAAAAGSPLSLRPAPAAPLLQGPPITHPLLHPAPGPIRTAHGPILFSPY

SEQ ID NO: 333828 - DNA, 1111 bp, Artificial Sequence
  derived and/or modified sequence
gacacttctgagtgtgggggccctggctagggagtgggactggcaggcttgggtggggttcccaagctttaatcttcctaccccacagaatgttttctctgcccttcaggcagcctgagccgggcagggcccctgcctctgctacggcagcccccgatcatgcagcccccactggacctcaagcagatcctgcccttcccactcgagccagcccctacccttggcctcttcagcaactacagcaccatggaccctgtgcagaaggctgtgctctcccacacttttgggggacccttgctcaagaccaagcggcccgtcatttcctgtaatatctgtcaaatccgcttcaattctcagagccaggctgaggcgcactacaaaggtaatcgccacgcccgacgagtcaaaggcattgaggctgccaagaccagaggcagggagcctggcgtccgagaacctggagacccagctcccccaggcagcaccccaacaaatggggatggtgtagcaccccgtccaggtactaagcacaagacaattctggaggcccgaagtgggctcgggcccatcaaagcttaccctcggctggggcctcccaccccgggggaaccagaggctcctgcccaggaccgaactttccactgtgagatctgcaatgtcaaggtcaactcggaggtccaactgaaacagcacatctccagccggcggcaccgagacggcgtggccgggaagcccaacccactactgagccgtcacaagaagtctaggggcgccggggagctggcgggcacgctgactttctccaaggagctgcccaagtccctggcgggcggcctgctccccagccccctggcggtggctgcagtgatggcagcggcagcaggctcgccgctgtccctgcgcccggctccagccgcacctcttctccagggaccgccgatcactcaccctctgcttcacccggcccccggacccatccgaactgcgcacggacccatcctcttctccccgtactgacctcaaccctgaacccctcccattcaactccccacctccagccgggacccaggcgtccgggctcccagcccgcccctcctcccggcactcccta

SEQ ID NO: 333829 - DNA, 132 bp, Artificial Sequence
  derived and/or modified sequence
tgatctcgaaatgatgacatatgtatttacggcgggctgggactgggcggacttctcttgctggccgtcgtcctgctgtccgcctgtttatgttggttgcatcggcgcgaggccgcatcggcccagcagtag

SEQ ID NO: 333830 - protein, 978 aa, Artificial Sequence
  derived and/or modified sequence
MSPSLGFPAQMNHQKGPSPSFGVQPCGPHDSARGGMIPHPQSRGPFPTCQLKSELDMLVGKCREEPLEGDMSSPNSTGIQDPLLGMLDGREDLEREEKREPESVYETDCRWDGCSQEFDSQEQLVHHINSEHIHGERKEFVCHWGGCSRELRPFKAQYMLVVHMRRHTGEKPHKCTFEGCRKSYSRLENLKTHLRSHTGEKPYMCEHEGCSKAFSNASDRAKHQNRTHSNEKPYVCKLPGCTKRYTDPSSLRKHVKTVHGPDAHVTKRHRGDGPLPRAPSISTVEPKREREGGPIREESRLTVPEGAMKPQPSPGAQSSCSSDHSPAGSAANTDSGVEMTGNAGGSTEDLSSLDEGPCIAGTGLSTLRRLENLRLDQLHQLRPIGTRGLKLPSLSHTGTTVSRRVGPPVSLERRSSSSSSISSAYTVSRRSSLASPFPPGSPPENGASSLPGLMPAQHYLLRARYASARGGGTSPTAASSLDRIGGLPMPPWRSRAEYPGYNPNAGVTRRASDPAQAADRPAPARVQRFKSLGCVHTPPTVAGGGQNFDPYLPTSVYSPQPPSITENAAMDARGLQEEPEVGTSMVGSGLNPYMDFPPTDTLGYGGPEGAAAEPYGARGPGSLPLGPGPPTNYGPNPCPQQASYPDPTQETWGEFPSHSGLYPGPKALGGTYSQCPRLEHYGQVQVKPEQGCPVGSDSTGLAPCLNAHPSEGPPHPQPLFSHYPQPSPPQYLQSGPYTQPPPDYLPSEPRPCLDFDSPTHSTGQLKAQLVCNYVQSQQELLWEGGGREDAPAQEPSYQSPKFLGGSQVSPSRAKAPVNTYGPGFGPNLPNHKSGSYPTPSPCHENFVVGANRASHRAAAPPRLLPPLPTCYGPLKVGGTNPSCGHPEVGRLGGGPALYPPPEGQVCNPLDSLDLDNTQLDFVAILDEPQGLSPPPSHDQRGSSGHTPPPSGPPNMAVGNMSVLLRSLPGETEFLNSSA

SEQ ID NO: 333831 - protein, 1106 aa, Artificial Sequence
  derived and/or modified sequence
MFNSMTPPPISSYGEPCCLRPLPSQGAPSVGTEGLSGPPFCHQANLMSGPHSYGPARETNSCTEGPLFSSPRSAVKLTKKRALSISPLSDASLDLQTVIRTSPSSLVAFINSRCTSPGGSYGHLSIGTMSPSLGFPAQMNHQKGPSPSFGVQPCGPHDSARGGMIPHPQSRGPFPTCQLKSELDMLVGKCREEPLEGDMSSPNSTGIQDPLLGMLDGREDLEREEKREPESVYETDCRWDGCSQEFDSQEQLVHHINSEHIHGERKEFVCHWGGCSRELRPFKAQYMLVVHMRRHTGEKPHKCTFEGCRKSYSRLENLKTHLRSHTGEKPYMCEHEGCSKAFSNASDRAKHQNRTHSNEKPYVCKLPGCTKRYTDPSSLRKHVKTVHGPDAHVTKRHRGDGPLPRAPSISTVEPKREREGGPIREESRLTVPEGAMKPQPSPGAQSSCSSDHSPAGSAANTDSGVEMTGNAGGSTEDLSSLDEGPCIAGTGLSTLRRLENLRLDQLHQLRPIGTRGLKLPSLSHTGTTVSRRVGPPVSLERRSSSSSSISSAYTVSRRSSLASPFPPGSPPENGASSLPGLMPAQHYLLRARYASARGGGTSPTAASSLDRIGGLPMPPWRSRAEYPGYNPNAGVTRRASDPAQAADRPAPARVQRFKSLGCVHTPPTVAGGGQNFDPYLPTSVYSPQPPSITENAAMDARGLQEEPEVGTSMVGSGLNPYMDFPPTDTLGYGGPEGAAAEPYGARGPGSLPLGPGPPTNYGPNPCPQQASYPDPTQETWGEFPSHSGLYPGPKALGGTYSQCPRLEHYGQVQVKPEQGCPVGSDSTGLAPCLNAHPSEGPPHPQPLFSHYPQPSPPQYLQSGPYTQPPPDYLPSEPRPCLDFDSPTHSTGQLKAQLVCNYVQSQQELLWEGGGREDAPAQEPSYQSPKFLGGSQVSPSRAKAPVNTYGPGFGPNLPNHKSGSYPTPSPCHENFVVGANRASHRAAAPPRLLPPLPTCYGPLKVGGTNPSCGHPEVGRLGGGPALYPPPEGQVCNPLDSLDLDNTQLDFVAILDEPQGLSPPPSHDQRGSSGHTPPPSGPPNMAVGNMSVLLRSLPGETEFLNSSA

SEQ ID NO: 333832 - protein, 574 aa, Artificial Sequence
  derived and/or modified sequence
LSPSLGFPAQMNHQKGPSPSFGVQPCGPHDSARGGMIPHPQSRGPFPTCQLKSELDMLVGKCREEPLEGDMSSPNSTGIQDPLLGMLDGREDLEREEKREPESVYETDCRWDGCSQEFDSQEQLVHHINSEHIHGERKEFVCHWGGCSRELRPFKAQYMLVVHMRRHTGEKPHKCTFEGCRKSYSRLENLKTHLRSHTGEKPYMCEHEGCSKAFSNASDRAKHQNRTHSNEKPYVCKLPGCTKRYTDPSSLRKHVKTVHGPDAHVTKRHRGDGPLPRAPSISTVEPKREREGGPIREESRLTVPEGAMPPHPQPLFSHYPQPSPPQYLQSGPYTQPPPDYLPSEPRPCLDFDSPTHSTGQLKAQLVCNYVQSQQELLWEGGGREDAPAQEPSYQSPKFLGGSQVSPSRAKAPVNTYGPGFGPNLPNHKSGSYPTPSPCHENFVVGANRASHRAAAPPRLLPPLPTCYGPLKVGGTNPSCGHPEVGRLGGGPALYPPPEGQVCNPLDSLDLDNTQLDFVAILDEPQGLSPPPSHDQRGSSGHTPPPSGPPNMAVGNMSVLLRSLPGETEFLNSSA

SEQ ID NO: 333833 - protein, 129 aa, Artificial Sequence
  derived and/or modified sequence
MFNSMTPPPISSYGEPCCLRPLPSQGAPSVGTEGLSGPPFCHQANLMSGPHSYGPARETNSCTEGPLFSSPRSAVKLTKKRALSISPLSDASLDLQTVIRTSPSSLVAFINSRCTSPGGSYGHLSIGTM

SEQ ID NO: 333834 - DNA, 3618 bp, Artificial Sequence
  derived and/or modified sequence
cccagactccagccctggaccgcgcatcccgagcccagcgcccagacagagtgtccccacaccctcctctgagacgccatgttcaactcgatgaccccaccaccaatcagtagctatggcgagccctgctgtctccggcccctccccagtcagggggcccccagtgtggggacagaaggactgtctggcccgcccttctgccaccaagctaacctcatgtccggcccccacagttatgggccagccagagagaccaacagctgcaccgagggcccactcttttcttctccccggagtgcagtcaagttgaccaagaagcgggcactgtccatctcacctctgtcggatgccagcctggacctgcagacggttatccgcacctcacccagctccctcgtagctttcatcaactcgcgatgcacatctccaggaggctcctacggtcatctctccattggcaccatgagcccatctctgggattcccagcccagatgaatcaccaaaaagggccctcgccttcctttggggtccagccttgtggtccccatgactctgcccggggtgggatgatcccacatcctcagtcccggggacccttcccaacttgccagctgaagtctgagctggacatgctggttggcaagtgccgggaggaacccttggaaggtgatatgtccagccccaactccacaggcatacaggatcccctgttggggatgctggatgggcgggaggacctcgagagagaggagaagcgtgagcctgaatctgtgtatgaaactgactgccgttgggatggctgcagccaggaatttgactcccaagagcagctggtgcaccacatcaacagcgagcacatccacggggagcggaaggagttcgtgtgccactgggggggctgctccagggagctgaggcccttcaaagcccagtacatgctggtggttcacatgcgcagacacactggcgagaagccacacaagtgcacgtttgaagggtgccggaagtcatactcacgcctcgaaaacctgaagacgcacctgcggtcacacacgggtgagaagccatacatgtgtgagcacgagggctgcagtaaagccttcagcaatgccagtgaccgagccaagcaccagaatcggacccattccaatgagaagccgtatgtatgtaagctccctggctgcaccaaacgctatacagatcctagctcgctgcgaaaacatgtcaagacagtgcatggtcctgacgcccatgtgaccaaacggcaccgtggggatggccccctgcctcgggcaccatccatttctacagtggagcccaagagggagcgggaaggaggtcccatcagggaggaaagcagactgactgtgccagagggtgccatgaagccacagccaagccctggggcccagtcatcctgcagcagtgaccactccccggcagggagtgcagccaatacagacagtggtgtggaaatgactggcaatgcagggggcagcactgaagacctctccagcttggacgagggaccttgcattgctggcactggtctgtccactcttcgccgccttgagaacctcaggctggaccagctacatcaactccggccaatagggacccggggtctcaaactgcccagcttgtcccacaccggtaccactgtgtcccgccgcgtgggccccccagtctctcttgaacgccgcagcagcagctccagcagcatcagctctgcctatactgtcagccgccgctcctccctggcctctcctttcccccctggctccccaccagagaatggagcatcctccctgcctggccttatgcctgcccagcactacctgcttcgggcaagatatgcttcagccagagggggtggtacttcgcccactgcagcatccagcctggatcggataggtggtcttcccatgcctccttggagaagccgagccgagtatccaggatacaaccccaatgcaggggtcacccggagggccagtgacccagcccaggctgctgaccgtcctgctccagctagagtccagaggttcaagagcctgggctgtgtccataccccacccactgtggcagggggaggacagaactttgatccttacctcccaacctctgtctactcaccacagccccccagcatcactgagaatgctgccatggatgctagagggctacaggaagagccagaagttgggacctccatggtgggcagtggtctgaacccctatatggacttcccacctactgatactctgggatatgggggacctgaaggggcagcagctgagccttatggagcgaggggtccaggctctctgcctcttgggcctggtccacccaccaactatggccccaacccctgtccccagcaggcctcatatcctgaccccacccaagaaacatggggtgagttcccttcccactctgggctgtacccaggccccaaggctctaggtggaacctacagccagtgtcctcgacttgaacattatggacaagtgcaagtcaagccagaacaggggtgcccagtggggtctgactccacaggactggcaccctgcctcaatgcccaccccagtgaggggcccccacatccacagcctctcttttcccattacccccagccctctcctccccaatatctccagtcaggcccctatacccagccaccccctgattatcttccttcagaacccaggccttgcctggactttgattcccccacccattccacagggcagctcaaggctcagcttgtgtgtaattatgttcaatctcaacaggagctactgtgggagggtgggggcagggaagatgcccccgcccaggaaccttcctaccagagtcccaagtttctggggggttcccaggttagcccaagccgtgctaaagctccagtgaacacatatggacctggctttggacccaacttgcccaatcacaagtcaggttcctatcccaccccttcaccatgccatgaaaattttgtagtgggggcaaatagggcttcacatagggcagcagcaccacctcgacttctgcccccattgcccacttgctatgggcctctcaaagtgggaggcacaaaccccagctgtggtcatcctgaggtgggcaggctaggagggggtcctgccttgtaccctcctcccgaaggacaggtatgtaaccccctggactctcttgatcttgacaacactcagctggactttgtggctattctggatgagccccaggggctgagtcctcctccttcccatgatcagcggggcagctctggacataccccacctccctctgggccccccaacatggctgtgggcaacatgagtgtcttactgagatccctacctggggaaacagaattcctcaactctagtgcctaaagagtagggaatctcatccatcacagatcgcatttcctaaggggtttctatccttccagaaaaattgggggagctgcagtcccatgcacaagatgccccagggatgggaggtatgggctgggggctatgtatagtctgtatacgttttgaggagaaatttgataatgacactgtttcctgataataaaggaactgcatcagaaaaaaaaaaaaaaaaaa

SEQ ID NO: 333835 - DNA, 135 bp, Artificial Sequence
  derived and/or modified sequence
atgagcggcccccacagctacggccccgccagagagaccaacagctgcaccgagggccccctgttcagcagccccagaagcgccgtgaagctgaccaagaagagagccctgagcatcagccccctgagcgactag

SEQ ID NO: 333836 - DNA, 135 bp, Artificial Sequence
  derived and/or modified sequence
atgtccggaccgcattcgtacggaccagcccgcgaaaccaattcctgtacagagggtcccctgttttccagtccacgcagcgccgtcaaactgaccaagaaaagggctctctcgatatccccactgagcgactag

SEQ ID NO: 333837 - DNA, 3613 bp, Artificial Sequence
  derived and/or modified sequence
gcacaccccccagcccagactccagccctggaccgcgcatcccgagcccagcgcccagacagagtgtccccacaccctcctctgagacgccatgttcaactcgatgaccccaccaccaatcagtagctatggcgagccctgctgtctccggcccctccccagtcagggggcccccagtgtggggacagaaggactgtctggcccgcccttctgccaccaagctaacctcatgtccggcccccacagttatgggccagccagagagaccaacagctgcaccgagggcccactcttttcttctccccggagtgcagtcaagttgaccaagaagcgggcactgtccatctcacctctgtcggatgccagcctggacctgcagacggttatccgcacctcacccagctccctcgtagctttcatcaactcgcgatgcacatctccaggaggctcctacggtcatctctccattggcaccatgagcccatctctgggattcccagcccagatgaatcaccaaaaagggccctcgccttcctttggggtccagccttgtggtccccatgactctgcccggggtgggatgatcccacatcctcagtcccggggacccttcccaacttgccagctgaagtctgagctggacatgctggttggcaagtgccgggaggaacccttggaaggtgatatgtccagccccaactccacaggcatacaggatcccctgttggggatgctggatgggcgggaggacctcgagagagaggagaagcgtgagcctgaatctgtgtatgaaactgactgccgttgggatggctgcagccaggaatttgactcccaagagcagctggtgcaccacatcaacagcgagcacatccacggggagcggaaggagttcgtgtgccactgggggggctgctccagggagctgaggcccttcaaagcccagtacatgctggtggttcacatgcgcagacacactggcgagaagccacacaagtgcacgtttgaagggtgccggaagtcatactcacgcctcgaaaacctgaagacgcacctgcggtcacacacgggtgagaagccatacatgtgtgagcacgagggctgcagtaaagccttcagcaatgccagtgaccgagccaagcaccagaatcggacccattccaatgagaagccgtatgtatgtaagctccctggctgcaccaaacgctatacagatcctagctcgctgcgaaaacatgtcaagacagtgcatggtcctgacgcccatgtgaccaaacggcaccgtggggatggccccctgcctcgggcaccatccatttctacagtggagcccaagagggagcgggaaggaggtcccatcagggaggaaagcagactgactgtgccagagggtgccatgaagccacagccaagccctggggcccagtcatcctgcagcagtgaccactccccggcagggagtgcagccaatacagacagtggtgtggaaatgactggcaatgcagggggcagcactgaagacctctccagcttggacgagggaccttgcattgctggcactggtctgtccactcttcgccgccttgagaacctcaggctggaccagctacatcaactccggccaatagggacccggggtctcaaactgcccagcttgtcccacaccggtaccactgtgtcccgccgcgtgggccccccagtctctcttgaacgccgcagcagcagctccagcagcatcagctctgcctatactgtcagccgccgctcctccctggcctctcctttcccccctggctccccaccagagaatggagcatcctccctgcctggccttatgcctgcccagcactacctgcttcgggcaagatatgcttcagccagagggggtggtacttcgcccactgcagcatccagcctggatcggataggtggtcttcccatgcctccttggagaagccgagccgagtatccaggatacaaccccaatgcaggggtcacccggagggccagtgacccagcccaggctgctgaccgtcctgctccagctagagtccagaggttcaagagcctgggctgtgtccataccccacccactgtggcagggggaggacagaactttgatccttacctcccaacctctgtctactcaccacagccccccagcatcactgagaatgctgccatggatgctagagggctacaggaagagccagaagttgggacctccatggtgggcagtggtctgaacccctatatggacttcccacctactgatactctgggatatgggggacctgaaggggcagcagctgagccttatggagcgaggggtccaggctctctgcctcttgggcctggtccacccaccaactatggccccaacccctgtccccagcaggcctcatatcctgaccccacccaagaaacatggggtgagttcccttcccactctgggctgtacccaggccccaaggctctaggtggaacctacagccagtgtcctcgacttgaacattatggacaagtgcaagtcaagccagaacaggggtgcccagtggggtctgactccacaggactggcaccctgcctcaatgcccaccccagtgaggggcccccacatccacagcctctcttttcccattacccccagccctctcctccccaatatctccagtcaggcccctatacccagccaccccctgattatcttccttcagaacccaggccttgcctggactttgattcccccacccattccacagggcagctcaaggctcagcttgtgtgtaattatgttcaatctcaacaggagctactgtgggagggtgggggcagggaagatgcccccgcccaggaaccttcctaccagagtcccaagtttctggggggttcccaggttagcccaagccgtgctaaagctccagtgaacacatatggacctggctttggacccaacttgcccaatcacaagtcaggttcctatcccaccccttcaccatgccatgaaaattttgtagtgggggcaaatagggcttcacatagggcagcagcaccacctcgacttctgcccccattgcccacttgctatgggcctctcaaagtgggaggcacaaaccccagctgtggtcatcctgaggtgggcaggctaggagggggtcctgccttgtaccctcctcccgaaggacaggtatgtaaccccctggactctcttgatcttgacaacactcagctggactttgtggctattctggatgagccccaggggctgagtcctcctccttcccatgatcagcggggcagctctggacataccccacctccctctgggccccccaacatggctgtgggcaacatgagtgtcttactgagatccctacctggggaaacagaattcctcaactctagtgcctaaagagtagggaatctcatccatcacagatcgcatttcctaaggggtttctatccttccagaaaaattgggggagctgcagtcccatgcacaagatgccccagggatgggaggtatgggctgggggctatgtatagtctgtatacgttttgaggagaaatttgataatgacactgtttcctgataataaaggaactgcatcag

SEQ ID NO: 333838 - DNA, 3394 bp, Artificial Sequence
  derived and/or modified sequence
accgcacaccccccagcccagactccagccctggaccgcgcatcccgagcccagcgcccagacagaggcccactcttttcttctccccggagtgcagtcaagttgaccaagaagcgggcactgtccatctcacctctgtcggatgccagcctggacctgcagacggttatccgcacctcacccagctccctcgtagctttcatcaactcgcgatgcacatctccaggaggctcctacggtcatctctccattggcaccatgagcccatctctgggattcccagcccagatgaatcaccaaaaagggccctcgccttcctttggggtccagccttgtggtccccatgactctgcccggggtgggatgatcccacatcctcagtcccggggacccttcccaacttgccagctgaagtctgagctggacatgctggttggcaagtgccgggaggaacccttggaaggtgatatgtccagccccaactccacaggcatacaggatcccctgttggggatgctggatgggcgggaggacctcgagagagaggagaagcgtgagcctgaatctgtgtatgaaactgactgccgttgggatggctgcagccaggaatttgactcccaagagcagctggtgcaccacatcaacagcgagcacatccacggggagcggaaggagttcgtgtgccactgggggggctgctccagggagctgaggcccttcaaagcccagtacatgctggtggttcacatgcgcagacacactggcgagaagccacacaagtgcacgtttgaagggtgccggaagtcatactcacgcctcgaaaacctgaagacgcacctgcggtcacacacgggtgagaagccatacatgtgtgagcacgagggctgcagtaaagccttcagcaatgccagtgaccgagccaagcaccagaatcggacccattccaatgagaagccgtatgtatgtaagctccctggctgcaccaaacgctatacagatcctagctcgctgcgaaaacatgtcaagacagtgcatggtcctgacgcccatgtgaccaaacggcaccgtggggatggccccctgcctcgggcaccatccatttctacagtggagcccaagagggagcgggaaggaggtcccatcagggaggaaagcagactgactgtgccagagggtgccatgaagccacagccaagccctggggcccagtcatcctgcagcagtgaccactccccggcagggagtgcagccaatacagacagtggtgtggaaatgactggcaatgcagggggcagcactgaagacctctccagcttggacgagggaccttgcattgctggcactggtctgtccactcttcgccgccttgagaacctcaggctggaccagctacatcaactccggccaatagggacccggggtctcaaactgcccagcttgtcccacaccggtaccactgtgtcccgccgcgtgggccccccagtctctcttgaacgccgcagcagcagctccagcagcatcagctctgcctatactgtcagccgccgctcctccctggcctctcctttcccccctggctccccaccagagaatggagcatcctccctgcctggccttatgcctgcccagcactacctgcttcgggcaagatatgcttcagccagagggggtggtacttcgcccactgcagcatccagcctggatcggataggtggtcttcccatgcctccttggagaagccgagccgagtatccaggatacaaccccaatgcaggggtcacccggagggccagtgacccagcccaggctgctgaccgtcctgctccagctagagtccagaggttcaagagcctgggctgtgtccataccccacccactgtggcagggggaggacagaactttgatccttacctcccaacctctgtctactcaccacagccccccagcatcactgagaatgctgccatggatgctagagggctacaggaagagccagaagttgggacctccatggtgggcagtggtctgaacccctatatggacttcccacctactgatactctgggatatgggggacctgaaggggcagcagctgagccttatggagcgaggggtccaggctctctgcctcttgggcctggtccacccaccaactatggccccaacccctgtccccagcaggcctcatatcctgaccccacccaagaaacatggggtgagttcccttcccactctgggctgtacccaggccccaaggctctaggtggaacctacagccagtgtcctcgacttgaacattatggacaagtgcaagtcaagccagaacaggggtgcccagtggggtctgactccacaggactggcaccctgcctcaatgcccaccccagtgaggggcccccacatccacagcctctcttttcccattacccccagccctctcctccccaatatctccagtcaggcccctatacccagccaccccctgattatcttccttcagaacccaggccttgcctggactttgattcccccacccattccacagggcagctcaaggctcagcttgtgtgtaattatgttcaatctcaacaggagctactgtgggagggtgggggcagggaagatgcccccgcccaggaaccttcctaccagagtcccaagtttctggggggttcccaggttagcccaagccgtgctaaagctccagtgaacacatatggacctggctttggacccaacttgcccaatcacaagtcaggttcctatcccaccccttcaccatgccatgaaaattttgtagtgggggcaaatagggcttcacatagggcagcagcaccacctcgacttctgcccccattgcccacttgctatgggcctctcaaagtgggaggcacaaaccccagctgtggtcatcctgaggtgggcaggctaggagggggtcctgccttgtaccctcctcccgaaggacaggtatgtaaccccctggactctcttgatcttgacaacactcagctggactttgtggctattctggatgagccccaggggctgagtcctcctccttcccatgatcagcggggcagctctggacataccccacctccctctgggccccccaacatggctgtgggcaacatgagtgtcttactgagatccctacctggggaaacagaattcctcaactctagtgcctaaagagtagggaatctcatccatcacagatcgcatttcctaaggggtttctatccttccagaaaaattgggggagctgcagtcccatgcacaagatgccccagggatgggaggtatgggctgggggctatgtatagtctgtatacgttttgaggagaaatttgataatgacactgtttcctgataataaaggaactgcatc

SEQ ID NO: 333839 - DNA, 187 bp, Artificial Sequence
  derived and/or modified sequence
ccagcgcccagacagaggactgtctggcccgcccttctgccaccaagctaacctcatgtccggcccccacagttatgggccagccagagagaccaacagctgcaccgagggcccactcttttcttctccccggagtgcagtcaagttgaccaagaagcgggcactgtccatctcacctctgtcggat

SEQ ID NO: 333840 - DNA, 135 bp, Artificial Sequence
  derived and/or modified sequence
atgagcggcccccacagctatggccctgcccgggagaccaacagctgcacagagggccccctcttcagcagccccaggtctgctgtgaagctgaccaagaagagggccctgagcatcagccccctgagtgactag

SEQ ID NO: 333841 - DNA, 135 bp, Artificial Sequence
  derived and/or modified sequence
atgagcggcccccacagctacggccccgcccgggagaccaacagctgtacagagggaccgctattcagctcaccccgaagcgccgtgaagctgaccaaaaaacgcgctctgtcgatttctcctctttccgattag

SEQ ID NO: 333842 - DNA, 135 bp, Artificial Sequence
  derived and/or modified sequence
atgtcaggtcctcattcttatgggcctgccagagagaccaattcctgcacagagggccctcttttttcctcgcctcgaagtgctgtaaagctcactaaaaaacgtgcacttagcatctctccactcagtgattag

SEQ ID NO: 333843 - DNA, 3321 bp, Artificial Sequence
  derived and/or modified sequence
atgttcaacagcatgacccccccccccatcagcagctacggcgagccctgctgcctgagacccctgcccagccagggcgcccccagcgtgggcaccgagggcctgagcggcccccccttctgccaccaggccaacctgatgagcggcccccacagctacggccccgccagagagaccaacagctgcaccgagggccccctgttcagcagccccagaagcgccgtgaagctgaccaagaagagagccctgagcatcagccccctgagcgacgccagcctggacctgcagaccgtgatcagaaccagccccagcagcctggtggccttcatcaacagcagatgcaccagccccggcggcagctacggccacctgagcatcggcaccatgagccccagcctgggcttccccgcccagatgaaccaccagaagggccccagccccagcttcggcgtgcagccctgcggcccccacgacagcgccagaggcggcatgatcccccacccccagagcagaggccccttccccacctgccagctgaagagcgagctggacatgctggtgggcaagtgcagagaggagcccctggagggcgacatgagcagccccaacagcaccggcatccaggaccccctgctgggcatgctggacggcagagaggacctggagagagaggagaagagagagcccgagagcgtgtacgagaccgactgcagatgggacggctgcagccaggagttcgacagccaggagcagctggtgcaccacatcaacagcgagcacatccacggcgagagaaaggagttcgtgtgccactggggcggctgcagcagagagctgagacccttcaaggcccagtacatgctggtggtgcacatgagaagacacaccggcgagaagccccacaagtgcaccttcgagggctgcagaaagagctacagcagactggagaacctgaagacccacctgagaagccacaccggcgagaagccctacatgtgcgagcacgagggctgcagcaaggccttcagcaacgccagcgacagagccaagcaccagaacagaacccacagcaacgagaagccctacgtgtgcaagctgcccggctgcaccaagagatacaccgaccccagcagcctgagaaagcacgtgaagaccgtgcacggccccgacgcccacgtgaccaagagacacagaggcgacggccccctgcccagagcccccagcatcagcaccgtggagcccaagagagagagagagggcggccccatcagagaggagagcagactgaccgtgcccgagggcgccatgaagccccagcccagccccggcgcccagagcagctgcagcagcgaccacagccccgccggcagcgccgccaacaccgacagcggcgtggagatgaccggcaacgccggcggcagcaccgaggacctgagcagcctggacgagggcccctgcatcgccggcaccggcctgagcaccctgagaagactggagaacctgagactggaccagctgcaccagctgagacccatcggcaccagaggcctgaagctgcccagcctgagccacaccggcaccaccgtgagcagaagagtgggcccccccgtgagcctggagagaagaagcagcagcagcagcagcatcagcagcgcctacaccgtgagcagaagaagcagcctggccagccccttcccccccggcagcccccccgagaacggcgccagcagcctgcccggcctgatgcccgcccagcactacctgctgagagccagatacgccagcgccagaggcggcggcaccagccccaccgccgccagcagcctggacagaatcggcggcctgcccatgcccccctggagaagcagagccgagtaccccggctacaaccccaacgccggcgtgaccagaagagccagcgaccccgcccaggccgccgacagacccgcccccgccagagtgcagagattcaagagcctgggctgcgtgcacaccccccccaccgtggccggcggcggccagaacttcgacccctacctgcccaccagcgtgtacagcccccagccccccagcatcaccgagaacgccgccatggacgccagaggcctgcaggaggagcccgaggtgggcaccagcatggtgggcagcggcctgaacccctacatggacttcccccccaccgacaccctgggctacggcggccccgagggcgccgccgccgagccctacggcgccagaggccccggcagcctgcccctgggccccggcccccccaccaactacggccccaacccctgcccccagcaggccagctaccccgaccccacccaggagacctggggcgagttccccagccacagcggcctgtaccccggccccaaggccctgggcggcacctacagccagtgccccagactggagcactacggccaggtgcaggtgaagcccgagcagggctgccccgtgggcagcgacagcaccggcctggccccctgcctgaacgcccaccccagcgagggccccccccacccccagcccctgttcagccactacccccagcccagccccccccagtacctgcagagcggcccctacacccagcccccccccgactacctgcccagcgagcccagaccctgcctggacttcgacagccccacccacagcaccggccagctgaaggcccagctggtgtgcaactacgtgcagagccagcaggagctgctgtgggagggcggcggcagagaggacgcccccgcccaggagcccagctaccagagccccaagttcctgggcggcagccaggtgagccccagcagagccaaggcccccgtgaacacctacggccccggcttcggccccaacctgcccaaccacaagagcggcagctaccccacccccagcccctgccacgagaacttcgtggtgggcgccaacagagccagccacagagccgccgccccccccagactgctgccccccctgcccacctgctacggccccctgaaggtgggcggcaccaaccccagctgcggccaccccgaggtgggcagactgggcggcggccccgccctgtaccccccccccgagggccaggtgtgcaaccccctggacagcctggacctggacaacacccagctggacttcgtggccatcctggacgagccccagggcctgagccccccccccagccacgaccagagaggcagcagcggccacacccccccccccagcggcccccccaacatggccgtgggcaacatgagcgtgctgctgagaagcctgcccggcgagaccgagttcctgaacagcagcgcctag

SEQ ID NO: 333844 - DNA, 3321 bp, Artificial Sequence
  derived and/or modified sequence
atgtttaactccatgacacctccccctatctccagctatggcgaaccctgctgtcttcggccattgccttcccagggagctcccagcgtgggcacagaagggctgagcggcccccccttttgccaccaggcaaatttaatgtctggcccccacagttacgggccggcccgggagacgaatagttgtaccgaaggacccttattctcatcacctaggtccgctgtgaaactcacaaaaaagcgggcattgagcatcagccccctctctgatgcaagcctggatttgcagaccgtaatccgcacatccccgtcctctctggtcgctttcatcaactcgagatgcacttctcctggtggaagctacggccatctttctattggtacaatgtccccgtccttggggtttccagcacagatgaaccatcagaagggaccttctccatcttttggcgtacagccatgcggaccccacgacagtgcacggggaggtatgatcccccatccgcagagcagaggcccttttcctacatgccaactgaagagtgaacttgacatgctcgtgggcaaatgcagagaggagcctctggagggtgacatgagctctcccaattctaccggcattcaggatcctcttctgggcatgctcgacggccgcgaagacctcgaacgcgaggagaagcgcgaaccagagagtgtttacgaaacagactgccgttgggacgggtgtagccaagagttcgacagccaagagcagttagtgcatcacatcaactctgagcatatccatggcgagagaaaggagttcgtgtgtcactggggaggctgctccagggaactgaggccttttaaggcccagtatatgctggttgtgcacatgaggcgccacacaggggagaagccgcacaaatgtaccttcgagggttgcaggaagagctactctagactcgaaaacctgaaaacacacttgagatcacatactggtgagaaaccctatatgtgcgagcacgaggggtgctctaaggcgttcagcaatgcgtcggaccgcgcaaaacaccaaaacaggacacatagcaatgagaaaccatacgtgtgcaagcttccaggctgcactaaacgctataccgatccttcgagtcttcgaaaacatgtgaagaccgtgcatgggcccgacgcacacgtcacaaagcgccataggggtgatgggcctctgccccgagctcccagcatttcaactgttgagcctaaaagggagagggaaggcggaccgatccgggaggagtcccgattgacagtcccagaaggggccatgaagcctcagcccagcccgggtgcgcagtcaagctgttcctctgaccactctcctgcgggatcagctgcgaacaccgattctggtgtcgagatgactggcaacgctggaggttctacggaagacctcagctcactggacgagggtccctgcatcgctggcactggcttgagcacacttcggaggctggagaatctgcgcttggaccagctgcatcagttaaggcccattgggacgagaggactgaaactcccttcattgtcccacacagggacaacggtgagccgtcgcgtcgggccccccgtcagtttggaacggcgtagcagtagctcaagttcaataagcagcgcatatactgtcagtaggcggagctcactggcttctccttttccacctggaagcccaccagaaaacggtgcgagctctctacccgggcttatgcctgcacagcactacctattgcgggcccgctacgccagtgctcgggggggcggcacaagccccacggctgctagctcgctggatcggattggagggctgcccatgcctccctggcgatcccgcgccgaatatcctggctacaatccaaatgccggtgttacaagaagggcctccgatccggctcaggctgcggaccgacctgcaccagccagagtacagagatttaaaagccttggatgcgttcacactcccccgaccgtagccgggggcgggcagaactttgacccctacctgcctacgtctgtctatagccctcaaccgccctcaatcacagagaacgccgccatggatgcgcgcggcctgcaagaagaacccgaggttggtacatcaatggtgggatctggcttgaacccatatatggatttcccgccaacagataccttaggctacggcggtccagagggcgctgccgcagaaccctacggagcccgcgggcccggatctctgcccctggggcctggcccacctaccaattacggcccgaatccttgtccgcagcaagctagctatcccgaccctacacaggaaacctggggggagtttccgtcccacagcgggttataccctgggccaaaggccctggggggtacttactctcagtgtccacgcctggagcattacgggcaggtacaagtcaagcccgaacagggctgccctgttggttctgatagcaccggactagccccctgtctcaacgcccacccctccgaggggccccctcatccacagcctcttttttcccattatcctcagccgagtccccctcagtatttgcagagtgggccctacacccagccaccgcctgattacctgccctcagagcccaggccatgcctggatttcgatagtcccacccactcaacaggccaactgaaagcccagctggtctgtaactatgttcagtcgcaacaggagttgctttgggagggcgggggccgcgaggacgcacccgcacaagaaccttcctaccagtctccaaagtttctgggaggtagtcaggtatccccctcaagggccaaagccccagtgaacacatacggccctggctttggccctaaccttcccaaccataagtctggttcatatcccacaccaagtccctgccacgagaacttcgtggttggcgcgaaccgagcgagccaccgggcagccgcgcccccccgtttattgccgcctctgcccacttgctacggaccattgaaagtcggagggaccaatccctcgtgcggccacccagaggtcggcagattgggcggggggcccgcgctgtatccacccccagaaggacaggtgtgcaatcccctcgattcccttgaccttgacaacacgcagctggattttgtggctattctggatgagcctcaagggctgagtccccccccatcccatgaccagcgtgggtcatccggacacactccccccccaagtggaccccccaatatggctgtgggaaatatgagtgtgcttctgaggagcctgcctggagaaaccgagtttctcaactcctccgcctag

SEQ ID NO: 333845 - DNA, 3321 bp, Artificial Sequence
  derived and/or modified sequence
atgttcaacagcatgaccccaccacccatcagcagctatggagagccctgctgcctgcggcccctgcccagccagggcgcccccagcgtgggcacagagggcctgagcggcccccccttctgccaccaggccaacctgatgagcggcccccacagctatggccctgcccgggagaccaacagctgcacagagggccccctcttcagcagccccaggtctgctgtgaagctgaccaagaagagggccctgagcatcagccccctgagtgatgccagcctggacctgcagaccgtcatccgcaccagccccagcagcctggtggccttcatcaacagccgctgcaccagccctgggggcagctatggccacctgagcatcggcaccatgagccccagcctgggcttccctgcccagatgaaccaccagaagggccccagccccagctttggagtgcagccctgtggcccccatgattctgcccggggcggcatgatcccccacccccagagccggggccccttccccacctgccagctgaagtctgagctggacatgctggtgggcaaatgtcgggaggagcccctggagggggacatgagcagccccaacagcacaggcatccaggaccccctgctgggcatgctggatggaagagaggacctggagcgggaggagaagcgggagcctgagagcgtgtatgaaacagactgccgctgggatggctgcagccaggagtttgacagccaggagcagctggtgcaccacatcaacagcgagcacatccacggggagaggaaggagtttgtgtgccactggggcggctgcagccgggagctgcggcccttcaaggcccagtacatgctggtggtgcacatgagaagacacactggagagaagccccacaagtgcacctttgagggctgcaggaagagctacagccggctggagaacctgaagacccacctgcggagccacactggagagaagccctacatgtgtgaacatgagggctgcagcaaggccttcagcaatgccagtgaccgggccaagcaccagaacagaacccacagcaatgagaagccctacgtgtgcaagctgcccggctgcaccaagcgctacacagaccccagcagcctgaggaagcacgtgaagacagtgcacggcccagatgcccacgtgaccaagaggcacagaggagatggccccctgccccgggcccccagcatcagcacagtggagcccaagcgggagcgggagggcggccccatccgggaggagagccggctgactgtgcctgagggcgccatgaagccccagcccagccctggggcccagagcagctgcagcagtgaccacagccctgctggcagcgctgccaacacagattctggagtggagatgactggaaatgccggcggcagcacagaggacctgagcagcctggatgagggcccctgcatcgccggcaccggcctgagcaccctgcggcggctggagaacctgcggctggaccagctgcaccagctgcggcccatcggcacccggggcctgaagctgcccagcctgagccacacaggcaccaccgtgtccagaagagtgggcccccctgtgtccctggagaggaggagcagcagcagcagcagcatcagcagcgcctacacagtgtccagaagaagcagcctggccagccccttccccccaggcagccccccagaaaatggagccagcagcctgcccggcctgatgcctgcccagcactacctgctgcgggcccgctatgccagcgcccggggcggcggcaccagccccacagctgccagcagcctggaccgcatcggcggcctgcccatgccaccctggaggagcagagctgagtacccaggctacaaccccaatgctggggtgacccggcgggccagtgaccctgcccaggccgctgacaggcctgccccagcccgggtgcagcgcttcaagagcctgggctgtgtgcacaccccacccaccgtggccggcggcggccagaactttgacccctacctgcccacctctgtgtacagcccccagcccccatccatcacagaaaatgctgccatggatgcccggggcctgcaggaggagcctgaggtgggcacctccatggtgggcagcggcctgaacccctacatggacttccccccaacagacaccctgggctacggcggccctgagggcgctgctgctgagccctatggagcccggggccctggcagcctgcccctgggccctggcccccccaccaactacggccccaacccctgcccccagcaggccagctacccagaccccacccaggagacctggggcgagttccccagccacagcggcctgtacccaggccccaaggccctgggcggcacctacagccagtgcccccggctggagcactacggccaggtgcaggtgaagccagagcagggctgccctgtgggcagtgacagcacaggcctggccccctgcctgaatgcccaccccagcgagggccccccccacccccagcccctcttcagccactacccccagcccagccccccccagtacctgcagagcggcccctacacccagcccccaccagactacctgcccagcgagccccggccctgcctggactttgacagccccacccacagcacaggccagctgaaggcccagctggtgtgcaactacgtgcagagccagcaggagctgctgtgggagggcggcggccgggaggatgccccagcccaggagcccagctaccagagccccaagttcctgggcggcagccaggtgagccccagccgggccaaggcccctgtgaacacctacggccctggcttcggccccaacctgcccaaccacaagagcggcagctaccccacccccagcccctgccacgagaactttgtggtgggcgccaacagagccagccacagagctgctgccccaccccggctgctgccccccctgcccacctgctacggccccctgaaggtgggcggcaccaaccccagctgtggccaccctgaggtgggccgcctgggcggcggccctgccctgtacccacctcctgagggccaggtgtgcaaccccctggacagcctggacctggacaacacccagctggactttgtggccatcctggatgagccccagggcctgagccccccacccagccatgaccagaggggcagcagcggccacaccccaccacccagcggcccccccaacatggctgtgggcaacatgtctgtgctgctgcggagcctgcccggggagacagagttcctgaacagcagcgcctag

SEQ ID NO: 333846 - DNA, 3321 bp, Artificial Sequence
  derived and/or modified sequence
atgttcaacagcatgacccccccccccatcagcagctacggcgagccatgttgcttgcggccgcttccatctcagggagctcctagcgtgggcaccgaaggtctgagcggacccccattctgtcatcaggcaaatctgatgtctggtccccactcgtacggaccagcccgcgaaaccaattcctgtaccgagggaccattattctccagtccccgaagcgcagttaaacttaccaagaaacgcgccctgtctatatccccattgtctgatgcatcacttgatctacagactgtgatcaggacgtcaccctcaagcctggtcgcttttattaacagtaggtgtacaagcccgggaggctcctatgggcatctgagcatcgggacgatgagtcccagcctgggattccctgcgcaaatgaatcatcagaaaggacctagtccctcttttggtgtgcaaccttgtggcccccatgatagcgctcgcggcgggatgatacctcacccacagtctcggggcccgtttcctacgtgccagctcaaatccgaacttgacatgctggtggggaagtgcagggaggagcccctggaaggggatatgagtagtcccaactccactggaattcaggatccactgttgggaatgctcgatggaagagaagatctggagagggaagaaaagcgcgagcctgaaagcgtttatgaaaccgactgtagatgggacggctgcagccaggagttcgatagtcaggagcagctcgtgcatcatattaattcagagcacatccatggggagagaaaggagttcgtgtgtcactggggtggctgtagccgagagttaaggcctttcaaagctcagtacatgctggttgttcatatgaggaggcacaccggcgaaaagcctcacaaatgcacgttcgaggggtgtcgtaagtcttacagcaggctggagaatctgaaaacccatctgcgatcacatactggcgagaagccctatatgtgcgagcacgagggttgttctaaagcattttccaacgccagcgatagggctaaacatcagaacagaacccattcaaacgaaaaaccttacgtctgtaaattgcccggatgcaccaaaaggtacaccgacccctcgagtttgcgtaagcacgtgaaaacagttcatggccccgatgcacatgtgaccaagcgacacagaggcgacgggccccttccacgcgccccctccattagcaccgtcgaaccgaaacgtgagcgagagggaggacccatccgtgaagaatcacgcctcacggtgcccgagggcgccatgaagccccagccaagtccgggtgcccagtcatcatgtagttcagatcactctccggcaggatccgctgctaataccgattccggagtcgagatgacgggaaatgcaggcggaagtactgaggatctgtcatccttagacgaggggccctgcattgccggcaccggcctcagtacactacgcaggctggagaatctcaggctggaccagctacaccagttaagacctatcggaacccgtggcctgaagctgccctctctgagccacacaggcacaaccgtgtcacgccgagtgggacctcctgtttcactggagcgacgctcctcatcctccagcagtattagctctgcatacactgtttccaggagaagcagcctcgcatcccctttcccccctggttcacctcccgagaatggcgccagtagcctgcccgggcttatgcctgcccagcactatctgctgcgggcacgatacgcttctgctagaggtgggggaacttcccctactgcagccagctcactggacaggatcggagggcttcctatgcctccatggcgcagccgcgccgagtatccagggtacaacccaaatgccggtgtcacccggcgcgccagcgatcctgcacaggccgcagaccgtccagcccccgcaagagtccagagattcaaaagccttggctgcgtgcatacccctccaaccgtggctggtgggggtcagaacttcgacccttacctcccaacctcagtttactccccccagccccctagtatcactgagaacgcagcaatggatgcacgcggcctccaggaggagcccgaggtgggaacaagcatggtgggttctggactcaacccctatatggactttccaccaactgatacactgggctatgggggaccagaaggagcagctgctgaaccgtatggtgcaaggggccccggatctctacccctgggccccgggccccctactaattacgggccaaatccttgcccacagcaggcaagttaccctgatccaactcaggagacatggggggaatttccatcgcactccgggctgtaccccggacccaaagccctcggtgggacgtacagccaatgtccacgcctggagcactatggccaggttcaagtgaagccagagcaggggtgccctgttggatctgacagtactggactggcaccctgtctaaatgctcatccatccgaaggtccaccacatccacaacccctgttcagccactatcctcaaccctctcccccccagtacttgcagtcaggaccatatacacaacccccacccgattacctgccaagtgagccacgcccatgcctggacttcgacagtcccactcacagcactggccagctgaaggctcagttggtttgcaactatgttcagagtcagcaggagctcttgtgggagggcggtggtcgggaagacgctccagctcaagagccatcttatcagagccccaaattcctggggggcagccaagtatcgccatctcgagctaaggcccctgtgaacacatatgggccgggttttggccctaacctccccaatcataaaagcggatcgtaccccactccatctccctgccacgagaatttcgtagttggtgctaaccgcgccagccatagagcagctgcccctccccgactcttgcctccattgcctacttgctatggccccctcaaggtcggaggcactaacccttcatgcggacaccccgaggttggcaggctgggtgggggtccagcgctttacccaccaccggaagggcaagtctgtaaccccctagacagtttagaccttgacaacacacaactggacttcgtggccattcttgacgaaccacagggcctatctcccccaccaagccatgaccagcgcggcagctctgggcacacacctccaccctccggccctcctaacatggccgtagggaacatgagtgtcctgctccggtctctgccgggcgagacggaattcctgaactccagtgcatag

SEQ ID NO: 333847 - DNA, 3321 bp, Artificial Sequence
  derived and/or modified sequence
atgtttaatagtatgaccccccctcctatcagttcctatggtgaaccatgctgtcttagacctctgcctagccagggcgctccatctgttggaacagagggactgagtggccctccattttgccatcaagccaatctgatgagcggcccacactcatatggtcccgctcgggagactaattcttgcactgagggtcccctcttcagcagcccgaggagcgctgttaagttaaccaagaagcgagctctctccatctcacctctatcagacgcaagtctggatctgcagacggtcatccgaacatcaccttcgtcactggtagcctttataaattcaagatgtactagccctgggggttcatacggccatctttccatcggcacaatgtctccttccctcggttttccagcccaaatgaatcaccaaaaaggcccatcaccgagcttcggagttcaaccttgtgggcctcacgacagcgccagaggcggtatgattcctcacccacagtcacggggacccttccccacctgtcagcttaagagtgagctggacatgctagttgggaagtgccgagaagaaccgctcgagggagacatgtcatcacccaactcaactggcatacaagaccctcttctggggatgctagatggcagggaggatttagagcgggaggagaaacgcgagcctgagtcagtgtatgaaacagattgtaggtgggacggatgttctcaggagttcgactcccaggaacagctggtccatcatataaactcggagcatattcatggcgaacgcaaggagtttgtctgccactgggggggatgcagccgggaactcaggcctttcaaagcccagtatatgctagtggtccacatgcgtagacacacaggcgagaagcctcacaaatgtacgtttgagggatgcaggaaatcctactcacggctggaaaacttgaaaacacatcttcggtctcataccggtgagaaaccttatatgtgtgagcacgaaggctgctccaaagccttctctaatgcgtccgacagagccaagcatcagaataggacccatagcaatgaaaaaccgtacgtctgcaaactcccaggctgcactaagagatatacagatccctcttccctgcggaagcatgtcaagacagtgcatggtccagacgcacatgtgaccaaacgacaccgcggagacggaccgcttccacgagctccttctatatcaaccgtggaacctaaaagggagcgagagggtggaccaatccgagaggaaagcaggctgaccgtgccggaaggggcaatgaaaccgcagcccagccccggagctcagtcgtcttgctcatcggaccacagtcctgccggttccgcagctaatactgattccggcgtggagatgacaggtaacgccggtggtagcaccgaggatctttcctccctagatgagggcccttgcattgcaggtaccgggctctcaactttaagaagactggagaacctgcgcctggaccagttgcaccagctccggcctatcggaaccaggggtttaaaactgccctccctgagccataccggcactacggtaagtaggcgcgtgggaccacccgtctccttggagagacgttccagctcctcttcctccatcagttccgcatatacagtcagtcgtcgttcttccttggctagcccttttccacccggatcaccaccagagaatggggctagcagccttcccggtctcatgcccgcacaacattacttgctgagagctcggtatgcttctgcccgaggcggaggcacttctcctacagcagcctcatcattggatcgtataggaggtctgccaatgcccccatggcggtcaagagccgagtatcctgggtataaccccaacgccggagtgactagaagggcctctgatcctgcgcaagctgcggacagacctgcccctgccagggtacagcggttcaagtctctgggatgtgttcatacaccccctaccgtggcgggtggaggtcagaatttcgatccctacttgcccacgagtgtatatagcccacagcctcccagcattacagagaatgctgcaatggatgcaagaggcctccaggaggaaccggaagtcgggacgagcatggttggcagcgggttaaatccctatatggacttccccccaacggataccctcggttacgggggacctgaaggcgcagccgcagagccttatggggcaagaggccctggtagcctcccgctggggcctggccctccgactaactacggcccaaacccatgcccccagcaagcctcctatccagacccaacgcaggaaacatggggagagtttccatcccacagtggactctaccccggtcccaaggctcttggaggaacctattcccagtgtccacgcctggagcactatggacaggtgcaggttaaaccagaacaaggatgccccgtcggctccgactcaaccggcctagcaccttgcctgaatgctcaccccagtgagggcccaccccacccacagcctctgtttagccactacccgcagccctcacctccccagtatctgcaatccggcccatatacccagccgccaccggattatctaccatccgaaccacggccttgtctggattttgattcaccgacccacagcacaggccagctcaaggcccagcttgtgtgcaattatgtccagtctcagcaggaattactatgggagggcggaggacgggaggacgcaccagcccaagagcctagttaccaatccccaaagtttcttggaggctctcaggtgtctccaagccgcgctaaagctccagtgaacacctatggtcctgggtttggtcctaacctgcctaaccataaatcaggctcttacccgaccccatccccatgccacgaaaatttcgtcgttggcgcaaaccgtgcctcacacagggccgctgcccctccaagactgcttcccccactccctacatgttatggacctctcaaagtgggcggaaccaatccgagctgtggacatccagaggtcggcaggctagggggaggtccggcactataccccccacccgaggggcaggtctgtaaccctctcgatagtttggatctcgacaatacccagctcgatttcgtggccattctagatgagcctcagggtctctctccccctcccagccacgatcagcgtgggtcaagtggacacaccccgcctccttccggcccacccaacatggccgtgggaaatatgagtgtgctgctacgtagcctgccaggcgagaccgagttcctcaattcttccgcatag

SEQ ID NO: 333848 - protein, 175 aa, Artificial Sequence
  derived and/or modified sequence
MSPSLGFPAQMNHQKGPSPSFGVQPCGPHDSARGGMIPHPQSRGPFPTCQLKSELDMLVGKCREEPLEGDMSSPNSTGIQDPLLGMLDGREDLEREEKREPESVYETDCRWDGCSQEFDSQEQLVHHINSEHIHGERKEFVCHWGGCSRELRPFKAQYMLVVHMRRHTGEKPHKC

SEQ ID NO: 333849 - protein, 44 aa, Artificial Sequence
  derived and/or modified sequence
MSGPHSYGPARETNSCTEGPLFSSPRSAVKLTKKRALSISPLSD

SEQ ID NO: 333850 - DNA, 390 bp, Artificial Sequence
  derived and/or modified sequence
atgttcaacagcatgacccccccccccatcagcagctacggcgagccctgctgcctgagacccctgcccagccagggcgcccccagcgtgggcaccgagggcctgagcggcccccccttctgccaccaggccaacctgatgagcggcccccacagctacggccccgccagagagaccaacagctgcaccgagggccccctgttcagcagccccagaagcgccgtgaagctgaccaagaagagagccctgagcatcagccccctgagcgacgccagcctggacctgcagaccgtgatcagaaccagccccagcagcctggtggccttcatcaacagcagatgcaccagccccggcggcagctacggccacctgagcatcggcaccatgtag

SEQ ID NO: 333851 - DNA, 390 bp, Artificial Sequence
  derived and/or modified sequence
atgttcaacagcatgactccaccacctatatctagttatggggaaccctgttgccttcgccccctgccttcccagggtgctccaagtgtgggaacagaaggcctttcaggtccgcccttctgtcaccaagccaacctgatgtctggtccgcacagctacggcccagcgagagaaaccaattcttgtaccgagggaccgttattctcctctccacggagtgcagttaaactgaccaaaaaaagagccctctccatatcacctctgagcgatgcgtctctggacttgcagaccgtcatacgcacatccccatcctctctggtcgccttcatcaactcccgatgcacctcccctgggggaagttacgggcacctgtccattggaacgatgtag

SEQ ID NO: 333852 - DNA, 480 bp, Artificial Sequence
  derived and/or modified sequence
ggttaagtttaagaggctggagggatggctagctggaggtctgcgttgtagagaggtaaccccagtgtccccacaccctcctctgagacgccatgttcaactcgatgaccccaccaccaatcagtagctatggcgagccctgctgtctccggcccctccccagtcagggggcccccagtgtggggacagaaggactgtctggcccgcccttctgccaccaagctaacctcatgtccggcccccacagttatgggccagccagagagaccaacagctgcaccgagggcccactcttttcttctccccggagtgcagtcaagttgaccaagaagcgggcactgtccatctcacctctgtcggatgccagcctggacctgcagacggttatccgcacctcacccagctccctcgtagctttcatcaactcgcgatgcacatctccaggaggctcctacggtcatctctccattggcaccatga

SEQ ID NO: 333853 - DNA, 784 bp, Artificial Sequence
  derived and/or modified sequence
accgcacaccccccagcccagactccagccctggaccgcgcatcccgagcccagcgcccagacagaggcccactcttttcttctccccggagtgcagtcaagttgaccaagaagcgggcactgtccatctcacctctgtcggatgccagcctggacctgcagacggttatccgcacctcacccagctccctcgtagctttcatcaactcgcgatgcacatctccaggaggctcctacggtcatctctccattggcaccatgagcccatctctgggattcccagcccagatgaatcaccaaaaagggccctcgccttcctttggggtccagccttgtggtccccatgactctgcccggggtgggatgatcccacatcctcagtcccggggacccttcccaacttgccagctgaagtctgagctggacatgctggttggcaagtgccgggaggaacccttggaaggtgatatgtccagccccaactccacaggcatacaggatcccctgttggggatgctggatgggcgggaggacctcgagagagaggagaagcgtgagcctgaatctgtgtatgaaactgactgccgttgggatggctgcagccaggaatttgactcccaagagcagctggtgcaccacatcaacagcgagcacatccacggggagcggaaggagttcgtgtgccactgggggggctgctccagggagctgaggcccttcaaagcccagtacatgctggtggttcacatgcgcagacacactggcgagaagccacacaagtgca

SEQ ID NO: 333854 - DNA, 390 bp, Artificial Sequence
  derived and/or modified sequence
atgttcaacagcatgaccccaccacccatcagcagctatggagagccctgctgcctgcggcccctgcccagccagggcgcccccagcgtgggcacagagggcctgagcggcccccccttctgccaccaggccaacctgatgagcggcccccacagctatggccctgcccgggagaccaacagctgcacagagggccccctcttcagcagccccaggtctgctgtgaagctgaccaagaagagggccctgagcatcagccccctgagtgatgccagcctggacctgcagaccgtcatccgcaccagccccagcagcctggtggccttcatcaacagccgctgcaccagccctgggggcagctatggccacctgagcatcggcaccatgtag

SEQ ID NO: 333855 - DNA, 390 bp, Artificial Sequence
  derived and/or modified sequence
atgttcaacagcatgacccccccccccatcagcagctacggcgagccctgttgcctacgccccctgccaagccaaggagccccaagcgtaggcactgaaggcctgtctggaccaccattctgccaccaagctaacctgatgtctggaccccactcttacggacccgctcgtgagactaatagctgtaccgaagggcctttgttttcatcgccaagatctgccgtcaaactgacaaaaaagcgcgccttgagtatcagcccactcagcgatgcctctttggacctccaaacggtgattcgtacttccccatcatcacttgtcgccttcatcaatagccgctgtacctctcctggcgggtcttatggccatctgagcataggaactatgtag

SEQ ID NO: 333856 - DNA, 390 bp, Artificial Sequence
  derived and/or modified sequence
atgtttaacagcatgaccccacccccaatctccagctatggcgagccttgctgtctccgcccattgccctctcagggagccccaagtgtaggaacagagggactaagcggtccaccattctgccatcaagccaatctgatgtcaggaccacactcgtacggtccagcccgagagaccaactcatgtaccgaagggcctctgttctctagccctcggtcagccgtgaagttgaccaaaaaaagggcattaagtatcagtcccctgtccgacgcctctcttgatctccagactgtgatccgtactagtcccagttccctggtggcgtttatcaacagtcgatgcacatcacctggtggcagctacggacatttgtctattggaactatgtag

SEQ ID NO: 333857 - protein, 2344 aa, Artificial Sequence
  derived and/or modified sequence
MIPWSIFLLHVLLFSLQEYICASSILMGTSKNGFNENRQKRALLAAQFEATSPRYFFHDAINWGESKIKGSCPYECLNGAFCSKTGTCDCQIFQALGTRCQIIPNMGNGRDGICKTWGQYHFETFDGIYYYFPGNCSYIFAKDCGDLEPRYTVWVHNSPKCLGSVYSCYRSISLFFSNQEEIRIYGHEIKKNGISLTLPQTIGQIFIEKLADYILVKTTFGFSLAWDGISGIYLKLSEDHKGKSCGLCGNYNDIQSDDFIILQEDYTEDIAMFANSWSVQTPDDTKCVLTPSDFPNPCSSGMPAFEAIFFKCQILLQFPFLSCHEYIDPYLYIASCVNDLCKTDDDETYCRAATEYARACSHAGYPIQDWRDDFPACTDKCDDSFVHRDCISCCPPTCTFEKQCLGSNLHCLDGCYCPDGLVMDNGTCISLENCPCGFHGLAYSVGSKIEQECTECVCVGGVWNCTEQDCPVQCSVVGDSHFTTFDGRHYSFIGMCQYILVKGTGKDKFTITLQKAPCEQNLGLVCLQSITLILEDDFNKQVTLGRGGQILTSPNQGFNLNGIVEIQTLSSLFILLKTTFGLKILFAIDGERIYIQLTSAWKRRTLGLCGTFNGNIRDDFLSPSGMIEGTPQLHANAWRVSSTCFAPVHVPVVDPCNINQQNIGYAAHCDVIHQELFAPCHIYISPGLYYQLCRHDACKCGSSCLCNALAHYAYLCGQHGVPIDFRTQISFCAVVCQKGMLYHHCSSFCLHSCISLSSPEQCSDDCAEGCNCPEGKFYEDTLNFCVPIFHCRCHYRGSVYQPGELIPTPSGLCQCSNGTVKCDELATPSAVHICPEGKEYFDCRFPDPELPAGGVNCETTCANLAMNFTCTPSSPCISGCVCAPGMAEHRGKCYVPESCPCIWKDWEYLSGEVIATPCYTCVCRRGMFNCTYYPCPAVCTIYGDRHYYSFDGLEYDYISDCQVFLIKSADDSDISVIAQNKKCFDNDIVCSKSVLISVGDTEIYLNDTPYKQKQSGFFLENKSTYQLWKAGYYIVVYFPEKDITILWDRKTTIHIKVGPQWKNKLSGLCGNFDKCTSNDMTTSNNLEVRNARVFGDSWALGQCESPDETIKPCEAHQNKFPYAKKECSILYSDIFASCRNVIDVTSFAKNCHEDTCNCNLGGDCECLCTSIAAYAYKCCQEGISIHWRSSTVCSLDCEYYNEGLGEGPYMLASYGQSGLVLGANMTSRSVFCLPRSSVHTSLFFYFMITPGLFKEKVSSLALVSLESAERPNYFLYVHDNDTLSLELWEANSAFHRRATFFHHQGLWIPGYSAFELYSKKGFFIIFTDSSVKASKYDDSEEFKHSSSFSIEEIQAAVPYRKMCEWRYEPCATPCFKTCSDPEALACKFLPPVEGCLPYCPKNMILDEVTLKCVYPRDCIPVIPTEPTLMPPAKPTVPMFTVWEMITPSDITVFDMLTPTTGLECEPQKFDPVYDCSQYICLNMEWQLYNWSLNCPKDVEMPDCGFRGRPVQVNSDICCPEWECPCRCSMLSELSIITFDGNNAALYSMASYILVRIPGEIIVAHIEKCSMNQNGNSLKKLAPSGRISGLCFKKLNVTTPIHKIIVNRLARKVEVDSIVVPLPFSSQELSIEDSGSMYVITTPAGLIIKWSHLTGIIDIHFGFRFNLSSYTEGLCGICNEDPDDDLRMQNGTIITNMEDIGLFIESWEIEKSFEVTMRRPVRNCTEHDCSQCIDLLNRRIFIPCHDKVSPEDFCEKMWINYTYFWNYECDALSAYVALCNKFDICIQWRTPDYCSLSCPEGKEYQPCVRPCEARTCLNQWFYGHTSCLNLREDCVCKVGTILHRPHSAQCIPEKECACTDSEDQPRTAGEIWNGGIDECTLYKCLENGSIIPIEPDCDEEPTPVCEREAEVVMGIIDKWTCCSKEVCGCDTTLCETSIPTCTNSQKLIVGHSPLSCCPQYKCECDPLKCPSISTPECREDQFMIQVRQEEPCCFSPFCVCESCTKPVPLCHDGEFLTVDLNSTHFCCPQYYCVCEPNLCPMPLLNCAEDMNLVKENVSGQCCPTWHCECNCENLIMPTCEVGEFTAIDHNFQSDCGCIQYLCEKDDVCVFQEVSVLNPGQSMIKYLEEDFCYAIECLEEKDNHTGFHTLNFTLVNCSKKCDVHQVYTPSPSDYGCCGTCKNVSCKFHMENGTSVVYAVGSTWHYNCTTYECVKTDEGAIILNYTMVCPPFNETECKMNEGIVKLYNEGCCKICKREERICQKVIIKSVIRKQDCMSQSPINVASCDGKCPSATIYNINIESHLRFCKCCRENGVRNLSVPLYCSGNGTEIMYTLQEPIDCTCQWN

SEQ ID NO: 333858 - DNA, 8083 bp, Artificial Sequence
  derived and/or modified sequence
aatttaatgataccttggagtatattcttgcttcatgtactgctgttttcattacaagaatatatttgtgcatcgtctatattgatgggaacatcaaaaaacgggtttaatgaaaatcgacagaaaagagctcttttagcagcacagtttgaagctacttctccgagatactttttccatgatgctattaattggggtgagagcaaaataaaaggttcttgtccttatgaatgccttaatggagctttctgttctaagactggaacatgtgactgtcaaatatttcaggctcttgggacaagatgccagatcatcccaaacatgggcaacggcagagatgggatttgtaaaacctggggacagtatcattttgaaacattcgatggcatctactattacttcccaggaaactgttcttacatttttgcaaaggactgtggtgatttggagcctcggtacactgtatgggttcataacagccctaaatgccttggttcggtgtattcttgttatcggtcaatcagcttgttcttttcaaaccaagaggaaattcgaatttatggtcatgaaataaaaaagaatggaatcagtttaacattgcctcagacaattggacagattttcattgagaaactagctgactacattcttgtgaaaacaacctttggcttttcattggcttgggacgggatatctgggatctacctcaagctgtctgaggaccataaggggaaatcatgtggcctatgtggaaactacaatgacattcaatctgatgatttcataattctgcaagaggactatacagaagacatcgctatgtttgcaaatagttggtcggtgcaaactccagatgacaccaaatgtgtactcacaccctcagattttccaaatccgtgctccagtggaatgccagcatttgaggcaatcttcttcaagtgtcagatactgttgcagtttccttttctgagctgccatgagtatatcgatccatacttatatattgccagctgtgttaatgatctttgcaaaactgatgatgatgaaacctattgccgagcagccactgagtatgctagagcctgctctcatgctggctaccctattcaagactggagagatgactttccagcatgcactgataaatgtgatgatagctttgtccatcgggactgtatcagttgttgtccaccaacctgcacatttgagaagcaatgtcttgggagcaatctccattgtcttgatggatgttactgcccagatggcctcgtaatggacaatgggacttgcatctccttggaaaattgcccatgcggttttcatggattagcttattcagttggttcaaaaattgaacaagaatgtactgaatgtgtgtgtgttggtggagtttggaactgcactgagcaagactgtccagttcaatgctcagttgtaggtgattctcactttacaacttttgatggtcgacattattcttttattggcatgtgccaatacatcctcgtgaaaggaactggaaaagataaattcacgattactttacagaaagctccctgtgagcagaatcttggcttggtctgccttcagtctataactctgattctggaggatgattttaacaaacaagtgacccttggtaggggaggacaaattctcactagtcctaaccaaggcttcaacctgaatggtattgttgaaattcaaactctgtcatccttatttatacttctaaaaaccacatttggtttaaagattctgtttgctatagatggggaaagaatttatattcagcttactagcgcatggaaaagaagaacattaggtctgtgtggcacttttaatggcaacataagggatgattttctttctccatcaggcatgatagaaggtacaccacaacttcacgcaaatgcgtggagagtttcttctacctgttttgcacctgttcatgtcccagtggtggacccctgtaacatcaatcaacaaaacattgggtatgcagcacactgtgatgtcatccaccaggagctctttgctccttgccacatctatattagccctgggctgtactatcagctatgccgccacgatgcatgcaagtgtggaagctcctgcctgtgcaatgctcttgcccactatgcctacctctgcggccagcacggtgttcccattgatttcagaactcagatttctttctgtgctgtggtgtgccagaagggcatgctgtaccatcactgttcctcgttctgcctccattcctgcatttctctctcttccccggagcagtgcagtgatgactgtgctgaaggctgtaattgtccggaaggcaaattctatgaagacactcttaacttttgtgtacccatattccactgccgttgtcattataggggcagtgtttatcaacctggagagctcatccccacaccctcgggcttatgccagtgttcaaatgggactgtgaaatgtgatgaattagcaacgccctctgctgttcacatctgcccagagggaaaagagtatttcgactgcaggtttcctgaccctgaattaccagctggtggtgttaattgtgagactacatgtgcaaacctagccatgaacttcacctgcaccccatcctcaccctgtataagtggctgtgtttgtgctccaggaatggcagagcacagaggaaagtgttatgttcctgaaagctgcccatgtatttggaaagattgggagtatctctcaggagaagtgattgctacaccgtgttacacctgcgtttgtcgacgaggaatgttcaattgcacatattatccatgcccagcagtgtgcacaatatacggggaccgacattattattcttttgatggactagaatatgactatatcagtgattgccaggtgtttttgataaagagtgcagatgattcagatatatctgtcattgcccagaacaagaaatgctttgacaacgatattgtttgttctaaaagtgttttgatttcagttggggacactgaaatttacctgaatgatactccttacaaacagaaacaatcaggtttttttctggaaaacaaatctacctaccagctttggaaggctggttactatatagtagtatactttccagagaaagatatcactattctttgggataggaagacaactattcatatcaaagttgggccacagtggaagaacaagctatcaggattgtgtggaaactttgacaaatgcacttcaaatgatatgaccacatctaataacttggaagtgagaaatgctcgggtatttggagatagttgggcattaggacagtgtgaaagtccagatgaaacaattaaaccctgtgaggcacatcaaaacaaatttccttatgccaagaaagaatgctccattttgtacagtgatatttttgcttcttgtcgcaatgtgattgacgttacttcttttgccaaaaattgtcatgaagatacatgtaactgcaatcttggtggcgactgtgagtgtttgtgcactagtatagctgcatatgcatacaagtgttgtcaggaaggaatatcaattcattggagatcatctactgtttgttcacttgattgtgaatactacaatgaaggacttggagaaggaccatatatgctggcaagctatgggcagagtggccttgttctgggggccaatatgaccagcagaagcgttttctgtttgccgagaagcagtgttcataccagtttatttttttattttatgatcactccaggccttttcaaagagaaggtatcatcattagcacttgtttccttggaatctgctgaaaggccaaactactttctctatgtccatgacaatgatactcttagcttggagctgtgggaggcgaattcagcctttcatcggagagcaacatttttccaccatcagggcctctggattcctggttacagtgcatttgagttatacagcaagaaaggctttttcatcatattcacagattctagtgtcaaagcatcaaaatatgatgattctgaagaatttaaacattcaagtagcttcagcatagaagaaatccaggcagcagtgccttacaggaagatgtgtgaatggagatatgaaccttgtgctacaccctgttttaaaacatgtagtgaccctgaagcactagcatgtaaatttcttccaccggttgaaggatgcttgccctactgccctaaaaatatgatccttgatgaggtcaccctcaagtgtgtttatccacgagactgtatacctgtgattcccacagaaccaacattaatgccaccagctaagccaactgtgcccatgtttacagtttgggaaatgattactccatcagacatcactgtgtttgatatgctaacaccaactacaggcttggaatgtgagcctcagaaatttgatcctgtttatgattgtagccaatacatatgccttaatatggaatggcagttatacaactggtcccttaattgcccaaaggacgtggaaatgcctgactgtggtttccgaggaaggccagttcaagtgaacagtgatatctgctgccctgagtgggaatgtccttgtcggtgttccatgttgtcagaactgagcattattacatttgatggaaacaacgcagcattatatagcatggcttcttatatcttagtaagaattcctggtgaaattatagttgctcatatcgaaaaatgttccatgaatcagaatggaaactccttaaaaaagctagctccctctggaagaatctctggactttgttttaagaagttaaatgtgacaacacccatacataaaataattgtcaatcggttggcaagaaaggtagaagtggattccattgttgtgcctttgcccttttcaagtcaggaactgtccatagaggattctggttcaatgtatgtaattactactccagctggactaatcataaagtggtctcatcttacaggaatcatagacattcattttggcttccgatttaacttgtcatcctacacagaaggactctgtggaatttgcaatgaagatccggatgatgatctaaggatgcaaaatggcacaattattacaaatatggaagacataggattatttattgagagctgggaaattgagaaatcatttgaagtaacaatgagaagacctgttaggaattgtactgagcatgattgcagccagtgcattgatttattaaatagaagaattttcattccatgtcatgataaagtttcaccggaagacttttgtgaaaagatgtggatcaattatacctatttttggaactatgaatgtgatgcactttctgcatatgtggctctgtgcaacaagtttgatatctgtattcagtggagaacacctgattactgctccctgagttgcccagaggggaaggaatatcaaccctgtgtgcgaccttgtgaagcaagaacatgcctgaaccaatggttctatggacacacttcctgtttgaatctaagagaagactgtgtgtgcaaagttggaactattcttcacaggccacattcagcccagtgcattccagagaaagagtgtgcatgcactgatagtgaagaccaaccccgcactgctggggagatttggaatgggggcattgatgaatgcactctatacaaatgtttggagaatggaagcattatccctatagaacctgactgtgatgaagagcccacgccagtttgtgaacgagaagctgaagttgtcatgggcatcattgataaatggacctgctgttcaaaggaagtttgtggatgtgacacgactttgtgtgaaactagcattccaacatgtacaaatagtcaaaaattgattgttggccacagtcctctttcttgctgtccacagtacaaatgtgaatgtgacccattgaaatgccccagtatttcaacaccagaatgcagagaagatcaattcatgattcaagttcgacaggaagaaccttgttgtttttcccctttttgtgtttgtgaatcttgcaccaaacctgttccactatgtcatgatggggaatttctcacagtagatcttaatagcacacacttctgttgtcctcagtattactgtgtatgtgaaccaaacctttgtcctatgccattactcaactgtgcagaagatatgaatcttgtgaaagaaaatgtatctggtcaatgttgcccaacatggcactgtgaatgtaactgtgaaaaccttattatgccaacttgtgaagtgggagaatttactgcaatagaccataacttccagagtgattgtggatgcatacagtatctctgtgaaaaggatgatgtgtgtgtatttcaagaagtatcagtattgaatcctggacaatccatgataaagtatttggaagaagacttttgttatgctatagagtgtctggaagaaaaagataaccatacgggctttcacactctgaattttacactggtgaattgttcaaaaaaatgtgatgttcaccaggtatatactccatccccaagtgattatggttgttgtggtacctgcaaaaatgtatcctgcaaatttcacatggaaaatggaacatcagttgtatacgcggtagggagtacctggcactacaattgcaccacatatgaatgtgttaaaactgatgaaggagcaataattctgaactacacaatggtctgtcccccttttaatgagactgaatgcaaaatgaatgaagggattgtgaagctttataatgaaggctgttgcaagatctgcaaacgagaagaaagaatatgccagaaagtgatcattaaatcggtcataaggaaacaggactgtatgagccaaagccctataaatgttgcatcttgtgacggcaaatgcccatcagctaccatatataacatcaatattgaaagtcacctaagattctgcaagtgttgtcgtgaaaatggagtacgaaacttgtctgtgcctctgtattgctcaggaaatggcactgaaattatgtacactctccaggaacccatagactgtacgtgccagtggaattaaacccttgggttccaagagctctatacaacatcataacgtcagatagaattaacttttattgctattacttaggcatgtggcagatttatgctgtttaacaatactgtatttttcagacttggaatgtggaaatttagcaatttgtacaaaatatatacagtttcaatagcaaaattaaatttattgctttactctattttagaaaatcaaatgactgtaagttgttcagctgaaatgctgttatgtatttaattacaacttggtgcagatacagtatattctcatcaactggaaggttattttgcaaaattccttcaatttcactcagtagctctttttttcttaatttgcaaagtctgctatagctatccaaattaaggtaccctttaatatgtactccttaatctggtaaatgtgatcagttaaaattgtcatctagatagcaataaagagtgatatgcttagagatagataatggattatttaaaacctgaatggtttatagagaagtcattataaattcccctcattttgcaggtgtaacagataaccagagaagctgtgtgactcgtacaaatttattcagtgtaataatatagtaaattcatgttaacagttggattaaatcctagctctctcttattccagtactatatcacttttaaaatcctgagcagtatgtagtaagagtatatcacagaatctttcattcttaaagagtttgcattggatagaattaagtattttaagtttaacatatttgaaaaatgccccccatacattgttattccaatagtaaggagcagggaaatatagcatcatttgctaaatagaggagatagatcttgaactgttattttttatataattaaaactgctattaaatgtgttgtcagtatttaacatttagttactgtctcattaatatttaattttgaggatgtacttgcatactgttgaagttgagtgctgttttgctgttaatgctgctgctttgccaatgaagaatgaaataaatttatctgaatgtatcaataacttt

SEQ ID NO: 333859 - protein, 168 aa, Artificial Sequence
  derived and/or modified sequence
MTLNSNGIYTGFIKVQMELCKPPQTSPNSGKLSPSSNGCMNTLHISSTNTVGEVIEALLKKFLVTESPAKFALYKRCHREDQVYACKLSDREHPLYLRLVAGPRTDTLSFVLREHEIGEWEAFSLPELQNFLRILDKEEDEQLQNLKRRYTAYRQKLEEALREVWKPD

SEQ ID NO: 333860 - DNA, 507 bp, Artificial Sequence
  derived and/or modified sequence
atgaccctgaactcaaatggaatctacaccggctttatcaaagtgcagatggagctgtgtaagccgccccaaaccagcccaaattctggcaaattatctccttctagtaatgggtgcatgaacaccctgcacatctcaagcacaaacaccgtgggggaggtaatcgaggctctcctaaagaaattccttgtcactgagagtcccgccaaatttgccctttacaagcgttgtcacagagaggatcaagtttatgcttgcaaactctccgaccgcgaacatcccctgtacttgcgcttagtagccggaccccgtaccgacaccctctctttcgttcttcgggagcacgagataggggagtgggaggcctttagcctcccagagttacagaatttcctcaggatccttgacaaggaagaagatgagcagttgcagaaccttaagcgtcgatacacagcttatagacagaagttggaagaggcgcttcgcgaagtgtggaagccagattag

SEQ ID NO: 333861 - DNA, 507 bp, Artificial Sequence
  derived and/or modified sequence
atgaccctgaacagcaatggcatctacacaggcttcatcaaggtgcagatggagctgtgcaagccaccccagaccagccccaacagcggcaagctgagccccagcagcaatggctgcatgaacaccctgcacatcagcagcaccaacacagtgggggaggtgattgaggccctgctgaagaagttcctggtgacagagagccctgccaagtttgccctgtacaagcgctgccaccgggaggaccaggtgtatgcctgcaagctgagtgaccgggagcaccccctgtacctgcggctggtggccggccccaggacagacaccctgagctttgtgctgcgggagcatgaaattggagagtgggaggccttcagcctgcctgagctgcagaacttcctgcgcatcctggacaaggaggaggatgagcagctgcagaacctgaagaggcgctacacagcctaccggcagaagctggaggaggccctgcgggaggtgtggaagccagactag

SEQ ID NO: 333862 - DNA, 507 bp, Artificial Sequence
  derived and/or modified sequence
atgaccctgaacagcaacggcatctacaccggcttcatcaaggtgcagatggagctttgtaagcccccgcagacatcacccaactccggtaagctgagtcccagtagtaatgggtgcatgaacacactgcacatctcatcgaccaatacagtgggggaggtcatagaggccctccttaaaaagttcctggtaacggaatctccagctaagttcgccctgtataaacgttgtcatcgggaggatcaggtgtacgcttgcaaattgagcgatcgggaacacccactctatctgagactggtcgcaggccctcgtacagatactctgtctttcgtgctaagggagcatgaaatcggggagtgggaggcattcagtctgcctgaactccaaaactttctgaggatcttagacaaagaggaagatgaacagctgcagaacctcaaacgcaggtacaccgcgtacagacagaagctagaggaggctctgcgggaggtgtggaaacccgattag

SEQ ID NO: 333863 - DNA, 507 bp, Artificial Sequence
  derived and/or modified sequence
atgaccttgaatagtaacgggatttacaccggcttcattaaagtacagatggagttgtgcaagcctccccagacaagtcccaatagcgggaaactatcaccatcctctaacggttgcatgaacacactgcatatttcttccactaataccgtgggggaagttatcgaggcacttttgaagaagttcctcgtcacagaaagtccagccaagttcgcattatacaagcgatgccatcgggaggaccaagtttacgcctgcaaacttagcgatagggagcaccctctgtatttgcggctcgtggcagggccacggacagacactctctctttcgtgctcagggaacatgagataggtgaatgggaagccttcagccttcctgagttgcagaactttctgcgaatcttagataaggaagaggacgaacaactgcagaatctaaaaagaaggtacacagcttatagacagaagcttgaggaggccctgcgagaggtatggaaacctgactag

SEQ ID NO: 333864 - DNA, 507 bp, Artificial Sequence
  derived and/or modified sequence
atgaccctgaacagcaacggcatctacaccggcttcatcaaggtgcagatggagctgtgcaagcccccccagaccagccccaacagcggcaagctgagccccagcagcaacggctgcatgaacaccctgcacatcagcagcaccaacaccgtgggcgaggtgatcgaggccctgctgaagaagttcctggtgaccgagagccccgccaagttcgccctgtacaagagatgccacagagaggaccaggtgtacgcctgcaagctgagcgacagagagcaccccctgtacctgagactggtggccggccccagaaccgacaccctgagcttcgtgctgagagagcacgagatcggcgagtgggaggccttcagcctgcccgagctgcagaacttcctgagaatcctggacaaggaggaggacgagcagctgcagaacctgaagagaagatacaccgcctacagacagaagctggaggaggccctgagagaggtgtggaagcccgactag

SEQ ID NO: 333865 - protein, 906 aa, Artificial Sequence
  derived and/or modified sequence
MEKLLRLCCWYSWLLLFYYNFQVRGVYSRSQDHPGFQVLASASHYWPLENVDGIHELQDTTGASRTHKLTVLPSRNATFVYSNDSAYSNLSATVDIVEGKVNKGIYLKEEKGVTLLYYGRYNSSCISKPEQCGPEGVTFSFFWKTQGEQSRPIPSAYGGQVISNGFKVCSSGGRGSVELYTRDNSMTWEASFSPPGPYWTHVLFTWKSKEGLKVYVNGTLSTSDPSGKVSRDYGESNVNLVIGSEQDQAKCYENGAFDEFIIWERALTPDEIAMYFTAAIGKHALLSSTLPSLFMTSTASPVMPTDAYHPIITNLTEERKTFQSPGVILSYLQNVSLSLPSKSLSEQTALNLTKTFLKAVGEILLLPGWIALSEDSAVVLSLIDTIDTVMGHVSSNLHGSTPQVTVEGSSAMAEFSVAKILPKTVNSSHYRFPAHGQSFIQIPHEAFHRHAWSTVVGLLYHSMHYYLNNIWPAHTKIAEAMHHQDCLLFATSHLISLEVSPPPTLSQNLSGSPLITVHLKHRLTRKQHSEATNSSNRVFVYCAFLDFSSGEGVWSNHGCALTRGNLTYSVCRCTHLTNFAILMQVVPLELARGHQVALSSISYVGCSLSVLCLVATLVTFAVLSSVSTIRNQRYHIHANLSFAVLVAQVLLLISFRLEPGTTPCQVMAVLLHYFFLSAFAWMLVEGLHLYSMVIKVFGSEDSKHRYYYGMGWGFPLLICIISLSFAMDSYGTSNNCWLSLASGAIWAFVAPALFVIVVNIGILIAVTRVISQISADNYKIHGDPSAFKLTAKAVAVLLPILGTSWVFGVLAVNGCAVVFQYMFATLNSLQGLFIFLFHCLLNSEVRAAFKHKTKVWSLTSSSARTSNAKPFHSDLMNGTRPGMASTKLSPWDKSSHSAHRVDLSAV

SEQ ID NO: 333866 - DNA, 2776 bp, Artificial Sequence
  derived and/or modified sequence
tggctccgagctttgacctccgagagagccatggaaaagctgctgcggctgtgctgctggtactcctggctgctgctattttattacaactttcaggtgcgtggcgtctactccagatcgcaggaccatccaggatttcaggtgttggcgtctgcttcccattactggccactggagaatgtggatgggatccatgaacttcaggatacaactggagcgtcccgaacccacaagctcactgtgcttccttcccgtaatgctacttttgtgtattccaatgattctgcctactcaaatctctctgcaactgtagatattgtggaagggaaggtcaacaaaggcatttacctgaaagaggaaaagggagtcacgcttctctattacggcaggtacaacagctcctgcatcagcaagccagagcagtgtggccctgaaggggtcacgttttcttttttctggaagacacaaggagaacagtctagaccaatcccttctgcgtatgggggacaggtcatctccaatgggttcaaagtctgctccagcggtggcagaggctctgtggagctgtatacgcgggacaattccatgacatgggaggcctccttcagccccccaggcccctattggactcatgtcctatttacatggaaatccaaggagggcctgaaagtctacgtcaacgggaccctgagcacctctgatccgagtggaaaagtgtctcgtgactatggagagtccaacgtcaacctcgtgatagggtctgagcaggaccaggccaagtgttatgagaacggtgctttcgatgagttcatcatctgggagcgggctctgactccggatgagatcgccatgtacttcactgctgccattggaaagcatgctttattgtcttcaacgctgccaagcctcttcatgacatccacagcaagccccgtgatgcccacagatgcctaccatcccatcataaccaacctgacagaagagagaaaaaccttccaaagtcccggagtgatactgagttacctccaaaatgtatccctcagcttacccagtaagtccctctcggagcagacagccttgaatctcaccaagaccttcttaaaagccgtgggagagatccttctactgcctggttggattgctctgtcagaggacagcgccgtggtactgagtctcatcgacactattgacaccgtcatgggccatgtatcctccaacctgcacggcagcacgccccaggtcaccgtggagggctcctctgccatggcagagttttccgtggccaaaatcctgcccaagaccgtgaattcctcccattaccgcttcccggcccacgggcagagcttcatccagatcccccacgaggccttccacaggcacgcctggagcaccgtcgtgggtctgctgtaccacagcatgcactactacctgaacaacatctggcccgcccacaccaagatcgcggaggccatgcatcaccaggactgcctgctgttcgccaccagccacctgatttccctggaggtgtccccaccacccaccctgtctcagaacctgtcgggctctccactcattacggtccacctcaagcacagattgacacgtaagcagcacagtgaggccaccaacagcagcaaccgagtcttcgtgtactgcgccttcctggacttcagctccggagaaggggtctggtcgaaccacggctgtgcgctcacgagaggaaacctcacctactccgtctgccgctgcactcacctcaccaactttgccatcctcatgcaggtggtcccgctggagcttgcacgcggacaccaggtggcgctgtcgtctatcagctatgtgggctgctccctctccgtgctctgcctggtggccacgctggtcaccttcgccgtgctgtcctccgtgagcaccatccggaaccagcgctaccacatccacgccaacctgtccttcgccgtgctggtggcccaggtcctgctgctcattagtttccgcctcgagccgggcacgaccccctgccaagtgatggccgtgctcctacactacttcttcctgagtgccttcgcatggatgctggtggaggggctgcacctctacagcatggtgatcaaggtctttgggtcggaggacagcaagcaccgttactactatgggatgggatggggttttcctcttctgatctgcatcatttcactgtcatttgccatggacagttacggaacaagcaacaattgctggctgtcgttggcgagtggcgccatctgggcctttgtagcccctgccctgtttgtcatcgtggtcaacattggcatcctcatcgctgtgaccagagtcatctcacagatcagcgccgacaactacaagatccatggagaccccagtgccttcaagttgacagccaaggcagtggccgtgctgctgcccatcctgggtacctcgtgggtctttggcgtgcttgctgtcaacggttgtgctgtggttttccagtacatgtttgccacgctcaactccctgcagggactgttcatattcctctttcattgtctcctgaattcagaggtgagagccgccttcaagcacaaaaccaaggtctggtcgctcacgagcagctctgcccgcacctccaacgcgaagcccttccactcggacctcatgaatgggacccggccaggcatggcctccaccaagctcagcccttgggacaagagcagccactctgcccaccgcgtcgacctgtcagccgtgtgagccgggaggctgccaaccaggccag

SEQ ID NO: 333867 - DNA, 2721 bp, Artificial Sequence
  derived and/or modified sequence
atggaaaagctgttgagactgtgctgctggtacagctggctgctgctgttctattataatttccaggtccggggcgtatactcaaggtctcaagatcaccccggatttcaggttctggcttctgcaagccattattggcccctcgaaaatgttgatggcattcacgaactacaggacaccaccggggcatccaggacacacaagctgactgtgctgccaagccgcaatgctactttcgtgtactcgaacgacagcgcctattccaatttatccgctaccgtggatattgtggagggcaaagtcaataaaggaatttacttaaaagaagagaagggggtcacattactgtactatgggagatacaatagcagttgtatcagcaagccagaacagtgcggccccgagggcgtgacattcagctttttttggaaaacccagggagagcagagcagacccattccaagcgcatatggtggccaagttatctctaacggatttaaagtctgtagctccggaggtcgtggctccgtggaactgtatacacgggacaactccatgacctgggaggccagctttagtccacccggcccctattggacgcatgtgctttttacatggaaatcaaaagaaggcctaaaggtgtatgtgaacggaacactgtccacaagcgatccgtcgggcaaagtctcccgcgattatggcgagtcaaacgtgaacctagtgatcgggtctgaacaggaccaggccaaatgctatgagaacggagctttcgatgaatttataatttgggagagagcattgactccagacgaaatcgctatgtattttacagccgcaattggcaagcacgcactgctttcttccaccctgccatctctttttatgacgtccacggcctcaccagtcatgccaacagatgcttaccatcctattatcacgaacctcacagaggaacggaagacgtttcagtcccccggggtgattctgagttatttgcagaacgtgagcctcagccttcctagtaagtcactttccgagcagaccgcacttaacctgacaaagacatttctgaaggctgtgggcgaaatcctgcttctgcccgggtggattgcactgtccgaagactccgctgtggtcctgtcccttatcgatactatcgacaccgttatgggtcacgtctcgagcaatctccacgggagcactccacaggttacagtggaaggcagtagtgctatggccgaattttcagtggcgaagatcttgccgaaaacagtgaattcctcccattatcgattccctgctcacggacagagcttcatccagattccccacgaggcttttcacaggcacgcttggtccacggttgtgggcttgctgtaccacagtatgcattattatttaaacaacatctggccggcacacaccaagatcgccgaggctatgcatcatcaggactgcctcctattcgcgacatcccatttgatctccctcgaagtctcaccgccccccaccctgtctcagaacctgtctgggtctccccttataacggtgcacctcaaacacagactgactagaaaacaacacagcgaagcaaccaatagctctaacagagtgttcgtttactgtgctttcctggatttcagctctggcgaaggcgtgtggagcaaccacggctgcgccctaacacgcggcaatcttacctattcagtgtgccggtgtacgcacctgacaaacttcgctatactcatgcaagtcgtccctctggaacttgctaggggccaccaggtagcactgtctagcatctcctatgtgggctgtagtctgtcagtgctgtgcctcgtcgccacactcgtgacattcgccgtgctgagcagtgtgagtaccattcggaaccaaagatatcacatacatgccaacctcagtttcgccgtgctcgttgcgcaggtgctcctgctcatctcatttcgactggagccaggcaccacgccctgtcaggtgatggctgtgttgctccactattttttcctctcagcatttgcttggatgcttgtagaggggttgcatctttattccatggtgatcaaagtgtttggaagtgaggactctaagcacagatactactatggtatgggttgggggttccccttgctgatctgtattatctcactgtctttcgccatggatagctacggcacctcaaacaattgctggctgtcactggcttccggcgccatctgggccttcgttgctcccgcccttttcgtaatagtggttaatatcgggattcttatcgccgtgacacgcgtgatatcgcaaatctctgctgacaattataaaattcacggagatcccagtgcgttcaagctgacggccaaagccgtggctgtgttgcttcccattttaggtacatcatgggttttcggcgtgttagccgttaatggctgcgccgtggtgtttcagtatatgtttgctactctgaactccctgcagggactgtttattttcctgttccactgcctactgaatagcgaagtgcgcgccgcttttaaacataaaacaaaggtttggagcctgactagttcttcagcccgcaccagtaacgcaaagccgtttcactctgatctgatgaatggtactcggcccggtatggccagtaccaaactgtccccatgggacaagagcagccactcagcccacagagttgatctcagtgccgtctag

SEQ ID NO: 333868 - DNA, 2721 bp, Artificial Sequence
  derived and/or modified sequence
atggagaagctgctgcggctgtgctgctggtacagctggctgctgctcttctactacaacttccaggtgcggggcgtgtacagccgcagccaggaccaccctggcttccaggtgctggccagcgccagccactactggcccctggagaatgtggatggcatccacgagctgcaggacaccactggagccagcaggacccacaagctgactgtgctgcccagcagaaatgccacctttgtgtacagcaatgattctgcctacagcaacctgagcgccaccgtggacatcgtggagggcaaggtgaacaagggcatctacctgaaggaggagaagggcgtgaccctgctgtactacggccgctacaacagcagctgcatcagcaagccagagcagtgtggccctgagggcgtgaccttctccttcttctggaagacccagggcgagcagagccggcccatccccagcgcctatggaggccaggtgatcagcaatggcttcaaggtgtgcagcagcggcggccggggctctgtggagctgtacacccgggacaacagcatgacctgggaggccagcttcagccccccaggcccctactggacccacgtgctcttcacctggaagagcaaggagggcctgaaggtgtatgtgaatggcaccctgagcaccagtgaccccagcggcaaggtgtcccgggactatggagagagcaatgtgaacctggtgattggcagcgagcaggaccaggccaagtgctatgaaaatggagcctttgatgagttcatcatctgggagcgggccctgaccccagatgagatcgccatgtacttcaccgctgccatcggcaagcacgccctgctgagcagcaccctgcccagcctcttcatgaccagcacagccagccctgtgatgcccacagatgcctaccaccccatcatcaccaacctgacagaggagaggaagaccttccagagccctggggtcatcctgagctacctgcagaatgtgtccctgagcctgcccagcaagagcctgtctgagcagacagccctgaacctgaccaagaccttcctgaaggctgtgggggagatcctgctgctgcccggctggatcgccctgtctgaggacagcgctgtggtgctgagcctgattgacaccatcgacacagtgatgggccacgtgagcagcaacctgcacggcagcaccccccaggtgacagtggagggcagcagcgccatggccgagttctctgtggccaagatcctgcccaagacagtgaacagcagccactaccgcttccctgcccacggccagagcttcatccagatcccccatgaggccttccacagacatgcctggagcacagtggtgggcctgctgtaccacagcatgcactactacctgaacaacatctggccagcccacaccaagattgctgaggccatgcaccaccaggactgcctgctgtttgccaccagccacctgatcagcctggaggtgtccccaccacccaccctgagccagaacctgagcggcagccccctcatcaccgtgcacctgaagcaccggctgaccaggaagcagcacagcgaggccaccaacagcagcaacagagtgtttgtgtactgtgccttcctggacttcagcagtggagagggcgtgtggagcaaccacggctgtgccctgacccggggcaacctgacctacagcgtgtgccgctgcacccacctgaccaactttgccatcctgatgcaggtggtgcccctggagctggcccggggccaccaggtggccctgagcagcatctcctatgtgggctgcagcctgtctgtgctgtgcctggtggccaccctggtgacctttgctgtgctgagctctgtgtccaccatccggaaccagcgctaccacatccacgccaacctgagctttgctgtgctggtggcccaggtgctgctgctgatctccttccggctggagcccggcaccaccccctgccaggtgatggctgtgctgctgcactacttcttcctgagcgcctttgcctggatgctggtggagggcctgcacctgtacagcatggtgatcaaggtgtttggaagtgaggacagcaagcaccgctactactacggcatgggctggggcttccccctgctgatctgcatcatcagcctgagctttgccatggacagctatggcaccagcaacaactgctggctgagcctggccagcggggccatctgggcctttgtggccccagccctcttcgtcatcgtggtgaacatcggcatcctgattgctgtgaccagggtcatcagccagatctctgctgacaactacaagatccatggagaccccagcgccttcaagctgacagccaaggctgtggccgtgctgctgcccatcctgggcacctcctgggtgtttggagtgctggccgtgaatggctgtgctgtggtgttccagtacatgtttgccaccctgaacagcctgcagggcctcttcatcttcctgttccactgcctgctgaacagcgaggtgcgggccgccttcaagcacaagaccaaggtgtggagcctgaccagcagcagcgcccggaccagcaatgccaagcccttccacagcgacctgatgaatggcaccaggcctggcatggccagcaccaagctgagcccctgggacaagagcagccacagcgcccaccgggtggacctgtctgctgtgtag

SEQ ID NO: 333869 - DNA, 2721 bp, Artificial Sequence
  derived and/or modified sequence
atggagaagctgctgcggctgtgctgctggtacagctggctgctgctgttctactataattttcaggtgcgaggggtgtactcaaggagccaggatcatcctggatttcaggttctcgcatcagcgtctcactattggcccctggagaatgttgacgggattcacgagctgcaggacacgaccggggcttctcgaacacacaagctaacggtcctcccttcgcgtaatgccacgttcgtgtactcaaatgactctgcctacagtaacctcagtgccaccgtggacattgtcgagggaaaggttaataaaggcatatatctgaaggaagagaaaggagttactctcctgtattatgggaggtataacagctcctgcatttctaaaccggagcaatgcgggccggagggtgtcacctttagcttcttctggaaaactcagggcgagcagtcccgcccaatccccagcgcctatggcggccaggtaatctcaaacggtttcaaagtgtgttcttcaggcggtaggggtagtgttgagctttatacacgtgacaactcaatgacatgggaggctagtttttccccgcctggaccttattggacccacgtgctctttacatggaaaagtaaagagggactcaaggtttacgttaacggtacactatcaacttctgaccccagcggaaaagttagccgcgactacggagagagcaacgttaacctggtgatcggatctgagcaggatcaagcaaaatgttacgaaaacggcgccttcgacgagtttatcatctgggagcgcgccctgactccagacgaaatagcaatgtactttaccgcagccattggaaagcatgccctgttaagttctacactccccagcctgtttatgacctccacagcgtcaccggtgatgccaaccgatgcataccaccctattattactaacctgactgaagagaggaaaaccttccaatctcctggcgtgattctcagttacctgcagaacgtatccctgtctctgccctccaagtctctgagtgagcagactgctctgaacttgacgaaaactttccttaaagccgtgggggagatactgctgctcccaggctggattgccttatctgaggattctgctgtagtgctaagcctgattgatacaattgacactgtgatgggccatgtttccagtaatctgcacgggagcacaccccaggtcacagttgagggaagctccgcaatggccgaattcagcgttgccaaaatcctgccgaaaaccgtgaattcatctcactacagattcccagctcacggccagtctttcattcagatcccgcatgaggctttccacagacacgcctggtctaccgtagtaggcctcctctaccattctatgcactattacctgaataacatatggccagctcataccaaaatcgccgaggccatgcaccaccaggattgcctgctatttgctacaagccatctgatctctctcgaagtctccccccctccaaccctaagccagaatctgtccgggtcccctttaatcaccgtgcatttgaaacaccgactgacacgcaagcagcactctgaggcgaccaatagctccaatagagtgttcgtgtactgcgcctttctggacttctcgagcggagaaggcgtgtggtccaatcacgggtgtgcactaacacggggcaatttgacatatagtgtctgtagatgcacccatctgactaattttgccatcctcatgcaggttgtacctctggaactcgcaagaggtcaccaggtggccttgtcctctatttcttacgtaggatgcagtctgagcgtgctttgcctcgtcgctactctcgtcaccttcgcggtgctctcctccgtttctacgattcgcaatcagcgatatcacatacatgctaatctttcattcgcagtgttggtcgcccaggtcctgttgttgatttcattccgactggagccagggacaacaccatgccaggtaatggcggtattgctccattatttttttttgtccgcattcgcctggatgctggtggagggtcttcatctgtactccatggtaataaaggtttttgggagcgaggattcaaaacaccgctattattacggtatgggatggggatttcctctgctgatctgcatcataagcctgtcattcgccatggatagctatgggacatccaataactgttggctttccctggcctctggcgcaatctgggcattcgtagccccggcactattcgtaattgtggtgaacatcggcattctgattgccgtgactcgggtcatctcccaaatatccgccgacaattataagattcatggtgacccctctgctttcaagctgaccgctaaagctgtggcggtgctactcccaatcctggggacaagctgggtattcggcgtcctggcggtcaatggctgcgctgtagtgttccagtacatgtttgccaccctgaattccctccagggcctgtttatcttcttgttccattgtctcctgaattccgaagtcagagccgcatttaaacacaagacaaaagtgtggagcttaaccagctcgtccgctagaacgagtaacgccaaacctttccattcagatctgatgaatggcacgagacccggaatggcatctactaagctgtcaccctgggacaagtctagccactcggcacatcgtgtcgatctttccgccgtgtag

SEQ ID NO: 333870 - DNA, 2721 bp, Artificial Sequence
  derived and/or modified sequence
atggagaaactgctgcgtctgtgctgctggtactcatggttgttgctcttttattataacttccaagtgaggggggtgtactcaaggtcccaggaccatccagggtttcaggttctcgcttctgccagtcactattggccactcgaaaacgtcgacggaatccacgagctccaggacacaaccggcgctagtaggacccataaactgacagtccttccttcccgaaacgccacttttgtgtactctaacgattcagcatactccaacctgtccgcaactgtcgatatcgtggaagggaaggtcaataaaggcatctatttgaaagaggagaagggtgtgaccctgctgtactacggaagatataatagctcttgtatttctaagcccgagcagtgcggacctgagggcgtaactttctctttcttctggaaaactcaaggcgaacagagcaggccaatcccttctgcctacggtggacaggtgatatctaatggcttcaaagtgtgtagctctggcggaagaggttctgtggagttatacacaagggataatagcatgacatgggaagcctccttcagccctccaggcccttactggactcacgtgctcttcacctggaagagtaaggaaggcctgaaagtttatgtgaatgggactttgtctacttccgacccatcaggcaaggtaagcagagactacggagaaagcaatgtcaacctggtgatcgggagtgaacaagaccaggcgaagtgctatgagaatggcgcattcgacgagttcatcatctgggagagagctctgacacccgatgagattgcaatgtactttaccgctgctataggcaaacacgccctgctgtcctctaccttgcccagcctattcatgacatctacagcaagtcctgttatgcccactgatgcttatcacccgataattacaaacctgaccgaggaacgaaaaacttttcagagccccggtgtgatactgtcgtacctccagaatgtgtcactaagtctgccgtccaaatccctcagcgaacaaaccgcactaaatctgactaaaacatttctgaaggccgttggcgaaattctgcttttacctggttggattgctttgagcgaagacagcgcagtcgttttgtctttgatagataccattgatactgttatgggtcacgtgagttctaacctgcacggtagtaccccacaggttaccgtggagggttcctcggcaatggcggagtttagtgtggcaaaaatactgccaaaaaccgtgaacagctcgcactaccgttttcctgctcacgggcagtcttttattcagattcctcatgaggcattccatagacacgcctggagtacggtggttggtttgctgtatcatagtatgcattactatctcaataacatctggcctgcacacaccaaaatagccgaggcaatgcatcaccaagattgccttttgtttgctacgtcccacctgatcagcctggaagtcagtccaccgcctaccctctctcagaacctgagtggtagccccctgatcaccgtccacctgaagcaccgtctcactaggaaacaacattctgaagcaaccaattcgagcaacagggttttcgtgtattgtgcattcttggactttagtagtggcgaaggggtgtggagcaatcatggttgtgccctaacgagaggcaatctcacctacagtgtctgtaggtgcacccacctcaccaacttcgccatcctgatgcaagtggtccctctggaattggcacggggtcaccaggtggcactatctagcatttcctacgtcggctgttccctgtcggtcctctgccttgtcgcaacacttgtcactttcgcagtgctgagctccgtgtcaaccatccggaaccagcgttaccacatccacgccaatctgagcttcgccgtcctggtggcacaggtgttgctgttgataagtttccgccttgagccgggtacaaccccttgccaggtgatggctgtgctactacattacttctttttaagcgcgttcgcctggatgctcgtggagggcctgcatctgtattcgatggtgattaaagtgtttgggagcgaggacagcaagcaccggtattattacgggatggggtggggctttccactgctgatttgtataatcagtctctcatttgccatggattcctatggtacttccaacaattgttggctctcgcttgcctccggtgccatttgggccttcgtggcccctgccctgttcgtgatcgtggtgaatatcggcatcttgatagctgtgaccagagtcataagtcagataagtgccgataactataagatacatggtgacccttccgcctttaaactgactgccaaggccgtcgcagtactgctgccaatactcggtactagctgggtattcggggtactggcagtaaacggatgtgcagtggtcttccagtatatgttcgctacattaaactcattacagggcctctttatcttcctttttcactgtctcctgaacagcgaggtccgcgcagcgtttaagcataagacgaaagtctggagcctgacctcgtcctccgcacgaacttccaatgccaaacctttccactccgacctcatgaatgggacccggccagggatggcttccactaaactgagtccatgggacaagtccagccactccgcccaccgggtggatctgtccgccgtgtag

SEQ ID NO: 333871 - DNA, 2721 bp, Artificial Sequence
  derived and/or modified sequence
atggagaagctgctgagactgtgctgctggtacagctggctgctgctgttctactacaacttccaggtgagaggcgtgtacagcagaagccaggaccaccccggcttccaggtgctggccagcgccagccactactggcccctggagaacgtggacggcatccacgagctgcaggacaccaccggcgccagcagaacccacaagctgaccgtgctgcccagcagaaacgccaccttcgtgtacagcaacgacagcgcctacagcaacctgagcgccaccgtggacatcgtggagggcaaggtgaacaagggcatctacctgaaggaggagaagggcgtgaccctgctgtactacggcagatacaacagcagctgcatcagcaagcccgagcagtgcggccccgagggcgtgaccttcagcttcttctggaagacccagggcgagcagagcagacccatccccagcgcctacggcggccaggtgatcagcaacggcttcaaggtgtgcagcagcggcggcagaggcagcgtggagctgtacaccagagacaacagcatgacctgggaggccagcttcagcccccccggcccctactggacccacgtgctgttcacctggaagagcaaggagggcctgaaggtgtacgtgaacggcaccctgagcaccagcgaccccagcggcaaggtgagcagagactacggcgagagcaacgtgaacctggtgatcggcagcgagcaggaccaggccaagtgctacgagaacggcgccttcgacgagttcatcatctgggagagagccctgacccccgacgagatcgccatgtacttcaccgccgccatcggcaagcacgccctgctgagcagcaccctgcccagcctgttcatgaccagcaccgccagccccgtgatgcccaccgacgcctaccaccccatcatcaccaacctgaccgaggagagaaagaccttccagagccccggcgtgatcctgagctacctgcagaacgtgagcctgagcctgcccagcaagagcctgagcgagcagaccgccctgaacctgaccaagaccttcctgaaggccgtgggcgagatcctgctgctgcccggctggatcgccctgagcgaggacagcgccgtggtgctgagcctgatcgacaccatcgacaccgtgatgggccacgtgagcagcaacctgcacggcagcaccccccaggtgaccgtggagggcagcagcgccatggccgagttcagcgtggccaagatcctgcccaagaccgtgaacagcagccactacagattccccgcccacggccagagcttcatccagatcccccacgaggccttccacagacacgcctggagcaccgtggtgggcctgctgtaccacagcatgcactactacctgaacaacatctggcccgcccacaccaagatcgccgaggccatgcaccaccaggactgcctgctgttcgccaccagccacctgatcagcctggaggtgagccccccccccaccctgagccagaacctgagcggcagccccctgatcaccgtgcacctgaagcacagactgaccagaaagcagcacagcgaggccaccaacagcagcaacagagtgttcgtgtactgcgccttcctggacttcagcagcggcgagggcgtgtggagcaaccacggctgcgccctgaccagaggcaacctgacctacagcgtgtgcagatgcacccacctgaccaacttcgccatcctgatgcaggtggtgcccctggagctggccagaggccaccaggtggccctgagcagcatcagctacgtgggctgcagcctgagcgtgctgtgcctggtggccaccctggtgaccttcgccgtgctgagcagcgtgagcaccatcagaaaccagagataccacatccacgccaacctgagcttcgccgtgctggtggcccaggtgctgctgctgatcagcttcagactggagcccggcaccaccccctgccaggtgatggccgtgctgctgcactacttcttcctgagcgccttcgcctggatgctggtggagggcctgcacctgtacagcatggtgatcaaggtgttcggcagcgaggacagcaagcacagatactactacggcatgggctggggcttccccctgctgatctgcatcatcagcctgagcttcgccatggacagctacggcaccagcaacaactgctggctgagcctggccagcggcgccatctgggccttcgtggcccccgccctgttcgtgatcgtggtgaacatcggcatcctgatcgccgtgaccagagtgatcagccagatcagcgccgacaactacaagatccacggcgaccccagcgccttcaagctgaccgccaaggccgtggccgtgctgctgcccatcctgggcaccagctgggtgttcggcgtgctggccgtgaacggctgcgccgtggtgttccagtacatgttcgccaccctgaacagcctgcagggcctgttcatcttcctgttccactgcctgctgaacagcgaggtgagagccgccttcaagcacaagaccaaggtgtggagcctgaccagcagcagcgccagaaccagcaacgccaagcccttccacagcgacctgatgaacggcaccagacccggcatggccagcaccaagctgagcccctgggacaagagcagccacagcgcccacagagtggacctgagcgccgtgtag

SEQ ID NO: 333872 - DNA, 555 bp, Artificial Sequence
  derived and/or modified sequence
atgttttgtttactgcatctttgcttctatctcgccaattttgctagcagtatcaagaggacacatgctgtaaatggttgttgcggcttacagatgatagccctctgggcccagtcttcaggaaatgccgacgcacgagttgaggagatactcgccggagaagagcgcaggctggccgcgctcttgggctctcaaggaatgaggttctgggtctgcttggccgcctgccgcgcaatgtggggcctggctgccaggaggggtagagccgaagattcttccagttcccctgtggatgcttcaaaattcccctggaggggcggacaacatagaaccacgatgatgccatgtctgctgcgagtaggggtgtttagaccgtgccatgtcagaccgaccggagatccatcatgtgacgtccagccaccaagactaggatttagtcgggtacctgatacccaggttgccttttatgggagcgggcactgggatcctacgccattctccgtacactcatgcttcttcaactttcaagttcggaaaatcattttcctcctatag

SEQ ID NO: 333873 - protein, 228 aa, Artificial Sequence
  derived and/or modified sequence
  misc_feature (1)..(1): Xaa can be any naturally occurring amino acid
XHGVSARDVLESRTRKQHSEATNSSNRVFVYCAFLDFSSGEGVWSNHGCALTRGNLTYSVCRCTHLTNFAILMQVVPLEVNIGILIAVTRVISQISADNYKIHGDPSAFKLTAKAVAVLLPILGTSWVFGVLAVNGCAVVFQYMFATLNSLQGLFIFLFHCLLNSEVRAAFKHKTKVWSLTSSSARTSNAKPFHSDLMNGTRPGMASTKLSPWDKSSHSAHRVDLSAV

SEQ ID NO: 333874 - DNA, 2892 bp, Artificial Sequence
  derived and/or modified sequence
gtcatggagtgtctgcacgggacgtcctggagagtcggacacgtaagcagcacagtgaggccaccaacagcagcaaccgagtcttcgtgtactgcgccttcctggacttcagctccggagaaggggtctggtcgaaccacggctgtgcgctcacgagaggaaacctcacctactccgtctgccgctgcactcacctcaccaactttgccatcctcatgcaggtggtcccgctggaggtcaacattggcatcctcatcgctgtgaccagagtcatctcacagatcagcgccgacaactacaagatccatggagaccccagtgccttcaagttgacagccaaggcagtggccgtgctgctgcccatcctgggtacctcgtgggtctttggcgtgcttgctgtcaacggttgtgctgtggttttccagtacatgtttgccacgctcaactccctgcagggactgttcatattcctctttcattgtctcctgaattcagaggtgagagccgccttcaagcacaaaaccaaggtctggtcgctcacgagcagctctgcccgcacctccaacgcgaagcccttccactcggacctcatgaatgggacccggccaggcatggcctccaccaagctcagcccttgggacaagagcagccactctgcccaccgcgtcgacctgtcagccgtgtgagccgggaggctgccaaccaggccaggctgcgctcagaacacacccccccaaacagaatgaaatgccccacctttgcccatggaccctctccttgctgctgtctggacatgggtgttgtggccccgagacagctgtcctcccctgtgactctggctgtcggagcacactgctcagcccagcagcctgatgcccaggccagcgtgggccctcctgccttgcatccacccgtgggctgagtgacttcctcgggggattcccaggacacagtggcctgactgtgatggtgcccttgagcctcccttcatcactcagcatcagacccagcgaggccaggacactcggggccggtcccgcagcaccaggaggggatgttcagcctctgtgccttggtggggcttggggactcagggccaaagaggtggttcaggtccccacgcaccctcagtcaggcgcaggcagctgggggtgtgtggggaagagcatgcggagtccccagtgtctgaatccactgagtggtgagttccccacagccggcgctagccgtggtgtgtgtctctgtaggtggtgccggcgtgggccaacctgtgctgtgtcatcagttgggggcccctgcccaagccgagctcgagccgtgggcgggagtcgttgactctccaggtgagggcgacccctctgccctgtccttgggggggtcccctctgctcacgtgaagagccgctctgggccttgaggctgcctgatggtgcctgtgcttgggggagcttctcggccatccgctgtgagttttgcctctttggaccccaattcggccttaagatgccctcctccctcgtgtgccagcctccttggttgttcttgggccacaggagctggccgtgtccccgcagtgcctggtgtccaggtggaaagtggagggcattttccagggcactgctttccccagaggcttcctcatggctcacaggcactctacgaagtttctaatgggcagaccacgcggcaggtagcacagtgcgctccgtctggtcaccatgagaccgacctgcgctgagtccccactgacctggagagggagggctggtgacagccgtgtcttctgtgttgagggaaatttatggactcagattcagccccagaggagatgggataattgttatggacccatgtgtgggcatgatcctgtggaacacaggtttgggatcatagatgtgaattaagacaccaccgagatacgggctgtgaggttcatactgtgctgatagcactcgtggtgtctgtgaaatgtgggtaagacattcaaacctggttttgatactggaaactcttcctttaaaactgtgaccatgatttcattcagcccctccacacccctatgtctgccttgtttcagagtgagttttctatggagcctgtggcccttttgcagcccacctggtggcttcttaatgtaactcttcccctggtcgcctggagtggaccactcatctgcaggcctctcctgcatggggagggtaggcagggagcagcatgtctgcaggggtgaacctttgctcttctgtcaggcgaggcccaggctgcaccagccacctgccacatggtgacagtgccacgggccctgcgtatggcccctgcaaccgtgctctggcgggcacacctggctgctgcaggccaaggccgctgttcagtgaagagtcccatgtttagtatggactaaagtcccatgtttagccactgccccaggctcccgtgaccccagaaaccaggtcacatggaccacagtgccagatcctcatcacgccggtgagcacctagaagtgagaacactgtattcctacaatgtacacttggatatttctccttatttagtttctagtgaaacaaatcaagtaaggaactatctttagtttagatggaattatttgtttttaattgttgccgtattcatctatatagctaatatttcaagataagtaatgaacaaaacctgtctaaaccttttgtttccaatgaatgaaagtcatgcactttatttataggctctatgttttggcttctgcagtacttttattatctatacataatttggccaaaaataagaaattggaaagaatgaaatgtttagtttatagtagaagaaagatgatgacactaagttgtgaaaatatgttgtgatttttatgaaataaactcatgtcctgaaaagaaa

SEQ ID NO: 333875 - DNA, 687 bp, Artificial Sequence
  derived and/or modified sequence
tagcatggtgtaagcgccagagatgtgctggagtcaagaacacgaaagcaacattctgaagccaccaacagcagcaacagggtgtttgtgtactgcgcgtttctggacttctcaagcggagaaggtgtgtggagtaatcacggctgcgccctgactcgcggaaatctcacctattcggtgtgtcgctgtactcaccttacaaacttcgctattcttatgcaggtggtgcctttggaggtgaatataggcatcctgatcgctgtaacacgagtcataagccaaattagcgctgacaactacaagatccatggggacccctctgctttcaagctgactgcaaaggccgtggccgtccttctcccgatcctgggtacttcatgggtttttggcgtcctggccgttaatggctgcgccgtggtgttccagtatatgtttgccacactgaattcgctgcagggtttattcattttcctgttccactgtctgctgaattccgaggtccgggccgcgttcaaacataaaacaaaagtgtggagtcttactagctcctctgcgaggacctcaaatgctaagccttttcatagcgatctcatgaatggcacacggccagggatggccagtaccaagctgtccccgtgggataaatcttctcactcagctcacagagtggatttgtccgccgtatag

SEQ ID NO: 333876 - DNA, 687 bp, Artificial Sequence
  derived and/or modified sequence
tgacatggagtgtctgccagagatgtgctggagagcaggaccaggaagcagcacagcgaggccaccaacagcagcaacagagtgtttgtgtactgtgccttcctggacttcagcagtggagagggcgtgtggagcaaccacggctgtgccctgacccggggcaacctgacctacagcgtgtgccgctgcacccacctgaccaactttgccatcctgatgcaggtggtgcccctggaggtgaacatcggcatcctgattgctgtgaccagggtcatcagccagatctctgctgacaactacaagatccatggagaccccagcgccttcaagctgacagccaaggctgtggccgtgctgctgcccatcctgggcacctcctgggtgtttggagtgctggccgtgaatggctgtgctgtggtgttccagtacatgtttgccaccctgaacagcctgcagggcctcttcatcttcctgttccactgcctgctgaacagcgaggtgcgggccgccttcaagcacaagaccaaggtgtggagcctgaccagcagcagcgcccggaccagcaatgccaagcccttccacagcgacctgatgaatggcaccaggcctggcatggccagcaccaagctgagcccctgggacaagagcagccacagcgcccaccgggtggacctgtctgctgtgtag

SEQ ID NO: 333877 - DNA, 687 bp, Artificial Sequence
  derived and/or modified sequence
tgacacggcgtgagcgcccgggacgtgctggagagccggacccggaagcagcattctgaggcaacgaattcttctaaccgagtgtttgtctattgcgcttttcttgacttctcatcaggggaaggcgtgtggtccaaccacggctgcgcgctgacacggggtaacctcacctactccgtgtgtcggtgcacgcatctgaccaactttgccatcctcatgcaggtcgtgccactcgaggtaaatattggaatcctcatcgcagtgactagagtaatttcacagatctccgcagacaactataaaatacatggggacccctctgcttttaaactgaccgcaaaagctgtcgccgttctgttgcccatccttggtaccagctgggtgtttggcgtgctcgccgtcaatggttgtgctgttgtgttccagtacatgttcgcaactctaaacagcctacaagggttgttcatatttctgtttcattgtctcctcaactccgaggtcagagctgcctttaagcacaagaccaaggtctggtccctcacgtcctcatccgcgcggacatcaaatgccaaaccattccactccgacctaatgaatggcacgcgtcctggcatggcatctaccaaattgagcccttgggataagagttctcattctgcccatcgggtggacctcagtgcagtgtag

SEQ ID NO: 333878 - DNA, 687 bp, Artificial Sequence
  derived and/or modified sequence
taacacggagttagcgcacgcgatgtgctcgagtcaaggacccggaagcagcactccgaggcaacaaactctagtaatagggttttcgtttactgcgcgtttctcgacttttccagcggcgagggagtgtggtctaaccacgggtgtgcactcacgcggggaaatctcacatactcagtttgtaggtgcacccacttaacaaacttcgctatcctcatgcaggtggtacccctcgaggtgaacatcggaatcctcatcgctgtgactcgagtcatatcgcagatcagcgcagacaattataagatccatggcgacccaagtgcgttcaaactgaccgccaaagccgttgcagtcttgctgccaatcctgggtacttcctgggtattcggcgtacttgccgtcaacggttgcgccgtggtctttcaatatatgttcgccaccctgaactcactgcaaggtctctttatattcttatttcactgcttgctcaattctgaagtccgcgcagccttcaaacacaagaccaaagtatggagtctgacctccagctccgcgagaacgtccaatgccaaaccttttcattctgacctcatgaacgggactcgcccaggtatggctagcactaagctctcgccttgggacaagagtagtcactcagcccaccgcgttgacctttctgccgtgtag

SEQ ID NO: 333879 - DNA, 687 bp, Artificial Sequence
  derived and/or modified sequence
tgacacggcgtgagcgccagagacgtgctggagagcagaaccagaaagcagcacagcgaggccaccaacagcagcaacagagtgttcgtgtactgcgccttcctggacttcagcagcggcgagggcgtgtggagcaaccacggctgcgccctgaccagaggcaacctgacctacagcgtgtgcagatgcacccacctgaccaacttcgccatcctgatgcaggtggtgcccctggaggtgaacatcggcatcctgatcgccgtgaccagagtgatcagccagatcagcgccgacaactacaagatccacggcgaccccagcgccttcaagctgaccgccaaggccgtggccgtgctgctgcccatcctgggcaccagctgggtgttcggcgtgctggccgtgaacggctgcgccgtggtgttccagtacatgttcgccaccctgaacagcctgcagggcctgttcatcttcctgttccactgcctgctgaacagcgaggtgagagccgccttcaagcacaagaccaaggtgtggagcctgaccagcagcagcgccagaaccagcaacgccaagcccttccacagcgacctgatgaacggcaccagacccggcatggccagcaccaagctgagcccctgggacaagagcagccacagcgcccacagagtggacctgagcgccgtgtag

SEQ ID NO: 333880 - DNA, 273 bp, Artificial Sequence
  derived and/or modified sequence
atgagaaaacaaggggtctcttctaagaggcttcagagctcgggacgcagccagtctaagggacggaggggtgcatcgctcgcccgcgagcccgaggttgaggaggagatggagaaaagcgccttgggtgggggaaaattgcctagggggtcttggagatcctcccctggaagaatccagtccctcaaagagcgcaaaggtctcgagctggaggtagtcgccaagactttcctgcttggcccatttcagttcgtgcggaattcactagcatag

SEQ ID NO: 333881 - DNA, 273 bp, Artificial Sequence
  derived and/or modified sequence
atgaggaagcagggcgtgagcagcaagaggctgcagagcagcggccgcagccagagcaagggccggcggggggccagcctggcccgggagcctgaggtggaggaggagatggagaagagcgccctgggcggcggcaagctgccccggggctcctggaggagcagccctggccgcatccagagcctgaaggagaggaagggcctggagctggaggtggtggccaagaccttcctgctgggccccttccagtttgtgaggaacagcctggcctag

SEQ ID NO: 333882 - DNA, 273 bp, Artificial Sequence
  derived and/or modified sequence
atgcggaagcagggcgtgagcagcaagcggctgcagagcagcggccggagccagtcaaagggcaggagaggagccagtcttgctcgcgaaccggaggtcgaagaggaaatggagaaaagtgcgcttggagggggcaaactccctcggggatcatggcgctctagccccgggaggatccagtcacttaaggagaggaaaggattagaactggaggttgtggctaagaccttcctgctgggaccttttcagtttgtgcggaattcacttgcttag

SEQ ID NO: 333883 - DNA, 273 bp, Artificial Sequence
  derived and/or modified sequence
atgcgcaagcagggggtgtccagcaagagattgcagtctagtgggcgttctcagtcgaaagggaggagaggtgcttcattggccagagagcccgaggtggaagaagagatggaaaagagcgccctgggtggcggaaagctgccgagggggagttggcggtcttcacccggacggatccagagccttaaagaaaggaagggcctggagctagaggtagtagccaaaacttttcttctgggaccgtttcagttcgttagaaacagtttagcatag

SEQ ID NO: 333884 - DNA, 273 bp, Artificial Sequence
  derived and/or modified sequence
atgagaaagcagggcgtgagcagcaagagactgcagagcagcggcagaagccagagcaagggcagaagaggcgccagcctggccagagagcccgaggtggaggaggagatggagaagagcgccctgggcggcggcaagctgcccagaggcagctggagaagcagccccggcagaatccagagcctgaaggagagaaagggcctggagctggaggtggtggccaagaccttcctgctgggccccttccagttcgtgagaaacagcctggcctag

SEQ ID NO: 333885 - DNA, 505 bp, Artificial Sequence
  derived and/or modified sequence
cccaatgaagcgcgtgaagggcaagcggtgatgggttctgcgccagtggggctgggagcccgtccggggctgtacatggggctgcgcgcaagtcgccatgacgaccgggaggtccgcaacggctgcggggacaagtccgttgaggctgccaggcgagtcaggtctctctggacctcgcctgactcggctgggctgtgcctgaaattgacccagctccaccatactccttgattatgagaaaacaaggagtaagctcaaagcggctgcaatcttccggccgcagccagtctaaggggcggcgcggggcctccctcgcccgggagccggaggtagaggaggagatggaaaagtcggccctaggcggcgggaaactgccaaggggctcctggaggtcctccccggggaggatccaaagtctgaaagagcgaaaaggcttggagctagaggtggtggccaagacctttcttctcggccccttccagttcgtccgtaattccctggcgca

SEQ ID NO: 333886 - DNA, 618 bp, Artificial Sequence
  derived and/or modified sequence
atgaggctaaagatgttcttaaccccccacatgtgtgtgatggcttccctgatctgttcccgccagttatttggctggctctttcggagggtgcgctttgaaaaggttatcttcggtatcctgaccgtcatgtcgatacaggggtacgctaacttgaggaaccagtggtccataatcggggagttcaataacctcccacaagaggaactcctgcagtggataaaatactcgacgacatcagacgcagtcttcgcaggggccatgcctacaatggcttccatcaagctgtccaccttgcatcccatcgtgaatcacccacattacgaagatgctgaccttagagcaaggactaaaattgtctattcgacctactccaggaaatccgccaaagaggttagagacaagctgctagagcttcacgtgaactattacgtgctggaagaggcatggtgtgtggtacggactaaaccaggatgttccatgttggaaatctgggatgtcgaggatccaagcaacgccgccaacccgcccctctgctctgtgttactcgaggatgctcgaccgtactttacgaccgtctttcagaacagcgtctatagagtgttgaaggtgaactag

SEQ ID NO: 333887 - DNA, 618 bp, Artificial Sequence
  derived and/or modified sequence
atgaggctgaagatgttcctgaccccccacatgtgtgtgatggccagcctcatctgcagccggcagctgtttggctggctgttcagaagagtgcgctttgagaaggtgatcttcggcatcctgactgtgatgagcatccagggctacgccaacctgaggaaccagtggagcatcattggagagttcaacaacctgccccaggaggagctgctgcagtggatcaagtacagcaccaccagtgatgctgtgtttgctggggccatgcccaccatggccagcatcaagctgagcaccctgcaccccatcgtgaaccacccccactatgaagatgctgacctgcgggcccggaccaagatcgtgtacagcacctacagcaggaagagcgccaaggaggtgcgggacaagctgctggagctgcacgtgaactactacgtgctggaggaggcctggtgtgtggtgaggaccaagccaggctgcagcatgctggagatctgggatgtggaggaccccagcaatgctgccaacccccccctgtgcagcgtgctgctggaggatgcccggccctacttcaccaccgtcttccagaacagcgtgtacagagtgctgaaggtgaactag

SEQ ID NO: 333888 - DNA, 618 bp, Artificial Sequence
  derived and/or modified sequence
atgcggctgaagatgttcctgaccccccacatgtgcgtgatggcctctctcatctgtagcaggcagctatttggctggctgttccgccgagtacgtttcgagaaagtcatctttggtatactaacagtgatgtcaatacaaggctatgcgaaccttaggaatcagtggagcatcataggcgaattcaataacctcccccaggaggaactgctgcagtggatcaagtatagcaccacatccgacgccgtctttgccggggccatgcctacaatggcctccattaaactgtccacattgcaccccatagtaaaccacccgcattatgaggatgctgaccttcgtgcccgaaccaaaatcgtgtacagtacctacagccgcaaatcagctaaggaagtgagggacaagctcttagagctgcatgtgaactattatgtcttagaggaggcatggtgtgttgtcagaacgaaacccggttgtagcatgctggagatttgggacgttgaggacccatctaacgccgcaaatcctcccttatgttccgttctcctcgaagatgcgagaccctacttcactacggtctttcagaactcagtgtaccgagtcctgaaggtgaactag

SEQ ID NO: 333889 - DNA, 618 bp, Artificial Sequence
  derived and/or modified sequence
atgagactcaagatgttcctgactccccacatgtgcgtgatggcatcactgatttgttcacggcagctcttcggatggctgttccgtagagttaggttcgaaaaggttatctttggcatattgacagtaatgtccatccagggctacgcaaatctgcgcaatcaatggtcgataatcggcgaattcaataatttaccccaggaggagctgctacaatggataaaatactccaccacttcagacgcagtcttcgcaggtgcaatgccaacgatggccagtatcaagctgtccactctgcatcctattgtcaaccatccacactacgaggatgctgacctgcgcgcacgcactaaaattgtgtacagtacctactcacggaagtcagctaaggaagtgcgagataagctgctcgaactgcatgtgaactattacgtcctggaggaggcatggtgtgtagtgagaaccaagcccggatgttccatgctggaaatttgggacgtggaggatccttctaatgcagcaaacccccctctctgttcagtcttattggaagacgctcgcccttacttcacaactgtttttcagaattctgtgtatcgagttctcaaagtgaactag

SEQ ID NO: 333890 - DNA, 618 bp, Artificial Sequence
  derived and/or modified sequence
atgagactgaagatgttcctgaccccccacatgtgcgtgatggccagcctgatctgcagcagacagctgttcggctggctgttcagaagagtgagattcgagaaggtgatcttcggcatcctgaccgtgatgagcatccagggctacgccaacctgagaaaccagtggagcatcatcggcgagttcaacaacctgccccaggaggagctgctgcagtggatcaagtacagcaccaccagcgacgccgtgttcgccggcgccatgcccaccatggccagcatcaagctgagcaccctgcaccccatcgtgaaccacccccactacgaggacgccgacctgagagccagaaccaagatcgtgtacagcacctacagcagaaagagcgccaaggaggtgagagacaagctgctggagctgcacgtgaactactacgtgctggaggaggcctggtgcgtggtgagaaccaagcccggctgcagcatgctggagatctgggacgtggaggaccccagcaacgccgccaacccccccctgtgcagcgtgctgctggaggacgccagaccctacttcaccaccgtgttccagaacagcgtgtacagagtgctgaaggtgaactag

SEQ ID NO: 333891 - DNA, 1339 bp, Artificial Sequence
  derived and/or modified sequence
tacactgtatatataggttgaatagaaggtcatcctattcatttattaatgagaggtacaatctctagggatctgtaaaatctattttgtcttaaccaaagaacaaatttttgacatatcttgaataggatgactataaattatgacttttaaattgttgtaatttttgtactattatctgatatttttatttttatgtattttcgtaagtagtttagagatagtcacattttaaaaatctaagatcaagcaaatgaagcttatttttatgtattcatagtataaaagaccttcagtaaataggtaatatttttgttttattctagaaaacagctccttgaacacagtgagctggcttttcacacattgcagttgttagtgtttactgcccttgccattttaattatgaggctaaagatgtttttgacaccgcacatgtgtgttatggcttccttgatatgctctcgacagctctttggctggctttttcgcagagttcgttttgagaaggttatctttggcattttaacagtgatgtcaatacaaggttatgcaaacctccgtaatcaatggagcataataggagaatttaataatttgcctcaggaagaacttttacagtggatcaaatacagtaccacatcagatgctgtctttgcaggtgccatgcctacaatggcaagcatcaagctgtctacacttcatcccattgtgaatcatccacattacgaagatgcagacttgagggctcggacaaaaatagtttattctacatatagtcgaaaatctgccaaagaagtaagagataaattgttggagttacatgtgaattattatgttttagaagaggcatggtgtgttgtgagaactaagcctggttgcagtatgcttgaaatctgggatgtggaagacccttccaatgcagctaaccctcccttatgtagcgtcctgctcgaagacgccaggccttacttcaccacagtatttcagaatagtgtgtacagagtattaaaggttaactgagaaggatactacccattttactatggcacaatgccgtgtgtcaaaaacaatcaccctttggcttattcacattaataaaaatcacaagctttaataacagacacttaaaaataagataaaaatggattggaaatttttctgattactaaaaggtaaattacttttctgttcattgaatgtcagccttattaagcttgtcatataagttattaaatcattcatgtcatactgcataaacaaatgttcatttcagaattttaaagagaaatgtatataaaagaacaatgaattttaataaatcaggggtatgtaagtc

SEQ ID NO: 333892 - DNA, 2853 bp, Artificial Sequence
  derived and/or modified sequence
atggacgaagagaatatgaccaagtcagaagagcagcaacctctatctctgcaaaaagctctgcagcagtgcgaactggtccagaatatgatcgacttgagcatatcaaatttagagggcctccgcactaagtgcgccacttccaacgatctgacgcagaaggagatccgcactctggaaagtaagctcgtgaaatacttcagcagacaactttcctgcaaaaagaaggtggctctacaagaaagaaatgccgagctagacgggtttccacagctaagacactggttcagaatcgtcgatgttaggaaggaggttctggaggaaattagcccaggacagctttctctagaggaccttcttgaaatgaccgatgagcaggtctgtgaaaccgtcgagaaatacggagccaaccgggaggagtgtgcccggttgaatgcctccctcagctgcctgcggaacgttcatatgtccggaggcaacctgagcaagcaggattggactatccagtggcccaccacggagacaggtaaggagaacaacccggtgtgtcccccagagcccaccccatggattcggacacatctatctcaaagcccccgcgtgccctccaagtgcgttcagcactactgccacacctcgcccacacctggggcacctgtatacacgcacgtcgataggctgacagtggatgcctatccaggcctctgcccaccaccacctctggagtcgggccatcggtccctgcctccctcgccacggcaaagacatgccgtccggacacctccacggacacctaatattgtaacaactgttactcccccgggcactccaccgatgcggaaaaagaataagctcaagccaccagggacaccgcccccctcatcacgcaaactgatacacctcatccccggctttaccgcccttcaccgaagcaagagccacgaatttcagttgggccaccgagtagacgaagcccacacgcccaaagccaaaaagaaatcgaagccgctgaacttaaagatacacagctcagtcgggtcatgcgagaacattccatcgcagcagcgcagccctctgctctcagagagatcgctgcgcagcttcttcgtggggcatgcgccattccttcctagcacccccccggtgcataccgaagcgaatttttcagccaataccctgagtgtaccgcggtggtccccccagattccccggcgcgacttggggaattctattaaacaccggttcagcactaagtactggatgagccagacctgtacggtttgcggaaaaggaatgctgtttggtctgaaatgtaaaaactgcaaactgaaatgccacaataaatgcacaaaagaggccccgccgtgccatctgctgattattcataggggcgaccccgcgagactggtgcgcacggaatctgtcccatgcgacataaataatcctttgcgaaaaccccctcggtattcagacctacatatctcccagactctgccaaagaccaataagattaataaggaccacatcccagtgccctaccagcctgatagttcttcaaacccttcatctactacatcctcaaccccttcaagccccgcccctcctttgccaccctcagctacacctccctctcctctccatccgagccctcagtgtacaagacaacaaaagaacttcaatctgcccgcctcacattactacaaatataagcagcagtttatttttcccgacgtggtgccagtacctgaaactccaaccagagcaccccaggtgattctccatcccgttacttccaaccccattctggagggaaatccgctactccagatagaggtggagccaaccagtgagaatgaagaagtacacgatgaggcggaggaatccgaggacgacttcgaagagatgaacttgtctttgctcagcgcccgctcattcccccgcaaagcaagtcagacttcgatctttttacaggaatgggacatcccgtttgaacaactggagatcggcgagttgatcgggaagggccggtttggacaggtgtatcacgggcggtggcacggtgaagtagctattagactgattgacatcgaaagagacaacgaagaccagctcaaggctttcaaaagagaggttatggcgtaccggcagacacgccacgaaaacgtggtcctgtttatgggggcctgtatgtcaccaccgcacttagccataatcacctcactttgcaagggacgcacactgtactccgtggtgagggacgccaagatcgtgctggatgtcaataaaaccagacagattgcacaggaaattgtgaaaggcatgggctatttgcacgcgaagggaattctacacaaggatctcaagagcaaaaacgttttttatgacaacgggaaggtggttataacagacttcggtctcttcagcatttccggggtgctccaagccggacggcgcgaggataaactcagaatccagaatggatggctgtgccacttggcccctgagattatacggcagcttagcccagataccgaagaagacaaactacctttctctaagcactcagatgtgttcgccctgggaaccatctggtacgagctgcatgcacgggagtggcccttcaagacacagccagcagaggccatcatctggcaaatggggacagggatgaagcctaatttatcgcaaatcgggatgggaaaggaaataagcgacattcttctcttttgctgggcattcgagcaggaagagcggcccactttcaccaagctgatggacatgctggagaaactgcccaaacgaaatagaaggctatcccatcccggacatttctggaaatccgccgaattgtag

SEQ ID NO: 333893 - DNA, 3815 bp, Artificial Sequence
  derived and/or modified sequence
aggcaagatgtcggtgtggagcgaggcaggagcgattgcagcaaccgtcacccccggagcccggcggcggcagcagcagcagcagcagcagcgcggggaggagacagcagccagccgcagtagccgccgcagccgcgggagcaatgcagacagcaccttgagaacgcgctaaagcactccaaaccgtggaccatgccgtgtccctgcaactgggaggggggaaaaccagattttttttgacataaaagcaagccagccaaaaatatataattttgtccttcaaggagccggtgtgtaaagagtgagcgctattttccttctcctcctcctcctctccctcctcctcctctccctcctcctctctctcctccttctcctcttctttttcctcctcctcctcctccctaagtgtacagacagcatcacatcacctggtttgcttctgagaaacagcatctctccttttcagggaccagagactcagagagagaggagacattctaatggagtccgcttgatatcccaaaataaaataataaattttggctcttgtcccctcctcccactcccaccccctcaaccctgtgtgagatgttggatttcttcttcatgagacattgttgagaagtcgcagtggttggagaggcggagggtagactacctctactcccccccctcttttttctctctgggaggaggaggaggggaagggggttgcagagcaagcgatggatgaggaaaacatgacgaaaagcgaggagcagcagcctctgagtttgcaaaaagccttacagcagtgcgaactggtccaaaacatgatagacttgagcatctccaacctggaagggcttaggaccaaatgtgctacctccaacgacctcacacaaaaagaaatccggaccctggagagcaagctggtgaagtacttcagccggcagctgtcctgcaaaaagaaggtagccttgcaggagcgcaacgcggagctggacggcttcccccagctacggcactggttccgaatcgtcgatgtgcgcaaggaggtcctggaggaaatctcccccggccagctgagcctggaggacctcttggagatgacggatgaacaggtgtgcgagactgtggagaaatacggagccaaccgggaggagtgtgcccgcctcaacgcctccctctcctgcctcaggaatgtccacatgtcaggaggcaacctttccaaacaagactggaccatccagtggcccacgacagagacggggaaggagaacaatcccgtgtgccccccggagcccaccccgtggatccgcacccatctctcccagagccccagggtcccgtccaagtgcgtccagcactattgtcacaccagccccactcccggggcccctgtgtacacccacgtggacaggcttaccgtggacgcctacccgggcttgtgcccgcccccgccactggagtcgggccaccgttccctgcccccatcgccccggcagcggcacgcggtccgcaccccgccgcgcacccccaacatcgtcaccaccgtgaccccgccgggcacgccgcccatgaggaagaagaacaagctgaagcccccggggaccccaccgccctcctcccgaaaactgatacacttgatcccgggattcaccgcgctgcatcggagcaaatcccacgagttccagctggggcaccgcgtggacgaggcccacacgcccaaagccaagaagaagagcaaacccttgaacctcaagatccacagcagcgtaggcagctgcgagaacatcccctctcagcagcgctccccgctgctgtccgagcgctccctccgctccttctttgtgggacacgcacctttcctgccttccacccctcctgttcacactgaggccaacttctctgcaaacacactgtcagtgccacgctggtccccgcagatccctcgcagagatctcggcaactccatcaagcacaggttttccaccaagtactggatgtctcagacgtgcacagtctgtgggaaagggatgctttttggcctcaagtgtaaaaactgcaagttaaagtgccacaacaaatgcaccaaagaagccccaccctgtcatcttctgatcatccaccgaggagatccagcaaggttagtccggacagagtccgttccgtgtgacatcaacaaccctctacggaagccacctcgctattcagacctgcacatcagtcagacgctccccaaaaccaacaaaatcaacaaggaccacatccctgtcccttaccagccagactccagcagcaacccctcctccacgacgtcctccacgccctcctcgccagcaccccccctccctcctagtgccacgccgccttctcccctacacccttccccacagtgcacacggcagcagaagaacttcaacctgccagcatcccactactacaaatacaagcagcagttcatcttcccagatgtggtgccggtgccggagacgccgacccgggcgccccaggtcatcctgcatccggtgacctcgaatccaatcttggaaggaaatccattacttcaaattgaagtggagccaacgtcggagaatgaagaggtccatgatgaggccgaagagtcagaggatgacttcgaggagatgaacctgtccctcctctcggcccggagcttcccacgcaaggccagccagaccagcatcttccttcaggagtgggacatcccctttgagcagctggagatcggcgagctcattggaaagggccgctttgggcaagtgtaccacggccgctggcatggcgaggtggccatccggctgattgacattgagagggacaacgaggaccagctcaaggccttcaagcgggaggtgatggcctacaggcagacacggcatgagaacgtggtgcttttcatgggtgcctgcatgagcccgcctcacctggccatcatcaccagcctctgtaagggacggacgctctattccgttgtgagggatgccaaaatcgttttggatgtcaacaaaaccaggcagattgctcaagaaattgtgaagggcatgggctacctccacgccaagggaatcctacacaaggacctcaagtcaaagaacgtcttctatgacaacggcaaagtggtcatcacggactttggactcttcagcatttctggggtgctgcaggctggcaggcgggaggacaaactgcgcatccagaatggctggctatgccacctggcaccagagatcatccgccagctgtcccccgacacagaggaggataagctccccttctccaagcactctgacgtctttgcccttggcacaatctggtatgaactccacgccagggaatggcctttcaagacccaaccagcagaggcaataatctggcaaatgggcacaggcatgaaacccaacctcagccagattggcatgggaaaagaaatctcggacattcttctcttctgctgggcctttgaacaagaagagagacctaccttcaccaagctcatggacatgctggagaaactgccaaagcgaaaccgtcgcctgtctcaccctggacatttctggaagtctgcagagctgtgacctttggacatcgggacggcgcccagctgcctgggctcccgtcacctctccctccctactctgtcctctgccagctcaggaggccagagactcagcatcagagggtaccaaccccgaccgacctgggagcactggacaactgctcggcggcctccctgcacctcagacttgagcccttttcctcgggcagggttggggacccccgagctaggactgaaccggaccagccagggt

SEQ ID NO: 333894 - DNA, 17008 bp, Artificial Sequence
  derived and/or modified sequence
gcagcagcctctgagtttgcaaaaagccttacagcagtgcgaactggtccaaaacatgatagacttgagcatctccaacctggaagggcttaggaccaaatgtgctacctccaacgacctcacacaaaaagaaatccggaccctggagagcaagctggtgaagtacttcagccggcagctgtcctgcaaaaagaaggtagccttgcaggagcgcaacgcggagctggacggcttcccccagctacggcactggttccgaatcgtcgatgtgcgcaaggaggtcctggaggaaatctcccccggccagctgagcctggaggacctcttggagatgacggatgaacaggtgtgcgagactgtggagaaatacggagccaaccgggaggagtgtgcccgcctcaacgcctccctctcctgcctcaggaatgtccacatgtcaggaggcaacctttccaaacaagactggaccatccagtggcccacgacagagacggggaaggagaacaatcccgtgtgccccccggagcccaccccgtggatccgcacccatctctcccagagccccagggtcccgtccaagtgcgtccagcactattgtcacaccagccccactcccggggcccctgtgtacacccacgtggacaggcttaccgtggacgcctacccgggcttgtgcccgcccccgccactggagtcgggccaccgttccctgcccccatcgccccggcagcggcacgcggtccgcaccccgccgcgcacccccaacatcgtcaccaccgtgaccccgccgggcacgccgcccatgaggaagaagaacaagctgaagcccccggggaccccaccgccctcctcccgaaaactgatacacttgatcccgggattcaccgcgctgcatcggagcaaatcccacgagttccagctggggcaccgcgtggacgaggcccacacgcccaaagccaagaagaagagcaaacccttgaacctcaagatccacagcagcgtaggcagctgcgagaacatcccctctcagcagcgctccccgctgctgtccgagcgctccctccgctccttctttgtgggacacgcacctttcctgccttccacccctcctgttcacactgaggccaacttctctgcaaacacactgtcagtgccacgctggtccccgcagatccctcgcagagatctcggcaactccatcaagcacaggttttccaccaagtactggatgtctcagacgtgcacagtctgtgggaaagggatgctttttggcctcaagtgtaaaaactgcaagttaaagtgccacaacaaatgcaccaaagaagccccaccctgtcatcttctgatcatccaccgaggagatccagcaaggttagtccggacagagtccgttccgtgtgacatcaacaaccctctacggaagccacctcgctattcagacctgcacatcagtcagacgctccccaaaaccaacaaaatcaacaaggaccacatccctgtcccttaccagccagactccagcagcaacccctcctccacgacgtcctccacgccctcctcgccagcaccccccctccctcctagtgccacgccgccttctcccctacacccttccccacagtgcacacggcagcagaagaacttcaacctgccagcatcccactactacaaatacaagcagcagttcatcttcccagatgtggtgccggtgccggagacgccgacccgggcgccccaggtcatcctgcatccggtgacctcgaatccaatcttggaaggaaatccattacttcaaattgaagtggagccaacgtcggagaatgaagaggtccatgatgaggccgaagagtcagaggatgacttcgaggagatgaacctgtccctcctctcggcccggagcttcccacgcaaggccagccagaccagcatcttccttcaggagtgggacatcccctttgagcagctggagatcggcgagctcattggaaagggccgctttgggcaagtgtaccacggccgctggcatggcgaggtggccatccggctgattgacattgagagggacaacgaggaccagctcaaggccttcaagcgggaggtgatggcctacaggcagacacggcatgagaacgtggtgcttttcatgggtgcctgcatgagcccgcctcacctggccatcatcaccagcctctgtaagggacggacgctctattccgttgtgagggatgccaaaatcgttttggatgtcaacaaaaccaggcagattgctcaagaaattgtgaagggcatgggctacctccacgccaagggaatcctacacaaggacctcaagtcaaagaacgtcttctatgacaacggcaaagtggtcatcacggactttggactcttcagcatttctggggtgctgcaggctggcaggcgggaggacaaactgcgcatccagaatggctggctatgccacctggcaccagagatcatccgccagctgtcccccgacacagaggaggataagctccccttctccaagcactctgacgtctttgcccttggcacaatctggtatgaactccacgccagggaatggcctttcaagacccaaccagcagaggcaataatctggcaaatgggcacaggcatgaaacccaacctcagccagattggcatgggaaaagaaatctcggacattcttctcttctgctgggcctttgaacaagaagagagacctaccttcaccaagctcatggacatgctggagaaactgccaaagcgaaaccgtcgcctgtctcaccctggacatttctggaagtctgcagagctgtgacctttggacatcgggacggcgcccagctgcctgggctcccgtcacctctccctccctactctgtcctctgccagctcaggaggccagagactcagcatcagagggtaccaaccccgaccgacctgggagcactggacaactgctcggcggcctccctgcacctcagacttgagcccttttcctcgggcagggttggggacccccgagctaggactgaaccggaccagccagggtgatgcgttattgatcagtgcggcccaggggacagcactaatgagagcactgcaggctgcacgtggtgcctttgggctatgggactaggacaggagaccccacgtgggggggctcacagacggggctatgtgtgtgtgtgtctgtgtgtttgacgttgttcactcttgtttccccttgacaagcaagagccagactgtcccaatgacggggcactcctcagttctgtctgtatgtggtaggttccagctgtaccatctgggaagctaagaggagggtacagagccgagtggcagcttagtcaaggctactgagccaagatcgagcagggaaggtcgggagtggctaagctcgttcctttggaaatatctgttttcagacaccccaacccgagcctgtcatggcgtgtggcacctttgcatagagctctgaagtacagtaggaaagttagaacgtcttttgagttctgggtctctctgggggacctattcccccatttctgctgttttctcctgttctctgagagtagcatcccttttcacctcactgcccgcacctccttgccatttggaaagccaagatgacttctgaggggctccttagagctcaccgtcattcagggcaccccctgaagtctggtccctgagaatcagggctctgggcagggagttctaggacattccttttcttccctcttctctgctactcacaccagtgaagcttattcccccaccaaggtggatgcgggttcttggggtacgtccatgttgggttatgtggctgtacctatgataacacgtttgcaaaagatttccctgcctgtcacccttgaggagtcctgttgggggagcacaaagggaggatgtttgttacacttctgcgttctttgctctagcctggtgcggggtcctcaagtagcttccccatcggaagcctgtgtccctcacctgtgtgtgttccctcagtgccccaccttccctccctcctcttgatcccaacctgggccggcgactcttcctgaccatgttggggaagcccctggtgttctgtatctgtaggaaggatgccgagagcaggctgggcatgcagatgggagaggagaacctctgggtcatttgcccatgttttcaaagccctgaccccctgcatgtgacctgatacaaaagggaaatctgtccccaagcagagcaatagcaggattatctgggcagtgaacaggaagcccagggcggccacagcccctctgtgtttcctgggtactacctgggccttagttttcttgtagctactatctatccaggcatctccctcctagagggccagagagaggaactggaacttcaaaaaccctacctgatcttactttcaaaatccaaatagacctatgaggatctcttccccaccttgggtgactcccagactggttcatgctctgggggccaaacctgcttccaaaccgggaagaatggtgagatcagtcatgcttcccaggagcctggctacaggaaacccctgtgtttcccaaagggccctcctgaattgcctttccaacactcccagcttactgggactagaggactaaagaccccggcttgggctgctcctaagcagacactgctcttctggggacatctatggctcttggcttgacgacgtgtgtgtgtcttggaggcattttatatatgtttgcctgagccccagccactctggggttgctggggatggctcttgtcaatggacacctccccatcccaacacaacactctgtgtcccagccctgggcctggacttgcacctgtcttggctctgcccagcagcctactgagtgcctgaaacccaaccactcacttctcttccatcacaccaggacttcttgggtccacaggctccagtccttgtcatgttcccttgtgccaagagacaggatatgaggaagggaagaggcagccagggtctactaccctgcagctgaaatgtccacaagaactggcaccttctcactcttgcctctcttgtttccagaattaactaaaatgtccaaccacagcctttggcaaggcctagcatgatctccaacagctgatttttccattcattcatgagcaccagtttgggattaaggacagggcctgagtgatccaggggaaaacccagccctttgtggaacagggtgccttgggtccatccctgaatctgagtcacttgctcttgacttctcgatctttccccacttcactactctgtccccacctgcattggtctctgctgcagccaggccaggatcctggccttcagtgccttcctgacgcccctaccctgtcccctctacaccgccctgacttgttgagaaaccagctttaatttgcacacatttaaatccaggaagaaccaaaccgctgctttccctgctggcttccatctttattcgctgatgaggttttgggaggaggttatattcatcttacgcagggaggaaaaaaaaagaggaaagaggctgtatatttttacatcataattaccagcctcacctgcaactcattctatacaatgacacgaccaagatttgtgtgtttgcccttgtcccatcacagctgcacacaggtgccctgtacacataagtcactgactcagcagcgagttgttccagtcagtcttgcttttagcaaaccgtcatatacatgggcttcccgaggggaccagtccacagggtgaagattcaccaggaagccttggctttgcagagagaaacatctcagctttctttaaagggcatgtggatttgcacataaatttcacccaactcttccaggatacagattattcataaaaccaaggagcttccttcttggccccctgtgggaggacgtgccccttgtgtccccatccccagagccaagctggaaacccaaagtcattgcttagatccattttgtcctggtattccttttactgatcaaagagaaaattttcatcttgccatggacccccccatcctcaccccatccacttgtctccacagctaccttggattgtcagtcaatagaagcccttgactgatattgaccactagacttttgtatccagggaacctagttcttccctttttctcacctcccatgccatatacacacatcatgcccctccccacaaacacacgaaaccagccttatctcaccttccaccattcccatccccacctacagctgatcatcaaaggtacacggaggaagtagtagacacggagctcaggccaatcattatcttgagaaatctaaacccagggctgtcaggctatgccccataggccatacccagcctgccaaatggtttttacatgttttaattgaggaaaaatcaaaagaataatatttcatgacatgaaaattctataacattcaaatttcatgtcaataaacaaaatgttattggagcacagtcacctctccatttacacaaccacggctgctcctatgcaactgtgacagagccagctatttgcaacagagacgatgtggcccacacagtcaaaaacttttacaatctggccctttcctaactttgctagcctttgatagagaggattggatatggctgtcaggggaggaacaggagcctttgatagagagggttggatatggctctcaggggaggaacaggaagttggagggggagagaacttgtttcagcggaagaaggccagcttgccccaagatgcagcgggctgcctccggaagtagagaactccctgtccttggatagggtggagcagatgttgactgcttggcctgtgtgatatggaggcaattcaggccctgaaggctggaccaactccctggactttaaaactcttcgtttgctaaggggggccataataacaaaatgtcacacactgagtggcttaaacaacacgaatttattcctcacaattcttgaggctggaagtcccaagatcaaggtgtcagcagggttggtttctggtgaggcctctttctttggcttgcagacagctgccctctgatcgtgacctcacgtggcctttcctctgtgactgcacatccccagtatctcctcctcttctgataaagacaacaatcttattagattagggttccaacgctctgtgattttattcccatccccggctttctttccccacactggttctcaatcttgagtcccgaaatatgccctccctatcctcatcctgtgcctaccttcacttcacccatccatcccctgcaggctggtcttgttccactgtgccaccatatccccaagcccccctcacctccgtgaggctcctaggactgctgcagcaaaccaccacccactggggcctacaacaacagatgtatcatctctcacccatctggatgccagaagtccaaaatcaaagtgttagcagggccatgttccccctgaaatctgtaagggaatccttcctggcggcttctgaattcctggtgctttcctggtcatcattggcattccttggcttgcagctgtgtcagtccaatccctgccctcatcatctctctgtgtgtccctatcttcatatggccatcttcttataaggacacgagtcacattggattaagggcccaccctatttcagtatgacctcatcttaactaattatatctgcaaagaccctctctccaaatgaagtctcattctgaggtactaggaatgaggacttcaacatgtctttttttttttttttttttttttgttggggacaccacaacttataacaccctctaagacattttctcttgtgccttgactggtcctccactgtagaacccaggtgcccttgaagatagattccccagaattcctggtctacaaggtcaggctgttgctgtcatgcttaccaagcttgccccaatcaacacgtcccatcactgaattccaacagctctggatctcagttctgtggctgtatgggaacagcctgtgtgtaagtggcttgtctgtagcggactgtcacttgacccctgaatgtgcctcatgaccctatccaaagcagttggtgacacagcatctgattttatctatactcttgttcattgacaaaggagtggattttgatgagctacattttgctgtttccttttttggctttgcctgtgatgtggggaagttcctaggcagactcatgtggccactctccctggctcccagcctcacctcctcccgtaccacctcaccctcacctgcacacacctgcaagggaatcactttgaactccaaggggagtgacaggcagcaaatgtcagtctgggtcctggaatgtggagccgcagtgaacctctgtcctctctggtcagtgcctgactatgatattaacccaaatcccagactcccttctcgaggccctgcaatccatacccattctgttaccagtttagttttgaaaccagtagtggggcaggaggttgatggaaaatctgcggtcccagtgacctcctggacttgtcttagtagtgcctggcacatagtaagtgctcaagaaatgtttacagaatgcagacagagaggtttgctgggtaagagtaagaccctggcacagggagttagaagggcaccattggcagggctggatggtattgggattcccctttgccagaccatgttgtgggtgccatatcaaccccaatgagtttgtttgttaggtttgttgttgtggtttagagttagagtcttgctctgtcacccaggctggagtacagcgtgatcatagctcactgcagcctcgaactcctggccacaagcaatcctcccaccttagcctctcaagttgctggtactacaggtgcacaccatcatgcctggctaattttttatttgttgtacagacagggtcttgctatgttgcccgcgctggtcttgaactcctggtctcaagcaatccccctgcttcagcctcccaaagcactgggattacagggctaagccattgtgctgagccagtttgccaggtttaatatctgtgacgtatgaagcgacccattgagtcaggtggcccaggatgtctaggaggcagagtaacaatccaccctgaacagccctcattcacagagcacttactacgtgccaggctggaattcctatgatggtttggggagatcagtagtcttattctcgttccaatggggcaactgtggtacagggacagaaaccagcctccaaattgcagacccagcattttaaaaacgagtctttgggctcatccattcccaggaacccacctccaggtcaaggggttcatgtccagctgctcatggggatgttacaatcccagcctctgagacttattggcaacttggaaccaggaaagagagagaggaaaagcaggaagttgtggaagggagggtgcaggggctggcagggaccatactgggagtttgcacggaagcttgaacttatgttctcaaactgacaggctgccagcagcagcccggatttccaggaaatgtacatctgggttggcagagtccctcctgggtccctccagtatccctgctccaggcttcctatcccctccgtctctcctgctggatgttgcactgtggtcccgtgttcctgagaggcgtacatcagtgagtgctcttccctctcaggggtgggaaagggcccttccttcccactcattgggatcatgcagctcccatttcctaacaccaagaatatgaaggattcatctcatggggttgagaatggctgtcctccttccactgaggactgagctggaggagatggactctgtctagaatgtgcctgatctaaataagaccttgtttcccaagcatgtcccatagacctttcattccatggaaaactcgccggatttgcattattgaaagggtcctgggacaagcatgcattggaaatgcttaggtaaaatgaaactaatttcttgattgcaggacttatcagaacttttaagacactattgtgtggttgaatctctaaatgcctgataggaggctgttcttcccaagctttcccaggcttgtttctgaatctccaacaaggtcaacctctgtgaatgagacttgataccttacctggtactgaaggaggcaatgtcaatgtactggcccacagaaaagagctgaccactagcattcatagacactgctaggagatgagaaaggtagcttagagcccgattccatccatgtggacagtggttccatgaacaagaacaccacatctggctgatggtgtcttccaatggaggggtcaaatctgctgtgtgttggtggcttctccaacataccatggcttggaggccaatgtgaaaagtatataagatgtaacaccctcagaagggttaagttttcacctgagttttcatcttcaaccaagtcattgggatggtgatctagaaggacctctaagatctagaaggataaagatctggtccaaggagtacaaatatgtaatggatctaccaccagtgtcccctgctgtactcttggcagacatcactaatccatcacagcatgccttcccactgatcacagatgtagcttcagggcattcgagttaccacttaagatggatatgagtgaccctcccttatctcactcttctcctttcacagaagcaggatctgaggcccagagagggaagctataataaactcccctaagtcaggtcccttctaagaggcagaggtaggtttagaactcaggcctcagaaacttccagaagccaagccatttgggctgtagttggtggacagtctatcagcgctctgcagatgtttcttctcagttagggaacttggaaaatgcagaaagaaagattctgtctctaagactctgtgtatgatcctactcggtaatctgcctgcttggagaaaaatcatttatcttctgggacggcttcaccacaaggcctgaatgctatgcccagtctagtaacagctgggctggaagtcacggcatatgggggccttaaggaataacagtgtgcgtggtggtgtgcaggagagctgcaagggcttttctttcttgaggaggtttgtaaaatttctgctgttcagtctgggcttctgggaagtcagggggtgctgcatataaagggcaggaaaaggagcctgactccaattgctctttggtttcttccctgaatggaaggctcaaaatcaagtttccacccagataagatcttgaggtcctagtggaccaccagctctactcctgagctcttgaaatacctctaatcaccagctcggtggctgagagtaccttcttgtccactgcctcttcttttccttctcgtcttcacttatcccccatccaacttctgcccgataatatctcccctgtattgtaaactgaggagaaagttgcacaattgtagagatgaaaaatagctgccatgtatttagcttaaattagctcagaagaaaggctccctccctccattgagcgggcagcacttgtttatgccaacatgctatttgcatcgcgccttcttaaatttgaaagtctaatgattaaaaacaaatcttagtttttcttttccaccacttaaaaaaaaaaaaccagcttggctagttcttctagtttaaaaataccctgacctccagcactacagtgagaattttggaaaggctggtaccaggatatcaggaggaaataaatacaggccaacaataaccagaggccttttctgagtggtgggcgacaggatgaacaaggtagaagagaggtctttgtgtcctcacacagatgctggcattctgggtttgtctggaattcagtgaacctctgtcctctctgacagagatttcttcaccaaccattcattcagtgggtgatttgttgagcatctactatgtgttagaccctgggcattcagtgatgagtgatacaatgtctcacctgttctgaagcctaaagcccaatggggaagagagacaagaagcaagtcaaccacaaatatataaatttgcaactcatgtagatctatggaaagaaaactcacgggggaccagaaacatgggagagggtatactgtgggagagctgctgacaaaggtctttctgaggaggtgacatttaagtcaagatctaaaggaagagaaggataaagagatgttcattctaagccagggtttctcaacctcagtactgttgagctatttggggccagataattctttgaggtggcgactgtcctgggcattggaggatgttaagcagcttcctcaactctccccacaagataccagtagcacctggtactggtgacatccaaaaacatccccagacacaccctgactttgctgtctggaatcaatcctcataaagccccaagccttggagcacagaggctggaagcccatatggtggcatgtcaggcatggtgtcacctgagcttctctgacccccacttctgatatggcatccagtttggagtctctgttctccatgagctcccatagctgtcccatattccacaaggcattgcttctgggccacggtcctctagttccagcatagccctatttttgggtatgttggtggatttcaaaagcctccagttgacatccaaagtgtgacatccaaaaccatctccagacattgccagatgtcccctgagttgtctccaggccacgcgactaggattcaaatccagcatcctgccatctgcaaccttccatgggagaaaggaaatcagaggagaacaggaaaacacaaggaggggactccttaagtgaacattgcagggaaataggtttttaaagcactagttagcatcaccagtggtttgaaggctgtctaggtaaggagaatgtggacttgcctttcaccgtctgcacggacaggggctgaaatctccagtcattctctccatccttccacagcccttctaagaagcagatcctcttgctgagctgaaatcttgagacttgcatccggcaatcttggtgttgctttctgaggctactcagggaaagcccttctgtattccccaggaaggaaagtctcccagatagtgaagggccttttctaccttccttgcaattcccagttcactgtgaagaagagagtcaggccgggttagaatggctgtctctggtagcaatgaagcaacaacatagacagtctggacaagatgtggcagttctgtccagtcccgtgtgactgatttgggcatggagacaggcagtgggtgaggatggcctctgtaggtccagctgttttacccctagaatcaaatccctggagcttccggcagtcccaggattgggaagggtaacagagaggacgagtcgggcactgcaaaagaccagatcttggaaaattgctttgggaattgggacaccttccaagaagacagttgagttggctggggctctgccctagatggggtcaacctctccccaacacagccctgcccaggttggggcattggcagcttaagtgcgtcctggacaacaaatgtaatgtattggtcctgtaagattctagccattttcctctgcttatttttctacatgtgttacaagtaataatgtttagatgggtacatatgaacttgtgtaagttcaagtaactgctatgtagctacagcatgggcatcaaggtactctaaggtacttgccctgccacaccgaggccccctgccccggccccctttccctcctagccagccttctagggagcactgcacaccctgccccttcaaagctatctggacagtcctggctcgactggagcattaagggaggggctgtccttggtcaggcttctgcccaactgtgtgatgcataaatctttgcctggctccttcttccttcttttcggaagtctatctcctcctgagggcctctgcggtcctaacctatcaaggaatatcatagattgtactccccaccccatcaaaacacaccctgactttgcgtctggaatcaatcctcataaagccccaaggcttggagcacagaggccagaagcccatatggtggcatgtcaggcatgctgtcacatgagcttctctgactccacttccaagatggcatccaatttggagtctctgttctccatgagctcccatagctgtcccatattccacaaggcactgcttctgggccccggtcctctagtttcctcatagccctatttttgggtacattggtggatttcaaatgcctacagttgagcagccgaaggattctaagaaaattttgcttgtatttcaaaggctcatgtccccagccccattcactacaccctcagcagagcccagcgtggagcaaccttgtcccttcattccccaaatcttcattttatatagtcatttagtaaatatttgttaagtgcctcctgtgattctggaaaaaatggagaaaagtgggtgctgccttcagggtactaggagtccgatgaagagagggaggagttccagtagggtcccgaggccccacaggagctcccaacccagagaaagaccctccaggaaggattctcagaggaggagacttctgaaccctgtcttgaaatttgagtagaatggtagggaacggtgtgtcagacagaaggaacagcctatgtgtggactcagaggcaagatcatgatttattgagggtaactgcaagtggctaaaatcctgccccctggcacttgcctgcctttccctgctttccccaaagcctgattttgggaccctggagtctccatctccaaacagagggtgccctggctcagatgtggagaccttgacttctttccccagcatgctctggttcctactgttagccttggtgtcctgtgggggaagatgtctgaggagagttttgtgcttgctggagtcagaccagtactcaggccacctcaggcctgctctgcatccctctctggctctacagacctctctctctctctctctctctctctctctctctctctgtctgtctgtctctgtgtctgtctctgtctctgcctgcctccacacagtgaaggatgtgtctctatttcttagtgccctgcattgggtcctgaagtccatgggcatcttggctatagatgggttggccatgagcccttctctctaatgcatttttcattcctgttcctcttttgcttcactttccctctatcgactcttgcgacctgtgtctctgatgtctctggggcccccagttctgtcttgccataccaaaaaaccttcttcagcaaaaaacctctttctgggacagttcatatcactctatgaataggcccctgaagtgttgaggtcaaggacatgtgtgaacgtggaaatgtatttatggaaagaccctacactgagggtctctaactaaacatttcaggtatgatgggcaaaatgctggtttgttacagaaatgactgaagaagacctaggggccatagtgggccacaggccaagcctgcaatacagcctgaagtgtgggaaagaatgtatcagtcctgttgatggagtggtgtgtttgctgtctctataaatatgtcagggtttgaaagacagaaaacaaagcatctttgctgaccgccagactcccagggtatatgtggctactgcaaattagcgaggcttgtttatctgcttcaacttgactcaatttgcatttcttgagccactgtctattgtggataatgatttcatcaacactttctcagcatcagcagcccctccagagtattccttgaattttcttagctttgtgcaacccacgagcacttaatatatcactaacccttgagtttattggagggagtgaatgaaataatgaatgtcaataacgttacgcaatacctggcacacagtaggtgcttcatcaatgtggcttttcttctcaatcacccaaatgaacctcccccagaatcccacctctagggggacattcctgaaaaataagggactagaatagcgaggtggtgggtgttacccatttatttagatatttgtgtcctggtgaacatggggagggatgcccaagtgtcataaggacaccccctccccccgtctacaaggcagaggtctcttaggatgtgagagagtctctggcaagaccagcccccaccccaccaaggccctcatagaaacagaacattcttcctccctatcccaaagcagaagttgactggggcagataaggcaagtcacattacatctgtgcccttgaccatacctggaccaggcagagaagatcccagacttaggtggtcaacgtttccaccccaagcctctcatttctcgctctctttgagacttgatcttgtaccaggatccactcgacagacttaacgcatgattaatttgattgattactcttgaagttactgaccttaggaaaattcctcaattgtaaaaaggctttctctatatgtaaattatgctgttatctttttctatacacaaagtatatagacctataaatattatacatatatattatatatataaagactaattcttgtacagaccaacgcggaccgatggtccatattcttttctccatgtttgtttgtgtcgactgttgcagagtgagttgatgtaagaaggtggtttcatgttttcttttggggggccacttctttcttttcctttccgtttctatctctgtctgtctccgtctctgtctctctctttctcacttgttgccaatgtcttgttgctgagaaggaacactctattcagatgccatccaggaaagaaaggccagatggatggagggtccactgtgtatatttgtacagaatcatttataaagttttctacacttctaaaaaaagtatttctaacttgggctgttggacagtttgtgtgcctctgagccagcaagcctgttgtttcttgtgtttagtgcaatgtttagtgagaaaccaatgtctgaattatttatgccaataaaaaatttgagaattactgcattgcactactgccaagacaggtctgaattctattgtt

SEQ ID NO: 333895 - DNA, 2853 bp, Artificial Sequence
  derived and/or modified sequence
atggatgaggagaacatgaccaagtctgaggagcagcagcccctgagcctgcagaaggccctgcagcagtgtgagctggtgcagaacatgattgacctgagcatcagcaacctggagggcctgcggaccaagtgtgccaccagcaatgacctgacccagaaggagatccgcaccctggagagcaagctggtgaagtacttcagccggcagctgagctgcaagaagaaggtggccctgcaggagagaaatgctgagctggatggcttcccccagctgcggcactggttccgcatcgtggatgtgaggaaggaggtgctggaggagatcagccctggccagctgagcctggaggacctgctggagatgacagatgagcaggtgtgtgagaccgtggagaagtacggggccaaccgggaggagtgtgcccggctgaatgccagcctgagctgcctgagaaatgtgcacatgtctgggggcaacctgagcaagcaggactggaccatccagtggcccaccacagaaacaggcaaggagaacaaccctgtgtgccccccagagcccaccccctggatccgcacccacctgagccagagcccccgggtgcccagcaaatgtgtgcagcactactgccacaccagccccacccctggggcccctgtgtacacccacgtggaccggctgactgtggatgcctacccaggcctgtgccccccaccacccctggagagcggccacaggagcctgccccccagcccccggcagagacatgctgtgaggaccccacccaggacccccaacatcgtgaccaccgtgaccccacctggcaccccacccatgaggaagaagaacaagctgaagcccccaggcaccccaccacccagcagcaggaagctgatccacctgatccctggcttcaccgccctgcacaggagcaagagccatgagttccagctgggccaccgggtggatgaggcccacacccccaaggccaagaagaagagcaagcccctgaacctgaagatccacagctctgtgggcagctgtgagaacatccccagccagcagaggagccccctgctgtctgagaggagcctgcgctccttctttgtgggccacgcccccttcctgcccagcaccccacctgtgcacacagaggccaacttcagcgccaacaccctgtctgtgccccgctggagcccccagatcccccggcgggacctgggcaacagcatcaagcaccgcttcagcaccaagtactggatgagccagacctgcaccgtgtgtgggaagggcatgctgtttggcctgaagtgcaagaactgcaagctgaagtgccacaacaagtgcaccaaggaggccccaccctgccacctgctgatcatccacagaggagaccctgcccggctggtgaggacagagagcgtgccctgtgacatcaacaaccccctgaggaagccaccccgctacagcgacctgcacatcagccagaccctgcccaagaccaacaagatcaacaaggaccacatccctgtgccctaccagcctgacagcagcagcaaccccagcagcaccaccagcagcacccccagcagccctgccccacccctgcccccatctgccaccccacccagccccctgcaccccagcccccagtgcacccggcagcagaagaacttcaacctgcctgccagccactactacaagtacaagcagcagttcatcttcccagatgtggtgcctgtgcctgagacccccacccgggccccccaggtgatcctgcaccctgtgaccagcaaccccatcctggagggcaaccccctgctgcagatcgaggtggagcccaccagtgaaaatgaggaggtgcatgatgaagctgaggagagtgaagatgactttgaggagatgaacctgagcctgctgagcgcccggagcttccccaggaaggccagccagaccagcatcttcctgcaggagtgggacatcccctttgagcagctggagatcggggagctgattggcaagggccgcttcggccaggtgtaccacggccgctggcacggggaggtggccatccggctgattgacatcgagcgggacaatgaagaccagctgaaggccttcaagcgggaggtgatggcctaccggcagaccaggcatgaaaatgtggtgctcttcatgggcgcctgcatgagccccccccacctggccatcatcaccagcctgtgcaagggccgcaccctgtacagcgtggtgagagatgccaagatcgtgctggatgtgaacaagacccggcagatcgcccaggagatcgtgaagggcatgggctacctgcacgccaagggcatcctgcacaaggacctgaagagcaagaatgtgttctatgacaacgggaaggtggtgatcacagactttggcctcttcagcatcagcggcgtgctgcaggccggcagaagagaggacaagctgcgcatccagaatggctggctgtgccacctggcccctgagatcatccggcagctgagcccagacacagaggaggacaagctgcccttcagcaagcacagtgatgtgtttgccctgggcaccatctggtatgagctgcacgcccgggagtggcccttcaagacccagcctgctgaggccatcatctggcagatgggcaccggcatgaagcccaacctgagccagatcggcatgggcaaggagatcagtgacatcctgctcttctgctgggcctttgagcaggaggagcggcccaccttcaccaagctgatggacatgctggagaagctgcccaagaggaacagaaggctgagccaccctggccacttctggaagtctgctgagctgtag

SEQ ID NO: 333896 - DNA, 2853 bp, Artificial Sequence
  derived and/or modified sequence
atggacgaggagaacatgaccaagagcgaggagcagcagcccctgagcctgcaaaaagcgttacagcaatgcgaactcgtgcagaatatgatagatctgtccatatctaatctcgagggtctcaggactaaatgtgcaacatccaatgaccttactcagaaggagataagaaccttggaaagtaagctggtgaagtatttctccagacagttgagctgtaaaaagaaagtagcactgcaggagcggaacgcagagctggacggattccctcaactgaggcactggttccgcattgtggacgtgagaaaagaagtgctggaagaaattagccctggccagctgagcctggaagacctcctggagatgaccgacgaacaggtgtgtgaaactgtggaaaaatatggggcgaatcgtgaggagtgtgcgagattaaatgcctctctgagctgcctgcgaaatgtgcacatgtcggggggtaatctcagcaagcaggactggaccatccagtggccaaccaccgaaaccgggaaggaaaataatcctgtctgtccccctgagcctaccccttggatccggacgcatctctcccagagccctcgcgtgccaagcaagtgtgtacagcattactgtcatacatcacccaccccaggagcccctgtctatacacatgtagaccggctgaccgtggatgcctaccctggcctgtgtccacctcctcctctcgagtcaggacaccggtcacttccacccagccccagacaacgacacgccgtccggactccccctcggacgcctaacatcgtcactaccgttactcccccaggaaccccccctatgaggaaaaagaataaattgaagccgccaggcactcctccaccatcatccagaaagcttatccaccttataccgggattcaccgccctgcaccgttcaaagagccatgagtttcagcttggacatcgtgtggacgaggcccacacaccaaaagcgaagaagaagagcaaaccactcaacttgaagatccatagcagcgtggggagctgtgaaaacattccatcccagcaaagatctcccctgctgtccgaaagatcactgcggtctttttttgtggggcatgcccccttcttaccaagtacccctcccgtacacacagaagcaaattttagcgccaatactttatccgtccctcgctggagcccacagattcctcgacgagacctggggaattcaatcaagcacagattcagcactaaatactggatgtctcagacttgtacggtctgtggaaaaggtatgctcttcgggcttaagtgcaaaaattgtaagctcaaatgccacaacaaatgcacaaaagaagcacccccatgccaccttctaattatacaccggggtgaccccgctcggctggttcggaccgagagtgtcccgtgtgacataaataacccccttaggaaacctcccagatatagcgaccttcacatcagtcagaccctgcctaagacaaacaagatcaacaaggaccatatacccgtgccctaccagcccgactcctcctcaaaccccagctccaccactagcagcacaccgtcctctccagccccacctctccccccctcagccacaccacccagcccactccacccgagcccacaatgcaccagacaacagaaaaattttaatctgcccgcctcccactattataaatataagcaacagtttatattccccgatgtggtccccgtccctgagacccctacaagggcaccccaggtgattcttcacccagtgacctcaaatcccattttggaaggcaaccctcttctgcagatagaagtcgaacccacatccgaaaacgaagaggttcacgatgaggcggaagagagcgaagacgacttcgaggaaatgaatttgagccttctaagcgccaggagctttccccgtaaggcttcgcagacatctatcttcttgcaagagtgggacatcccgtttgaacagctggagatcggggagctgattggcaaggggcggttcggccaagtgtatcacggccgttggcatggcgaggtggctattaggctgattgatatagagcgcgataacgaggatcagctgaaagcttttaagcgtgaggtgatggcgtacagacagactcgacacgagaatgtggtgttgttcatgggagcttgtatgagtccccctcacctagctatcataacgtcactttgcaagggccgcaccttgtattcagtcgttcgcgacgctaagatagttctggacgtcaataaaactaggcagatagctcaggagatcgtgaagggcatgggctacctacacgcgaagggtatacttcacaaggacctaaagtcaaagaacgtcttttacgacaacggcaaggtggtgattaccgacttcggattattctctattagcggagttctccaagccgggcgccgcgaggacaagctccgtattcaaaatggatggctctgccacctggcaccggagatcattaggcagctctccccagatacagaagaagataagcttccttttagcaagcatagcgatgtcttcgcactgggtactatttggtatgaactgcacgcaagagaatggccttttaagactcaaccagcagaagctataatctggcaaatgggaacaggcatgaagcccaatctgagccagattggtatggggaaggagatcagcgatattctcctgttctgctgggcatttgaacaggaggaacgcccaaccttcactaaacttatggacatgctcgaaaagctacccaagcggaaccgaagactgtcccatcccggccacttttggaagagtgctgaattgtag

SEQ ID NO: 333897 - DNA, 2853 bp, Artificial Sequence
  derived and/or modified sequence
atggacgaggaaaatatgaccaagagtgaagaacagcagcccctgagtttacagaaagccctacagcagtgcgaacttgtgcagaatatgatcgatctgtctatctcaaacctggaaggcctcaggacaaagtgcgccacttccaatgacctgacccaaaaagaaatccggacactggagagtaagctggtgaagtattttagccgccaactttcctgcaaaaagaaggtggccctgcaagagcgaaatgctgaactggacgggttcccccagcttcgtcactggttccggatcgtggacgtcagaaaagaagttctcgaggaaatcagccctggtcagttgagtctggaagatctactggagatgaccgacgagcaggtgtgtgaaacagtcgaaaaatacggcgctaatcgggaggagtgcgccagactgaatgcttcccttagctgcctcagaaatgttcacatgtcaggaggaaatctgtccaagcaagattggacaattcagtggccaaccacggaaaccggcaaagagaataacccagtttgtcccccagaaccgactccatggattagaacccatctgtcgcaatcccctcgcgtgccatcaaagtgcgtgcagcactattgccacacgtctcccactcctggggcacccgtgtatacgcatgtcgatcggctaaccgtggacgcctatcccggactgtgtccccctcctccactggagtccggacatcggtccctgcccccatcgcccaggcagaggcatgcggtccggacacctcctcgcacccctaatattgtgactaccgtgactcctcctggaaccccccctatgcggaagaaaaataagctcaaaccgcctggcactcccccaccatcctccaggaaactcatccatctcattcctggattcaccgccttacataggagtaaatcacatgaatttcaattgggacaccgtgtggatgaggcccacaccccgaaagcgaaaaagaagagcaagccacttaatctgaagattcattcaagtgttggatcctgtgaaaatatcccttctcagcagagaagcccattgttaagtgagaggtctctgagaagtttcttcgtgggtcatgcgccttttctgccaagtaccccgcctgtgcataccgaagctaacttttctgcgaacaccctgagcgttcctagatggtcccctcagattcctcgccgagacctagggaacagtattaagcatagattcagtaccaaatattggatgagccaaacctgtacagtttgcgggaaaggaatgctgttcggtttgaaatgcaagaactgcaagctgaaatgccacaacaagtgtaccaaggaagctccgccatgccatctactcatcatccatcgtggagaccccgctcgcctggtccggaccgagtccgttccctgcgatataaataaccccctccgaaagccccctcggtattcagatctgcatatctcccaaaccttgcccaagactaacaagatcaacaaggatcacattccagtcccttaccaacccgactcatcttcgaatccctcgtcgaccacatcctctacaccatcctctccggctccacccttaccaccatcggcaacccctccgagcccactccatccttcaccacagtgtacccggcaacaaaaaaacttcaacttaccggcatcacactactataagtataagcagcagtttatttttcctgatgtggtgcccgtccctgaaactcctacgagggcaccacaggtcatccttcatcccgtcacctccaacccaatcctggaaggcaatcccctcctgcagatcgaagtggaaccgacgagtgagaacgaggaggtgcacgatgaagccgaggagagcgaggacgactttgaggagatgaatctgtctctgctgtccgcacgttcgttcccgaggaaagcatcccagacttctattttcttacaagagtgggacataccattcgagcagttggagattggtgaattgatcggtaagggccgatttgggcaggtctatcacggtcgttggcacggtgaagtggcgattcgcttgatcgacatagagcgagataacgaggatcagctaaaggctttcaagcgggaagtaatggcgtaccgtcaaacacggcatgaaaacgtggtcctgttcatgggagcttgtatgtcccccccacatctggcaattatcacaagcctctgcaagggcagaaccttatacagcgtggtgagagatgcaaaaatagtcttggatgtcaacaagactcgacagatcgcacaggaaatagtgaagggcatgggctacctccacgcaaaggggattctccataaggatttgaagagtaagaacgttttttacgacaatggcaaagttgtcatcacagactttggtttgttctctatttcaggagttctgcaagccggaagacgggaagacaagctacgtatccagaacggctggttgtgtcatctggccccagagatcattcgccagctgtcccccgataccgaggaggataagctccctttttctaaacattcagatgtattcgccctgggtaccatctggtatgagctgcacgcgagagaatggccctttaagacacagccggctgaggcaatcatctggcagatggggactggcatgaaacccaacttgtcccagattgggatgggtaaagaaatctccgatattctgctgttctgctgggcttttgagcaagaggagcgaccgacatttactaaactgatggatatgctggaaaaactgcccaagaggaatcggcgactctcgcacccgggtcacttttggaagtctgctgaactgtag

SEQ ID NO: 333898 - DNA, 2853 bp, Artificial Sequence
  derived and/or modified sequence
atggacgaggagaacatgaccaagagcgaggagcagcagcccctgagcctgcagaaggccctgcagcagtgcgagctggtgcagaacatgatcgacctgagcatcagcaacctggagggcctgagaaccaagtgcgccaccagcaacgacctgacccagaaggagatcagaaccctggagagcaagctggtgaagtacttcagcagacagctgagctgcaagaagaaggtggccctgcaggagagaaacgccgagctggacggcttcccccagctgagacactggttcagaatcgtggacgtgagaaaggaggtgctggaggagatcagccccggccagctgagcctggaggacctgctggagatgaccgacgagcaggtgtgcgagaccgtggagaagtacggcgccaacagagaggagtgcgccagactgaacgccagcctgagctgcctgagaaacgtgcacatgagcggcggcaacctgagcaagcaggactggaccatccagtggcccaccaccgagaccggcaaggagaacaaccccgtgtgcccccccgagcccaccccctggatcagaacccacctgagccagagccccagagtgcccagcaagtgcgtgcagcactactgccacaccagccccacccccggcgcccccgtgtacacccacgtggacagactgaccgtggacgcctaccccggcctgtgcccccccccccccctggagagcggccacagaagcctgccccccagccccagacagagacacgccgtgagaaccccccccagaacccccaacatcgtgaccaccgtgaccccccccggcaccccccccatgagaaagaagaacaagctgaagccccccggcacccccccccccagcagcagaaagctgatccacctgatccccggcttcaccgccctgcacagaagcaagagccacgagttccagctgggccacagagtggacgaggcccacacccccaaggccaagaagaagagcaagcccctgaacctgaagatccacagcagcgtgggcagctgcgagaacatccccagccagcagagaagccccctgctgagcgagagaagcctgagaagcttcttcgtgggccacgcccccttcctgcccagcaccccccccgtgcacaccgaggccaacttcagcgccaacaccctgagcgtgcccagatggagcccccagatccccagaagagacctgggcaacagcatcaagcacagattcagcaccaagtactggatgagccagacctgcaccgtgtgcggcaagggcatgctgttcggcctgaagtgcaagaactgcaagctgaagtgccacaacaagtgcaccaaggaggcccccccctgccacctgctgatcatccacagaggcgaccccgccagactggtgagaaccgagagcgtgccctgcgacatcaacaaccccctgagaaagccccccagatacagcgacctgcacatcagccagaccctgcccaagaccaacaagatcaacaaggaccacatccccgtgccctaccagcccgacagcagcagcaaccccagcagcaccaccagcagcacccccagcagccccgccccccccctgccccccagcgccaccccccccagccccctgcaccccagcccccagtgcaccagacagcagaagaacttcaacctgcccgccagccactactacaagtacaagcagcagttcatcttccccgacgtggtgcccgtgcccgagacccccaccagagccccccaggtgatcctgcaccccgtgaccagcaaccccatcctggagggcaaccccctgctgcagatcgaggtggagcccaccagcgagaacgaggaggtgcacgacgaggccgaggagagcgaggacgacttcgaggagatgaacctgagcctgctgagcgccagaagcttccccagaaaggccagccagaccagcatcttcctgcaggagtgggacatccccttcgagcagctggagatcggcgagctgatcggcaagggcagattcggccaggtgtaccacggcagatggcacggcgaggtggccatcagactgatcgacatcgagagagacaacgaggaccagctgaaggccttcaagagagaggtgatggcctacagacagaccagacacgagaacgtggtgctgttcatgggcgcctgcatgagccccccccacctggccatcatcaccagcctgtgcaagggcagaaccctgtacagcgtggtgagagacgccaagatcgtgctggacgtgaacaagaccagacagatcgcccaggagatcgtgaagggcatgggctacctgcacgccaagggcatcctgcacaaggacctgaagagcaagaacgtgttctacgacaacggcaaggtggtgatcaccgacttcggcctgttcagcatcagcggcgtgctgcaggccggcagaagagaggacaagctgagaatccagaacggctggctgtgccacctggcccccgagatcatcagacagctgagccccgacaccgaggaggacaagctgcccttcagcaagcacagcgacgtgttcgccctgggcaccatctggtacgagctgcacgccagagagtggcccttcaagacccagcccgccgaggccatcatctggcagatgggcaccggcatgaagcccaacctgagccagatcggcatgggcaaggagatcagcgacatcctgctgttctgctgggccttcgagcaggaggagagacccaccttcaccaagctgatggacatgctggagaagctgcccaagagaaacagaagactgagccaccccggccacttctggaagagcgccgagctgtag

SEQ ID NO: 333899 - protein, 414 aa, Artificial Sequence
  derived and/or modified sequence
RAKKKSKPLNLKIHSSVGSCENIPSQQRSPLLSERSLRSFFVGHAPFLPSTPPVHTEANFSANTLSVPRWSPQIPRRDLGNSIKHRFSTKYWMSQTCTVCGKGMLFGLKCKNCKLKCHNKCTKEAPPCHLLIIHRGDPARLVRTESVPCDINNPLRKPPRYSDLHISQTLPKTNKINKDHIPVPYQPDSSSNPSSTTSSTPSSPAPPLPPSATPPSPLHPSPQCTRQQKNFNLPASHYYKYKQQFIFPDVVPVPETPTRAPQVILHPVTSNPILEGNPLLQIEVEPTSENEEVHDEAEESEDDFEEMNLSLLSARSFPRKASQTSIFLQEWDIPFEQLEIGELIGKGRFGQVYHGRWHGEVAIRLIDIERDNEDQLKAFKREVMAYRQTRHENVVLFMGACMSPPHLAIITRPV

SEQ ID NO: 333900 - DNA, 1245 bp, Artificial Sequence
  derived and/or modified sequence
cgggctaagaagaagtccaagcccctcaacctcaagatccactctagcgtgggaagttgcgagaatatcccctctcagcaaagatcccccctgctgtccgagagatcgctgcgttccttctttgtagggcacgcgcccttcctcccttctaccccccctgttcacaccgaggctaacttctcagccaacactctctccgtgcctaggtggtccccacaaatcccccggcgggaccttggcaattctattaagcatagattctccaccaaatactggatgtctcagacatgtacagtttgcggaaaaggtatgcttttcggattgaagtgtaagaattgcaaacttaagtgccacaacaaatgtaccaaagaagcacccccctgtcacctgttgatcatccaccggggagaccctgccaggttagtcagaaccgagtccgtgccatgtgatattaacaatccactgcggaagcctcccagatattctgatctccacatctcacagactctgcctaagactaacaaaatcaacaaggatcatatcccggttccataccagccagactcgtctagcaatccctcatcaactacaagctctacaccgagctcgcccgcacctccactgcctccctctgctacacctccttccccattgcatccgtcacctcagtgcacccggcagcaaaaaaacttcaatctgcctgcctcccattactataagtacaagcagcaattcatatttccagacgtggtgcccgttcctgaaacacccacacgtgcaccccaggtgattcttcaccccgtgacatccaacccaatactcgaggggaatccactgctccagattgaggttgagccaaccagcgagaacgaggaggttcatgacgaggcggaggagagcgaggatgacttcgaggagatgaatcttagccttctttctgctcgctccttccctcgtaaagcatctcagacctccatctttttacaggagtgggacatcccatttgagcaactggaaatcggtgaactgattggtaaaggaagattcggtcaggtgtaccatggtcgatggcacggagaagtggccatcagactgattgatatcgaaagagataatgaggatcagcttaaagcgttcaagcgagaggttatggcctaccgccagacaaggcacgaaaacgtcgtgctgtttatgggggcatgtatgtcccccccacacctggctatcattacccggcccgtttag

SEQ ID NO: 333901 - DNA, 1382 bp, Artificial Sequence
  derived and/or modified sequence
agagccaagaagaagagcaaacccttgaacctcaagatccacagcagcgtaggcagctgcgagaacatcccctctcagcagcgctccccgctgctgtccgagcgctccctccgctccttctttgtgggacacgcacctttcctgccttccacccctcctgttcacactgaggccaacttctctgcaaacacactgtcagtgccacgctggtccccgcagatccctcgcagagatctcggcaactccatcaagcacaggttttccaccaagtactggatgtctcagacgtgcacagtctgtgggaaagggatgctttttggcctcaagtgtaaaaactgcaagttaaagtgccacaacaaatgcaccaaagaagccccaccctgtcatcttctgatcatccaccgaggagatccagcaaggttagtccggacagagtccgttccgtgtgacatcaacaaccctctacggaagccacctcgctattcagacctgcacatcagtcagacgctccccaaaaccaacaaaatcaacaaggaccacatccctgtcccttaccagccagactccagcagcaacccctcctccacgacgtcctccacgccctcctcgccagcaccccccctccctcctagtgccacgccgccttctcccctacacccttccccacagtgcacacggcagcagaagaacttcaacctgccagcatcccactactacaaatacaagcagcagttcatcttcccagatgtggtgccggtgccggagacgccgacccgggcgccccaggtcatcctgcatccggtgacctcgaatccaatcttggaaggaaatccattacttcaaattgaagtggagccaacgtcggagaatgaagaggtccatgatgaggccgaagagtcagaggatgacttcgaggagatgaacctgtccctcctctcggcccggagcttcccacgcaaggccagccagaccagcatcttccttcaggagtgggacatcccctttgagcagctggagatcggcgagctcattggaaagggccgctttgggcaagtgtaccacggccgctggcatggcgaggtggccatccggctgattgacattgagagggacaacgaggaccagctcaaggccttcaagcgggaggtgatggcctacaggcagacacggcatgagaacgtggtgcttttcatgggtgcctgcatgagcccgcctcacctggccatcatcaccaggccagtttgattgtcctaaatataacgtacaggagttggggggcctgagcacatgaagattccgtccccatcatcgagtggaagcggcttccttttatgttcaaaaagctgaatcgctttccctttataaagcacagctgaaaaggt

SEQ ID NO: 333902 - DNA, 1245 bp, Artificial Sequence
  derived and/or modified sequence
cgggccaagaagaagagcaagcccctgaacctgaagatccacagctctgtgggcagctgtgagaacatccccagccagcagaggagccccctgctgtctgagaggagcctgcgctccttctttgtgggccacgcccccttcctgcccagcaccccacctgtgcacacagaggccaacttcagcgccaacaccctgtctgtgccccgctggagcccccagatcccccggcgggacctgggcaacagcatcaagcaccgcttcagcaccaagtactggatgagccagacctgcaccgtgtgtgggaagggcatgctgtttggcctgaagtgcaagaactgcaagctgaagtgccacaacaagtgcaccaaggaggccccaccctgccacctgctgatcatccacagaggagaccctgcccggctggtgaggacagagagcgtgccctgtgacatcaacaaccccctgaggaagccaccccgctacagcgacctgcacatcagccagaccctgcccaagaccaacaagatcaacaaggaccacatccctgtgccctaccagcctgacagcagcagcaaccccagcagcaccaccagcagcacccccagcagccctgccccacccctgcccccatctgccaccccacccagccccctgcaccccagcccccagtgcacccggcagcagaagaacttcaacctgcctgccagccactactacaagtacaagcagcagttcatcttcccagatgtggtgcctgtgcctgagacccccacccgggccccccaggtgatcctgcaccctgtgaccagcaaccccatcctggagggcaaccccctgctgcagatcgaggtggagcccaccagtgaaaatgaggaggtgcatgatgaagctgaggagagtgaagatgactttgaggagatgaacctgagcctgctgagcgcccggagcttccccaggaaggccagccagaccagcatcttcctgcaggagtgggacatcccctttgagcagctggagatcggggagctgattggcaagggccgcttcggccaggtgtaccacggccgctggcacggggaggtggccatccggctgattgacatcgagcgggacaatgaagaccagctgaaggccttcaagcgggaggtgatggcctaccggcagaccaggcatgaaaatgtggtgctcttcatgggcgcctgcatgagccccccccacctggccatcatcaccaggcctgtgtag

SEQ ID NO: 333903 - DNA, 1245 bp, Artificial Sequence
  derived and/or modified sequence
cgggccaagaagaagagcaagcccctgaacctgaagatccacagcagtgtcgggtcatgcgaaaacatccccagtcagcaacggagcccactgcttagcgaaagaagcttgagaagctttttcgtaggccacgccccgttcctgccatcaacaccacccgttcatactgaagccaatttctccgctaacactttgtcagtgccccgctggtctcctcagatcccacgccgagacttaggaaattcaattaaacacagattctcaacgaagtactggatgagtcagacctgcacggtgtgcggtaaaggtatgttatttggactcaaatgtaaaaactgtaagctcaagtgccataataagtgtacaaaggaggcgcccccctgccatctgttaataattcaccgtggggacccagccaggctggtgaggaccgaaagcgttccttgcgacataaataacccattaaggaagcctccacggtatagtgatctgcacatctcccagacattgccaaaaaccaacaagattaacaaggatcacattcctgtaccttatcagcctgactcgagctctaatcccagctcaaccacgtcttctacccccagttcccccgccccacctctgcctccctcagccactcctccttctcctctgcacccctccccgcagtgtactaggcagcagaagaatttcaacctgcctgcttctcactattacaagtataagcaacaatttatcttccctgatgtcgtcccggttcccgaaacccccacacgggcacctcaagtgatactgcaccccgttacaagtaacccaattctcgaagggaacccgttacttcagatcgaggtcgaaccaaccagtgagaacgaggaagtgcatgatgaagcggaggagtctgaggatgattttgaggaaatgaacctgtcactcctgtctgctcggagcttccctagaaaggctagccaaacgagcatcttcctccaggaatgggacattccattcgagcagctggagataggcgaactcatcggcaaagggagattcggccaggtatatcacggtcgctggcacggggaggtcgctattagattaattgacattgagcgggacaacgaagatcagctcaaggcctttaaacgggaggtgatggcctacaggcagaccagacacgagaatgtggtgctgtttatgggcgcctgcatgagccctccccacctcgccattataactcggcccgtctag

SEQ ID NO: 333904 - DNA, 1245 bp, Artificial Sequence
  derived and/or modified sequence
cgcgcaaaaaagaaatcaaagcctctaaatttgaaaatccatagctctgtgggctcttgtgaaaacattccctcacagcagcgatcccctctactttcggaacgatccctgaggagttttttcgttggccacgcaccattcctaccaagtaccccacccgttcataccgaggcgaatttctcagccaatactctcagcgttccgcgttggagcccccaaattccaaggagggacctggggaactccatcaagcatagattctcaacgaagtactggatgtcccagacatgtaccgtatgtggtaagggtatgctcttcggtctgaaatgcaagaattgcaaactgaaatgtcacaataagtgcacaaaggaggcgcctccatgccatctgctgattatccatcgcggtgatcccgctcgcctcgtgcgcaccgagagtgttccttgcgacattaacaaccctctccgaaaacctccgcgatacagcgacttacacatctcccaaactctgcctaagacaaataaaattaacaaagatcatattcccgtgccctatcaaccggattcctcatctaatccctcttctacaacatcctctactccaagtagcccggcacctccactgcctccaagtgcaaccccacctagcccactgcacccaagtccacagtgtaccaggcaacaaaagaacttcaacctgccagcgtcacactactataaatataagcagcaatttatcttccctgatgtggtacctgttcctgaaaccccaactcgggcaccccaggtaatacttcatcccgttacgtcgaaccctattctggagggaaaccccttgctgcagatcgaggtcgaaccgacttccgaaaacgaggaggtccatgacgaggcagaagagtccgaggatgacttcgaagagatgaatttatctctgttaagcgcacgtagtttcccaaggaaggcctcgcagacttccatcttcctgcaggagtgggatattccctttgagcagttggagatcggagagctcataggaaagggcagattcgggcaggtgtatcacgggcgatggcacggtgaggtcgctatcagactcatcgacatcgagagagacaatgaagatcagctaaaagcgtttaagcgagaggtgatggcttaccgccagaccaggcatgagaatgtggtcttattcatgggagcatgcatgagtccccctcatctcgctatcattaccagacccgtttag

SEQ ID NO: 333905 - DNA, 1245 bp, Artificial Sequence
  derived and/or modified sequence
agagccaagaagaagagcaagcccctgaacctgaagatccacagcagcgtgggcagctgcgagaacatccccagccagcagagaagccccctgctgagcgagagaagcctgagaagcttcttcgtgggccacgcccccttcctgcccagcaccccccccgtgcacaccgaggccaacttcagcgccaacaccctgagcgtgcccagatggagcccccagatccccagaagagacctgggcaacagcatcaagcacagattcagcaccaagtactggatgagccagacctgcaccgtgtgcggcaagggcatgctgttcggcctgaagtgcaagaactgcaagctgaagtgccacaacaagtgcaccaaggaggcccccccctgccacctgctgatcatccacagaggcgaccccgccagactggtgagaaccgagagcgtgccctgcgacatcaacaaccccctgagaaagccccccagatacagcgacctgcacatcagccagaccctgcccaagaccaacaagatcaacaaggaccacatccccgtgccctaccagcccgacagcagcagcaaccccagcagcaccaccagcagcacccccagcagccccgccccccccctgccccccagcgccaccccccccagccccctgcaccccagcccccagtgcaccagacagcagaagaacttcaacctgcccgccagccactactacaagtacaagcagcagttcatcttccccgacgtggtgcccgtgcccgagacccccaccagagccccccaggtgatcctgcaccccgtgaccagcaaccccatcctggagggcaaccccctgctgcagatcgaggtggagcccaccagcgagaacgaggaggtgcacgacgaggccgaggagagcgaggacgacttcgaggagatgaacctgagcctgctgagcgccagaagcttccccagaaaggccagccagaccagcatcttcctgcaggagtgggacatccccttcgagcagctggagatcggcgagctgatcggcaagggcagattcggccaggtgtaccacggcagatggcacggcgaggtggccatcagactgatcgacatcgagagagacaacgaggaccagctgaaggccttcaagagagaggtgatggcctacagacagaccagacacgagaacgtggtgctgttcatgggcgcctgcatgagccccccccacctggccatcatcaccagacccgtgtag

SEQ ID NO: 333906 - protein, 436 aa, Artificial Sequence
  derived and/or modified sequence
MYNKKAKMEPNASESAIPARRQRQPRAKKKSKPLNLKIHSSVGSCENIPSQQRSPLLSERSLRSFFVGHAPFLPSTPPVHTEANFSANTLSVPRWSPQIPRRDLGNSIKHRFSTKYWMSQTCTVCGKGMLFGLKCKNCKLKCHNKCTKEAPPCHLLIIHRGDPARLVRTESVPCDINNPLRKPPRYSDLHISQTLPKTNKINKDHIPVPYQPDSSSNPSSTTSSTPSSPAPPLPPSATPPSPLHPSPQCTRQQKNFNLPASHYYKYKQQFIFPDVVPVPETPTRAPQVILHPVTSNPILEGNPLLQIEVEPTSENEEVHDEAEESEDDFEEMNLSLLSARSFPRKASQTSIFLQEWDIPFEQLEIGELIGKGRFGQVYHGRWHGEVAIRLIDIERDNEDQLKAFKREVMAYRQTRHENVVLFMGACMSPPHLAIIT

SEQ ID NO: 333907 - DNA, 1311 bp, Artificial Sequence
  derived and/or modified sequence
atgtacaacaagaaagccaaaatggaacccaacgcaagtgagtccgcaatccccgctaggaggcaacgtcagcctcgagccaagaaaaagtcaaagccgctgaatctgaagatccactcttcagtcgggtcctgtgagaatattccttcacaacagcggagcccattgctgagcgagcgctctctgagatcgttcttcgtcgggcacgcccctttcctcccatcaactcctcctgtccacactgaggccaatttttctgccaataccctttccgtgcctaggtggtcgccacaaattcctcgcagagatctggggaattccatcaagcaccgcttctcaacaaaatattggatgtcacagacatgtactgtgtgcgggaagggaatgctgtttggactaaagtgtaaaaattgtaagcttaagtgtcataacaaatgtaccaaggaggcacctccatgccatctgttaattatacatcggggggatcctgcaagactcgtccggactgaaagtgtgccctgcgatattaacaacccactccgtaaaccgccgcgatattcggatctgcatatttcacagacactcccaaaaacaaataagattaataaagatcacatcccggtcccataccaacctgactcatcgagcaaccccagttctactactagtagcacaccatctagccctgcgcctcctctccccccaagcgccactccgccatccccacttcatcctagcccacagtgtacgcgtcagcagaagaatttcaacctgccagcctctcactactataaatacaagcagcaattcattttcccggacgttgttccagtgccggagacacctacccgggcccctcaagtgattctccacccagtcacgagcaaccccatccttgaaggcaacccacttctgcaaatcgaagtggagccaacttcagagaatgaggaagtccacgatgaggctgaagaatccgaggacgacttcgaagaaatgaatttgagtcttctgtcagccagatcttttcctcgcaaagcctcccaaacctctatatttctccaggaatgggacatcccttttgagcagttagagataggtgaactcattggaaaaggccggttcggccaggtgtaccatggtagatggcatggggaagtcgcgatacggcttatcgatatcgagcgcgacaatgaagaccagctgaaagcgtttaaaagagaggtgatggcgtaccgccaaactcggcacgagaatgtggttcttttcatgggagcttgtatgagccctccccatctcgccataattacttag

SEQ ID NO: 333908 - DNA, 1938 bp, Artificial Sequence
  derived and/or modified sequence
atgtataacaaaaaagcaaaaatggaaccaaatgcaagtgagtctgcgattccagcgaggaggcagcggcagcccagagccaagaagaagagcaaacccttgaacctcaagatccacagcagcgtaggcagctgcgagaacatcccctctcagcagcgctccccgctgctgtccgagcgctccctccgctccttctttgtgggacacgcacctttcctgccttccacccctcctgttcacactgaggccaacttctctgcaaacacactgtcagtgccacgctggtccccgcagatccctcgcagagatctcggcaactccatcaagcacaggttttccaccaagtactggatgtctcagacgtgcacagtctgtgggaaagggatgctttttggcctcaagtgtaaaaactgcaagttaaagtgccacaacaaatgcaccaaagaagccccaccctgtcatcttctgatcatccaccgaggagatccagcaaggttagtccggacagagtccgttccgtgtgacatcaacaaccctctacggaagccacctcgctattcagacctgcacatcagtcagacgctccccaaaaccaacaaaatcaacaaggaccacatccctgtcccttaccagccagactccagcagcaacccctcctccacgacgtcctccacgccctcctcgccagcaccccccctccctcctagtgccacgccgccttctcccctacacccttccccacagtgcacacggcagcagaagaacttcaacctgccagcatcccactactacaaatacaagcagcagttcatcttcccagatgtggtgccggtgccggagacgccgacccgggcgccccaggtcatcctgcatccggtgacctcgaatccaatcttggaaggaaatccattacttcaaattgaagtggagccaacgtcggagaatgaagaggtccatgatgaggccgaagagtcagaggatgacttcgaggagatgaacctgtccctcctctcggcccggagcttcccacgcaaggccagccagaccagcatcttccttcaggagtgggacatcccctttgagcagctggagatcggcgagctcattggaaagggccgctttgggcaagtgtaccacggccgctggcatggcgaggtggccatccggctgattgacattgagagggacaacgaggaccagctcaaggccttcaagcgggaggtgatggcctacaggcagacacggcatgagaacgtggtgcttttcatgggtgcctgcatgagcccgcctcacctggccatcatcaccagcctctgtaagggacggacgctctattccgttgtgagggatgccaaaatcgttttggatgtcaacaaaaccaggcagattgctcaagaaattgtgaagggcatgggctacctccacgccaagggaatcctacacaaggacctcaagtcaaagaacgtcttctatgacaacggcaaagtggtcatcacggactttggactcttcagcatttctggggtgctgcaggctggcaggcgggaggacaaactgcgcatccagaatggctggctatgccacctggcaccagagatcatccgccagctgtcccccgacacagaggaggataagctccccttctccaagcactctgacgtctttgcccttggcacaatctggtatgaactccacgccagggaatggcctttcaagacccaaccagcagaggcaataatctggcaaatgggcacaggcatgaaacccaacctcagccagattggcatgggaaaagaaatctcggacattcttctcttctgctgggcctttgaacaagaagagagacctaccttcaccaagctcatggacatgctggagaaactgccaaagcgaaaccgtcgcctgtctcaccctggacatttctggaagtctgcagag

SEQ ID NO: 333909 - DNA, 1311 bp, Artificial Sequence
  derived and/or modified sequence
atgtacaacaagaaggccaagatggagcccaatgccagcgagagcgccatcccagcccggcggcagaggcagccccgggccaagaagaagagcaagcccctgaacctgaagatccacagctctgtgggcagctgtgagaacatccccagccagcagaggagccccctgctgtctgagaggagcctgcggagcttctttgtgggccacgcccccttcctgcccagcaccccacctgtgcacacagaggccaacttcagcgccaacaccctgtctgtgccccgctggagcccccagatcccccggcgggacctgggcaacagcatcaagcaccgcttcagcaccaagtactggatgagccagacctgcaccgtgtgtgggaagggcatgctgtttggcctgaagtgcaagaactgcaagctgaagtgccacaacaagtgcaccaaggaggccccaccctgccacctgctgatcatccacagaggagaccctgcccggctggtgaggacagaatctgtgccctgtgacatcaacaaccccctgaggaagcccccacgctacagcgacctgcacatcagccagaccctgcccaagaccaacaagatcaacaaggaccacatccctgtgccctaccagcctgacagcagcagcaaccccagcagcaccaccagcagcacccccagcagccctgccccacccctgccccccagcgccaccccacccagccccctgcaccccagcccccagtgcacccggcagcagaagaacttcaacctgcctgccagccactactacaagtacaagcagcagttcatcttcccagatgtggtgcctgtgcctgagacccccacccgggccccccaggtgatcctgcaccctgtgaccagcaaccccatcctggagggcaaccccctgctgcagatcgaggtggagcccaccagtgaaaatgaggaggtgcatgatgaggccgaggagagtgaagatgactttgaggagatgaacctgagcctgctgagcgcccgctccttccccaggaaggccagccagaccagcatcttcctgcaggagtgggacatcccctttgagcagctggagattggagagctgattggcaagggccgcttcggccaggtgtaccacggccgctggcatggagaggtggccatccggctgattgatattgagcgggacaatgaagaccagctgaaggccttcaagcgggaggtgatggcctaccggcagaccaggcatgaaaatgtggtgctcttcatgggcgcctgcatgagccccccccacctggccatcatcacctag

SEQ ID NO: 333910 - DNA, 1311 bp, Artificial Sequence
  derived and/or modified sequence
atgtacaacaagaaggccaagatggagcccaacgccagcgagagcgcaatccccgctaggcggcagcgtcagcccagggccaagaaaaaaagcaagcctcttaatcttaagatccactcaagcgttggctcctgtgaaaatatccccagccagcaacgaagcccactcttatctgagcggagtctccgctctttctttgtgggccacgccccctttctgcccagcactcctcccgtgcatacagaggctaacttctcggctaataccctgtctgtgccacggtggtcaccgcagatcccacgcagggacctcggaaactctataaaacataggtttagtacgaagtactggatgagccaaacctgcacggtctgtgggaaaggcatgctgtttggtctcaaatgcaagaattgtaagctcaaatgtcacaataaatgtacaaaggaggctcccccctgtcacctgctgattatccacagaggcgacccagccaggcttgtgcgtactgagtctgtgccctgcgacataaataacccactgaggaagcccccccggtattccgatctacatatctctcagaccctcccgaaaacaaataagatcaacaaggatcacatacctgtgccgtatcagcccgattcatcttccaatccctcgagcaccactagttcaaccccctcttccccggcacctccactgcctccgtccgcaacccctcctagcccccttcacccatccccacagtgtacacgccagcagaagaatttcaatctgcctgccagccattactacaagtacaaacagcagtttatttttcctgacgttgttcccgtgcccgaaacccctactcgggccccgcaggttatcttgcatccagttaccagcaatccaatactggaaggcaaccctctgctacagatcgaggtagagcccaccagcgaaaatgaagaggtgcacgatgaagcagaggagtctgaggacgacttcgaagaaatgaatttaagcctcttgagtgcccggtcctttcctcggaaggcaagtcagacttccattttccttcaggagtgggacattccctttgaacaactcgagattggggagcttataggaaagggtagatttgggcaggtgtatcatggacgctggcacggcgaggtggctataaggctgatcgatatagagcgtgataatgaggaccagctgaaagctttcaaaagggaagtgatggcgtatcgacagaccagacacgagaacgtcgtgctcttcatgggcgcttgcatgtcaccgccccacctggctataatcacttag

SEQ ID NO: 333911 - DNA, 1311 bp, Artificial Sequence
  derived and/or modified sequence
atgtacaacaagaaagccaagatggagcctaacgccagtgagagtgctattcctgccagaagacaaaggcaaccgagagcaaagaaaaagagtaagcctttgaacttaaagatccacagtagcgtgggaagttgtgaaaacattccctcccagcagcgtagccctcttttaagtgagagaagcttgcgcagttttttcgtgggacatgccccatttcttccctccacccctcctgtccacacagaggccaacttcagcgcgaacacactgagtgtccccaggtggagtccccagattcccaggcgtgacctgggcaattccatcaagcaccgattcagcactaaatactggatgtcccagacgtgtacagtttgcggcaaaggaatgttgttcggactgaagtgcaagaactgcaagctcaaatgtcacaacaagtgtacaaaagaagctcctccgtgccacctattgatcatccaccggggtgaccccgctcggcttgtacgtaccgaatccgtcccttgtgatatcaataaccctctcagaaagccccctcgttactccgaccttcacatttcgcagacccttcctaaaaccaacaaaatcaataaagatcacattcccgtaccctaccaacctgacagctctagcaaccccagcagcactacctccagcacacctagctctccagccccacccctgcccccaagtgccacccctcccagcccgttacatccctcacctcagtgcactcgccagcagaaaaattttaacctgccagcaagtcactactacaagtacaaacaacagttcatctttcccgatgttgtgcccgtaccagagacgcctacccgcgctcctcaggtaatcctacatccagttactagcaaccctattctcgaggggaatccgctgctccaaatagaggttgagcctacctcagaaaatgaagaggtccacgacgaagcagaggagtcagaagatgatttcgaagaaatgaacttgagcctcctgtccgccagatcattccctaggaaggcctcacagacaagcatattcttacaggagtgggatatcccctttgaacagctggagatcggcgagctgattggtaaaggacggttcggccaggtataccacgggagatggcacggcgaagtcgccattcgtcttattgatatcgagagggacaacgaggatcaactgaaggcttttaaacgtgaggtgatggcctacagacagacacgccacgaaaatgttgtgctgtttatgggcgcatgtatgtcccctccccatctagctatcatcacctag

SEQ ID NO: 333912 - DNA, 1311 bp, Artificial Sequence
  derived and/or modified sequence
atgtacaacaagaaggccaagatggagcccaacgccagcgagagcgccatccccgccagaagacagagacagcccagagccaagaagaagagcaagcccctgaacctgaagatccacagcagcgtgggcagctgcgagaacatccccagccagcagagaagccccctgctgagcgagagaagcctgagaagcttcttcgtgggccacgcccccttcctgcccagcaccccccccgtgcacaccgaggccaacttcagcgccaacaccctgagcgtgcccagatggagcccccagatccccagaagagacctgggcaacagcatcaagcacagattcagcaccaagtactggatgagccagacctgcaccgtgtgcggcaagggcatgctgttcggcctgaagtgcaagaactgcaagctgaagtgccacaacaagtgcaccaaggaggcccccccctgccacctgctgatcatccacagaggcgaccccgccagactggtgagaaccgagagcgtgccctgcgacatcaacaaccccctgagaaagccccccagatacagcgacctgcacatcagccagaccctgcccaagaccaacaagatcaacaaggaccacatccccgtgccctaccagcccgacagcagcagcaaccccagcagcaccaccagcagcacccccagcagccccgccccccccctgccccccagcgccaccccccccagccccctgcaccccagcccccagtgcaccagacagcagaagaacttcaacctgcccgccagccactactacaagtacaagcagcagttcatcttccccgacgtggtgcccgtgcccgagacccccaccagagccccccaggtgatcctgcaccccgtgaccagcaaccccatcctggagggcaaccccctgctgcagatcgaggtggagcccaccagcgagaacgaggaggtgcacgacgaggccgaggagagcgaggacgacttcgaggagatgaacctgagcctgctgagcgccagaagcttccccagaaaggccagccagaccagcatcttcctgcaggagtgggacatccccttcgagcagctggagatcggcgagctgatcggcaagggcagattcggccaggtgtaccacggcagatggcacggcgaggtggccatcagactgatcgacatcgagagagacaacgaggaccagctgaaggccttcaagagagaggtgatggcctacagacagaccagacacgagaacgtggtgctgttcatgggcgcctgcatgagccccccccacctggccatcatcacctag

SEQ ID NO: 333913 - DNA, 180 bp, Artificial Sequence
  derived and/or modified sequence
atgtcccacctgcccgctgtaagtccagttttcttccagcttcccgctcctcatcctccaaccgtacttaggcctcagttgggtctgcatccaaaccctgagtgcgacagagagaaaatgtctgtccgcgaccatgacccagaagtcctgactcgtaactccggctccctccaggcttag

SEQ ID NO: 333914 - protein, 155 aa, Artificial Sequence
  derived and/or modified sequence
MDTMMLNVRNLFEQLVRRVEILSEGNEVQFIQLAKDFEDFRKKWQRTDHELGKYKDLLMKAETERSALDVKLKHARNQVDVEIKRRQRAEADCEKLERQIQLIREMLMCDTSGSIQLSEEQKSALAFLNRGQPSSSNAGNKRLSTIDESGSILSD

SEQ ID NO: 333915 - protein, 174 aa, Artificial Sequence
  derived and/or modified sequence
MDTMMLNVRNLFEQLVRRVEILSEGNEVQFIQLAKDFEDFRKKWQRTDHELGKYKDLLMKAETERSALDVKLKHARNQVDVEIKRRQRAEADCEKLERQIQLIREMLMCDTSGSIQLSEEQKSALAFLNRGQPSSSNAGNKRLSTIDESGSILSDISFDKTDESLDWDSSLVKT

SEQ ID NO: 333916 - protein, 107 aa, Artificial Sequence
  derived and/or modified sequence
MDTMMLNVRNLFEQLVRRVEILSEGNEVQFIQLAKDFEDFRKKWQRTDHELGKYKDLLMKAETERSALDVKLKHARNQVDVEIKRRQRAEADCEKLERQIQLIREML

SEQ ID NO: 333917 - protein, 294 aa, Artificial Sequence
  derived and/or modified sequence
MDTMMLNVRNLFEQLVRRVEILSEGNEVQFIQLAKDFEDFRKKWQRTDHELGKYKDLLMKAETERSALDVKLKHARNQVDVEIKRRQRAEADCEKLERQIQLIREMLMCDTSGSIQLSEEQKSALAFLNRGQPSSSNAGNKRLSTIDESGSILSDISFDKTDESLDWDSSLVKTFKLKKREKRRSTSRQFVDGPPGPVKKTRSIGSAVDQGNESIVAKTTVTVPNDGGPIEAVSTIETVPYWTRSRRKTGTLQPWNSDSTLNSRQLEPRTETDSVGTPQSNGGMRLHDFVSKTV

SEQ ID NO: 333918 - protein, 151 aa, Artificial Sequence
  derived and/or modified sequence
MDTMMLNVRNLFEQLVRRVEILSEGNEVQFIQLAKDFEDFRKKWQRTDHELGKYKDLLMKAETERSALDVKLKHARNQVDVEIKRRQRAEADCEKLERQIQLIREMLMCDTSGSIQLSEEQKSALAFLNRGQPSSSNAGNKRLSTIDESGS

SEQ ID NO: 333919 - DNA, 3229 bp, Artificial Sequence
  derived and/or modified sequence
gcgaagtgaagggtggcccaggtggggccaggctgactgaatgtatctcctagctatggactaaataatacatggggggaaataaacaagtattcatgagggtgaaaatgtgacccagcaggaaaattacaactattttcaattgacgttgaataggatgagtcatggaatttaagtgatttactgaagattatactactggtagatagaagagctaaagaaagatggatactatgatgctgaatgtgcggaatctgtttgagcagcttgtgcgccgggtggagattctcagtgaaggaaatgaagtccaatttatccagttggcgaaggactttgaggatttccgtaaaaagtggcagaggactgaccatgagctggggaaatacaaggatcttttgatgaaagcagagactgagcgaagtgctctggatgttaagctgaagcatgcacgtaatcaggtggatgtagagatcaaacggagacagagagctgaggctgactgcgaaaagctggaacgacagattcagctgattcgagagatgctcatgtgtgacacatctggcagcattcaactaagcgaggagcaaaaatcagctctggcttttctcaacagaggccaaccatccagcagcaatgctgggaacaaaagactatcaaccattgatgaatctggttccattttatcagatatcagctttgacaagactgatgaatcactggattgggactcttctttggtgaagactttcaaactgaagaagagagaaaagaggcgctctactagccgacagtttgttgatggtccccctggacctgtaaagaaaactcgttccattggctctgcagtagaccaggggaatgaatccatagttgcaaaaactacagtgactgttcccaatgatggcgggcccatcgaagctgtgtccactattgagactgtgccatattggaccaggagccgaaggaaaacaggtactttacaaccttggaacagtgactccaccctgaacagcaggcagctggagccaagaactgagacagacagtgtgggcacgccacagagtaatggagggatgcgcctgcatgactttgtttctaagacggttattaaacctgaatcctgtgttccatgtggaaagcggataaaatttggcaaattatctctgaagtgtcgagactgtcgtgtggtctctcatccagaatgtcgggaccgctgtccccttccctgcattcctaccctgataggaacacctgtcaagattggagagggaatgctggcagactttgtgtcccagacttctccaatgatcccctccattgttgtgcattgtgtaaatgagattgagcaaagaggtctgactgagacaggcctgtataggatctctggctgtgaccgcacagtaaaagagctgaaagagaaattcctcagagtgaaaactgtacccctcctcagcaaagtggatgatatccatgctatctgtagccttctaaaagactttcttcgaaacctcaaagaacctcttctgacctttcgccttaacagagcctttatggaagcagcagaaatcacagatgaagacaacagcatagctgccatgtaccaagctgttggtgaactgccccaggccaacagggacacattagctttcctcatgattcacttgcagagagtggctcagagtccacatactaaaatggatgttgccaatctggctaaagtctttggccctacaatagtggcccatgctgtgcccaatccagacccagtgacaatgttacaggacatcaagcgtcaacccaaggtggttgagcgcctgctttccttgcctctggagtattggagtcagttcatgatggtggagcaagagaacattgaccccctacatgtcattgaaaactcaaatgccttttcaacaccacagacaccagatattaaagtgagtttactgggacctgtgaccactcctgaacatcagcttctcaagactccttcatctagttccctgtcacagagagtccgttccaccctcaccaagaacactcctagatttgggagcaaaagcaagtctgccactaacctaggacgacaaggcaacttttttgcttctccaatgctcaagtgaagtcacatctgcctgttacttcccagcattgactgactataagaaaggacacatctgtactctgctctgcagcctcctgtactcattactacttttagcattctccaggcttttactcaagtttaattgtgcatgagggttttattaaaactatatatatctccccttccttctcctcaagtcacataatatcagcactttgtgctggtcattgttgggagcttttagatgagacatctttccaggggtagaagggttagtatggaattggttgtgattctttttggggaagggggttattgttcctttggcttaaagccaaatgctgctcatagaatgatctttctctagtttcatttagaactgatttccgtgagacaatgacagaaaccctacctatctgataagattagcttgtctcagggtgggaagtgggagggcagggcaaagaaaggattagaccagaggatttaggatgcctccttctaagaaccagaagttctcattccccattatgaactgagctataatatggagctttcataaaaatgggatgcattgaggacagaactagtgatgggagtatgcgtagctttgatttggatgattaggtctttaatagtgttgagtggcacaaccttgtaaatgtgaaagtacaactcgtatttatctctgatgtgctgctggctgaactttgggttcatttggggtcaaagccagtttttcttttaaaattgaattcattctgatgcttggcccccatacccccaaccttgtccagtggagcccaacttctaaaggtcaatatatcatcctttggcatcccaactaacaataaagagtaggctataagggaagattgtcaatattttgtggtaagaaaagctacagtcattttttctttgcactttggatgctgaaatttttcccatggaacatagccacatctagatagatgtgagctttttcttctgttaaaattattcttaatgtctgtaaaaacgattttcttctgtagaatgtttgacttcgtattgacccttatctgtaaaacacctatttgggataatatttggaaaaaaagtaaatagctttttcaaaatgaa

SEQ ID NO: 333920 - DNA, 3307 bp, Artificial Sequence
  derived and/or modified sequence
aataaatttctctgtgattggttggtgaaggttttcaaaccggagctgtgggcgcggcgctgctctgccgttgggtgaggcgcggagcgaagtgaagggtggcccaggtggggccaggctgactgaatgtatctcctagctatggactaaataatacatggggggaaataaacaagtattcatgagggtgaaaatgtgacccagcaggaaaattacaactattttcaattgacgttgaatagggtgagtaaattttagctttttgagttacaatttggctgagatatcagagttacagaaagatggatactatgatgctgaatgtgcggaatctgtttgagcagcttgtgcgccgggtggagattctcagtgaaggaaatgaagtccaatttatccagttggcgaaggactttgaggatttccgtaaaaagtggcagaggactgaccatgagctggggaaatacaaggatcttttgatgaaagcagagactgagcgaagtgctctggatgttaagctgaagcatgcacgtaatcaggtggatgtagagatcaaacggagacagagagctgaggctgactgcgaaaagctggaacgacagattcagctgattcgagagatgctcatgtgtgacacatctggcagcattcaactaagcgaggagcaaaaatcagctctggcttttctcaacagaggccaaccatccagcagcaatgctgggaacaaaagactatcaaccattgatgaatctggttccattttatcagatatcagctttgacaagactgatgaatcactggattgggactcttctttggtgaagactttcaaactgaagaagagagaaaagaggcgctctactagccgacagtttgttgatggtccccctggacctgtaaagaaaactcgttccattggctctgcagtagaccaggggaatgaatccatagttgcaaaaactacagtgactgttcccaatgatggcgggcccatcgaagctgtgtccactattgagactgtgccatattggaccaggagccgaaggaaaacaggtactttacaaccttggaacagtgactccaccctgaacagcaggcagctggagccaagaactgagacagacagtgtgggcacgccacagagtaatggagggatgcgcctgcatgactttgtttctaagacggttattaaacctgaatcctgtgttccatgtggaaagcggataaaatttggcaaattatctctgaagtgtcgagactgtcgtgtggtctctcatccagaatgtcgggaccgctgtccccttccctgcattcctaccctgataggaacacctgtcaagattggagagggaatgctggcagactttgtgtcccagacttctccaatgatcccctccattgttgtgcattgtgtaaatgagattgagcaaagaggtctgactgagacaggcctgtataggatctctggctgtgaccgcacagtaaaagagctgaaagagaaattcctcagagtgaaaactgtacccctcctcagcaaagtggatgatatccatgctatctgtagccttctaaaagactttcttcgaaacctcaaagaacctcttctgacctttcgccttaacagagcctttatggaagcagcagaaatcacagatgaagacaacagcatagctgccatgtaccaagctgttggtgaactgccccaggccaacagggacacattagctttcctcatgattcacttgcagagagtggctcagagtccacatactaaaatggatgttgccaatctggctaaagtctttggccctacaatagtggcccatgctgtgcccaatccagacccagtgacaatgttacaggacatcaagcgtcaacccaaggtggttgagcgcctgctttccttgcctctggagtattggagtcagttcatgatggtggagcaagagaacattgaccccctacatgtcattgaaaactcaaatgccttttcaacaccacagacaccagatattaaagtgagtttactgggacctgtgaccactcctgaacatcagcttctcaagactccttcatctagttccctgtcacagagagtccgttccaccctcaccaagaacactcctagatttgggagcaaaagcaagtctgccactaacctaggacgacaaggcaacttttttgcttctccaatgctcaagtgaagtcacatctgcctgttacttcccagcattgactgactataagaaaggacacatctgtactctgctctgcagcctcctgtactcattactacttttagcattctccaggcttttactcaagtttaattgtgcatgagggttttattaaaactatatatatctccccttccttctcctcaagtcacataatatcagcactttgtgctggtcattgttgggagcttttagatgagacatctttccaggggtagaagggttagtatggaattggttgtgattctttttggggaagggggttattgttcctttggcttaaagccaaatgctgctcatagaatgatctttctctagtttcatttagaactgatttccgtgagacaatgacagaaaccctacctatctgataagattagcttgtctcagggtgggaagtgggagggcagggcaaagaaaggattagaccagaggatttaggatgcctccttctaagaaccagaagttctcattccccattatgaactgagctataatatggagctttcataaaaatgggatgcattgaggacagaactagtgatgggagtatgcgtagctttgatttggatgattaggtctttaatagtgttgagtggcacaaccttgtaaatgtgaaagtacaactcgtatttatctctgatgtgctgctggctgaactttgggttcatttggggtcaaagccagtttttcttttaaaattgaattcattctgatgcttggcccccatacccccaaccttgtccagtggagcccaacttctaaaggtcaatatatcatcctttggcatcccaactaacaataaagagtaggctataagggaagattgtcaatattttgtggtaagaaaagctacagtcattttttctttgcactttggatgctgaaatttttcccatggaacatagccacatctagatagatgtgagctttttcttctgttaaaattattcttaatgtctgtaaaaacgattttcttctgtagaatgtttgacttcgtattgacccttatctgtaaaacacctatttgggataatatttggaaaaaaagtaaatagctttttcaaaatgaa

SEQ ID NO: 333921 - DNA, 3080 bp, Artificial Sequence
  derived and/or modified sequence
gaagtgagtagtgggggtgccagaccaggtgcgtctgccgctggattgtgataggaagcagagtgttcgtgtgaaagatggatactatgatgctgaatgtgcggaatctgtttgagcagcttgtgcgccgggtggagattctcagtgaaggaaatgaagtccaatttatccagttggcgaaggactttgaggatttccgtaaaaagtggcagaggactgaccatgagctggggaaatacaaggatcttttgatgaaagcagagactgagcgaagtgctctggatgttaagctgaagcatgcacgtaatcaggtggatgtagagatcaaacggagacagagagctgaggctgactgcgaaaagctggaacgacagattcagctgattcgagagatgctcatgtgtgacacatctggcagcattcaactaagcgaggagcaaaaatcagctctggcttttctcaacagaggccaaccatccagcagcaatgctgggaacaaaagactatcaaccattgatgaatctggttccattttatcagatatcagctttgacaagactgatgaatcactggattgggactcttctttggtgaagactttcaaactgaagaagagagaaaagaggcgctctactagccgacagtttgttgatggtccccctggacctgtaaagaaaactcgttccattggctctgcagtagaccaggggaatgaatccatagttgcaaaaactacagtgactgttcccaatgatggcgggcccatcgaagctgtgtccactattgagactgtgccatattggaccaggagccgaaggaaaacaggtactttacaaccttggaacagtgactccaccctgaacagcaggcagctggagccaagaactgagacagacagtgtgggcacgccacagagtaatggagggatgcgcctgcatgactttgtttctaagacggttattaaacctgaatcctgtgttccatgtggaaagcggataaaatttggcaaattatctctgaagtgtcgagactgtcgtgtggtctctcatccagaatgtcgggaccgctgtccccttccctgcattcctaccctgataggaacacctgtcaagattggagagggaatgctggcagactttgtgtcccagacttctccaatgatcccctccattgttgtgcattgtgtaaatgagattgagcaaagaggtctgactgagacaggcctgtataggatctctggctgtgaccgcacagtaaaagagctgaaagagaaattcctcagagtgaaaactgtacccctcctcagcaaagtggatgatatccatgctatctgtagccttctaaaagactttcttcgaaacctcaaagaacctcttctgacctttcgccttaacagagcctttatggaagcagcagaaatcacagatgaagacaacagcatagctgccatgtaccaagctgttggtgaactgccccaggccaacagggacacattagctttcctcatgattcacttgcagagagtggctcagagtccacatactaaaatggatgttgccaatctggctaaagtctttggccctacaatagtggcccatgctgtgcccaatccagacccagtgacaatgttacaggacatcaagcgtcaacccaaggtggttgagcgcctgctttccttgcctctggagtattggagtcagttcatgatggtggagcaagagaacattgaccccctacatgtcattgaaaactcaaatgccttttcaacaccacagacaccagatattaaagtgagtttactgggacctgtgaccactcctgaacatcagcttctcaagactccttcatctagttccctgtcacagagagtccgttccaccctcaccaagaacactcctagatttgggagcaaaagcaagtctgccactaacctaggacgacaaggcaacttttttgcttctccaatgctcaagtgaagtcacatctgcctgttacttcccagcattgactgactataagaaaggacacatctgtactctgctctgcagcctcctgtactcattactacttttagcattctccaggcttttactcaagtttaattgtgcatgagggttttattaaaactatatatatctccccttccttctcctcaagtcacataatatcagcactttgtgctggtcattgttgggagcttttagatgagacatctttccaggggtagaagggttagtatggaattggttgtgattctttttggggaagggggttattgttcctttggcttaaagccaaatgctgctcatagaatgatctttctctagtttcatttagaactgatttccgtgagacaatgacagaaaccctacctatctgataagattagcttgtctcagggtgggaagtgggagggcagggcaaagaaaggattagaccagaggatttaggatgcctccttctaagaaccagaagttctcattccccattatgaactgagctataatatggagctttcataaaaatgggatgcattgaggacagaactagtgatgggagtatgcgtagctttgatttggatgattaggtctttaatagtgttgagtggcacaaccttgtaaatgtgaaagtacaactcgtatttatctctgatgtgctgctggctgaactttgggttcatttggggtcaaagccagtttttcttttaaaattgaattcattctgatgcttggcccccatacccccaaccttgtccagtggagcccaacttctaaaggtcaatatatcatcctttggcatcccaactaacaataaagagtaggctataagggaagattgtcaatattttgtggtaagaaaagctacagtcattttttctttgcactttggatgctgaaatttttcccatggaacatagccacatctagatagatgtgagctttttcttctgttaaaattattcttaatgtctgtaaaaacgattttcttctgtagaatgtttgacttcgtattgacccttatctgtaaaacacctatttgggataatatttggaaaaaaagtaaatagctttttcaaaatg

SEQ ID NO: 333922 - DNA, 581 bp, Artificial Sequence
  derived and/or modified sequence
ggagctgtgggcgcggcgctgctctgccgttgggtgaggcgcggagcgaagtgaagggtggcccaggtggggccaggctgactgaagagagccaaaggaaatcaacatttgaattgactacccaatgtcctgcccctgtttctgtcctgtagcacttaggaaagatggatactatgatgctgaatgtgcggaatctgtttgagcagcttgtgcgccgggtggagattctcagtgaaggaaatgaagtccaatttatccagttggcgaaggactttgaggatttccgtaaaaagtggcagaggactgaccatgagctggggaaatacaaggatcttttgatgaaagcagagactgagcgaagtgctctggatgttaagctgaagcatgcacgtaatcaggtggatgtagagatcaaacggagacagagagctgaggctgactgcgaaaagctggaacgacagattcagctgattcgagagatgctcatgtgtgacacatctggcagcattcaactaagcgaggagcaaaaatcagctctggcttttctcaacagaggccaaccatccagcagcaatgctggg

SEQ ID NO: 333923 - DNA, 2190 bp, Artificial Sequence
  derived and/or modified sequence
gttttcaaaccggagctgtgggcgcggcgctgctctgccgttgggtgaggcgcggagcgaagtgaagggtggcccaggtggggccaggctgactgaatgtatctcctagctatggactaaataatacatggggggaaataaacaagtattcatgagggtgaaaatgtgacccagcaggaaaattacaactattttcaattgacgttgaatagggagagccaaaggaaatcaacatttgaattgactacccaatgtcctgcccctgtttctgtcctgtagcacttaggaaagatggatactatgatgctgaatgtgcggaatctgtttgagcagcttgtgcgccgggtggagattctcagtgaaggaaatgaagtccaatttatccagttggcgaaggactttgaggatttccgtaaaaagtggcagaggactgaccatgagctggggaaatacaaggatcttttgatgaaagcagagactgagcgaagtgctctggatgttaagctgaagcatgcacgtaatcaggtggatgtagagatcaaacggagacagagagctgaggctgactgcgaaaagctggaacgacagattcagctgattcgagagatgctcatgtgtgacacatctggcagcattcaactaagcgaggagcaaaaatcagctctggcttttctcaacagaggccaaccatccagcagcaatgctgggaacaaaagactatcaaccattgatgaatctggttccattttatcagatatcagctttgacaagactgatgaatcactggattgggactcttctttggtgaagactttcaaactgaagaagagagaaaagaggcgctctactagccgacagtttgttgatggtccccctggacctgtaaagaaaactcgttccattggctctgcagtagaccaggggaatgaatccatagttgcaaaaactacagtgactgttcccaatgatggcgggcccatcgaagctgtgtccactattgagactgtgccatattggaccaggagccgaaggaaaacaggtactttacaaccttggaacagtgactccaccctgaacagcaggcagctggagccaagaactgagacagacagtgtgggcacgccacagagtaatggagggatgcgcctgcatgactttgtttctaagacggttattaaacctgaatcctgtgttccatgtggaaagcggataaaatttggcaaattatctctgaagtgtcgagactgtcgtgtggtctctcatccagaatgtcgggaccgctgtccccttccctgcattcctaccctgataggaacacctgtcaagattggagagggaatgctggcagactttgtgtcccagacttctccaatgatcccctccattgttgtgcattgtgtaaatgagattgagcaaagaggtctgactgagacaggcctgtataggatctctggctgtgaccgcacagtaaaagagctgaaagagaaattcctcagagtgaaaactgtacccctcctcagcaaagtggatgatatccatgctatctgtagccttctaaaagactttcttcgaaacctcaaagaacctcttctgacctttcgccttaacagagcctttatggaagcagcagaaatcacagatgaagacaacagcatagctgccatgtaccaagctgttggtgaactgccccaggccaacagggacacattagctttcctcatgattcacttgcagagagtggctcagagtccacatactaaaatggatgttgccaatctggctaaagtctttggccctacaatagtggcccatgctgtgcccaatccagacccagtgacaatgttacaggacatcaagcgtcaacccaaggtggttgagcgcctgctttccttgcctctggagtattggagtcagttcatgatggtggagcaagagaacattgaccccctacatgtcattgaaaactcaaatgccttttcaacaccacagacaccagatattaaagtgagtttactgggacctgtgaccactcctgaacatcagcttctcaagactccttcatctagttccctgtcacagagagtccgttccaccctcaccaagaacactcctagatttgggagcaaaagcaagtctgccactaacctaggacgacaaggcaacttttttgcttctccaatgctcaagtga

SEQ ID NO: 333924 - DNA, 586 bp, Artificial Sequence
  derived and/or modified sequence
agtgaagggtggcccaggtggggccaggctgactgaagtgagtagtgggggtgccagaccagatggatactatgatgctgaatgtgcggaatctgtttgagcagcttgtgcgccgggtggagattctcagtgaaggaaatgaagtccaatttatccagttggcgaaggactttgaggatttccgtaaaaagtggcagaggactgaccatgagctggggaaatacaaggatcttttgatgaaagcagagactgagcgaagtgctctggatgttaagctgaagcatgcacgtaatcaggtggatgtagagatcaaacggagacagagagctgaggctgactgcgaaaagctggaacgacagattcagctgattcgagagatgctcatgtgtgacacatctggcagcattcaactaagcgaggagcaaaaatcagctctggcttttctcaacagaggccaaccatccagcagcaatgctgggaacaaaagactatcaaccattgatgaatctggttccattttatcagatatcagctttgacaagactgatgaatcactggattgggactcttctttggtgaagacttt

SEQ ID NO: 333925 - DNA, 570 bp, Artificial Sequence
  derived and/or modified sequence
aagtgaagggtggcccaggtggggccaggctgactgaagtgagtagtgggggtgccagaccagtgtatctcctagctatggactaaataatacatggggggaaataaacaagtattcatgagggtgaaaatgtgacccagcaggaaaattacaactattttcaattgacgttgaataggaaagatggatactatgatgctgaatgtgcggaatctgtttgagcagcttgtgcgccgggtggagattctcagtgaaggaaatgaagtccaatttatccagttggcgaaggactttgaggatttccgtaaaaagtggcagaggactgaccatgagctggggaaatacaaggatcttttgatgaaagcagagactgagcgaagtgctctggatgttaagctgaagcatgcacgtaatcaggtggatgtagagatcaaacggagacagagagctgaggctgactgcgaaaagctggaacgacagattcagctgattcgagagatgctcatgtgtgacacatctggcagcattcaactaagcgaggagcaaaaatcagctctggcttttctcaac

SEQ ID NO: 333926 - DNA, 551 bp, Artificial Sequence
  derived and/or modified sequence
gttttcaaaccggagctgtgggcgcggcgctgctctgccgttgggtgaggcgcggagcgaagtgaagggtggcccaggtggggccaggctgactgaatgtatctcctagctatggactaaataatacatggggggaaataaacaagtattcatgagggtgaaaatgtgacccagcaggaaaattacaactattttcaattgacgttgaataggaaagatggatactatgatgctgaatgtgcggaatctgtttgagcagcttgtgcgccgggtggagattctcagtgaaggaaatgaagtccaatttatccagttggcgaaggactttgaggatttccgtaaaaagtggcagaggactgaccatgagctggggaaatacaaggatcttttgatgaaagcagagactgagcgaagtgctctggatgttaagctgaagcatgcacgtaatcaggtggatgtagagatcaaacggagacagagagctgaggctgactgcgaaaagctggaacgacagattcagctgattcgagagatgctcatgtgtgacacat

SEQ ID NO: 333927 - DNA, 2193 bp, Artificial Sequence
  derived and/or modified sequence
gaaagatggatactatgatgctgaatgtgcggaatctgtttgagcagcttgtgcgccgggtggagattctcagtgaaggaaatgaagtccaatttatccagttggcgaaggactttgaggatttccgtaaaaagtggcagaggactgaccatgagctggggaaatacaaggatcttttgatgaaagcagagactgagcgaagtgctctggatgttaagctgaagcatgcacgtaatcaggtggatgtagagatcaaacggagacagagagctgaggctgactgcgaaaagctggaacgacagattcagctgattcgagagatgctcatgtgtgacacatctggcagcattcaactaagcgaggagcaaaaatcagctctggcttttctcaacagaggccaaccatccagcagcaatgctgggaacaaaagactatcaaccattgatgaatctggttccattttatcagatatcagctttgacaagactgatgaatcactggattgggactcttctttggtgaagactttcaaactgaagaagagagaaaagaggcgctctactagccgacagtttgttgatggtccccctggacctgtaaagaaaactcgttccattggctctgcagtagaccaggggaatgaatccatagttgcaaaaactacagtgactgttcccaatgatggcgggcccatcgaagctgtgtccactattgagactgtgccatattggaccaggagccgaaggaaaacaggtactttacaaccttggaacagtgactccaccctgaacagcaggcagctggagccaagaactgagacagacagtgtgggcacgccacagagtaatggagggatgcgcctgcatgactttgtttctaagacggttattaaacctgaatcctgtgttccatgtggaaagcggataaaatttggcaaattatctctgaagtgtcgagactgtcgtgtggtctctcatccagaatgtcgggaccgctgtccccttccctgcattcctaccctgataggaacacctgtcaagattggagagggaatgctggcagactttgtgtcccagacttctccaatgatcccctccattgttgtgcattgtgtaaatgagattgagcaaagaggtctgactgagacaggcctgtataggatctctggctgtgaccgcacagtaaaagagctgaaagagaaattcctcagagtgaaaactgtacccctcctcagcaaagtggatgatatccatgctatctgtagccttctaaaagactttcttcgaaacctcaaagaacctcttctgacctttcgccttaacagagcctttatggaagcagcagaaatcacagatgaagacaacagcatagctgccatgtaccaagctgttggtgaactgccccaggccaacagggacacattagctttcctcatgattcacttgcagagagtggctcagagtccacatactaaaatggatgttgccaatctggctaaagtctttggccctacaatagtggcccatgctgtgcccaatccagacccagtgacaatgttacaggacatcaagcgtcaacccaaggtggttgagcgcctgctttccttgcctctggagtattggagtcagttcatgatggtggagcaagagaacattgaccccctacatgtcattgaaaactcaaatgccttttcaacaccacagacaccagatattaaagtgagtttactgggacctgtgaccactcctgaacatcagcttctcaagactccttcatctagttccctgtcacagagagtccgttccaccctcaccaagaacactcctagatttgggagcaaaagcaagtctgccactaacctaggacgacaaggcaacttttttgcttctccaatgctcaagtgaagtcacatctgcctgttacttcccagcattgactgactataagaaaggacacatctgtactctgctctgcagcctcctgtactcattactacttttagcattctccaggcttttactcaagtttaattgtgcatgagggttttattaaaactatatatatctccccttccttctcctcaagtcacataatatcagcactttgtgctggtcattgttgggagcttttagatgagacatctttccaggggtagaagggttagtatggaattggttgtgattctttttgggg

SEQ ID NO: 333928 - DNA, 539 bp, Artificial Sequence
  derived and/or modified sequence
aaactggcaaaattattatattaatcaataggcttgacttgaagaaccacattttcttgttggtcagtcacttgctaatgaactgacatgctctttcctatttgttttctgctccaagtgattggaggggctgttatattcaaagaaagatggatactatgatgctgaatgtgcggaatctgtttgagcagcttgtgcgccgggtggagattctcagtgaaggaaatgaagtccaatttatccagttggcgaaggactttgaggatttccgtaaaaagtggcagaggactgaccatgagctggggaaatacaaggatcttttgatgaaagcagagactgagcgaagtgctctggatgttaagctgaagcatgcacgtaatcaggtggatgtagagatcaaacggagacagagagctgaggctgactgcgaaaagctggaacgacagattcagctgattcgagagatgctcatgtgtgacacatctggcagcattcaactaagcgaggagcaaaaatcagctctggcttttctcaacaga

SEQ ID NO: 333929 - DNA, 530 bp, Artificial Sequence
  derived and/or modified sequence
aaaccggagctgtgggcgcggcgctgctctgccgttgggtgaggcgcggagcgaagtgaagggtggcccaggtggggccaggctgactgaatgtatctcctagctatggactaaataatacatggggggaaataaacaagtattcatgagggtgaaaatgtgacccagcaggaaaattacaactattttcaattgacgttgaataggatggatactatgatgctgaatgtgcggaatctgtttgagcagcttgtgcgccgggtggagattctcagtgaaggaaatgaagtccaatttatccagttggcgaaggactttgaggatttccgtaaaaagtggcagaggactgaccatgagctggggaaatacaaggatcttttgatgaaagcagagactgagcgaagtgctctggatgttaagctgaagcatgcacgtaatcaggtggatgtagagatcaaacggagacagagagctgaggctgactgcgaaaagctggaacgacagattcagctgattcgagagatgctcat

SEQ ID NO: 333930 - DNA, 563 bp, Artificial Sequence
  derived and/or modified sequence
gtacgtcacaccgtagagggacggcgcgggaggaataaatttctctgtgattggttggtgaaggttttcaaaccggagctgtgggcgcggcgctgctctgccgttggaaagatggatactatgatgctgaatgtgcggaatctgtttgagcagcttgtgcgccgggtggagattctcagtgaaggaaatgaagtccaatttatccagttggcgaaggactttgaggatttccgtaaaaagtggcagaggactgaccatgagctggggaaatacaaggatcttttgatgaaagcagagactgagcgaagtgctctggatgttaagctgaagcatgcacgtaatcaggtggatgtagagatcaaacggagacagagagctgaggctgactgcgaaaagctggaacgacagattcagctgattcgagagatgctcatgtgtgacacatctggcagcattcaactaagcgaggagcaaaaatcagctctggcttttctcaacagaggccaaccatccagcagcaatgctgggaacaaaagactatcaaccattgatgaatctggttc

SEQ ID NO: 333931 - DNA, 3073 bp, Artificial Sequence
  derived and/or modified sequence
tctgccgttgggtgaggcgcggagcgaagtgaagggtggcccaggtggggccaggctgactgaaaaagatggatactatgatgctgaatgtgcggaatctgtttgagcagcttgtgcgccgggtggagattctcagtgaaggaaatgaagtccaatttatccagttggcgaaggactttgaggatttccgtaaaaagtggcagaggactgaccatgagctggggaaatacaaggatcttttgatgaaagcagagactgagcgaagtgctctggatgttaagctgaagcatgcacgtaatcaggtggatgtagagatcaaacggagacagagagctgaggctgactgcgaaaagctggaacgacagattcagctgattcgagagatgctcatgtgtgacacatctggcagcattcaactaagcgaggagcaaaaatcagctctggcttttctcaacagaggccaaccatccagcagcaatgctgggaacaaaagactatcaaccattgatgaatctggttccattttatcagatatcagctttgacaagactgatgaatcactggattgggactcttctttggtgaagactttcaaactgaagaagagagaaaagaggcgctctactagccgacagtttgttgatggtccccctggacctgtaaagaaaactcgttccattggctctgcagtagaccaggggaatgaatccatagttgcaaaaactacagtgactgttcccaatgatggcgggcccatcgaagctgtgtccactattgagactgtgccatattggaccaggagccgaaggaaaacaggtactttacaaccttggaacagtgactccaccctgaacagcaggcagctggagccaagaactgagacagacagtgtgggcacgccacagagtaatggagggatgcgcctgcatgactttgtttctaagacggttattaaacctgaatcctgtgttccatgtggaaagcggataaaatttggcaaattatctctgaagtgtcgagactgtcgtgtggtctctcatccagaatgtcgggaccgctgtccccttccctgcattcctaccctgataggaacacctgtcaagattggagagggaatgctggcagactttgtgtcccagacttctccaatgatcccctccattgttgtgcattgtgtaaatgagattgagcaaagaggtctgactgagacaggcctgtataggatctctggctgtgaccgcacagtaaaagagctgaaagagaaattcctcagagtgaaaactgtacccctcctcagcaaagtggatgatatccatgctatctgtagccttctaaaagactttcttcgaaacctcaaagaacctcttctgacctttcgccttaacagagcctttatggaagcagcagaaatcacagatgaagacaacagcatagctgccatgtaccaagctgttggtgaactgccccaggccaacagggacacattagctttcctcatgattcacttgcagagagtggctcagagtccacatactaaaatggatgttgccaatctggctaaagtctttggccctacaatagtggcccatgctgtgcccaatccagacccagtgacaatgttacaggacatcaagcgtcaacccaaggtggttgagcgcctgctttccttgcctctggagtattggagtcagttcatgatggtggagcaagagaacattgaccccctacatgtcattgaaaactcaaatgccttttcaacaccacagacaccagatattaaagtgagtttactgggacctgtgaccactcctgaacatcagcttctcaagactccttcatctagttccctgtcacagagagtccgttccaccctcaccaagaacactcctagatttgggagcaaaagcaagtctgccactaacctaggacgacaaggcaacttttttgcttctccaatgctcaagtgaagtcacatctgcctgttacttcccagcattgactgactataagaaaggacacatctgtactctgctctgcagcctcctgtactcattactacttttagcattctccaggcttttactcaagtttaattgtgcatgagggttttattaaaactatatatatctccccttccttctcctcaagtcacataatatcagcactttgtgctggtcattgttgggagcttttagatgagacatctttccaggggtagaagggttagtatggaattggttgtgattctttttggggaagggggttattgttcctttggcttaaagccaaatgctgctcatagaatgatctttctctagtttcatttagaactgatttccgtgagacaatgacagaaaccctacctatctgataagattagcttgtctcagggtgggaagtgggagggcagggcaaagaaaggattagaccagaggatttaggatgcctccttctaagaaccagaagttctcattccccattatgaactgagctataatatggagctttcataaaaatgggatgcattgaggacagaactagtgatgggagtatgcgtagctttgatttggatgattaggtctttaatagtgttgagtggcacaaccttgtaaatgtgaaagtacaactcgtatttatctctgatgtgctgctggctgaactttgggttcatttggggtcaaagccagtttttcttttaaaattgaattcattctgatgcttggcccccatacccccaaccttgtccagtggagcccaacttctaaaggtcaatatatcatcctttggcatcccaactaacaataaagagtaggctataagggaagattgtcaatattttgtggtaagaaaagctacagtcattttttctttgcactttggatgctgaaatttttcccatggaacatagccacatctagatagatgtgagctttttcttctgttaaaattattcttaatgtctgtaaaaacgattttcttctgtagaatgtttgacttcgtattgacccttatctgtaaaacacctatttgggataatatttggaaaaaaagtaaatagctttttcaaaatgaa

SEQ ID NO: 333932 - protein, 632 aa, Artificial Sequence
  derived and/or modified sequence
MDTMMLNVRNLFEQLVRRVEILSEGNEVQFIQLAKDFEDFRKKWQRTDHELGKYKDLLMKAETERSALDVKLKHARNQVDVEIKRRQRAEADCEKLERQIQLIREMLMCDTSGSIQLSEEQKSALAFLNRGQPSSSNAGNKRLSTIDESGSILSDISFDKTDESLDWDSSLVKTFKLKKREKRRSTSRQFVDGPPGPVKKTRSIGSAVDQGNESIVAKTTVTVPNDGGPIEAVSTIETVPYWTRSRRKTGTLQPWNSDSTLNSRQLEPRTETDSVGTPQSNGGMRLHDFVSKTVIKPESCVPCGKRIKFGKLSLKCRDCRVVSHPECRDRCPLPCIPTLIGTPVKIGEGMLADFVSQTSPMIPSIVVHCVNEIEQRGLTETGLYRISGCDRTVKELKEKFLRVKTVPLLSKVDDIHAICSLLKDFLRNLKEPLLTFRLNRAFMEAAEITDEDNSIAAMYQAVGELPQANRDTLAFLMIHLQRVAQSPHTKMDVANLAKVFGPTIVAHAVPNPDPVTMLQDIKRQPKVVERLLSLPLEYWSQFMMVEQENIDPLHVIENSNAFSTPQTPDIKVSLLGPVTTPEHQLLKTPSSSSLSQRVRSTLTKNTPRFGSKSKSATNLGRQGNFFASPMLK

SEQ ID NO: 333933 - protein, 139 aa, Artificial Sequence
  derived and/or modified sequence
MDTMMLNVRNLFEQLVRRVEILSEGNEVQFIQLAKDFEDFRKKWQRTDHELGKYKDLLMKAETERSALDVKLKHARNQVDVEIKRRQRAEADCEKLERQIQLIREMLMCDTSGSIQLSEEQKSALAFLNRGQPSSSNAG

SEQ ID NO: 333934 - protein, 129 aa, Artificial Sequence
  derived and/or modified sequence
MDTMMLNVRNLFEQLVRRVEILSEGNEVQFIQLAKDFEDFRKKWQRTDHELGKYKDLLMKAETERSALDVKLKHARNQVDVEIKRRQRAEADCEKLERQIQLIREMLMCDTSGSIQLSEEQKSALAFLN

SEQ ID NO: 333935 - protein, 111 aa, Artificial Sequence
  derived and/or modified sequence
MDTMMLNVRNLFEQLVRRVEILSEGNEVQFIQLAKDFEDFRKKWQRTDHELGKYKDLLMKAETERSALDVKLKHARNQVDVEIKRRQRAEADCEKLERQIQLIREMLMCDT

SEQ ID NO: 333936 - protein, 130 aa, Artificial Sequence
  derived and/or modified sequence
MDTMMLNVRNLFEQLVRRVEILSEGNEVQFIQLAKDFEDFRKKWQRTDHELGKYKDLLMKAETERSALDVKLKHARNQVDVEIKRRQRAEADCEKLERQIQLIREMLMCDTSGSIQLSEEQKSALAFLNR

SEQ ID NO: 333937 - DNA, 468 bp, Artificial Sequence
  derived and/or modified sequence
atggacaccatgatgctgaacgtgagaaacctgttcgagcagctggtgagaagagtggagatcctgagcgagggcaacgaggtgcagttcatccagctggccaaggacttcgaggacttcagaaagaagtggcagagaaccgaccacgagctgggcaagtacaaggacctgctgatgaaggccgagaccgagagaagcgccctggacgtgaagctgaagcacgccagaaaccaggtggacgtggagatcaagagaagacagagagccgaggccgactgcgagaagctggagagacagatccagctgatcagagagatgctgatgtgcgacaccagcggcagcatccagctgagcgaggagcagaagagcgccctggccttcctgaacagaggccagcccagcagcagcaacgccggcaacaagagactgagcaccatcgacgagagcggcagcatcctgagcgactag

SEQ ID NO: 333938 - DNA, 420 bp, Artificial Sequence
  derived and/or modified sequence
atggacaccatgatgctgaacgtgagaaacctgttcgagcagctggtgagaagagtggagatcctgagcgagggcaacgaggtgcagttcatccagctggccaaggacttcgaggacttcagaaagaagtggcagagaaccgaccacgagctgggcaagtacaaggacctgctgatgaaggccgagaccgagagaagcgccctggacgtgaagctgaagcacgccagaaaccaggtggacgtggagatcaagagaagacagagagccgaggccgactgcgagaagctggagagacagatccagctgatcagagagatgctgatgtgcgacaccagcggcagcatccagctgagcgaggagcagaagagcgccctggccttcctgaacagaggccagcccagcagcagcaacgccggctag

SEQ ID NO: 333939 - DNA, 525 bp, Artificial Sequence
  derived and/or modified sequence
atggacaccatgatgctgaacgtgagaaacctgttcgagcagctggtgagaagagtggagatcctgagcgagggcaacgaggtgcagttcatccagctggccaaggacttcgaggacttcagaaagaagtggcagagaaccgaccacgagctgggcaagtacaaggacctgctgatgaaggccgagaccgagagaagcgccctggacgtgaagctgaagcacgccagaaaccaggtggacgtggagatcaagagaagacagagagccgaggccgactgcgagaagctggagagacagatccagctgatcagagagatgctgatgtgcgacaccagcggcagcatccagctgagcgaggagcagaagagcgccctggccttcctgaacagaggccagcccagcagcagcaacgccggcaacaagagactgagcaccatcgacgagagcggcagcatcctgagcgacatcagcttcgacaagaccgacgagagcctggactgggacagcagcctggtgaagacctag

SEQ ID NO: 333940 - DNA, 390 bp, Artificial Sequence
  derived and/or modified sequence
atggacaccatgatgctgaacgtgagaaacctgttcgagcagctggtgagaagagtggagatcctgagcgagggcaacgaggtgcagttcatccagctggccaaggacttcgaggacttcagaaagaagtggcagagaaccgaccacgagctgggcaagtacaaggacctgctgatgaaggccgagaccgagagaagcgccctggacgtgaagctgaagcacgccagaaaccaggtggacgtggagatcaagagaagacagagagccgaggccgactgcgagaagctggagagacagatccagctgatcagagagatgctgatgtgcgacaccagcggcagcatccagctgagcgaggagcagaagagcgccctggccttcctgaactag

SEQ ID NO: 333941 - DNA, 336 bp, Artificial Sequence
  derived and/or modified sequence
atggacaccatgatgctgaacgtgagaaacctgttcgagcagctggtgagaagagtggagatcctgagcgagggcaacgaggtgcagttcatccagctggccaaggacttcgaggacttcagaaagaagtggcagagaaccgaccacgagctgggcaagtacaaggacctgctgatgaaggccgagaccgagagaagcgccctggacgtgaagctgaagcacgccagaaaccaggtggacgtggagatcaagagaagacagagagccgaggccgactgcgagaagctggagagacagatccagctgatcagagagatgctgatgtgcgacacctag

SEQ ID NO: 333942 - DNA, 393 bp, Artificial Sequence
  derived and/or modified sequence
atggacaccatgatgctgaacgtgagaaacctgttcgagcagctggtgagaagagtggagatcctgagcgagggcaacgaggtgcagttcatccagctggccaaggacttcgaggacttcagaaagaagtggcagagaaccgaccacgagctgggcaagtacaaggacctgctgatgaaggccgagaccgagagaagcgccctggacgtgaagctgaagcacgccagaaaccaggtggacgtggagatcaagagaagacagagagccgaggccgactgcgagaagctggagagacagatccagctgatcagagagatgctgatgtgcgacaccagcggcagcatccagctgagcgaggagcagaagagcgccctggccttcctgaacagatag

SEQ ID NO: 333943 - DNA, 324 bp, Artificial Sequence
  derived and/or modified sequence
atggacaccatgatgctgaacgtgagaaacctgttcgagcagctggtgagaagagtggagatcctgagcgagggcaacgaggtgcagttcatccagctggccaaggacttcgaggacttcagaaagaagtggcagagaaccgaccacgagctgggcaagtacaaggacctgctgatgaaggccgagaccgagagaagcgccctggacgtgaagctgaagcacgccagaaaccaggtggacgtggagatcaagagaagacagagagccgaggccgactgcgagaagctggagagacagatccagctgatcagagagatgctgtag

SEQ ID NO: 333944 - DNA, 885 bp, Artificial Sequence
  derived and/or modified sequence
atggacaccatgatgctgaacgtgagaaacctgttcgagcagctggtgagaagagtggagatcctgagcgagggcaacgaggtgcagttcatccagctggccaaggacttcgaggacttcagaaagaagtggcagagaaccgaccacgagctgggcaagtacaaggacctgctgatgaaggccgagaccgagagaagcgccctggacgtgaagctgaagcacgccagaaaccaggtggacgtggagatcaagagaagacagagagccgaggccgactgcgagaagctggagagacagatccagctgatcagagagatgctgatgtgcgacaccagcggcagcatccagctgagcgaggagcagaagagcgccctggccttcctgaacagaggccagcccagcagcagcaacgccggcaacaagagactgagcaccatcgacgagagcggcagcatcctgagcgacatcagcttcgacaagaccgacgagagcctggactgggacagcagcctggtgaagaccttcaagctgaagaagagagagaagagaagaagcaccagcagacagttcgtggacggcccccccggccccgtgaagaagaccagaagcatcggcagcgccgtggaccagggcaacgagagcatcgtggccaagaccaccgtgaccgtgcccaacgacggcggccccatcgaggccgtgagcaccatcgagaccgtgccctactggaccagaagcagaagaaagaccggcaccctgcagccctggaacagcgacagcaccctgaacagcagacagctggagcccagaaccgagaccgacagcgtgggcaccccccagagcaacggcggcatgagactgcacgacttcgtgagcaagaccgtgtag

SEQ ID NO: 333945 - DNA, 456 bp, Artificial Sequence
  derived and/or modified sequence
atggacaccatgatgctgaacgtgagaaacctgttcgagcagctggtgagaagagtggagatcctgagcgagggcaacgaggtgcagttcatccagctggccaaggacttcgaggacttcagaaagaagtggcagagaaccgaccacgagctgggcaagtacaaggacctgctgatgaaggccgagaccgagagaagcgccctggacgtgaagctgaagcacgccagaaaccaggtggacgtggagatcaagagaagacagagagccgaggccgactgcgagaagctggagagacagatccagctgatcagagagatgctgatgtgcgacaccagcggcagcatccagctgagcgaggagcagaagagcgccctggccttcctgaacagaggccagcccagcagcagcaacgccggcaacaagagactgagcaccatcgacgagagcggcagctag

SEQ ID NO: 333946 - DNA, 1899 bp, Artificial Sequence
  derived and/or modified sequence
atggatacgatgatgctgaatgtaaggaatttgtttgaacaactggtccgaagagttgaaattttgtccgagggtaatgaagtacagtttatccagctagccaaggatttcgaggacttccggaaaaaatggcaacgcactgatcacgaattgggcaagtacaaagacctcctaatgaaagccgaaacagagcggagtgccctggatgtgaagctcaagcatgctcggaaccaggtggacgtcgagataaaaaggagacagcgggctgaagctgactgcgaaaaactggaacgtcagattcaactgattcgggagatgcttatgtgcgacacaagcgggagtatccagctcagcgaggaacaaaagtctgcgctggcattcctgaatcgagggcaaccaagctccagcaacgctggcaacaagagactgtccactatagatgagtctggatctattctgtccgatataagctttgacaagactgacgagagcctggattgggactcgtcgctggtgaagacttttaagctgaagaagagagagaagagaagaagcacctcaagacagttcgtggatggcccacctgggcctgttaagaaaacccgcagtattggaagcgccgtcgaccaagggaatgagtccattgtggcaaagactaccgttaccgtccccaacgatggggggcccatcgaggcagtttctactattgaaacggtgccatactggactaggagcagaagaaagacaggaaccctccaaccatggaattccgactctactctcaacagtcgccagcttgagcccaggactgaaaccgattctgtggggaccccacagtctaacgggggtatgcggttacacgactttgtgtccaagactgttatcaagcctgaaagttgcgtgccctgtgggaaaaggatcaaattcgggaagctatccttgaaatgcagagactgcagagtggtctcccatcccgaatgtcgggacaggtgccccttgccgtgtatccccaccctgattggcacacccgtcaaaatcggggagggcatgcttgccgacttcgtctctcaaacgtctccaatgatcccgtcaatcgtcgttcattgtgttaatgaaatagaacaaagaggcttgaccgagaccggcctctatcggattagtggctgtgatcggacagtgaaggaactgaaggagaaattcttgagagtcaagactgtgcccttactgagtaaggtcgacgacatacacgcgatttgcagtttgttaaaggactttctccgcaatctgaaggaacctctcctgacattccggcttaatagagcattcatggaggcagcggaaatcacggacgaagacaattccatcgccgcaatgtatcaggcagtcggtgaactaccacaggcgaaccgcgataccctggccttcctgatgatccatcttcagcgtgtggcccagtctccacacacaaaaatggacgtggctaatttagccaaggtgttcggccctacaattgtcgcacacgcggtcccaaatccagatcctgtcaccatgttgcaggacattaagaggcagcccaaggtggtagaacgattgctgagcctccccctggaatattggagtcaattcatgatggtggagcaggagaatattgaccccctccacgtgatagaaaacagtaatgctttctccacaccccagacacccgatataaaagtgtccctgctgggccccgtgacaacccccgaacaccagctactgaagaccccttcttcgagctctctgagccagagggtgcggtctacattaactaagaatacccctagatttggtagtaagtctaagagcgccactaacctcggtcgccagggcaatttcttcgcctcccccatgctaaaatag

SEQ ID NO: 333947 - DNA, 1899 bp, Artificial Sequence
  derived and/or modified sequence
atggacactatgatgctcaatgtgaggaacctgttcgaacagctggttcggagagtagaaatcttgagcgaaggtaacgaggtccagttcatacagctggccaaagacttcgaagattttaggaagaagtggcagcgcacagatcatgagcttggcaagtataaagacctgctcatgaaagccgagacagagcgatctgctctggacgtgaaacttaaacacgccagaaatcaagtggatgttgaaattaagcggcgccagagggccgaggccgactgtgagaaacttgaaaggcaaatacagctgatccgagagatgctgatgtgcgatacaagcggatctatccaactgtccgaagagcagaaatcagcactcgctttcttgaaccgcgggcagccttcgtcctcaaatgctggtaacaaacgcttgtccaccatagacgaaagcggctctattcttagtgacatcagtttcgacaagaccgacgagtccctcgactgggacagttcactggtgaagacattcaaacttaaaaaaagggaaaagcgccgctcaacatcccggcagtttgtcgatggtccccctgggcccgtgaaaaagaccagaagcatcggaagcgcagttgatcaggggaacgagtccatcgtggctaagaccacagttaccgttcctaacgacggcgggccaatagaggctgtatctacaattgagacggttccatattggacccgaagccggaggaagaccgggacactccaaccatggaactccgacagtactctgaattcgcggcagctggaaccaaggaccgaaactgattctgtcggaacaccccaatccaatggcggaatgcggcttcacgattttgtttccaaaacagtgatcaaaccggaatcctgcgtgccatgcggcaagaggattaagtttgggaaactgagccttaagtgccgcgattgcagggtggtgtctcaccccgagtgccgcgataggtgtccattaccatgtattccgactcttatcgggacaccagtgaaaatcggagaggggatgctcgccgactttgtgtcacagaccagcccaatgattccttcaattgtggtccactgcgtcaacgagatagaacagaggggactaactgagaccggcctgtatagaatatcaggctgtgaccggacggtgaaggaattgaaagaaaagttcctgcgggtgaagacagttccgcttctctcaaaagtagacgatatccatgccatttgctctcttttgaaggacttcctaagaaacttgaaggagccactgcttacttttcgactcaaccgagcatttatggaggccgccgagataacagacgaagacaattcaatagccgctatgtaccaggccgtcggcgagttgccccaggccaaccgtgacacacttgctttcctgatgatccacctccagcgggtggcacagtcaccacacacaaaaatggatgtggccaatttagccaaggttttcggtcctacaattgtggcccacgcagtccctaatccagaccccgtcaccatgcttcaggacatcaaaagacaacctaaagttgtggagcggttgctgtccctccctcttgagtactggtcacagtttatgatggtggagcaagagaacatagatcccctgcacgtcatcgagaatagtaacgcttttagcaccccccagaccccagacattaaagtttcacttctggggcccgtgacaactccagagcatcagctgctcaaaactcccagttccagctccttatcccaaagggtgcggagtaccctgaccaaaaataccccacgatttgggagtaaatctaaaagtgctacgaatttgggaaggcaggggaatttttttgctagccccatgctgaagtag

SEQ ID NO: 333948 - DNA, 1899 bp, Artificial Sequence
  derived and/or modified sequence
atggacaccatgatgctcaacgttaggaatctttttgaacagctggtcaggcgcgtggaaattctctcagaggggaatgaagtgcagtttatccagcttgccaaggacttcgaggatttcaggaaaaaatggcagaggaccgaccacgaactcggaaagtataaagacttgctgatgaaggctgaaaccgaacgctctgccctcgacgtgaaactcaaacacgcgagaaaccaggtggacgtcgaaataaaaaggcgacagagggcagaagccgactgcgagaagttggagaggcagatccaactcatcagggagatgctgatgtgcgatacttcaggctccatccagttgtccgaggaacagaagagcgcactggccttcctgaataggggacaaccctcatcgagcaatgccggcaataagcggctgtctaccatcgatgagtccggatccatcctcagcgacatcagctttgataagacagacgagagcctagactgggatagttcactggtgaagacgtttaaactcaaaaagagggaaaaacgccgctctactagccggcagtttgtggacggtccgccaggtcccgtcaaaaagacacgtagcatcggcagcgcagtcgatcagggcaacgagtccatcgtggcgaagacgaccgtgactgtcccaaacgacggaggcccaatcgaagcagtctctactatcgaaaccgttccctattggaccagatctcgccgcaagacaggcacactccagccgtggaatagcgactccacccttaactcccgccaacttgaaccgagaacggagacagactccgtgggaacaccccagagtaatggtggtatgcgcttacacgacttcgtgtctaagacggtgatcaaacctgagtcttgcgtcccatgtggaaaacggattaagtttggtaagctgtcactcaaatgtcgcgattgcagagtcgtgagtcatccagagtgtcgggaccgctgcccgctgccttgtatcccaaccctaattggaactccagtgaaaatcggcgagggcatgctggctgactttgtgagtcaaacctcccctatgatcccaagtattgtggtgcactgcgtcaatgaaatcgaacagagaggtctgactgaaaccggtctgtaccgaattagcggatgcgatcgcactgttaaagagctgaaagagaagttcctccgcgtgaaaactgtgcccctgttgtccaaagtcgacgatatccatgctatctgctctctgctcaaagatttcctgcggaatctcaaagaacctcttttgactttccgccttaaccgcgcatttatggaggccgccgagatcacagatgaagacaattctattgctgccatgtaccaggctgtaggtgagcttccccaggccaatcgggacacgcttgcttttctaatgatccacttgcagcgcgtggcccagtcaccccacactaaaatggatgtggctaatctcgccaaagtcttcgggccaacaattgtagcccatgctgtccctaaccctgaccccgtcaccatgctacaagacatcaagaggcagccaaaagttgtcgagcgtctgttgtctctgccactagagtactggagccaattcatgatggtcgaacaggagaatatagacccactgcacgtgatcgagaatagtaacgctttcagcacgccacaaacgcccgatatcaaggtgtctctgctggggccagttacaacccctgagcaccagctccttaagacacccagttcatcatcattgagccagcgcgtacggagtacattaaccaagaatacaccgcgcttcgggtctaaatctaagtctgcaacaaacctgggccgccaaggtaatttttttgcatcccctatgctcaagtag

SEQ ID NO: 333949 - DNA, 1899 bp, Artificial Sequence
  derived and/or modified sequence
atggatactatgatgctcaacgtgcgtaacctgttcgagcagctggtgcgtcgggtggagattctgtccgaagggaatgaagttcagtttattcagttagctaaagatttcgaggacttccggaagaagtggcagagaaccgatcatgagctgggcaagtataaggatctgctgatgaaagcagaaaccgagaggtcggccttagacgtcaaactgaaacacgcaagaaaccaagtggatgtggagataaaacgccgccagagggctgaagcggactgtgagaagcttgagagacagattcagctgatcagggaaatgctgatgtgcgatacatccggatccattcagctgtctgaggagcagaagtctgccctggctttcttaaacaggggacaaccaagctcaagtaacgccgggaataagagactaagcaccattgacgaaagtggttcaatcctgtcagacattagcttcgataaaaccgacgaatcactggactgggattcgagtctggtgaagactttcaagcttaagaagagggaaaagcggagatcaacaagccgccagttcgtggacggccctcctgggcctgtgaaaaagacaaggtcgatcggctccgcggtggaccagggtaatgaatccattgtagccaagacaaccgtaaccgtgccgaacgatgggggacccatcgaagccgtgtccactattgaaaccgtgccctattggaccaggtcccgacgcaagactgggacgctgcagccctggaattctgattcaaccctgaattctcgacagcttgagccaaggactgagacagattctgtcgggaccccacagtccaatggaggaatgcgtctgcatgactttgtgtcaaaaacagttatcaaaccagaaagttgcgtgccttgtggcaaacgaatcaagtttggcaaacttagccttaaatgtcgcgactgcagagtggtgtcccacccagagtgtcgcgaccggtgtccactcccctgcattcctactttgattgggacccccgtcaaaattggggaaggcatgctcgccgattttgtgagccagacatccccaatgattccgagtatcgtcgttcattgtgtcaatgagatcgagcagagaggattgactgagacggggctgtatcgcatatctggttgtgatcgaacggtaaaggagctcaaggaaaaatttctcagagtcaagacagtccccctgctaagcaaagttgatgacatccacgccatttgtagcttgctgaaagactttctccgaaatctgaaagaacctctactgactttccgtctgaacagagcgtttatggaagctgccgagattacagacgaggataacagcatcgctgccatgtatcaggccgtgggagaattgccgcaggccaaccgcgatacgctcgccttcctcatgatccacctacagagggtcgcccagagtccacacaccaagatggatgtcgccaatttagctaaggttttcggacctactatcgtcgcacatgccgtgccaaaccctgatcccgtgaccatgctgcaggatatcaaacgccagcctaaggtggtggagcgacttctttctttgcctctcgaatactggagccagtttatgatggtggaacaggagaatatcgaccccttgcatgtgatagaaaactcaaatgccttctcgaccccacagactcctgacatcaaagtatccctgctcggcccagtgacgacacctgaacatcagttgctgaagaccccttcttcttcttcactgtctcagagagtgcgtagcaccctgacaaagaatactcccagatttgggagcaaatctaagtccgcgaccaacctcgggagacaggggaatttctttgcatcccctatgctgaagtag

SEQ ID NO: 333950 - DNA, 468 bp, Artificial Sequence
  derived and/or modified sequence
atggacacaatgatgctaaatgtccggaacctcttcgagcaactagtaagaagagtagagatactcagcgaaggcaacgaggtacagttcattcagctagccaaagactttgaggactttaggaagaagtggcagcggacagaccacgagctgggcaaatacaaggacctgctgatgaaggccgaaaccgagcggagtgcactagatgtcaaactgaagcacgcacggaatcaagtggatgttgaaatcaaacgtaggcagagagcagaagctgattgcgagaagctggagcggcagatccaactgattagggaaatgttaatgtgtgatacttccggatccatacagctctccgaagagcagaaaagcgcactggcgttcctcaatcggggccagcctagtagctccaatgccggcaataaaagactgtctaccattgatgagtccgggagcatcctctccgactag

SEQ ID NO: 333951 - DNA, 420 bp, Artificial Sequence
  derived and/or modified sequence
atggacaccatgatgctcaatgtgaggaacttgtttgaacagctggtgaggcgagtggaaattttgagtgagggaaatgaggtgcagttcatccagcttgctaaggatttcgaggattttcgcaagaaatggcagagaactgaccatgagctggggaagtataaggatctccttatgaaagcggagactgaaaggtctgcacttgacgtgaagctgaaacatgctaggaatcaggtcgatgtggaaataaaacgtcggcaacgtgccgaagctgactgcgagaagctcgaaagacagattcagctgattcgagagatgctgatgtgcgatacaagtggctcaatacagttatccgaggagcaaaagagcgcccttgccttcctaaaccggggccaaccctctagctccaatgccggatag

SEQ ID NO: 333952 - DNA, 1899 bp, Artificial Sequence
  derived and/or modified sequence
atggacactatgatgctgaacgtccgcaatctgttcgaacagctagtgagaagggttgagatcctctccgaaggcaatgaagtgcagtttattcagctggccaaggactttgaagattttaggaaaaagtggcagcggaccgatcatgaactgggaaagtataaagatcttcttatgaaagctgagacggagagatccgcactggatgtgaagttgaagcatgccaggaaccaggtggacgtcgagattaaacgacggcagagggctgaggctgactgcgaaaagctcgagcgacagatccaattgataagagaaatgttgatgtgcgacacttccggaagcattcagctttcagaggagcagaagtcagctttggccttcctcaacagaggacagcccagttcaagcaatgccggtaacaaaaggctgagcacgattgacgagtctggcagcattttgagtgatatctccttcgacaagacagacgagtctctggactgggatagtagtctggtgaagacctttaagcttaagaagcgtgaaaaaaggcgctctacctccagacagtttgtagacggacctccaggccctgtgaagaagacacgctcgattgggtccgccgtcgaccaaggtaatgaatccattgtagcaaaaaccaccgttaccgttcccaatgatggggggccaatcgaagccgtgtctaccattgaaaccgtgccttattggacacgcagccgacggaagactggtactttgcaaccatggaactccgacagtaccctgaacagccggcagttggagccacgcacagagacagactccgtaggaactccccagtccaacggaggcatgcggctgcacgacttcgtcagtaagaccgtcatcaagcccgagtcctgcgtgccatgcggtaagcgcattaagtttgggaaactgtctctgaaatgccgagattgcagggtcgtgtcgcaccccgaatgtagagataggtgtccactgccttgcattccaactctgatcgggacacctgtgaagataggagaaggaatgctcgctgattttgtgagccagaccagcccaatgataccttcaattgtagtgcattgtgtcaatgaaattgaacagcgggggctgacagaaacgggcctctacaggatctcaggatgcgaccggaccgtcaaggaacttaaggaaaagttcctgagagtgaagactgtccccctcctgagcaaggtcgatgacatacatgcgatatgtagcctgttgaaagacttcttgaggaacctaaaagagccactcctgacctttcgcctgaatagagcttttatggaggcagccgaaattaccgacgaggacaactccatcgccgctatgtatcaagctgtgggggagctgccgcaggctaatcgagatacattggcctttcttatgatccacctccaacgagtggcacagtcaccccacacaaaaatggatgttgccaacctcgcaaaggtgtttggccctactattgtcgctcacgcggttccgaacccggaccctgtcactatgctgcaggatataaaaagacagcctaaagtcgtagagagactcctctcactgccactggaatactggagccagtttatgatggttgagcaagaaaacattgaccctttgcacgtgatagagaactccaacgcgttctccaccccccagacacccgatattaaggttagcttattaggacccgtcactacgccggagcatcaactgttaaagacgccctcaagctcaagcctgtcacagcgtgttcgttctactttaacaaagaacaccccgcggtttggctctaaaagcaagtccgccacgaacttaggtagacaggggaactttttcgcatcccctatgctgaagtag

SEQ ID NO: 333953 - DNA, 525 bp, Artificial Sequence
  derived and/or modified sequence
atggacactatgatgctcaatgtgaggaaccttttcgagcagcttgtaaggcgggtggaaattctgtccgaaggcaacgaagtgcagtttattcagctggctaaagatttcgaagacttccgaaaaaagtggcagaggacagaccatgaattgggaaaatacaaagacctactgatgaaggccgaaaccgaaagatctgcactggatgtgaagttaaaacatgctcgcaaccaggtagatgtagaaataaagaggagacaacgcgccgaggcagactgtgagaagctcgaacgccaaatacagctgatccgcgaaatgctgatgtgcgatacctcggggagcatccaactatccgaagaacaaaagtcagctctggctttcctgaaccgtggacagcctagcagcagtaacgcaggtaataagcggctgagtacaatcgacgaatctggcagtatcctgagcgatatcagcttcgataaaacagacgagtccctcgattgggacagttcgctggtgaagacatag

SEQ ID NO: 333954 - DNA, 390 bp, Artificial Sequence
  derived and/or modified sequence
atggacaccatgatgttgaatgtgcggaacctgtttgagcagctggtgagaagggtcgaaatcttgtccgaagggaacgaggtgcagttcatccagctggccaaggactttgaggattttcggaagaaatggcagcgcacagaccatgagctcggaaaatacaaagacttgctgatgaaggcggaaaccgagcgctctgcactggacgtgaagctgaaacacgcacgcaaccaggtggatgtcgaaatcaaaagaagacagagggccgaggcagattgcgagaaactcgagcgacagattcagcttatcagagaaatgctgatgtgtgatacttccggatccatccagttaagcgaagaacagaagtctgccctggcctttcttaactag

SEQ ID NO: 333955 - DNA, 336 bp, Artificial Sequence
  derived and/or modified sequence
atggacacaatgatgttgaacgtgcggaacctgttcgaacaactcgttcggagggttgagatattgagcgaggggaacgaggtgcagtttattcagctggctaaggacttcgaggactttcgaaaaaagtggcagagaacagaccatgagctcggaaagtacaaggatctgctgatgaaggcagagactgagcggtccgcgctggatgtgaagcttaagcatgcccggaatcaggttgatgtggagataaaacggagacagcgtgctgaggccgactgcgagaagctcgagaggcagatccaacttatccgcgagatgttgatgtgcgacacatag

SEQ ID NO: 333956 - DNA, 1899 bp, Artificial Sequence
  derived and/or modified sequence
atggatactatgatgcttaacgtccgaaatctgtttgaacagctggtaaggagagtggaaattttatctgaggggaacgaggtgcaattcatccagctcgcaaaggatttcgaggactttagaaaaaaatggcagcgaaccgatcatgagctggggaaatataaagacctactaatgaaggcagagacagagcgcagcgctcttgacgtcaagctgaagcatgctcgaaaccaggtcgatgtggagattaagcgtcggcaaagggcggaagccgactgtgagaagctagagcgccagatccagttgatcagagagatgctaatgtgcgacacctcgggaagtatccagctttccgaagagcagaaatcagctcttgctttccttaataggggccagccttcttcttccaatgctgggaacaaacgtctgtctacaatcgatgaatctggcagcattttgtccgacataagcttcgacaagacagacgagagtctggactgggacagtagtcttgttaagactttcaagctcaaaaaacgggagaagcgaaggtctacctcaagacagtttgttgacggaccgcccggtcctgtcaaaaagactaggagcatcggttctgctgttgatcagggaaacgaatcaattgtggccaagaccacggtcacggtccctaacgacggcggccccatcgaggcggtctcaaccatcgagaccgtaccttattggacccgttctcggcggaaaaccgggacactgcagccatggaatagcgactcgacccttaactcccgccagctcgaaccacgcacggaaacagactcagtaggtacgccgcagtcgaatgggggcatgcgcctgcacgactttgtttctaagacggtgatcaaacctgagtcctgtgtgccatgtggaaagaggatcaagttcggaaagctatctctcaaatgtagggactgcagggtagtcagccaccctgagtgtagagatcgatgtccactgccctgtataccgactctgattggcactcctgtgaagatcggcgagggcatgctggccgactttgtgagtcagactagcccaatgatacccagcatcgtggtgcactgcgtaaacgaaatcgagcaacggggcttaacggaaactggcttgtaccggattagcgggtgcgaccgtacggtcaaagaacttaaagagaagtttctgcgtgttaagaccgtgccgctcctgtccaaggtcgacgatatccacgcaatctgctccctactgaaagattttctccgaaacttaaaagaacccctcctaaccttccggctcaacagggcattcatggaggcagctgagattacagatgaagacaactccatcgctgccatgtaccaggccgttggggaattacctcaggcgaaccgggacacactcgccttcttaatgatccacctgcagagagtggcgcagtccccccatacaaagatggacgtggcaaaccttgccaaggttttcggaccaacaatcgtcgcccatgctgtaccgaacccggaccccgtgactatgctccaggatatcaagcggcagcctaaagtcgttgagcggctgctctcgctcccattggaatattggtcacagtttatgatggttgaacaggagaatattgatcccctgcatgtgatcgagaattcaaacgctttttctactcctcagactcccgacatcaaggttagccttctgggaccagtgacaactccagagcaccagctgctcaaaacgccatcgagttcttccctgagccagagggtgaggtcaaccttgaccaaaaacacaccacggttcggtagtaagagcaagagtgcaacaaacctggggaggcagggcaatttcttcgctagcccgatgctgaaatag

SEQ ID NO: 333957 - DNA, 393 bp, Artificial Sequence
  derived and/or modified sequence
atggatacgatgatgctgaatgttagaaacctcttcgagcagctggtgaggagagtcgagattctgagtgagggcaacgaggtgcaattcattcagctggccaaggacttcgaagacttcagaaagaaatggcaaaggacggaccacgagctgggcaagtacaaagacctcttgatgaaggccgaaacggaaaggtccgcattggacgtgaagcttaagcacgcgcggaaccaagtggatgtggagattaaacgacggcagcgcgcagaggcggattgtgaaaagctggagagacaaatccagctcattcgtgaaatgttgatgtgcgacacctctgggtccattcaactgagcgaggagcagaaaagtgccctggcattcctgaataggtag

SEQ ID NO: 333958 - DNA, 324 bp, Artificial Sequence
  derived and/or modified sequence
atggataccatgatgttgaatgttcgaaacttgtttgagcagctggttaggcgtgtcgaaatcttgtcggaggggaacgaggtgcagtttattcagctcgcgaaagacttcgaagactttagaaaaaaatggcagcgtaccgatcatgagctaggcaaatataaggacttactcatgaaggccgagaccgagagatcagccctggatgtcaagcttaaacatgcacgaaatcaggtcgacgtggaaattaagcggcggcagcgggcagaagctgactgcgaaaagttagagaggcagatccagctaattcgcgagatgctgtag

SEQ ID NO: 333959 - DNA, 885 bp, Artificial Sequence
  derived and/or modified sequence
atggacacaatgatgcttaacgtgaggaacctcttcgaacaactggtcaggcgcgttgaaatcctcagcgaaggcaatgaagtccagttcatccagctggccaaggatttcgaagacttccgcaagaagtggcaaagaacagatcacgaactgggcaagtataaggacttactcatgaaagctgaaactgagcggtcagcactcgatgtaaaattgaaacatgctcgtaatcaagtggatgtcgagatcaagcgccgccagcgcgctgaagcggattgcgagaaattggagaggcagatacagctgatcagggagatgcttatgtgcgatacatctggatctatccaactgtcagaggagcaaaagtctgcgctggcttttctcaaccgaggtcaaccctcatctagcaacgctggaaataagaggttatccaccatagacgagtctggaagcatcctgtcggatatttcattcgacaagactgacgagagtctagactgggacagttccttagttaagacatttaagttaaaaaaaagggagaaaaggagatcgaccagtaggcaattcgtcgacggcccaccggggccggtcaagaagacgcgttctataggcagcgcagttgaccagggaaacgaatctattgtcgccaagactacagtgacagttcccaacgacggaggccccatagaggcagtgagtaccatcgagaccgtgccatactggacaaggagcagacggaagactggcacactgcaaccatggaattctgatagcacgttgaattcacgccagctggagccacggacagagaccgacagtgtgggcaccccccaaagcaacggggggatgcggctgcacgatttcgtgtctaaaacagtgtag

SEQ ID NO: 333960 - DNA, 456 bp, Artificial Sequence
  derived and/or modified sequence
atggacactatgatgctgaacgtgagaaacctgttcgagcaattagttagacgggtcgagattttatccgagggcaacgaagtgcagttcatccaactcgctaaagattttgaggacttcagaaagaagtggcagcggacggaccatgagctgggaaaatataaggacctcctcatgaaggccgaaaccgaaaggtccgcgctagacgtgaaattgaagcacgctcgcaaccaggttgatgttgaaattaaaagaagacagagggcagaggccgactgcgagaagctagagagacaaattcaactcatccgcgagatgctcatgtgcgacacctctggatccatccaactcagcgaggagcagaaatctgcattggcctttctaaatcgtggccaaccctcttcttccaacgcagggaataagcggctgtctaccatagatgaatccggatcatag

SEQ ID NO: 333961 - DNA, 1899 bp, Artificial Sequence
  derived and/or modified sequence
atggacaccatgatgctgaatgtgaggaacctgtttgagcagctggtgagaagagtggagatcctgtctgagggcaatgaggtgcagttcatccagctggccaaggactttgaggacttcaggaagaagtggcagaggacagaccacgagctgggcaagtacaaggacctgctgatgaaggccgagacagagaggtctgccctggatgtgaagctgaagcacgccaggaaccaggtggatgtggagatcaagaggcggcagagagctgaggccgactgtgagaagctggagcggcagatccagctgatccgggagatgctgatgtgtgacaccagcggcagcatccagctgtctgaggagcagaagagcgccctggccttcctgaacagaggccagcccagcagcagcaatgccggcaacaagaggctgagcaccattgatgaaagtggcagcatcctgagtgacatcagctttgacaagacagatgagagcctggactgggacagcagcctggtgaagaccttcaagctgaagaagcgggagaagagaagaagcaccagccggcagtttgtggatggccccccaggccctgtgaagaagaccaggagcatcggcagcgctgtggaccagggcaatgaaagcatcgtggccaagaccaccgtgacagtgcccaatgatggcggccccatcgaggccgtgtccaccatcgagaccgtgccctactggaccaggagcaggaggaagacaggcaccctgcagccctggaacagcgacagcaccctgaacagccggcagctggagcccaggacagaaacagacagcgtgggcaccccccagagcaatggaggcatgaggctgcatgactttgtgtccaagacagtcatcaagccagagagctgtgtgccctgtgggaagaggatcaagtttgggaagctgagcctgaagtgccgggactgccgggtggtgagccaccctgagtgccgggaccgctgccccctgccctgcatccccaccctcatcggcacccctgtgaagatcggggagggcatgctggccgactttgtgtcccagaccagccccatgatccccagcatcgtggtgcactgtgtgaatgaaattgagcagaggggcctgacagaaacaggcctgtaccgcatcagcggctgtgacagaacagtgaaggagctgaaggagaagttcctgcgggtgaagacagtgcccctgctgagcaaggtggatgacatccacgccatctgcagcctgctgaaggacttcctgaggaacctgaaggagcccctgctgaccttccggctgaacagagccttcatggaggccgctgagatcacagatgaggacaacagcattgctgccatgtaccaggccgtgggggagctgccccaggccaacagagacaccctggccttcctgatgatccacctgcagagggtggcccagagcccccacaccaagatggatgtggccaacctggccaaggtgtttggccccaccatcgtggcccatgctgtgcccaacccagaccctgtgaccatgctgcaggacatcaagaggcagcccaaggtggtggagcggctgctgagcctgcccctggagtactggagccagttcatgatggtggagcaggagaacatcgaccccctgcacgtgattgagaacagcaatgccttcagcaccccccagaccccagacatcaaggtgtccctgctgggccctgtgaccaccccagagcaccagctgctgaagacccccagcagcagcagcctgagccagagggtgcgcagcaccctgaccaagaacacccccaggtttggcagcaagagcaagagcgccaccaacctgggccggcagggcaacttctttgccagccccatgctgaagtag

SEQ ID NO: 333962 - DNA, 468 bp, Artificial Sequence
  derived and/or modified sequence
atggacaccatgatgctgaatgtgaggaacctgtttgagcagctggtgagaagagtggagatcctgtctgagggcaatgaggtgcagttcatccagctggccaaggactttgaggacttcaggaagaagtggcagaggacagaccacgagctgggcaagtacaaggacctgctgatgaaggccgagacagagaggtctgccctggatgtgaagctgaagcacgccaggaaccaggtggatgtggagatcaagaggcggcagagagctgaggccgactgtgagaagctggagcggcagatccagctgatccgggagatgctgatgtgtgacaccagcggcagcatccagctgtctgaggagcagaagagcgccctggccttcctgaacagaggccagcccagcagcagcaatgccggcaacaagaggctgagcaccattgatgaaagtggcagcatcctgagtgactag

SEQ ID NO: 333963 - DNA, 420 bp, Artificial Sequence
  derived and/or modified sequence
atggacaccatgatgctgaatgtgaggaacctgtttgagcagctggtgagaagagtggagatcctgtctgagggcaatgaggtgcagttcatccagctggccaaggactttgaggacttcaggaagaagtggcagaggacagaccacgagctgggcaagtacaaggacctgctgatgaaggccgagacagagaggtctgccctggatgtgaagctgaagcacgccaggaaccaggtggatgtggagatcaagaggcggcagagagctgaggccgactgtgagaagctggagcggcagatccagctgatccgggagatgctgatgtgtgacaccagcggcagcatccagctgtctgaggagcagaagagcgccctggccttcctgaacagaggccagcccagcagcagcaatgccggctag

SEQ ID NO: 333964 - DNA, 525 bp, Artificial Sequence
  derived and/or modified sequence
atggacaccatgatgctgaatgtgaggaacctgtttgagcagctggtgagaagagtggagatcctgtctgagggcaatgaggtgcagttcatccagctggccaaggactttgaggacttcaggaagaagtggcagaggacagaccacgagctgggcaagtacaaggacctgctgatgaaggccgagacagagaggtctgccctggatgtgaagctgaagcacgccaggaaccaggtggatgtggagatcaagaggcggcagagagctgaggccgactgtgagaagctggagcggcagatccagctgatccgggagatgctgatgtgtgacaccagcggcagcatccagctgtctgaggagcagaagagcgccctggccttcctgaacagaggccagcccagcagcagcaatgccggcaacaagaggctgagcaccattgatgaaagtggcagcatcctgagtgacatcagctttgacaagacagatgagagcctggactgggacagcagcctggtgaagacctag

SEQ ID NO: 333965 - DNA, 390 bp, Artificial Sequence
  derived and/or modified sequence
atggacaccatgatgctgaatgtgaggaacctgtttgagcagctggtgagaagagtggagatcctgtctgagggcaatgaggtgcagttcatccagctggccaaggactttgaggacttcaggaagaagtggcagaggacagaccacgagctgggcaagtacaaggacctgctgatgaaggccgagacagagaggtctgccctggatgtgaagctgaagcacgccaggaaccaggtggatgtggagatcaagaggcggcagagagctgaggccgactgtgagaagctggagcggcagatccagctgatccgggagatgctgatgtgtgacaccagcggcagcatccagctgtctgaggagcagaagagcgccctggccttcctgaactag

SEQ ID NO: 333966 - DNA, 336 bp, Artificial Sequence
  derived and/or modified sequence
atggacaccatgatgctgaatgtgaggaacctgtttgagcagctggtgagaagagtggagatcctgtctgagggcaatgaggtgcagttcatccagctggccaaggactttgaggacttcaggaagaagtggcagaggacagaccacgagctgggcaagtacaaggacctgctgatgaaggccgagacagagaggtctgccctggatgtgaagctgaagcacgccaggaaccaggtggatgtggagatcaagaggcggcagagagctgaggccgactgtgagaagctggagcggcagatccagctgatccgggagatgctgatgtgtgacacctag

SEQ ID NO: 333967 - DNA, 393 bp, Artificial Sequence
  derived and/or modified sequence
atggacaccatgatgctgaatgtgaggaacctgtttgagcagctggtgagaagagtggagatcctgtctgagggcaatgaggtgcagttcatccagctggccaaggactttgaggacttcaggaagaagtggcagaggacagaccacgagctgggcaagtacaaggacctgctgatgaaggccgagacagagaggtctgccctggatgtgaagctgaagcacgccaggaaccaggtggatgtggagatcaagaggcggcagagagctgaggccgactgtgagaagctggagcggcagatccagctgatccgggagatgctgatgtgtgacaccagcggcagcatccagctgtctgaggagcagaagagcgccctggccttcctgaacagatag

SEQ ID NO: 333968 - DNA, 324 bp, Artificial Sequence
  derived and/or modified sequence
atggacaccatgatgctgaatgtgaggaacctgtttgagcagctggtgagaagagtggagatcctgtctgagggcaatgaggtgcagttcatccagctggccaaggactttgaggacttcaggaagaagtggcagaggacagaccacgagctgggcaagtacaaggacctgctgatgaaggccgagacagagaggtctgccctggatgtgaagctgaagcacgccaggaaccaggtggatgtggagatcaagaggcggcagagagctgaggccgactgtgagaagctggagcggcagatccagctgatccgggagatgctgtag

SEQ ID NO: 333969 - DNA, 885 bp, Artificial Sequence
  derived and/or modified sequence
atggacaccatgatgctgaatgtgaggaacctgtttgagcagctggtgagaagagtggagatcctgtctgagggcaatgaggtgcagttcatccagctggccaaggactttgaggacttcaggaagaagtggcagaggacagaccacgagctgggcaagtacaaggacctgctgatgaaggccgagacagagaggtctgccctggatgtgaagctgaagcacgccaggaaccaggtggatgtggagatcaagaggcggcagagagctgaggccgactgtgagaagctggagcggcagatccagctgatccgggagatgctgatgtgtgacaccagcggcagcatccagctgtctgaggagcagaagagcgccctggccttcctgaacagaggccagcccagcagcagcaatgccggcaacaagaggctgagcaccattgatgaaagtggcagcatcctgagtgacatcagctttgacaagacagatgagagcctggactgggacagcagcctggtgaagaccttcaagctgaagaagcgggagaagagaagaagcaccagccggcagtttgtggatggccccccaggccctgtgaagaagaccaggagcatcggcagcgctgtggaccagggcaatgaaagcatcgtggccaagaccaccgtgacagtgcccaatgatggcggccccatcgaggccgtgtccaccatcgagaccgtgccctactggaccaggagcaggaggaagacaggcaccctgcagccctggaacagcgacagcaccctgaacagccggcagctggagcccaggacagaaacagacagcgtgggcaccccccagagcaatggaggcatgaggctgcatgactttgtgtccaagacagtgtag

SEQ ID NO: 333970 - DNA, 456 bp, Artificial Sequence
  derived and/or modified sequence
atggacaccatgatgctgaatgtgaggaacctgtttgagcagctggtgagaagagtggagatcctgtctgagggcaatgaggtgcagttcatccagctggccaaggactttgaggacttcaggaagaagtggcagaggacagaccacgagctgggcaagtacaaggacctgctgatgaaggccgagacagagaggtctgccctggatgtgaagctgaagcacgccaggaaccaggtggatgtggagatcaagaggcggcagagagctgaggccgactgtgagaagctggagcggcagatccagctgatccgggagatgctgatgtgtgacaccagcggcagcatccagctgtctgaggagcagaagagcgccctggccttcctgaacagaggccagcccagcagcagcaatgccggcaacaagaggctgagcaccattgatgaaagtggcagctag

SEQ ID NO: 333971 - DNA, 1899 bp, Artificial Sequence
  derived and/or modified sequence
atggacaccatgatgctgaacgtgcggaacctgttcgagcagctggtgagacgggtggagatcttatccgaaggtaacgaggtgcaatttatccaattagctaaggattttgaggatttccgcaagaagtggcagcgaactgatcacgagcttggaaagtataaggacttactcatgaaggcagaaaccgagcggtccgcgctggacgtgaagttgaaacacgcccgaaaccaggttgacgtagagataaagcgccggcaaagggccgaagccgactgtgaaaaactggagcgtcagatccagctcattagggagatgctgatgtgtgatacttctggcagcatccagttgtcagaggagcagaaatccgccctggcctttttaaatagaggacagccatcatcttcgaacgctgggaataaacggctttctactattgatgagagcggcagcatactgtcagacatttcattcgacaagactgatgaatcccttgattgggatagctccctggtcaaaaccttcaagttgaagaaacgggagaaaaggcggtccacctctagacaatttgtggatggtcccccagggcccgttaaaaagaccaggtccattgggtccgctgtcgatcaggggaatgaatccatcgtcgccaaaacaaccgttaccgtacccaatgacggcgggcccattgaggccgtgtcgactattgaaacagttccttactggacaaggtcgaggcggaaaaccggtacattgcaaccctggaactccgattccactctgaactcccggcagctggagccaaggactgagaccgactccgtaggtaccccccagagtaatgggggtatgaggctgcacgactttgtgtctaaaaccgtgattaaaccagaaagctgtgtcccatgtggcaagcggatcaagttcggtaagcttagtcttaagtgcagagactgccgggtggtgtcccaccctgaatgccgcgacagatgccctctgccttgcattccaacgcttattggcacccctgtcaagataggagaggggatgctcgccgatttcgtgagccagacaagcccaatgataccctccattgtcgtgcattgcgtgaatgaaatcgagcaacgcggtctgacagaaactgggctctacagaatatccggatgtgatcggacagtgaaagagctcaaagagaaattcctgcgcgttaagaccgtacccttgctgtccaaagtcgacgatattcacgcaatctgctccctcctcaaggactttctcagaaacctgaaggagccactgctcacatttcgcctgaatcgggcatttatggaggctgctgaaattacagacgaagataatagcatcgctgcgatgtatcaggcagtgggcgagctccctcaagccaacagggacaccctagcctttctgatgattcacctccaacgtgtggcacagtcacctcatactaagatggatgtcgcgaacctcgccaaagtctttggcccgaccattgtcgcccatgctgtgccaaatcccgaccccgttacgatgttgcaggacatcaagaggcagccgaaagtggttgagagactgctaagcctgcctctggaatactggtctcagttcatgatggtggaacaggaaaatattgatcccctgcacgtcatcgaaaactccaacgctttctctacgccccagactcccgacatcaaggtttccttgctgggtcccgtgaccacaccagagcaccagttgctgaaaactccctcatcctcctctctgtctcagcgcgtgcgatccaccctgaccaaaaatacccctagattcggcagcaagtccaaatcagctaccaacctcggcagacagggaaacttttttgcgtccccaatgctgaaatag

SEQ ID NO: 333972 - DNA, 1899 bp, Artificial Sequence
  derived and/or modified sequence
atggacaccatgatgctgaacgtgcggaacctgttcgagcagctggtgcgcagggtggagatcctgagtgaaggtaacgaagtgcagttcatacagctggctaaggacttcgaagacttccgaaagaaatggcagagaacggaccacgagttaggaaaatacaaggatttactaatgaaagcagaaacggaacggagcgcgctcgatgtgaaactcaaacacgcccggaatcaggtggacgtggagatcaagcggcgccagcgggctgaggctgactgcgagaaactcgaaaggcagatccaattgattcgcgagatgctgatgtgtgacacttcgggcagtatccagctcagcgaggaacaaaagagtgctctggctttcttaaaccgtggacagccctcgtcttccaatgcaggcaataagcggctctctacaattgatgagtccggcagcattttgtctgatatcagcttcgataagactgatgaatcactggattgggacagcagcctggtgaagactttcaagctcaagaagagggaaaagcggaggagcacttcccggcaattcgtggacgggccacccggtcccgtcaagaaaaccagatccattggctccgccgtggaccaaggaaatgaaagcattgtcgcaaaaactacagtcactgtgcctaatgatggtgggcccatcgaggcagtatccaccatagagacagtaccctattggaccaggtctcgacgaaaaactgggacattgcaaccatggaactccgactcaactctgaactccaggcagctcgaaccacgtaccgaaacggacagcgtgggcacccctcagtccaacggcggtatgaggcttcacgatttcgttagcaaaacagtgatcaaacccgagtcctgtgtgccatgcggtaagcgaatcaagttcgggaaactgagtcttaagtgccgagactgtagagtggtgagccaccctgagtgccgagatcgctgcccgttaccctgcatccctacattgatcgggactccagtgaagatcggcgaaggaatgctcgccgacttcgttagtcagacatccccgatgatcccatccattgtagtacattgcgtgaacgagatagaacagcgtggactcactgagaccggcctgtacaggatttccggctgcgatcgaacagtcaaggaactcaaggagaagttcctgcgggtcaaaactgtaccactgttatccaaagtggacgatatccacgccatttgctctttgctaaaggattttctccggaacctgaaagaacctctcctgacctttcgcctgaacagagcctttatggaggctgcagaaatcaccgacgaagacaattcaattgctgcgatgtatcaggcggtgggagagctgccacaggcaaatcgagatacgcttgcattcttgatgatccatttgcaacgcgtagctcagtccccacatacaaagatggatgtggcgaatctggcgaaggtttttgggccaacaatcgttgctcatgctgttccaaacccagaccccgtgaccatgctccaggacatcaagcgccaaccaaaggtcgttgagcgccttttaagcttgcccttagagtattggagtcaattcatgatggtcgagcaggaaaacatcgacccgcttcacgtaatcgaaaactccaatgccttttctactccccagactcctgatattaaagtgagtttgctcgggccagtgacaacacccgagcatcagctcctgaagaccccctccagctctagcttgagtcaacgcgtgcgatcgaccctgaccaagaacacgcctaggttcggtagcaaatcaaagagcgctacgaatctcgggcgacaggggaatttctttgcctctccgatgctaaaatag

SEQ ID NO: 333973 - DNA, 1899 bp, Artificial Sequence
  derived and/or modified sequence
atggacaccatgatgctgaacgtgcggaacctgttcgagcagctggtcaggagggttgagattctctccgagggcaatgaagttcaatttatccagctggctaaagattttgaggatttccggaaaaaatggcagagaaccgaccacgagctaggtaaatacaaagatctactgatgaaggctgagacagaacgctcggcgttagatgtgaagttgaaacacgcccggaaccaagtggatgtggagattaagcgccggcaacgcgcagaggccgattgtgaaaaattggaaaggcagatccagctgattagggagatgcttatgtgcgatacctctgggagtattcagctctcggaagagcagaaatcggcactggcctttctgaatcggggtcagccatcttcttcaaacgcaggcaacaaaagactctctactatagatgagagtgggagtatcttgtcagatatatccttcgataagaccgatgaatcattggactgggactcttccctggtgaagacgttcaagctcaagaagcgggagaagcggcgtagtacgtctcggcagtttgttgacggaccacctgggcccgtcaaaaagacccggtccattggctcagcagtggatcagggaaatgagagcattgttgctaaaacgaccgtgacagtccctaatgatggaggaccaatcgaggcggtgtctacgatcgagactgtgccgtattggacacgctccagacgcaagacaggaactctccaaccctggaatagcgattccacgcttaacagcagacagctggaacccagaaccgaaaccgactctgtgggaactccacagtcaaatggggggatgagactccatgatttcgtctccaaaacagtgattaaaccagagtcctgcgttccgtgcgggaagcggattaaatttggcaagctgtctctcaagtgccgcgactgcagggttgtctcccacccagagtgtcgagacagatgccccctcccctgtattcctactctcatcggcacacctgtgaaaatcggggagggtatgttggctgactttgtttcccagacttcaccaatgatcccttcaatcgtggttcactgtgtaaatgagatcgagcagaggggtttgaccgaaacgggtctctataggatatccggatgtgatcgcaccgtgaaggaactgaaggagaaattcctgcgagtgaaaactgtgcccctgctgagcaaggttgatgacatacacgccatctgtagcctgctcaaagactttctgcgaaacttaaaagagcccctactcacattccgcctgaaccgcgcttttatggaggccgccgaaattacggacgaggataacagcatagcggctatgtaccaggctgtgggcgaactccctcaggctaatagagacacccttgcctttctgatgattcacctgcaaagggtcgcacaatcgccacacacaaaaatggatgttgccaacctggctaaagtgttcggccctactatcgttgcccacgctgtgcctaaccccgaccccgtaacaatgttgcaagacattaaaaggcagccaaaggttgttgagcggttgctctctctgcctctggagtactggtctcagttcatgatggtggagcaggagaacattgatcctcttcacgtaatcgaaaacagcaacgctttttcgacaccacagactccagatatcaaagtgtcgctactgggaccagtaaccactcccgagcaccaactgctcaagacccccagttcgagttccctctcacaacgggttagatcgaccctaactaaaaatacacccagattcggaagtaagtccaagtcagccacaaatcttgggcgccaaggcaacttttttgcttctcccatgctgaaatag

SEQ ID NO: 333974 - DNA, 1899 bp, Artificial Sequence
  derived and/or modified sequence
atggacaccatgatgctgaacgtgcggaacctgttcgagcagctggtcagaagggtagaaattttgagtgagggcaacgaggtccagtttatacagctagcaaaggacttcgaagactttagaaaaaaatggcagcgtacagatcacgaactcggcaagtataaggaccttctaatgaaagccgagacagagcgctccgccctagacgtgaaactgaaacacgcaagaaaccaggtcgacgtggaaattaagagacgccagcgggctgaggctgattgcgagaagttggagcggcagatccagctgatccgcgaaatgctcatgtgcgacacaagcggctccatccagctgtcagaagagcaaaagtccgctttagcattccttaatagggggcagccatccagcagtaacgccgggaacaagaggctgtcaacaatagatgaatcaggctcgattctcagtgacatctctttcgataaaacagatgagtcccttgactgggatagcagtctggttaagaccttcaagctgaaaaagcgggagaagcgacgctccacatctcggcagttcgtggatggcccacctggtcctgtcaagaaaacaaggtctatcggctctgccgtggatcagggtaacgaatctatcgttgccaagaccacggttactgtgccaaatgacggaggccccatagaggccgtttctacaatagagactgttccctattggacccggtcccgtcgcaaaacggggaccctgcaaccttggaactctgacagcaccttgaactcacgacaattggagcctcgaaccgaaacagattctgtgggtacaccccaatctaacggcggcatgcgcctccacgacttcgtatccaagactgttataaagccagagagctgtgtgccttgtgggaagagaatcaagttcggcaagctgtcactgaagtgtcgtgactgccgcgtagtgtctcaccctgaatgcagagataggtgccccctaccatgcattccgacacttatcggcacccccgtgaaaatcggcgaaggaatgctggcggacttcgtcagccaaacctcccctatgataccgtctatagtggtgcactgtgtgaatgagattgagcaaagaggactgacagagaccggactgtaccgaatctcaggttgcgacagaactgtcaaagagctcaaagagaagtttctgagagttaagacagtacccttgctgtccaaggtggacgacattcacgccatctgttcacttctgaaagatttcctgaggaatttgaaagagccactactaacattcagattgaatcgcgcgttcatggaagctgcagagataacagatgaagacaactcaattgccgctatgtaccaggcagttggtgagctcccacaggctaatagggatacccttgcttttcttatgattcacttgcagagggttgcccagagtcctcataccaaaatggacgtagccaacctggctaaggtgttcggccccacgatcgtggcacacgccgtgcctaaccccgacccagtgactatgctgcaggacattaaacgacagcctaaggttgtagaaagactgctaagcctgcctctggaatattggtctcagtttatgatggtggaacaagagaatatcgatcctctgcatgtaatagaaaattccaacgcattctctacaccccagacccctgacatcaaggtgagcctgctcggccccgttactacccccgaacaccagctcctgaagactccgtccagctcatcactgagccagagggtgcgctcgacgctgactaagaacaccccaagattcggttctaagagcaaatctgcaaccaatctcggacgccagggtaacttcttcgcaagtccgatgctgaaatag

SEQ ID NO: 333975 - DNA, 468 bp, Artificial Sequence
  derived and/or modified sequence
atggacaccatgatgctgaacgtgcggaacctgttcgagcagctggttcgtagagttgaaattctgagcgaagggaatgaagtgcaattcatccagttggccaaggatttcgaagattttagaaaaaaatggcagcggacagaccacgaactggggaagtataaggacttgctgatgaaagcagagaccgagagaagcgcactggacgtaaagttgaagcatgccagaaaccaggttgacgtcgagatcaagcggcgccaacgagcagaagccgattgtgagaagttagagcgacaaattcagctaatcagggagatgctaatgtgcgatacgtcaggaagcattcagctctccgaggagcaaaagtctgccctggcttttctgaatcgcggccaacctagttcgagcaacgctgggaataagcgcctgtccaccattgacgaatctgggtctatccttagcgattag

SEQ ID NO: 333976 - DNA, 420 bp, Artificial Sequence
  derived and/or modified sequence
atggacaccatgatgctgaacgtgcggaacctgttcgagcagctggttagacgagttgagatcctgagtgagggcaatgaagttcagtttatccaactcgcaaaggattttgaggacttccgcaaaaagtggcagcgcaccgaccacgaattgggtaaatataaagacctgctgatgaaagctgaaacggaaaggagcgccctggacgttaagctgaaacatgcacgcaaccaggtggatgtcgaaattaaaagaagacagagggcagaagccgactgtgagaagcttgaaaggcagattcagctcatcagggaaatgttgatgtgtgatacttctgggtcaattcagctatcagaggagcagaagagtgccttggctttcctgaatagaggccaaccaagctcgtccaacgccgggtag

SEQ ID NO: 333977 - DNA, 1899 bp, Artificial Sequence
  derived and/or modified sequence
atggacaccatgatgctgaacgtgcggaacctgttcgagcagctggttagaagagtggagattctttcagaagggaatgaggtccagtttatccagttggccaaagattttgaggactttcgtaaaaaatggcaacgtacagatcacgagctgggcaagtataaggacttgctaatgaaggccgagacagagaggtcagcactcgacgtaaagctcaaacacgctaggaatcaagtcgatgtcgagatcaaaagaagacagcgtgccgaggccgattgcgaaaagctggagcgtcaaatccagctcatccgggagatgttgatgtgcgacacaagcggatccatacaactgagtgaagaacagaagtcggcgctggcattccttaacagagggcagccaagttcctccaatgctggtaataaaaggctctccacaatcgacgagagtggtagcatcctgtcagatatcagctttgacaaaaccgatgaaagcctggattgggactcttctctagtgaagaccttcaaactaaagaaaagagaaaaaaggagatctaccagcaggcagtttgtggacggacctcccggacctgttaagaaaaccaggagcattggaagcgcagtggaccaggggaatgaatctatcgtagctaagacaacggtaacagttccgaatgatggtggccccattgaggctgtgtccaccatagagactgtgccttactggacaagatcccgcagaaagaccgggactttacagccttggaacagcgattccactcttaattctaggcagctggagcctaggactgaaacagatagtgtgggcactccccagtccaatggaggcatgcgcttacatgacttcgtgagtaagaccgttatcaagccagagtcgtgcgtgccatgcggaaagcggatcaagtttggcaaacttagcctgaagtgtcgcgactgcagggtggtgtctcaccctgaatgccgcgacaggtgccccctgccctgtatccctacactaattggtactcctgttaaaattggcgagggcatgctggccgatttcgtgagccagacctccccgatgatcccttccatcgtggttcattgcgtgaacgagattgagcagaggggcctcaccgagaccggcctttacagaatctcgggatgtgaccgtaccgttaaggagcttaaagaaaaatttttgcgcgtcaagaccgtgcccctgctgtcgaaagtcgacgacatacatgcaatttgttccctgctgaaggacttcctgcgaaacctgaaagaacctctgcttacctttcgactgaatcgggcttttatggaggctgccgaaatcactgacgaggacaattcgattgccgcaatgtaccaggcggtcggcgaactccctcaggccaatcgggatactctcgccttcctgatgatccacttacaacgtgttgcccagtccccccacacgaagatggacgtcgccaatcttgctaaggtgtttggtccaactattgtggcccatgcagtgcccaacccagaccctgtgactatgctgcaggacatcaagaggcaaccaaaggttgtcgagcgccttctctctttgcctctggaatattggtcacagttcatgatggtcgagcaggagaacatagaccccttacatgtgattgaaaattcaaatgccttctccacaccacagacgccagatatcaaggtgagcttgctgggtcctgtgacaacgcccgagcaccaactgctgaaaacaccctccagctctagcctctctcagcgagtccggagcaccctgactaaaaataccccacggttcggtagcaagagtaaaagcgccacaaatctggggcgccaaggtaattttttcgccagccccatgctgaaatag

SEQ ID NO: 333978 - DNA, 525 bp, Artificial Sequence
  derived and/or modified sequence
atggacaccatgatgctgaacgtgcggaacctgttcgagcagctggttcgcagagtggagatcctttcggaagggaacgaagtgcagttcatccaattagctaaagattttgaagacttccgtaagaagtggcagcggaccgaccatgagctaggcaaatataaagacctcctcatgaaggcggagacagaaaggagcgcactcgacgtgaagctaaagcatgcccgcaaccaggtggatgttgagattaagcggcgacaaagagcagaggcagactgtgaaaaactggagcggcaaatccagttaatacgagaaatgctaatgtgcgacacaagcggctcgatccaactgtcggaggaacaaaagagcgccctggctttcctgaataggggtcaaccaagcagctcaaatgctgggaataaaagactgtcaaccatagacgagtccggaagcatcctatcggacatcagttttgacaagactgatgaatctttagactgggactccagcctcgtgaaaacttag

SEQ ID NO: 333979 - DNA, 390 bp, Artificial Sequence
  derived and/or modified sequence
atggacaccatgatgctgaacgtgcggaacctgttcgagcagctggtgcggcgcgtagagatcctttccgaaggtaatgaagtgcagtttatccagctggcaaaagatttcgaggacttcaggaaaaagtggcagagaaccgaccacgagctgggcaaatacaaggatcttctcatgaaggctgagactgagagatccgctctagatgtgaaattgaaacatgccaggaatcaggttgatgttgagatcaagcggcgtcagcgggctgaggcagattgcgagaaactggaaaggcagattcaactgatccgcgagatgctgatgtgtgacacgagcggatcaatacagctaagcgaagagcagaagagtgccttggcatttctcaattag

SEQ ID NO: 333980 - DNA, 336 bp, Artificial Sequence
  derived and/or modified sequence
atggacaccatgatgctgaacgtgcggaacctgttcgagcagctggtgcggcgcgttgagatcttgagtgaaggcaacgaagtgcagtttatccagctagcaaaggacttcgaagacttccgtaaaaagtggcaaaggaccgaccatgagctgggtaaatataaagacctgctgatgaaagccgagactgagcgctcagccctggacgtcaaattgaaacacgctagaaaccaagtggacgtcgagattaagaggcggcagcgagccgaggcagattgtgagaagcttgagagacaaatccagcttatccgcgaaatgctgatgtgcgatacctag

SEQ ID NO: 333981 - DNA, 1899 bp, Artificial Sequence
  derived and/or modified sequence
atggacaccatgatgctgaacgtgcggaacctgttcgagcagctggtccggagagtggaaatactttccgaagggaatgaagtgcagttcatccagttagctaaggatttcgaagactttcggaaaaaatggcagagaacagatcacgagctcggaaagtataaggaccttttaatgaaagccgagactgagaggagcgccttggacgtgaagctgaaacatgctcggaaccaggtcgacgtggagatcaaacggcgacagagggcagaggccgactgtgagaagttggagcggcagatccagctgatccgggaaatgctaatgtgcgacactagcgggagcattcaattaagcgaagaacagaagagcgcacttgccttcttaaatcgagggcagccctcttcaagcaatgcaggcaacaaaagattatcgactatcgatgagtctggtagcatccttagcgatattagtttcgacaaaaccgacgaaagcctggactgggacagttccctagttaaaacttttaagcttaaaaaacgtgaaaaacggcggtcgacttcaaggcaatttgtggacggaccccccggcccagtgaagaagaccaggagcattggttcagcagtggatcagggaaacgagtcgatcgtcgccaagacaaccgttacggtaccaaatgatggaggaccaattgaagctgtctctacaattgaaaccgttccctactggacacggtcccgacgaaaaaccggcaccttgcagccttggaatagcgatagtaccctgaattctaggcaactcgaacccagaacagagactgactctgttggcacgccacagagtaatgggggtatgcgcctgcacgacttcgtctcaaaaacggttattaagccagagagctgcgtaccctgcggcaagcgaattaagtttggaaaactgtccctgaaatgcagggactgccgtgtggtgtctcacccggagtgcagggatagatgcccactaccttgcattcctacgctgatcggcactccagtaaagataggtgaagggatgctggctgattttgtctcacagacaagtcccatgatcccctctatagtagtgcactgcgtgaacgagattgaacagagaggactgactgagacaggtctttacagaatatccggctgtgaccgcactgtcaaggaattaaaggaaaagttccttcgcgtcaagacagtgcccctgctgagtaaagtggacgatattcacgccatctgttccttgctgaaagactttttacgtaatctaaaggaaccgctgttaacattccggctgaacagagcttttatggaggccgccgagatcaccgacgaagacaactccattgccgccatgtaccaagctgtcggcgagctgcctcaggctaacagagatacccttgcttttcttatgattcacctccaaagggtggcacagagcccccacaccaagatggacgttgctaatctggccaaagtgttcggcccaactattgtggcccatgcagtcccaaaccccgaccctgtgactatgctgcaggatattaaaaggcagcccaaagttgtggagcggttgttgtctctgcccctagaatactggtcccagtttatgatggtagagcaggagaatatagatcctctgcacgtcatcgaaaactcaaacgccttctctacaccacagacaccagacattaaggtgtctctgcttgggcctgtaacaacgcctgagcaccagttgctaaagactccaagcagctcatcactgtcacagagggtccggagcacattgaccaagaacacccccaggttcggttctaagagtaaatcagccacaaacctcggaagacagggaaacttctttgctagtcctatgcttaagtag

SEQ ID NO: 333982 - DNA, 393 bp, Artificial Sequence
  derived and/or modified sequence
atggacaccatgatgctgaacgtgcggaacctgttcgagcagctggtgcgacgagtggagatactgtcggagggaaatgaagttcagtttatccagcttgcaaaagatttcgaggacttccgaaagaagtggcaacgcactgatcatgaactgggtaagtataaggatctgttgatgaaggcggaaactgaaagatccgctctagatgtaaagttaaagcacgcacgcaaccaggtggatgtcgagataaaacggcgccagcgggctgaggccgattgcgaaaaactggaacgccaaatccagttgatccgagagatgttgatgtgcgataccagtggctccattcagctgtccgaggaacaaaagagtgcgttagcatttcttaacagatag

SEQ ID NO: 333983 - DNA, 324 bp, Artificial Sequence
  derived and/or modified sequence
atggacaccatgatgctgaacgtgcggaacctgttcgagcagctggttcgtagagtagagatcttgtccgaaggaaatgaagtacagttcattcagctggctaaagactttgaggattttcgaaagaagtggcagaggactgatcatgagctaggcaagtacaaggatctgctcatgaaagccgagacagagcggagtgcactggacgtaaagctgaagcacgctcggaatcaggtggatgtcgaaattaagcgcaggcagagggctgaagcagactgtgagaagctggagcgccaaatccaactcatcagagagatgctgtag

SEQ ID NO: 333984 - DNA, 885 bp, Artificial Sequence
  derived and/or modified sequence
atggacaccatgatgctgaacgtgcggaacctgttcgagcagctggtgagacgcgtcgagatcttgagtgaggggaatgaggttcaattcatccagctagctaaagattttgaagattttcgcaagaagtggcaaagaaccgaccatgagctgggtaagtacaaagacctgcttatgaaagctgaaactgagaggtctgctctggacgttaagctgaagcatgctcgcaaccaggttgatgttgaaattaagcggaggcagagggccgaagccgactgcgagaaactggaaaggcagatccaattgatccgggagatgctgatgtgcgacacttcgggaagtatacagctgtctgaggaacagaagtccgccctcgcatttctgaataggggccagcccagttcaagcaacgccggaaacaaaaggctaagcaccatcgacgagtccggaagcatactctctgacattagctttgacaagacagatgaaagtctagattgggatagtagtctggtgaaaaccttcaagctgaagaaaagagagaaacgccggtctacctcgcgacagtttgtggacggcccacctgggcccgtgaagaaaactagatcgattggatcagctgtggatcaggggaacgaatctatcgtggccaagacaaccgtcacagtgccaaatgatggaggaccaatagaggcagtctccaccatcgagaccgttccttactggacacgcagccgtaggaagaccgggactttacaaccctggaacagcgacagcaccctaaacagtagacagctcgagcctagaactgagacagactctgtaggcacacctcagtcgaacggggggatgcgcctgcacgacttcgtgtctaagaccgtctag

SEQ ID NO: 333985 - DNA, 456 bp, Artificial Sequence
  derived and/or modified sequence
atggacaccatgatgctgaacgtgcggaacctgttcgagcagctggtgcggcgagtagagattctgtccgagggaaacgaggtgcagttcatccagctggccaaggattttgaggatttcagaaagaaatggcaaaggaccgatcatgagttaggcaaatataaggacctgctcatgaaagctgagactgagcgcagcgcattggatgttaaactgaaacacgccagaaaccaggtcgacgttgagatcaaaagaagacagcgcgctgaagccgactgcgagaagcttgagaggcagattcaactgatccgcgaaatgctgatgtgcgacacttcgggctcaatccagctgagcgaagaacagaaaagcgcacttgcctttctcaacaggggtcagccttcaagcagcaatgccggaaacaagaggttgtcaactatcgacgaaagcgggtcctag

SEQ ID NO: 333986 - DNA, 1899 bp, Artificial Sequence
  derived and/or modified sequence
atggatactatgatgctgaatgtgcgtaacctatttgagcagctggtcagaagagtagagattttgagtgagggtaatgaggtgcagtttattcaactggccaaggattttgaggattttcggaaaaagtggcagcgcaccgatcacgaactgggaaaatacaaggatctccttatgaaagctgaaaccgaacgttctgctctggatgtaaagctgaagcacgcacgtaaccaggtagatgttgaaattaagaggcgccagcgagccgaggctgactgtgagaaacttgagagacaaattcagctgatccgcgaaatgcttatgtgtgacacctctggttcaatccagctgagcgaggaacaaaagtcagccctggcattcttgaacaggggtcagccctcgagttctaacgccggaaacaaaagactgagcaccattgacgagtcaggaagtattttgtccgacatctcatttgacaagacagacgagagcttagattgggactccagtctggtgaaaacatttaaactgaaaaagcgagaaaaacggagatccacatcacggcagtttgtggatggtccccctggccctgtgaaaaagacccgctctataggcagcgcagtcgaccaagggaatgaatctatcgtcgcgaaaacgactgttactgtacctaacgacggagggcctattgaagcagtttcaacaattgagacggtgccatattggacccggtctagacgcaaaactggaactcttcagccttggaactccgatagtacccttaacagccggcaacttgagccgcgaacagagacagacagtgtgggtaccccacagagtaacgggggaatgcgactacacgatttcgtttctaagaccgtcataaaaccagagagctgcgtgccatgcggtaagagaatcaaatttgggaaactctcccttaagtgtcgggattgtcgcgtggtgtctcatcccgagtgtcgagataggtgtcccctgccttgcatcccaactttgattggaactcccgtcaaaattggggagggcatgctggccgattttgtaagccagacctcaccaatgattccttcaatcgtggttcactgtgttaatgagatcgagcaaagaggattgacggagacgggactgtataggatatccggatgtgacagaaccgtgaaggagctcaaggagaagtttctccgtgtcaagactgtgccgttgctgagcaaggtggacgatatccacgcaatttgtagtctcctgaaggatttcctgaggaatctaaaagaaccactgctgaccttccgattgaaccgcgcttttatggaagcggcagaaattacagatgaggataattcgattgcggctatgtaccaggctgtgggggagttgccccaagcaaacagggacactctggccttcctaatgatccatctacagcgagtcgctcagagcccccatacaaaaatggacgtcgccaatctcgctaaggtgttcggtccaaccatagtggctcatgcggtacccaatcccgatcccgttactatgctacaagacattaagcgccaacccaaggttgttgagcgtttgcttagcttgcctctagaatactggagccaatttatgatggtcgagcaggagaacattgatcctttacacgtgatagaaaactccaatgcattctcgaccccacagacccccgacattaaagtgtcccttctaggtccagtgaccacccccgaacatcagctcctgaagacaccatcttcttcatccttgtcccagcgagtgcgatccaccctgacaaagaacactccccgtttcggatcaaagtctaaatccgcaaccaatctggggcgacagggcaacttcttcgcatcacctatgttaaagtag

SEQ ID NO: 333987 - DNA, 1899 bp, Artificial Sequence
  derived and/or modified sequence
atggacaccatgatgttgaatgtacgcaacttgttcgagcagctcgtcagaagggtagagatactcagtgaaggaaacgaggtacagtttatacaactagccaaggatttcgaagacttcaggaagaagtggcagcgtactgatcatgaactcggtaaatataaggatcttctaatgaaagcagagaccgagagaagcgccctcgacgtcaagctgaagcacgcacgcaatcaggtggacgtggagattaaaaggagacagcgagccgaggctgattgcgagaaactggaacgacaaattcagctgattagagagatgctaatgtgcgacacgagcggatccattcagctgtccgaagaacagaaaagtgcactggcttttcttaatcgtggacaacctagctcttctaacgcgggaaataaacgcctctctacaatcgatgaatccggctctatcctgtcggatattagctttgacaagactgatgagagcctggattgggattcttctctcgtgaaaaccttcaagctaaaaaagcgcgagaaacgtcgaagcacttcacgtcagttcgtggacggccctcctggtccagttaagaaaaccagaagcattggctccgctgtcgaccaggggaacgaatctattgtcgccaagacaacggtcacagttcccaatgatgggggacctatcgaggctgttagtactatcgagacagtcccctattggacgcgttcacgcagaaagacgggcacactgcagccctggaattctgacagcaccctgaatagcagacagttggaaccccgaacagagaccgactccgtcggcacaccacagagcaacggagggatgcgcttgcatgattttgtgagcaagaccgtgatcaaaccggagtcttgtgtcccatgcggcaaacggatcaaattcggaaaactctcgctcaaatgtcgggactgccgagttgtgtctcaccctgagtgtcgagaccgctgcccattgccatgtattccaactctgattggtactcctgtcaaaatcggagagggaatgctggctgactttgtgtcacagacttcccccatgattccaagtatcgtggtgcactgtgtgaacgaaattgaacagagaggactgactgaaacggggctgtatcgcatttccggctgtgatcgtacagtgaaggagctgaaagagaagttccttagggtgaagaccgtaccactcctgagcaaggtggatgatattcacgccatctgtagtctattaaaggacttcctgcgtaacctaaaggaacctctgctgactttccgccttaaccgagcttttatggaggcagccgagatcaccgacgaagacaattctatcgcagcaatgtatcaggccgttggtgaattaccacaggccaaccgggatactttggcgtttctgatgatacatctgcagcgggtcgcacagtctcctcacacgaaaatggacgtagctaatctcgccaaagtatttgggccaacgatcgtggcccacgccgtacctaatcccgaccccgtgaccatgttgcaggatataaagaggcagcccaaggttgtggagagactgctgtctctcccactcgagtattggtcacagtttatgatggttgaacaggagaacatcgaccccctccatgttatagaaaactccaatgccttctctacccctcagacccctgatattaaggtatctcttctgggcccagtaactacgcccgagcatcagctgttaaaaaccccaagctcaagctccttatcacagcgggtccgctccacactgacaaagaacaccccgaggtttggctccaagagcaagtctgccacgaacctgggtcgccagggcaacttctttgctagtcccatgctgaagtag

SEQ ID NO: 333988 - DNA, 1899 bp, Artificial Sequence
  derived and/or modified sequence
atggacactatgatgctgaacgtccgcaatctctttgagcagctcgttcgtcgggtggaaattttatctgaaggtaatgaggtccagttcatccaactggccaaggattttgaggattttcgtaagaagtggcagcgcacggaccatgagctgggcaagtacaaggatctgctgatgaaagccgagacagaacgatctgcattagatgttaagctgaagcacgcccgaaaccaggtggatgtggaaattaagaggaggcagagggcggaagccgactgcgagaagctggaacggcagatccaactcatcagggagatgttgatgtgcgatacctcaggaagtatacaactatccgaagaacagaagtcggcattggcctttcttaaccgagggcagccctcgagcagcaacgcaggcaataagcgtctgtctaccattgatgagtccgggtcaattctttctgacatttcctttgataagacggacgaatctctggattgggactcttctctcgtgaagactttcaagctgaaaaagcgtgagaagagacgctctacaagtagacagttcgttgatggcccacctggaccagtgaaaaaaacccggtccataggttctgctgtcgaccaggggaatgagtctatcgtcgcgaagaccacagtgactgtgccaaacgacgggggtccgattgaagctgtgtccacaatcgaaacggtgccttactggacccgatcacgtcgcaaaacgggcacgttgcagccttggaattctgatagcaccttaaactcgaggcagctggagccgagaaccgagactgattctgttgggacgccccaatcgaatggcggtatgagactgcacgacttcgtatccaaaaccgttattaagcctgaaagctgtgtgccttgcgggaaaaggattaagtttggcaagctgagccttaagtgcagggattgccgagtggtgtcccatccagagtgtcgggaccgatgtcccctgccttgtatccctacgctgatcggtactcccgtgaaaatcggcgaggggatgctggcggatttcgtttctcagacttccccgatgattccaagtatcgttgtgcactgcgtgaacgaaattgaacagagggggctgactgagaccgggttgtacaggatatcagggtgcgaccgcacagtcaaggagttaaaggaaaaattcttaagagtaaagaccgtccccctgttgtcaaaggtcgatgatatacacgctatctgctctttacttaaagacttcctgcggaatctgaaagaaccattgctgacgttcaggctaaatcgagcatttatggaagccgctgaaattaccgacgaggataacagcattgctgccatgtatcaggctgtgggggagttgccgcaggctaatcgcgatacacttgcctttctgatgatccatctacagcgcgtggcgcagtccccccatacgaagatggacgtggccaatttggccaaggtttttgggccaactatcgttgcacacgcagtgcccaatccagatccagtgaccatgcttcaagacattaagaggcagcccaaggtggtggagcgcctgctctctctgcctctggagtattggtcgcagtttatgatggtagaacaggagaatattgatcccttacacgtgatcgaaaattctaacgcttttagcaccccacagacccctgacattaaggttagcttactgggccctgtgaccacccccgagcatcagttgctgaagacaccgtctagctctagtctctcacagcgcgtccgttcaacattaacaaagaacacccccaggtttggatccaaatccaagagcgcaacaaatttgggaagacaaggaaatttttttgcctcccccatgctcaagtag

SEQ ID NO: 333989 - DNA, 1899 bp, Artificial Sequence
  derived and/or modified sequence
atggataccatgatgctgaatgtacggaacctcttcgagcagctggtccgcagggttgagatactgagcgaggggaacgaagtacagttcattcaactggcaaaggacttcgaggactttcgcaagaaatggcagcgaactgatcacgaattggggaagtacaaggatctactgatgaaggcggaaacagaacggtccgctctcgacgtgaaactgaagcacgcaaggaaccaggtggacgtggagatcaaaaggagacagagggcagaggccgattgtgagaagctggagagacagatccagcttatcagagaaatgctgatgtgcgatacatctggctctattcagctgtcagaagagcagaagagcgcactcgcgtttttaaatcgaggccagccatcaagttctaacgcagggaacaagaggttgagtaccatagatgaatccggcagcatactgtcggacatttcgtttgacaaaacagatgagagtctggactgggactcctcattggtgaaaaccttcaagctcaagaaacgtgaaaaacgtcggagtacctcccggcagttcgtggacggcccacccggtcctgtgaagaaaacccgaagtatcggcagcgctgtcgatcagggtaatgaatcaattgtcgcaaagacaactgtaaccgtccccaatgacgggggtcctatagaggccgtgtctacaatcgaaacggtaccatactggaccagatcccgacgaaagaccgggaccctgcagccatggaatagcgatagtacattaaactcccgtcaactcgagccaagaactgagacagactcagtgggcacacctcaatcaaatggaggcatgaggctccacgatttcgtaagcaaaacggtcatcaaaccggagtcatgtgtgccctgcggaaagcgaatcaagtttggcaaactgtcattaaaatgcagagactgccgggttgtcagccatcccgagtgccgggacaggtgccccctgccttgtatcccaaccctgattggaacaccagtcaaaataggcgagggcatgttagcagattttgtgagtcaaacatcacctatgatccctagcattgttgtccactgcgtgaatgaaatcgaacagaggggcctgacagaaaccgggctctatagaatttcaggctgtgatcggactgtaaaggagctcaaggaaaaatttctgcgcgtgaagaccgtgcccttgctaagcaaggtggatgacattcacgctatctgcagcctcctgaaagactttctcagaaatctgaaagagccattgctgacatttcggcttaaccgagcattcatggaagctgcagagataactgacgaggacaactctattgcagctatgtatcaggcagtaggagaactccctcaggctaatcgggatactctggcatttctaatgatccacctacagcgggttgcgcaatccccacacactaagatggacgtggcgaacttggcaaaggtgttcggacctaccatcgtcgcacacgccgtccccaatcctgatccagtgaccatgctgcaggacataaagaggcagcccaaggtggtggagagactgctgtctctgcctctggaatattggagtcagttcatgatggtggaacaagagaatatcgaccctcttcacgtcattgaaaacagtaacgcatttagtactccccagacaccagacataaaggtgagtctgctgggaccagtcacaaccccggagcaccagctgctcaaaacacccagcagctccagcctctcccaacgcgtaaggagcaccctgactaagaacacgcccagattcgggtctaagtctaaatccgccaccaatttaggacgccaggggaacttttttgccagcccaatgctaaaatag

SEQ ID NO: 333990 - DNA, 468 bp, Artificial Sequence
  derived and/or modified sequence
atggacactatgatgctcaatgtgaggaatctatttgagcaattggtccgacgagtggagattctgtcagaaggaaacgaggttcagtttattcagcttgcaaaagacttcgaagacttccgtaagaagtggcagcggaccgatcacgagctcggcaaatataaggacctgctgatgaaagcagagacggaaaggagcgctctggacgtcaaactgaagcatgccaggaatcaggtggacgtggaaatcaagcgccgtcaaagagccgaagcagactgcgaaaagctggaaaggcagattcagttaattcgggagatgctgatgtgtgacacatctggatcaatccagctgagcgaggagcagaagagcgccctggcctttctgaaccggggacagccctcaagttccaacgcgggtaataaaaggctgtccactattgatgaaagcgggagcatcctcagcgattag

SEQ ID NO: 333991 - DNA, 420 bp, Artificial Sequence
  derived and/or modified sequence
atggatacaatgatgctgaacgtacgtaacctgttcgagcagctcgtgcggcgagtggagattctgtcggagggcaacgaggtgcaattcatccagcttgctaaggacttcgaggacttcaggaaaaagtggcagcggaccgaccacgagttgggcaaatacaaggatctcttaatgaaagccgaaacagagaggtccgctctggatgtgaaactgaagcacgcccgaaatcaggtggatgtggaaatcaaacgtcgtcagagagcggaggccgattgcgagaagttggaacggcagattcagcttattcgggagatgcttatgtgtgataccagtggttccatccagctctccgaggagcagaaatccgcactggcgtttttgaatcggggtcagccatcttcttctaacgcgggatag

SEQ ID NO: 333992 - DNA, 1899 bp, Artificial Sequence
  derived and/or modified sequence
atggacactatgatgctcaacgttaggaacctgtttgaacaactggtgcgtcgggtggaaatcctttccgagggcaacgaagtacagttcatccagctggccaaggactttgaggacttcaggaagaagtggcagcgtacagaccacgaattaggcaaatataaagacctgttgatgaaagctgaaacagaaaggtctgctctggatgtgaaactgaagcatgccagaaaccaggtggatgtggagatcaagagaaggcagagagctgaggcagactgtgagaaactggaacgtcagattcaactaattagggaaatgttaatgtgcgacacgagcggctccattcagctgtccgaagaacaaaagagtgccctggcttttctcaatcgaggccaacccagttcttcgaatgctggaaataagagacttagcactatcgacgaaagtgggtcaatcctgagcgacatttctttcgacaagacagacgagtctctggattgggacagctcgttggtgaaaacatttaaattaaagaagagagagaagcgacggtcaacaagccgccaatttgtggacggtccacctggcccagtgaagaaaacacgctctattgggtctgcagtcgaccaggggaacgagagtatcgtggccaagacaaccgtcaccgttccaaacgacggcggacctatcgaagccgtgtcaaccatcgaaacggtcccctattggacacgaagcaggcgaaaaactggcacccttcagccatggaattccgatagtacactcaactcccgccaactcgagcctagaactgagacagattctgttgggacgccacagagtaatggagggatgcgcctgcacgattttgtgtccaaaactgtgattaagcctgaatcatgtgtgccatgtgggaaaagaataaaatttggcaaactgagtctaaagtgcagggactgtagggtagtgtctcaccccgaatgccgagatcggtgtccacttccatgtatccctacactgataggcacacctgtgaagatcggggagggaatgctagcagactttgtctcccaaaccagccctatgatacccagcatcgtggtgcattgcgttaacgagatagagcaaagaggccttacagagaccggtctgtaccgaatttcgggatgtgacaggactgtgaaagaactcaaggagaagttcttgagagttaaaacagttccccttctgtccaaagtagatgacattcatgctatctgcagtctgctgaaagattttctccgaaatttaaaagaacctctgctcactttccgattaaatagggcttttatggaggctgccgagatcactgacgaggataattctattgcggcaatgtaccaggcagtgggtgaactcccgcaggccaaccgtgatactctagcattcctgatgatacacctgcagcgagtggcacagtcaccacacacaaaaatggatgtggcgaacctcgcaaaagtttttggacctaccattgttgcccacgccgtgcctaatcctgatccagtgacgatgcttcaggacattaagcgtcagcccaaagtcgtcgaacggttgctcagtctacccctggaatattggtctcaatttatgatggttgagcaggagaatattgaccctctgcacgtgatcgagaatagcaacgcgttctcaacgccgcagacccctgacattaaggtctccctgctgggccctgtcactacccctgaacatcagctgctgaaaactcctagctcttcctctctgtctcaacgggtccgatcgacattgacaaagaacacaccgagattcggttccaagtccaagtctgccactaatctgggacggcaaggcaatttctttgcttcccccatgttaaagtag

SEQ ID NO: 333993 - DNA, 525 bp, Artificial Sequence
  derived and/or modified sequence
atggataccatgatgctgaatgtacgcaacctcttcgaacagctcgttcggcgtgtggagatcctgagcgaggggaatgaggtccagtttatccagctggcaaaggacttcgaggattttaggaaaaaatggcaaaggacggaccacgagctggggaagtacaaagatctgctgatgaaggcagaaaccgaaaggtcagctcttgatgttaaactgaaacatgctagaaaccaagtagatgtggaaatcaagaggcggcagcgagccgaggcggactgtgaaaaattggaaaggcagattcagctcatcagggagatgctgatgtgtgacacctctgggtcgattcagttatcagaagaacaaaagtctgcgctcgccttccttaatcgtggccaaccttcatcttccaatgctggtaataaacgcttgagcaccatagatgagtcaggctccattttaagtgacatcagttttgacaaaaccgacgagtccctggactgggattctagtctcgttaaaacatag

SEQ ID NO: 333994 - DNA, 390 bp, Artificial Sequence
  derived and/or modified sequence
atggacacaatgatgctcaacgttagaaatctatttgagcagctcgttaggcgagtggagatcctgagtgagggaaacgaagttcagttcatccagctggccaaggacttcgaggacttccgcaagaagtggcaacgcacagaccacgagctggggaagtacaaggatctcctcatgaaggctgaaactgaacgcagcgctctggatgtcaagctgaaacatgcgaggaatcaagtggacgtggaaattaagagacgccagagagccgaggctgactgcgagaagttggaaagacagattcagttaattagggaaatgctcatgtgtgacaccagtggcagcatccagctctctgaagaacaaaagagcgccctcgcattcctcaactag

SEQ ID NO: 333995 - DNA, 336 bp, Artificial Sequence
  derived and/or modified sequence
atggatacaatgatgctcaatgtgcgcaatttatttgaacagctcgtgcgtcgggtggaaatcctctccgaaggtaatgaagtgcagtttatccagttggctaaggacttcgaggattttcggaaaaaatggcagcgtacggaccacgaattgggtaaatacaaggacctcttaatgaaagccgagactgaaaggtccgcacttgatgtgaaattaaaacatgcaagaaatcaggtggatgtggagataaagcgtcgacaacgcgctgaagccgactgtgagaaacttgagcgtcaaattcaattgatcagggagatgctgatgtgtgacacgtag

SEQ ID NO: 333996 - DNA, 1899 bp, Artificial Sequence
  derived and/or modified sequence
atggacacgatgatgctgaacgtgcgcaacctgttcgaacagctggttcggagggtggagatcctatctgaaggcaatgaggtacaattcatacagcttgccaaagactttgaagattttcggaaaaagtggcagcgaacggaccacgagctgggtaaatacaaggatctactgatgaaggcagaaacagagagaagcgcattggatgtgaaactgaaacatgcaagaaaccaagttgacgtggagatcaaacgaagacagagggccgaggccgattgcgagaagctggagcgtcagattcagctaattcgcgagatgctgatgtgcgacacatctgggtccatccagctgagcgaggaacagaaaagtgcactggctttccttaacagaggacaaccctcctcctcaaacgctggcaataaacggctctcgaccatcgacgaatctgggagcattctgtccgacatcagcttcgacaaaaccgatgagtctctggattgggattcatctcttgtgaaaacgttcaagcttaaaaagagggaaaagcggcgaagcacgtctcggcagttcgtcgacggaccccctgggccagttaaaaaaacacggtccatcggcagtgccgtggatcaggggaacgaaagtatcgtggctaaaacgactgtgactgtgcctaatgatggaggaccaattgaagcagtctccactattgaaacagtgccttactggactaggagcagacgcaaaacaggaacactccaaccttggaactcagactcaacattaaattctagacagctggagccccgtaccgagaccgatagtgtgggaaccccgcagtccaatggaggcatgcgcctacacgactttgtaagcaaaacagtgatcaaacctgaatcgtgcgtgccctgcggaaaacgaattaaatttgggaagctgagcctgaagtgtagggattgtagggtggtctcccatccagaatgcagggacaggtgtcccctcccctgtatcccaaccctgatcggaacccctgttaagatcggagagggcatgctcgcagacttcgtgagccagacctctcccatgattccttcaattgtggtgcactgtgtgaacgaaatcgagcagagaggtctgacagaaaccgggctgtaccggatatcaggatgtgacagaactgtcaaggagttgaaggagaaatttctgcgggttaaaactgtacctcttctgagcaaagttgacgacatccatgccatctgcagcttgttgaaggattttttgagaaatctgaaggagcctctgctcacattcaggttgaatagggctttcatggaagcggcagaaatcacggacgaagacaactccatcgccgctatgtatcaggcggtgggggagctcccgcaggcgaacagggacacattggcttttcttatgattcatctgcaacgggttgcccaatctccccataccaagatggatgtagctaacctggctaaagtgtttgggccaactatcgtagctcatgctgtcccaaacccagaccctgtgacgatgctgcaggatattaagaggcaaccgaaggtggtggaacggttgctttcactccctctagaatactggagccaattcatgatggtggagcaggaaaacatagaccctcttcatgtgattgaaaactccaatgcattctccaccccacagacgcccgatattaaagtgtccctgctgggaccagtgacgaccccagagcatcaactgctgaagacaccatcttcatccagcctgtctcagcgcgtgcggagtactctcaccaaaaacacaccccgatttgggtctaagagtaaatccgcaacaaaccttggcaggcagggcaatttcttcgcatcccccatgctgaagtag

SEQ ID NO: 333997 - DNA, 393 bp, Artificial Sequence
  derived and/or modified sequence
atggatactatgatgctcaatgtgcgcaatcttttcgagcaattggtccgcagagtcgagattctgagcgaaggcaacgaggtgcagtttatccaactcgcaaaagactttgaagactttcggaagaaatggcaaaggactgaccacgaattagggaaatacaaggatctcctgatgaaagctgagacagagaggtccgcactcgatgtaaaactcaagcacgccagaaatcaggtggatgttgaaatcaaacgccgtcagcgggctgaggccgattgtgagaagcttgagcggcagatacagcttattcgggagatgcttatgtgcgatacttctggtagcattcagttgtcggaagagcagaagtcagcgctcgcctttttaaatagatag

SEQ ID NO: 333998 - DNA, 324 bp, Artificial Sequence
  derived and/or modified sequence
atggataccatgatgctgaatgtgaggaatttgttcgagcaacttgtgcgacgcgttgagattctgtcggagggaaacgaggtgcagttcatccagctggccaaggactttgaagattttcgtaagaagtggcaaaggaccgaccatgagctcggaaagtacaaggacctgctcatgaaggcggagaccgagaggtcagccctggacgttaagttgaagcatgccagaaatcaggtcgatgtggagatcaagcgcaggcaacgggcagaagccgactgtgagaagctggagagacagattcagctgattcgagagatgctctag

SEQ ID NO: 333999 - DNA, 885 bp, Artificial Sequence
  derived and/or modified sequence
atggataccatgatgctgaatgtgcgtaacctattcgaacagttagtgaggcgagtggagatacttagcgagggcaacgaggtccagttcattcagctcgcgaaggactttgaggacttcagaaaaaagtggcagcgcaccgatcacgaactgggtaaatataaagatctcctgatgaaggcagagactgaacgatccgctctcgatgtgaaactcaagcatgccaggaaccaggtggacgttgaaatcaagcggaggcagcgggctgaggccgactgcgagaaactggagcgccagatccagctcatccgggaaatgcttatgtgtgacactagtggatccatccagctgagcgaggagcaaaaatctgctctagcttttcttaacagaggtcagccttcgtctagcaacgccggaaacaagcgacttagtacaatcgacgagtcaggcagcatcctctcagacatcagcttcgacaagaccgacgagtcattagattgggatagctctctcgtgaaaacattcaagcttaaaaagagggaaaaacggagaagcacttcacgacagttcgttgatggaccacccggtccagtgaaaaaaacccggagcattggctccgcggtggaccagggcaacgaaagcatcgtggccaagaccaccgtgaccgtgcccaacgacggcggaccaattgaagccgtcagcacaatcgaaaccgtgccctattggacgaggagcagacgcaagaccgggacattgcagccctggaattcagacagcacattaaacagccgtcagctagagcccagaaccgagactgacagcgtcggcaccccacaaagcaatggcggaatgcgcctgcacgacttcgtgtcaaagacggtatag

SEQ ID NO: 334000 - DNA, 456 bp, Artificial Sequence
  derived and/or modified sequence
atggatactatgatgctgaatgttagaaacctgtttgagcagctagtgcggcgtgtcgagattctgagcgaaggtaacgaagtgcagtttattcagctcgccaaggatttcgaggattttagaaagaagtggcaaaggaccgaccacgagctgggaaaatataaagatctgttgatgaaggctgagacagaacgatcagctctggatgtaaagctcaaacacgcacgcaaccaagtggatgtggaaatcaagcgaagacagcgtgcagaggccgactgtgaaaagttagaacggcagatccagctgattagagaaatgttgatgtgtgataccagcgggagtatccaactttccgaagagcagaaatccgccttggcctttcttaatcgtggacagcctagctccagtaatgctggcaacaagcgcctgtctacaatcgacgagtccgggtcctag

SEQ ID NO: 334001 - DNA, 574 bp, Artificial Sequence
  derived and/or modified sequence
gaagtgaagggtggcccaggtggggccaggctgactgaagtgagtagtgggggtgccagaccaggtgcgtctgccgctggattgtgataggaagcagagtgttcgtgtgatggatactatgatgctgaatgtgcggaatctgtttgagcagcttgtgcgccgggtggagattctcagtgaaggaaatgaagtccaatttatccagttggcgaaggactttgaggatttccgtaaaaagtggcagaggactgaccatgagctggggaaatacaaggatcttttgatgaaagcagagactgagcgaagtgctctggatgttaagctgaagcatgcacgtaatcaggtggatgtagagatcaaacggagacagagagctgaggctgactgcgaaaagctggaacgacagattcagctgattcgagagatgctcatgtgtgacacatctggcagcattcaactaagcgaggagcaaaaatcagctctggcttttctcaacagaggccaaccatccagcagcaatgctgggaacaaaagactatcaaccattgatgaatctggttccattttatcagat

SEQ ID NO: 334002 - DNA, 932 bp, Artificial Sequence
  derived and/or modified sequence
gaggcgcggagcgaagtgaagggtggcccaggtggggccaggctgactgaaatggatactatgatgctgaatgtgcggaatctgtttgagcagcttgtgcgccgggtggagattctcagtgaaggaaatgaagtccaatttatccagttggcgaaggactttgaggatttccgtaaaaagtggcagaggactgaccatgagctggggaaatacaaggatcttttgatgaaagcagagactgagcgaagtgctctggatgttaagctgaagcatgcacgtaatcaggtggatgtagagatcaaacggagacagagagctgaggctgactgcgaaaagctggaacgacagattcagctgattcgagagatgctcatgtgtgacacatctggcagcattcaactaagcgaggagcaaaaatcagctctggcttttctcaacagaggccaaccatccagcagcaatgctgggaacaaaagactatcaaccattgatgaatctggttccattttatcagatatcagctttgacaagactgatgaatcactggattgggactcttctttggtgaagactttcaaactgaagaagagagaaaagaggcgctctactagccgacagtttgttgatggtccccctggacctgtaaagaaaactcgttccattggctctgcagtagaccaggggaatgaatccatagttgcaaaaactacagtgactgttcccaatgatggcgggcccatcgaagctgtgtccactattgagactgtgccatattggaccaggagccgaaggaaaacaggtactttacaaccttggaacagtgactccaccctgaacagcaggcagctggagccaagaactgagacagacagtgtgggcacgccacagagtaatggagggatgcgcctgcatgactttgtttctaagacggt

SEQ ID NO: 334003 - DNA, 1899 bp, Artificial Sequence
  derived and/or modified sequence
atggacaccatgatgctgaacgtgagaaacctgttcgagcagctggtgagaagagtggagatcctgagcgagggcaacgaggtgcagttcatccagctggccaaggacttcgaggacttcagaaagaagtggcagagaaccgaccacgagctgggcaagtacaaggacctgctgatgaaggccgagaccgagagaagcgccctggacgtgaagctgaagcacgccagaaaccaggtggacgtggagatcaagagaagacagagagccgaggccgactgcgagaagctggagagacagatccagctgatcagagagatgctgatgtgcgacaccagcggcagcatccagctgagcgaggagcagaagagcgccctggccttcctgaacagaggccagcccagcagcagcaacgccggcaacaagagactgagcaccatcgacgagagcggcagcatcctgagcgacatcagcttcgacaagaccgacgagagcctggactgggacagcagcctggtgaagaccttcaagctgaagaagagagagaagagaagaagcaccagcagacagttcgtggacggcccccccggccccgtgaagaagaccagaagcatcggcagcgccgtggaccagggcaacgagagcatcgtggccaagaccaccgtgaccgtgcccaacgacggcggccccatcgaggccgtgagcaccatcgagaccgtgccctactggaccagaagcagaagaaagaccggcaccctgcagccctggaacagcgacagcaccctgaacagcagacagctggagcccagaaccgagaccgacagcgtgggcaccccccagagcaacggcggcatgagactgcacgacttcgtgagcaagaccgtgatcaagcccgagagctgcgtgccctgcggcaagagaatcaagttcggcaagctgagcctgaagtgcagagactgcagagtggtgagccaccccgagtgcagagacagatgccccctgccctgcatccccaccctgatcggcacccccgtgaagatcggcgagggcatgctggccgacttcgtgagccagaccagccccatgatccccagcatcgtggtgcactgcgtgaacgagatcgagcagagaggcctgaccgagaccggcctgtacagaatcagcggctgcgacagaaccgtgaaggagctgaaggagaagttcctgagagtgaagaccgtgcccctgctgagcaaggtggacgacatccacgccatctgcagcctgctgaaggacttcctgagaaacctgaaggagcccctgctgaccttcagactgaacagagccttcatggaggccgccgagatcaccgacgaggacaacagcatcgccgccatgtaccaggccgtgggcgagctgccccaggccaacagagacaccctggccttcctgatgatccacctgcagagagtggcccagagcccccacaccaagatggacgtggccaacctggccaaggtgttcggccccaccatcgtggcccacgccgtgcccaaccccgaccccgtgaccatgctgcaggacatcaagagacagcccaaggtggtggagagactgctgagcctgcccctggagtactggagccagttcatgatggtggagcaggagaacatcgaccccctgcacgtgatcgagaacagcaacgccttcagcaccccccagacccccgacatcaaggtgagcctgctgggccccgtgaccacccccgagcaccagctgctgaagacccccagcagcagcagcctgagccagagagtgagaagcaccctgaccaagaacacccccagattcggcagcaagagcaagagcgccaccaacctgggcagacagggcaacttcttcgccagccccatgctgaagtag

SEQ ID NO: 334004 - DNA, 489 bp, Artificial Sequence
  derived and/or modified sequence
atgaagatccccctgaccgccaccatctgcctgcccggcagcagcccccccggcctgtgcatcttcgccaaggtgagcgacgtgaagagactggagatggacgacatcgccgacagaatgagaatggacgccggcgaggtgaccctggtgaaccacaacagcgtgttcaagacccacctgctgccccagaccggcttccccgaggaccagctgagcctgagcgaccagcagatcctgagcagcagacagggccacctggacagaagcttcacctgcagcaccagaagcgccgcctacaaccccagctactacagcggccccggcctgggcgtgctggccagatacagctggggcaagatgctgaccttcggcggccaccacggcgtgaccctgatgcagatcagacacatggccgtggccggcttcagcagcttcatcaacttccagatcatcctgccccagaccgtgttcctggcccaggccatctag

SEQ ID NO: 334005 - DNA, 489 bp, Artificial Sequence
  derived and/or modified sequence
atgaaaatccctctgaccgcgacaatatgtcttcccggttcatcccctccaggattgtgcatttttgctaaggtgtctgatgtgaaacggctggagatggatgatatcgcagatcgaatgaggatggatgctggcgaagtcacccttgtaaatcataatagcgtctttaagacacacctcctgcctcaaaccggttttccagaagaccaactgtccctcagtgaccaacagattcttagctcccgacagggacacctggatcgcagctttacatgcagcacccgcagtgcggcgtacaaccccagttattactcagggcccggccttggggtgttggccagatactcctggggcaaaatgcttacctttggcgggcaccacggtgtgactctcatgcagattaggcatatggccgtagcaggattctcctctttcatcaacttccagattattctgcctcagacagtttttcttgcacaggcgatatag

SEQ ID NO: 334006 - DNA, 489 bp, Artificial Sequence
  derived and/or modified sequence
atgaagatccccctgacagccaccatctgcctgcccggcagcagccccccaggcctgtgcatctttgccaaggtgtctgatgtgaagaggctggagatggatgacattgctgacaggatgaggatggatgctggggaggtgaccctggtgaaccacaacagcgtcttcaagacccacctgctgccccagacaggcttccctgaggaccagctgagcctgagtgaccagcagatcctgagcagccggcagggccacctggaccgctccttcacctgcagcaccaggtctgctgcctacaaccccagctactacagcggccctggcctgggcgtgctggcccgctacagctggggcaagatgctgacctttggaggccaccacggcgtgaccctgatgcagatccgccacatggctgtggccggcttcagcagcttcatcaacttccagatcatcctgccccagacagtgttcctggcccaggccatctag

SEQ ID NO: 334007 - DNA, 489 bp, Artificial Sequence
  derived and/or modified sequence
atgaagatccccctgaccgccaccatctgcctgcccggcagcagccctcctggcctctgtatttttgccaaagtctccgatgttaaacgtctggagatggacgatatagccgatcggatgagaatggacgcaggggaggttacactggtgaaccataatagtgtgtttaagacgcacctgctgccgcagaccggatttcctgaggaccagctttctctttcagatcagcagattttgagcagccgccaagggcacctggacaggagctttacgtgttcaacaaggtctgccgcgtataacccatcctattactcgggtcctgggctgggcgtgctggctcgatatagctgggggaaaatgttgacctttggaggccatcacggcgtgaccctcatgcagatccgacatatggcagtagcaggcttctcgtcgtttatcaacttccaaataatactgccccagacagtcttcttggcccaggccatctag

SEQ ID NO: 334008 - DNA, 489 bp, Artificial Sequence
  derived and/or modified sequence
atgaagatccctctgactgccacaatttgcctgcccggttcttcaccccctggtctttgcatattcgcaaaggtgtccgatgtgaagcggttagaaatggatgatatagctgataggatgcgaatggacgctggtgaagttacccttgttaaccacaattcagtatttaagactcatctactgccccagacgggattcccagaagaccaactgtcactgtctgatcaacagattttatccagtagacagggacatctcgaccgctcttttacttgcagtacacgctctgcagcttacaacccgtcatactattcaggcccaggattaggtgtcttggccagatatagctggggtaaaatgctgactttcggtggacatcatggagtcacactgatgcagatacggcatatggccgtggcaggttttagctccttcataaattttcagatcatcctgcctcagactgtgttcttggcccaggccatttag

SEQ ID NO: 334009 - DNA, 1935 bp, Artificial Sequence
  derived and/or modified sequence
atggacgacatcgccgacagaatgagaatggacgccggcgaggtgaccctggtgaaccacaacagcgtgttcaagacccacctgctgccccagaccggcttccccgaggaccagctgagcctgagcgaccagcagatcctgagcagcagacagggccacctggacagaagcttcacctgcagcaccagaagcgccgcctacaaccccagctactacagcgacaaccccagcagcgacagcttcctgggcagcggcgacctgagaaccttcggccagagcgccaacggccagtggagaaacagcacccccagcagcagcagcagcctgcagaagagcagaaacagcagaagcctgtacctggagaccagaaagaccagcagcggcctgagcaacagcttcgccggcaagagcaaccaccactgccacgtgagcgcctacgagaagagcttccccatcaagcccgtgcccagccccagctggagcggcagctgcagaagaagcctgctgagccccaagaagacccagagaagacacgtgagcaccgccgaggagaccgtgcaggaggaggagagagagatctacagacagctgctgcagatggtgaccggcaagcagttcaccatcgccaagcccaccacccacttccccctgcacctgagcagatgcctgagcagcagcaagaacaccctgaaggacagcctgttcaagaacggcaacagctgcgccagccagatcatcggcagcgacaccagcagcagcggcagcgccagcatcctgaccaaccaggagcagctgagccacagcgtgtacagcctgagcagctacacccccgacgtggccttcggcagcaaggacagcggcaccctgcaccacccccaccaccaccacagcgtgccccaccagcccgacaacctggccgccagcaacacccagagcgagggcagcgacagcgtgatcctgctgaaggtgaaggacagccagacccccacccccagcagcaccttcttccaggccgagctgtggatcaaggagctgaccagcgtgtacgacagcagagccagagagagactgagacagatcgaggagcagaaggccctggccctgcagctgcagaaccagagactgcaggagagagagcacagcgtgcacgacagcgtggagctgcacctgagagtgcccctggagaaggagatccccgtgaccgtggtgcaggagacccagaagaagggccacaagctgaccgacagcgaggacgagttccccgagatcaccgaggagatggagaaggagatcaagaacgtgttcagaaacggcaaccaggacgaggtgctgagcgaggccttcagactgaccatcaccagaaaggacatccagaccctgaaccacctgaactggctgaacgacgagatcatcaacttctacatgaacatgctgatggagagaagcaaggagaagggcctgcccagcgtgcacgccttcaacaccttcttcttcaccaagctgaagaccgccggctaccaggccgtgaagagatggaccaagaaggtggacgtgttcagcgtggacatcctgctggtgcccatccacctgggcgtgcactggtgcctggccgtggtggacttcagaaagaagaacatcacctactacgacagcatgggcggcatcaacaacgaggcctgcagaatcctgctgcagtacctgaagcaggagagcatcgacaagaagagaaaggagttcgacaccaacggctggcagctgttcagcaagaagagccaggagatcccccagcagatgaacggcagcgactgcggcatgttcgcctgcaagtacgccgactgcatcaccaaggacagacccatcaacttcacccagcagcacatgccctacttcagaaagagaatggtgtgggagatcctgcacagaaagctgctgtag

SEQ ID NO: 334010 - DNA, 1932 bp, Artificial Sequence
  derived and/or modified sequence
atggacgacatcgccgacagaatgagaatggacgccggcgaggtgaccctggtgaaccacaacagcgtgttcaagacccacctgctgccccagaccggcttccccgaggaccagctgagcctgagcgaccagcagatcctgagcagcagacagggccacctggacagaagcttcacctgcagcaccagaagcgccgcctacaaccccagctactacagcgacaaccccagcagcgacagcttcctgggcagcggcgacctgagaaccttcggccagagcgccaacggccagtggagaaacagcacccccagcagcagcagcagcctgcagaagagcagaaacagcagaagcctgtacctggagaccagaaagaccagcagcggcctgagcaacagcttcgccggcaagagcaaccaccactgccacgtgagcgcctacgagaagagcttccccatcaagcccgtgcccagccccagctggagcggcagctgcagaagaagcctgctgagccccaagaagacccagagaagacacgtgagcaccgccgaggagaccgtgcaggaggaggagagagagatctacagacagctgctgcagatggtgaccggcaagcagttcaccatcgccaagcccaccacccacttccccctgcacctgagcagatgcctgagcagcagcaagaacaccctgaaggacagcctgttcaagaacggcaacagctgcgccagccagatcatcggcagcgacaccagcagcagcggcagcgccagcatcctgaccaaccaggagcagctgagccacagcgtgtacagcctgagcagctacacccccgacgtggccttcggcagcaaggacagcggcaccctgcaccacccccaccaccaccacagcgtgccccaccagcccgacaacctggccgccagcaacacccagagcgagggcagcgacagcgtgatcctgctgaaggtgaaggacagccagacccccacccccagcagcaccttcttccaggccgagctgtggatcaaggagctgaccagcgtgtacgacagcagagccagagagagactgagacagatcgaggagcagaaggccctggccctgcagctgcagaaccagagactgcaggagagagagcacagcgtgcacgacagcgtggagctgcacctgagagtgcccctggagaaggagatccccgtgaccgtggtgcaggagacccagaagaagggccacaagctgaccgacagcgaggacgagttccccgagatcaccgaggagatggagaaggagatcaagaacgtgttcagaaacggcaaccaggacgaggtgctgagcgaggccttcagactgaccatcaccagaaaggacatccagaccctgaaccacctgaactggctgaacgacgagatcatcaacttctacatgaacatgctgatggagagaagcaaggagaagggcctgcccagcgtgcacgccttcaacaccttcttcttcaccaagctgaagaccgccggctaccaggccgtgaagagatggaccaagaaggtggacgtgttcagcgtggacatcctgctggtgcccatccacctgggcgtgcactggtgcctggccgtggtggacttcagaaagaagaacatcacctactacgacagcatgggcggcatcaacaacgaggcctgcagaatcctgctgcagtacctgaagcaggagagcatcgacaagaagagaaaggagttcgacaccaacggctggcagctgttcagcaagaagagccagatcccccagcagatgaacggcagcgactgcggcatgttcgcctgcaagtacgccgactgcatcaccaaggacagacccatcaacttcacccagcagcacatgccctacttcagaaagagaatggtgtgggagatcctgcacagaaagctgctgtag

SEQ ID NO: 334011 - DNA, 1935 bp, Artificial Sequence
  derived and/or modified sequence
atggacgacatcgccgatagaatgagaatggacgcaggcgaagtgacactggtgaaccataacagcgttttcaagacccacctgttgccacagaccggtttcccggaggaccagctgtcactttctgatcagcagattttgagctctagacagggtcacctagatagaagctttacctgctctacacgtagcgctgcgtacaacccttcttattactccgataacccttctagtgattctttcctcgggtcgggagacctgaggacgtttggccagtctgcaaacggtcagtggcgtaactccacaccttcgagctcatcatctctgcagaagtctcgaaattcaaggagcctctatttagagacccgcaaaaccagtagtgggctgtcaaatagttttgccgggaaatcaaaccatcactgccacgtctccgcctacgagaaatcatttcctatcaagcccgtgcccagcccttcctggtccggttcctgcagaagaagcctgctatcacccaagaagacccagcgcaggcatgtctcaactgccgaagagacagtgcaagaagaggagagggaaatctaccgccagctactccagatggtgactggaaagcagttcacaatcgccaaacccactacacacttcccgttacacttgagtagatgtctgagtagctctaagaatacactgaaggactcactttttaagaacggtaacagctgcgcaagccagatcattggcagcgacactagcagttctggctctgctagtatcttaaccaaccaggagcagcttagtcattccgtttacagtctatcttcatatacaccagacgtggccttcggcagtaaagactccggcaccttgcaccaccctcatcaccatcacagtgtgccacaccagcccgacaatcttgctgccagtaatacccaatcagagggatccgactcagtcattctgctgaaggttaaggattcccagacacctacgcctagttcaactttctttcaggccgaactctggatcaaagagcttacttcagtgtatgactccagagccagagaacggttgaggcagatcgaagaacagaaagctctggctctgcaattgcagaaccagcgccttcaagagagagagcacagcgtgcacgacagcgtggagttgcacctccgggtgcccctggagaaggagatcccagtcaccgtcgtccaggaaactcagaaaaaagggcacaagctgaccgactctgaagatgagttccctgaaatcacagaagagatggagaaagagattaagaatgtgttcaggaatgggaatcaggatgaggtgctctcagaagcttttcgcctgaccatcaccaggaaagatatacagactctgaaccatctcaattggttgaacgatgagatcatcaatttctatatgaatatgctcatggagcgctcaaaggagaaggggctacctagtgtacacgcttttaatactttcttttttaccaagctgaaaacagctgggtatcaagcggttaagcgctggaccaagaaagttgacgttttctccgtcgacattctgctagtgcctatccatctgggagtgcactggtgtcttgcagttgtggactttcggaagaaaaacatcacttactatgattccatgggtggtattaataatgaggcttgccgaatcctgctgcagtatctcaagcaggagagtatcgacaagaagcgtaaagagttcgacaccaacggctggcagctgttctctaagaaatcccaggagatcccacagcagatgaacggctctgactgcggtatgtttgcttgcaaatacgccgactgtattaccaaagatagaccaattaactttacccagcaacatatgccttacttccggaaacgcatggtgtgggaaattctccacaggaagttgctctag

SEQ ID NO: 334012 - DNA, 1932 bp, Artificial Sequence
  derived and/or modified sequence
atggacgatatcgcggatagaatgaggatggacgccggtgaagtaacgctggtaaatcataatagcgtgtttaagacccatctactccctcaaaccggcttccctgaagaccagttatccctgtccgatcaacagatcctcagttcgcggcaggggcatctcgacaggtccttcacatgttctacaaggagtgccgcatacaacccctcgtattattcggacaatcccagttctgattcgtttttggggtcaggggatctccggaccttcgggcaatccgcaaacggccaatggaggaactctactccttcttcgtcgtcaagtctgcagaagagccggaactcacgatcgctgtatttagaaacgaggaaaactagcagtggactatccaactcgtttgcaggaaagagtaatcaccattgccacgtctctgcctacgaaaagtcattccccatcaaaccagtgccgagtccatcttggtcggggtcctgccgacgctcactgctcagccccaaaaagacacagcggagacatgtgagcactgctgaggaaacagtgcaggaagaggagagggagatttacaggcagctgctccagatggtcacggggaaacagtttacaattgcaaagccgactacacactttccactgcatctgagcagatgcctgtcgagtagtaaaaatacactgaaggattcgctgttcaagaacggcaattcgtgcgcctcacaaatcataggctcggatacaagttcttcagggtcggcctcaattctgactaatcaagaacagctttcacactctgtgtactcgctgagttcctacaccccagatgttgcctttggctccaaggactcaggcacccttcaccacccccatcaccaccactccgttccccaccaacccgataacctggcagccagcaacactcagtcggaaggctcagatagcgtcatcctactgaaggtgaaggacagccagacccctaccccatctagcaccttttttcaagccgaactgtggattaaggagctcactagcgtctacgactcacgagcccgcgaacggttgagacagatcgaggaacaaaaagctctggccttacaactacaaaatcagagattacaagagcgcgaacatagtgtccacgactccgttgaactccacttacgggtcccactcgagaaagagatccctgtgactgtggttcaagagacccaaaagaagggccataaactaacggactcagaagacgaattcccagagatcactgaggagatggagaaagaaatcaaaaacgtatttaggaatgggaaccaggatgaagttctgtcggaagccttcagactcactatcaccaggaaggacattcagacgctgaaccacttgaattggctgaatgacgagattatcaatttctatatgaacatgctgatggagcggtccaaagagaagggcctgccttccgtccacgcgtttaacacctttttttttaccaaacttaaaacagccgggtatcaggctgttaaacggtggaccaagaaggtggacgtattctccgtggacatcctactggtacctatccacctgggggttcattggtgcctggccgtggttgatttccggaagaagaatatcacctactatgattccatgggaggcatcaataacgaggcctgtcgtatcctgctgcagtatctgaaacaggagtcgatcgacaagaaacggaaagagttcgacacaaacggatggcagctcttctccaaaaagtctcaaataccacaacagatgaacggttctgattgcggtatgtttgcttgtaaatatgccgattgcattaccaaagaccgccccatcaatttcacccaacagcacatgccatatttccgaaaacggatggtgtgggagatactgcacaggaagctgttgtag

SEQ ID NO: 334013 - DNA, 1935 bp, Artificial Sequence
  derived and/or modified sequence
atggatgacatcgcagatagaatgcgaatggatgctggggaagtgacgctggtcaaccataactctgtgttcaagacccacctcctccctcagacggggtttcccgaggaccagctctctctgagcgatcagcagattctgtctagtcggcagggtcatctcgatcggtcctttacatgctccaccagatctgccgcctacaatccatcttattacagtgacaatccctcctctgatagctttttgggttcaggcgacctgaggaccttcgggcagagtgcgaatggacaatggcgaaactccacccctagcagctccagcagtctgcagaagagccgcaatagtcgctcgctctatctggaaacccgtaaaacttcctccggactgtccaatagcttcgcaggtaagagtaaccatcattgccatgtctcagcatatgaaaagtcttttcccataaaacctgtccctagtccctcctggagcggctcatgcagaagatcgctgctgagccccaagaagacacagaggcggcacgtgagcacggctgaggaaaccgtccaggaggaggagcgcgagatctacagacagttgctgcaaatggtcaccggaaagcagttcactatagcgaagccaaccacccatttccccctgcatctcagccgatgtttgtctagctccaaaaacacactcaaagacagtctgttcaaaaatggcaatagttgcgcaagccagattattgggtctgatacttcctcctccggtagtgcctctattctcaccaaccaggaacaactgtctcattctgtttactctttaagttcctatactccggacgttgccttcggctctaaggactccgggacgctgcatcaccctcaccatcaccatagtgtgccccatcagcccgataatctggctgccagcaacacacagtcggaaggtagtgattccgttattctgctgaaagttaaggattcccagacccccactccgagtagtactttttttcaagccgagctctggatcaaggaactgacatcagtttacgattcaagggcccgagagaggctgagacagatcgaggagcagaaagccttggcactccagcttcagaatcagcgcctccaggaacgggaacacagtgtacatgacagcgtggaactccatctgcgggtgcctctggagaaggagataccagttaccgtcgtacaggagacacagaaaaagggacacaagctgactgacagcgaagacgaattccccgaaattaccgaggagatggaaaaagagatcaagaatgtgttccggaatgggaatcaagatgaagttttgtctgaggccttccgcctcactatcactcggaaagatattcagactctgaaccacctgaactggctgaacgatgagatcataaacttctacatgaacatgctgatggaacggagcaaggagaaagggctcccttctgttcacgcatttaacacttttttcttcactaagctgaagaccgccggatatcaggctgtgaagaggtggactaagaaagttgacgttttctctgtggacatcctcctggtaccaatccatttgggcgtgcactggtgccttgctgtggtggattttcgcaagaaaaacataacttattacgactcaatgggtggcatcaacaatgaagcatgtaggatcctgctgcagtaccttaagcaggagtcaatcgacaagaagcggaaggagtttgacacgaatgggtggcaacttttcagcaagaagagccaggagatcccacagcagatgaacggcagcgactgcggcatgtttgcttgtaaatatgcagattgcattaccaaagacagacccattaactttactcagcagcacatgccctatttccgcaaaaggatggtatgggagattctacacaggaaacttctgtag

SEQ ID NO: 334014 - DNA, 1932 bp, Artificial Sequence
  derived and/or modified sequence
atggatgacatcgccgacaggatgaggatggacgccggcgaagtaacactggtgaaccacaattccgtttttaaaactcacctgctgccccagactgggttccctgaggatcagctgagcctgtccgatcaacaaatcctttccagcagacaggggcaccttgatcgcagttttacatgctcaacgcgttccgctgcctataatcctagttactactctgataatccgagtagcgacagtttccttggctccggagatctccggacattcggccaaagtgccaacggacagtggagaaacagcacccccagctcgtccagttccctgcaaaaaagccgcaacagtcggtccctatacctcgaaacccggaaaacgtcctccgggttgagtaattctttcgccggcaagagcaatcaccattgtcatgtctctgcatacgaaaaatcctttccaattaagccagtcccatccccctcctggtctggtagttgtagaaggtctctgcttagcccgaaaaagacacagagaagacacgtgagcaccgccgaagaaaccgtccaggaagaggagagagagatctacaggcaactgctacagatggtcacggggaagcagttcaccatcgccaagccaacgacacactttccactccacctcagccgatgcctgtctagctcaaaaaacaccctgaaggatagcttgttcaagaacggaaactcctgtgccagtcaaatcatcgggagtgatacctcgtcttccggctctgcctctatcttgactaatcaggaacagttgtcccacagtgtgtattcccttagctcgtacaccccagacgttgcctttggatcgaaagactcaggcacccttcaccacccccaccaccatcactctgtgccacaccagccagataacctggctgcatcaaacacacagtccgaaggcagtgatagtgtgattcttctcaaggtgaaagattcccagactcctacacctagctctactttcttccaggcggaactgtggatcaaagaactgacaagcgtctacgattctcgggctagagagcgactgcgccagatcgaggagcagaaggctctggcgctgcagctccagaatcagcgcctgcaggagcgagagcatagcgtgcacgattcagtagaactacacctcagagtgccattggagaaggaaatcccagtgacagtggttcaggaaacgcagaagaagggtcacaaactgaccgactccgaggatgaattccctgaaattactgaagaaatggagaaagagattaaaaatgtttttagaaatgggaatcaggacgaggtgctaagtgaggcctttcgattgaccattacaagaaaggacattcagaccctgaaccatctgaactggttaaatgatgagataattaacttctacatgaatatgctcatggagaggagcaaggaaaaggggctgccgtctgtacacgccttcaatacttttttctttacaaaacttaagactgcaggatatcaggccgtgaaacgatggactaaaaaagtggacgtgttctcagtagatatcctgcttgtgcctatccacctgggggtgcactggtgtctagccgtggttgattttaggaaaaaaaatataacttactacgattctatgggaggaatcaacaacgaggcttgccggattctgctgcaatatctcaagcaggaatcaattgataagaaacggaaggaatttgatacaaacggatggcagttgttttctaagaaaagtcagatccctcagcagatgaatggttctgactgtgggatgttcgcctgtaagtacgccgactgtattaccaaagacagaccaatcaacttcactcagcagcacatgccctatttccggaaacggatggtgtgggagattctccatcggaaactcttatag

SEQ ID NO: 334015 - DNA, 1935 bp, Artificial Sequence
  derived and/or modified sequence
atggacgatatagccgataggatgcgaatggatgctggtgaggtgacgttggtgaaccataactcagtttttaaaactcacttgctaccccaaactggttttcccgaggatcagctgagtcttagtgaccagcaaatccttagctctagacagggccatctcgacagaagcttcacatgtagcaccagatcagccgcttataacccgtcttattattccgacaatccttcgtcagatagctttcttgggtccggggacctgcgaaccttcgggcaaagtgcgaatggtcagtggcggaactccaccccatcctcctcatcttcactgcagaagtcacgcaatagtcgttccctgtatctggagactcgaaaaacctcatctggactgtctaatagcttcgccggcaagtccaatcaccattgccacgtctcagcctatgaaaaatcttttcctatcaaacctgtgccatcaccctcctggtccgggtcctgtcggagatctttgttgtcaccaaagaaaacacagcgtagacatgtgtccacagccgaggaaacagtgcaagaagaggaacgagaaatttataggcagttacttcagatggtcaccggcaagcagtttaccatagcaaagcctactacacactttcctctccacctctcaagatgtttgtcctcgagcaaaaacacactcaaggactctctgtttaagaatgggaattcgtgcgcctctcagatcatcggcagcgacacatccagttcagggtcagctagtatcctaaccaatcaagagcaactttcgcattcagtttactcgctttcgtcgtatactcccgacgtcgcttttggatccaaagatagcggaaccctgcatcatcctcatcatcaccatagtgtgcctcatcagcctgataatctggcagcctctaacacccagtctgaaggatctgattctgtgatcctcctcaaagtaaaggattcacagacaccgacacctagcagcaccttttttcaagcggagctgtggatcaaggaactcaccagcgtctatgacagtagggctagagagcggctgagacaaatcgaggaacagaaagccctcgccctgcaacttcagaatcagcgattgcaggagagggaacacagcgttcatgactctgtcgaactgcacctgcgcgttccattagagaaagaaatccctgtaacggtcgtacaggagacacagaagaaggggcacaagctgacagactcagaagatgagtttcctgaaatcactgaagaaatggagaaggaaataaaaaacgtgtttcgaaatggaaaccaggacgaagtgctgagtgaagcctttcggctcacgattacaagaaaagacattcagaccctgaaccatctgaactggttgaacgacgagatcattaatttttatatgaacatgctgatggaacggtctaaggagaaaggactgccctccgtgcacgctttcaacacttttttttttacgaagctgaagacagccgggtatcaggccgttaaacgatggaccaagaaggtggacgtgtttagcgtggatatactgcttgtgccaatccatctaggcgtgcattggtgtttggctgtagtggattttaggaaaaagaatatcacctattacgattcaatgggaggtattaataatgaagcttgccggatcttgctgcagtacttaaagcaggagtccatagacaaaaagaggaaggaatttgatacaaacggttggcagctttttagcaagaaatcccaagaaatccctcaacaaatgaatggttctgattgtggcatgtttgcctgtaagtatgctgattgcatcactaaagataggccaatcaacttcacacaacaacatatgccctactttaggaaaagaatggtttgggagatcctgcatcgcaaactgctgtag

SEQ ID NO: 334016 - DNA, 1935 bp, Artificial Sequence
  derived and/or modified sequence
atggatgacattgctgacaggatgaggatggatgctggggaggtgaccctggtgaaccacaacagcgtcttcaagacccacctgctgccccagacaggcttccctgaggaccagctgagcctgagtgaccagcagatcctgagcagccggcagggccacctggaccgctccttcacctgcagcaccaggtctgctgcctacaaccccagctactacagcgacaaccccagcagtgacagcttcctgggcagcggggacctgcggaccttcggccagagcgccaacggccagtggaggaacagcacccccagcagcagcagcagcctgcagaagagcaggaacagccgcagcctgtacctggagaccaggaagaccagcagcggcctgagcaacagctttgctgggaagagcaaccaccactgccacgtgtctgcctatgagaagagcttccccatcaagcctgtgcccagccccagctggagcggcagctgcagaagaagcctgctgagccccaagaagacccagaggagacatgtgtccacagctgaggagaccgtgcaggaggaggagcgggagatctaccggcagctgctgcagatggtgacaggcaagcagttcaccatcgccaagcccaccacccacttccccctgcacctgagccgctgcctgagcagcagcaagaacaccctgaaggacagcctcttcaagaatggaaacagctgtgccagccagatcatcggcagtgacaccagcagcagcggcagcgccagcatcctgaccaaccaggagcagctgagccacagcgtgtacagcctgagcagctacaccccagatgtggccttcggcagcaaggacagcggcaccctgcaccacccccaccaccaccacagcgtgccccaccagcctgacaacctggccgccagcaacacccagagcgagggcagtgacagcgtcatcctgctgaaggtgaaggacagccagacccccacccccagcagcaccttcttccaggccgagctgtggatcaaggagctgacctctgtgtatgacagccgggcccgggagcggctgcggcagatcgaggagcagaaggccctggccctgcagctgcagaaccagaggctgcaggagcgggagcacagcgtgcatgattctgtggagctgcacctgcgggtgcccctggagaaggagatccctgtgacagtggtgcaggagacccagaagaagggccacaagctgacagacagtgaagatgagttccctgagatcacagaggagatggagaaggagatcaagaatgtgttcagaaatggaaaccaggatgaggtgctgtctgaggccttccggctgaccatcaccaggaaggacatccagaccctgaaccacctgaactggctgaatgatgagatcatcaacttctacatgaacatgctgatggagaggagcaaggagaagggcctgcccagcgtgcacgccttcaacaccttcttcttcaccaagctgaagacagctggctaccaggccgtgaagcgctggaccaagaaggtggatgtgttttctgtggacatcctgctggtgcccatccacctgggcgtgcactggtgcctggccgtggtggacttcaggaagaagaacatcacctactatgacagcatgggcggcatcaacaatgaggcctgccgcatcctgctgcagtacctgaagcaggagagcattgacaagaagaggaaggagtttgacaccaacggctggcagctgttcagcaagaagagccaggagatcccccagcagatgaatggaagtgactgtggcatgtttgcctgcaagtatgctgactgcatcaccaaggaccggcccatcaacttcacccagcagcacatgccctacttcaggaagaggatggtgtgggagatcctgcacaggaagctgctgtag

SEQ ID NO: 334017 - DNA, 1932 bp, Artificial Sequence
  derived and/or modified sequence
atggatgacattgctgacaggatgaggatggatgctggggaggtgaccctggtgaaccacaacagcgtcttcaagacccacctgctgccccagacaggcttccctgaggaccagctgagcctgagtgaccagcagatcctgagcagccggcagggccacctggaccgctccttcacctgcagcaccaggtctgctgcctacaaccccagctactacagcgacaaccccagcagtgacagcttcctgggcagcggggacctgcggaccttcggccagagcgccaacggccagtggaggaacagcacccccagcagcagcagcagcctgcagaagagcaggaacagccgcagcctgtacctggagaccaggaagaccagcagcggcctgagcaacagctttgctgggaagagcaaccaccactgccacgtgtctgcctatgagaagagcttccccatcaagcctgtgcccagccccagctggagcggcagctgcagaagaagcctgctgagccccaagaagacccagaggagacatgtgtccacagctgaggagaccgtgcaggaggaggagcgggagatctaccggcagctgctgcagatggtgacaggcaagcagttcaccatcgccaagcccaccacccacttccccctgcacctgagccgctgcctgagcagcagcaagaacaccctgaaggacagcctcttcaagaatggaaacagctgtgccagccagatcatcggcagtgacaccagcagcagcggcagcgccagcatcctgaccaaccaggagcagctgagccacagcgtgtacagcctgagcagctacaccccagatgtggccttcggcagcaaggacagcggcaccctgcaccacccccaccaccaccacagcgtgccccaccagcctgacaacctggccgccagcaacacccagagcgagggcagtgacagcgtcatcctgctgaaggtgaaggacagccagacccccacccccagcagcaccttcttccaggccgagctgtggatcaaggagctgacctctgtgtatgacagccgggcccgggagcggctgcggcagatcgaggagcagaaggccctggccctgcagctgcagaaccagaggctgcaggagcgggagcacagcgtgcatgattctgtggagctgcacctgcgggtgcccctggagaaggagatccctgtgacagtggtgcaggagacccagaagaagggccacaagctgacagacagtgaagatgagttccctgagatcacagaggagatggagaaggagatcaagaatgtgttcagaaatggaaaccaggatgaggtgctgtctgaggccttccggctgaccatcaccaggaaggacatccagaccctgaaccacctgaactggctgaatgatgagatcatcaacttctacatgaacatgctgatggagaggagcaaggagaagggcctgcccagcgtgcacgccttcaacaccttcttcttcaccaagctgaagacagctggctaccaggccgtgaagcgctggaccaagaaggtggatgtgttttctgtggacatcctgctggtgcccatccacctgggcgtgcactggtgcctggccgtggtggacttcaggaagaagaacatcacctactatgacagcatgggcggcatcaacaatgaggcctgccgcatcctgctgcagtacctgaagcaggagagcattgacaagaagaggaaggagtttgacaccaacggctggcagctgttcagcaagaagagccagatcccccagcagatgaatggaagtgactgtggcatgtttgcctgcaagtatgctgactgcatcaccaaggaccggcccatcaacttcacccagcagcacatgccctacttcaggaagaggatggtgtgggagatcctgcacaggaagctgctgtag

SEQ ID NO: 334018 - DNA, 1935 bp, Artificial Sequence
  derived and/or modified sequence
atggacgacatcgccgaccggatgcggatggacgccggcgaggtgacactggtgaatcacaacagtgtgtttaagacccacttactgcctcagacagggttcccggaggaccagctatccctcagcgaccagcagatcctgtcctccagacaagggcatttggatcgttccttcacatgttccacccgatccgccgcctacaaccccagttactactctgacaacccatcttctgatagctttctgggttcaggcgatctgaggacttttgggcagtctgctaatgggcagtggcgcaacagcacaccttctagttcatcatctctgcagaaatctcgtaacagtcgaagcctttacctagaaacaagaaagacgtctagtggcctgtcaaattccttcgccggaaaatccaaccaccattgccacgtgtctgcctacgagaagtctttcccgattaagcccgtgccttctccttcttggtcaggctcatgccgacggagcctgctcagtcccaagaaaactcagcgccggcacgtatccactgccgaagagaccgtacaggaggaagaaagagagatatatcggcagctcctgcaaatggttaccggcaagcagttcacgattgccaagcctaccacccattttcccttgcacctgtcacgttgtctgagctctagcaaaaacacactgaaggactctctgttcaagaatgggaattcgtgcgcaagccagattattgggtctgacacgtcaagtagcggctctgcctccattctgactaaccaagagcagctgagccactccgtctacagcctcagctcttacacacctgatgtcgcatttggaagtaaggactctgggacactgcatcacccccaccaccaccattcagttccccatcagccagacaacttagctgcaagcaatactcaatccgagggttctgatagcgtcatcctcctgaaggtgaaggattctcagaccccaacgcccagctctaccttttttcaagccgaactctggatcaaggaactcacatctgtctacgatagtcgcgcaagggaacgcctcaggcagatcgaagagcaaaaggccctggccctccagctacaaaatcagagactacaggaaagagaacactccgtccacgatagcgtggaactgcatttacgggttccattggagaaggaaattcctgtgacagtggtgcaggaaacgcagaaaaagggacacaaactcaccgactccgaggatgaattcccagaaatcacggaggaaatggagaaagaaatcaaaaacgtgtttcggaatggcaatcaagatgaggtgctctcggaggcctttaggcttaccattactcgaaaagacatccagacactgaatcatctgaattggctgaacgacgaaattatcaacttttacatgaacatgctcatggagcggagtaaggaaaaggggctccccagcgttcacgctttcaatacttttttctttaccaagctcaaaacggcgggttatcaggccgttaagcgctggacaaagaaagttgatgtgttttcagtggatattctcctggtacctatccatctcggcgtgcattggtgccttgctgttgtggatttccgcaaaaaaaacatcacatattatgattcaatgggcggcatcaataatgaggcatgtcgaatcctcctgcagtacctgaaacaggaaagtattgataagaagagaaaggaattcgacaccaatgggtggcagctctttagtaagaagtctcaggagatcccccaacagatgaatggctccgattgcgggatgttcgcctgtaagtatgctgactgtattactaaggacaggcccatcaatttcacacaacaacatatgccatacttcagaaagaggatggtgtgggaaatcttacatcgtaagctcctctag

SEQ ID NO: 334019 - DNA, 1932 bp, Artificial Sequence
  derived and/or modified sequence
atggacgacatcgccgaccggatgcggatggacgccggcgaggtgacactcgtgaaccacaattcagtgtttaagacacatctgttaccccaaacaggctttcctgaagaccagttgtccctgtccgatcagcagattctgtcctcgagacaaggacatcttgaccgatccttcacttgtagcacccggagtgcggcatacaaccctagttactacagtgataacccctcttcagatagcttcctaggcagtggtgaccttagaaccttcgggcagagcgctaacggccagtggcgaaattccacaccctccagctcttcttcactgcagaagtctcgtaactccagaagtctctacctagaaacccggaagacttcctctggcctctccaacagtttcgcaggtaaatcaaaccaccattgccacgtgtcagcctatgagaaatctttcccgattaagccggtaccctcgccgtcttggtcgggttcatgcagaaggtcccttctgtctcctaagaaaacacagcgccggcatgtctccaccgccgaggaaacagtgcaggaggaggagcgcgagatctaccgccaactgctgcagatggtgacaggcaagcaatttaccattgccaaacccaccactcacttccctctgcacctgtcccgctgcctatccagtagtaaaaacaccttaaaagattccctattcaagaacggaaactcttgtgcctcccagatcattgggagtgacacctccagcagcggcagcgcttctatcctgacaaatcaggaacaactcagtcattctgtctatagcttatcctcttacacgccagacgtagccttcgggtccaaggactcaggtacattacaccatccacatcatcatcacagcgttccgcaccagcctgataacttagcagcatccaatacacagagcgagggatctgacagcgtgatcctcttgaaggtgaaggacagtcagacccccaccccaagtagcacattctttcaggctgaactgtggatcaaggagttaacaagtgtgtacgactctagagcccgtgaacggctacggcagatagaggaacagaaagcgctggccttgcaactccagaaccagagactccaggaacgggagcatagtgtgcacgactcagtcgagctgcatctgcgagtgcccctggagaaggagattccagtgacagtggtgcaggaaactcaaaaaaaaggccataagctgacggatagcgaggacgagttccccgaaataacagaggagatggaaaaggagattaagaatgtgtttagaaacggcaaccaggacgaagtgctcagcgaagcattcaggctgaccattacccgaaaggacattcagacactgaaccatttgaactggctgaacgacgagattataaatttttacatgaacatgctcatggagcgctctaaagagaagggcctgccctccgtccatgcttttaatacttttttctttaccaagctgaaaacagccggttatcaggcagtcaaaaggtggacaaagaaagtagacgttttttctgttgacattctcctcgtacctatccacctcggtgtccactggtgcttagccgtcgtggattttcggaagaagaatataacctattacgacagtatggggggaattaacaatgaggcgtgtcgtatactgctccagtacctgaaacaggagtcaatcgataaaaagagaaaggagtttgatacgaacggctggcagcttttttcaaaaaagtcacagattccacaacagatgaatggctccgattgcgggatgtttgcctgtaaatacgctgactgtattacgaaggaccggccaattaactttactcaacagcatatgccttatttccgcaaacgaatggtgtgggagattctgcatagaaaattactttag

SEQ ID NO: 334020 - DNA, 1935 bp, Artificial Sequence
  derived and/or modified sequence
atggacgacatcgccgaccggatgcggatggacgccggcgaggtgacactggtgaaccataatagcgtattcaagactcatttattgcctcagacaggctttcctgaagatcagctgtccttatccgaccagcagatcctctcaagccgccaggggcatctggaccgatccttcacatgtagtacgaggagcgcggcctacaatccatcctattacagcgacaacccctcctcagatagtttcttagggagcggcgatctacgaacattcgggcaaagcgctaatggccagtggcggaacagcactcccagctcatcaagctcactgcagaaatcccgtaattcccgttccctgtatctggagacacgcaaaacctccagtggcctgtctaactcgttcgccgggaagtccaaccatcactgtcatgtgtcagcttacgagaagagcttcccgatcaaaccagtaccttcacccagttggtccgggtcatgcagacgctcacttctttcccctaagaagacacaacgtcggcatgtcagcacagccgaggagactgtgcaggaagaggagagagaaatttaccggcagctgctgcagatggtgacaggtaagcagttcaccatagctaagccaaccactcactttccactgcatctctcacggtgtctctcctcctccaagaacactctgaaggactccttattcaagaatggaaactcctgtgcttcacagattatcggcagcgacacaagcagtagcgggtcagcctccattctaaccaatcaggaacaactgtcccattctgtgtattctctgtcaagctacacgccagatgtcgcctttgggagtaaggatagcggaaccttacaccacccgcaccaccatcactcggttccccaccagccagacaatctggccgcttcaaatacacagtctgagggtagtgactctgtgatcctgctaaaagttaaggacagccagacaccaaccccgtccagtactttctttcaagccgagctttggatcaaagaactgacttccgtgtacgactccagagcccgggagcggttgagacaaatcgaggaacagaaagccctggcgttgcaactgcagaaccagcggttgcaggaacgcgagcattcagtgcatgactccgttgaactccacctgagggtccccctggagaaggaaatccccgtcacagtggtgcaggaaacgcaaaaaaagggccacaagcttactgattctgaggacgagttccctgagatcactgaggagatggagaaagagattaagaacgtgttccggaatggaaatcaggacgaggtgttaagtgaagccttcagactcacaatcacacgcaaggacattcagacgttgaaccaccttaattggttaaacgacgagatcatcaatttttatatgaatatgctcatggaacggtcgaaagagaaaggactgccctcagtccacgcatttaatacctttttcttcacaaaacttaaaaccgctgggtatcaggccgttaagagatggaccaaaaaagtcgacgtcttcagcgtggacatactcttggttcccatacatttaggtgtgcactggtgtctggcggtagtggacttccgcaagaagaatatcacatactacgactctatgggcggaatcaacaacgaggcttgtcggatcctactccaatatctcaaacaggaatccatcgataagaaacggaaggagttcgataccaacggctggcaactgttcagcaagaagagccaagaaattccgcaacagatgaacggaagtgactgcggcatgttcgcgtgtaagtacgcagactgtatcaccaaagacagacctatcaatttcactcagcagcacatgccatactttcgaaagcggatggtgtgggagatactccatcgaaagttattgtag

SEQ ID NO: 334021 - DNA, 1932 bp, Artificial Sequence
  derived and/or modified sequence
atggacgacatcgccgaccggatgcggatggacgccggcgaggtgaccttggtgaaccataacagcgttttcaaaacacatttgctcccacagaccggttttcctgaggaccagctgtcactgtccgaccagcagattcttagctcccggcagggtcacctcgaccggagttttacttgttccactaggagcgccgcctacaatcctagttactatagtgacaaccctagctctgactctttcttggggagtggagatctgagaacatttggacaaagtgcaaatggtcagtggcgcaatagtactccatcatcttcttcctccctccagaagagcaggaactcccggtcgttatacctggaaacgcgcaaaacaagctctggacttagtaactcttttgccggtaagagcaatcatcactgtcacgtaagcgcttacgaaaagtcttttcccatcaagcccgttccctctccctcctggtcgggcagttgtaggcgttcacttctctctcctaaaaaaacgcagcgccgacacgtctcaaccgcggaagaaacagttcaggaagaggaacgggagatctatagacaattacttcagatggtcaccgggaagcagtttactattgccaaaccaactactcacttcccactccacctgagccgctgcctatccagttctaagaataccctgaaagattcactgtttaagaacggtaattcatgtgctagccagattatcggctctgacaccagctcctctgggtcagcttctatcctgacaaatcaggaacagctctcccactctgtgtattcccttagtagttatactcccgacgtcgcttttggatccaaagactcaggaactctgcaccacccacaccaccatcacagcgtgccccaccagccagacaacctggccgcctctaacacccagtctgagggcagcgattccgtaattctccttaaggtaaaggatagtcaaacacctacaccctcctcgacatttttccaggccgaactgtggattaaggagctgacttctgtgtatgatagtcgcgcgagggagcggctcagacaaatcgaagaacaaaaggccctggctctgcagctgcagaatcagcggttgcaggaacgagagcattctgtgcatgacagcgtcgagttacacctgcgcgtcccattggaaaaagaaattccagtgactgtggttcaagagacacaaaagaagggccacaagctgacagactccgaggacgagtttcctgaaatcaccgaggagatggagaaagaaattaagaacgtgtttcgcaatggaaatcaagatgaggttctctcggaagccttccggctgacaatcacccgaaaggacatccagacactgaatcatctgaattggctgaatgatgagatcatcaacttttacatgaacatgctaatggagagatccaaggagaaggggcttccgtctgtccatgcattcaatacctttttcttcactaagctaaagacagcagggtaccaggcagttaagagatggactaagaaagtggacgtgttcagcgtcgatattctgctggttcccatccacctcggagtccactggtgcctcgcagtggtggacttccgaaaaaagaatattacttattatgattcgatgggcggcattaataacgaggcatgcaggatcctcctccagtacctgaagcaggaatccatagataagaagcgaaaggaatttgatactaatgggtggcagcttttctccaagaagagccaaattccgcagcagatgaatgggagcgattgtggaatgtttgcctgtaagtatgcagattgtattacgaaggatagacccataaactttacacaacagcacatgccatactttcgaaaacgaatggtttgggaaatactccatcggaaattattgtag

SEQ ID NO: 334022 - DNA, 1935 bp, Artificial Sequence
  derived and/or modified sequence
atggacgacatcgccgaccggatgcggatggacgccggcgaggtgaccctggtgaatcacaatagtgtctttaagacccacttgctcccacagaccggatttccagaggaccagctctcattatcagaccaacagatactgagtagtcgccagggacacttggacaggagttttacttgctcgacaaggagcgccgcctacaacccatcctattattcagacaatccctcaagtgactcgttcctagggtccggggatttacgaaccttcggacagtctgccaatggacaatggcgcaattctaccccatccagctccagttctctgcagaaaagccggaactcccgaagcctgtatcttgaaacccgcaaaacttcttctggtctgtccaactctttcgcaggtaagagcaaccatcattgccatgtctcggcctacgaaaaaagctttccaatcaagcctgtcccatctccatcctggtccggctcctgtaggaggagtctcctgtcccccaagaaaacccagcgcagacacgtctccaccgctgaagaaactgtccaggaagaagaacgtgagatctacaggcagcttctgcaaatggtaactggaaagcagttcacaattgcaaagccaaccactcacttcccgctgcacttatcaaggtgtctgagctcttccaaaaacactctgaaagattcccttttcaaaaacggaaactcttgcgcctcccagattataggtagcgataccagctcctctggaagcgcctcgatccttacaaatcaggagcagttatcccacagcgtgtatagcctttcaagttatacaccagatgtggctttcggatccaaggatagtggaacactgcatcatccacatcaccatcatagtgtcccacatcaacccgataacttggccgctagcaatacccagtcggagggcagcgactccgtcatcctactgaaagtgaaggactcccagacaccgacaccaagctccacatttttccaagccgagttatggatcaaagagctgacctctgtatacgacagccgcgctcgagaacgcctgcggcagattgaggagcaaaaagctctcgcgctccaactgcaaaaccagcgcctgcaggagcgggaacactccgtgcatgacagcgtcgagctgcatctccgtgtgccactcgagaaggagatcccagtaacggttgtccaagaaacccaaaaaaaaggacacaagctgactgatagcgaagatgaatttcctgagattacagaggagatggaaaaagaaatcaaaaacgtgttccgaaatggaaaccaggatgaagttctctccgaggcgttccggttaaccatcacacggaaggatattcagacgctgaaccatttaaattggcttaatgatgaaataattaacttttacatgaacatgctcatggagagatctaaggaaaaaggcctcccttctgtgcacgctttcaatacatttttttttacaaagctgaaaaccgcaggctatcaggcggtcaagcgctggacgaagaaggtggacgtgttttctgtggatattctgctagtgccgatacacctcggagttcactggtgtcttgctgtggtggattttcgtaagaaaaacatcacctactacgacagcatgggggggataaacaacgaggcctgcagaattctactccagtatttgaagcaagaaagcatcgataagaaacggaaagagtttgacaccaatggatggcagttgttcagcaaaaagtctcaggagattccacaacagatgaacgggtcagactgcggaatgtttgcctgcaagtatgcggactgtattacaaaggatcggccaatcaacttcactcaacagcacatgccctatttcagaaaacgcatggtgtgggagattctacacagaaagttgctatag

SEQ ID NO: 334023 - DNA, 1935 bp, Artificial Sequence
  derived and/or modified sequence
atggacgatatcgctgatcggatgcggatggatgctggggaagtgacactggtcaatcacaatagtgtattcaagacacacttactcccccagacaggatttcccgaagaccagttatcactgagcgatcagcaaatactgtcctcccggcagggccacctcgacaggagttttacttgctccacacgttcagctgcttacaatccaagctattactccgataaccctagttctgattctttcttgggatctggggacctgcgcacgttcggccagagcgccaatggccagtggcgcaacagcacccccagctctagtagctctttgcaaaagtcacgcaattctcgaagcttgtatttggagactcggaaaacaagctcggggttgtccaatagcttcgctgggaagtctaatcatcattgccatgtttccgcctatgagaagtcgttccccatcaagcccgttccgtctccttcatggagcgggagctgcagacgcagcttactcagtccaaaaaagactcaacgcaggcacgtttcaactgcagaggagactgtgcaggaggaggaacgggagatctatcggcaattactccagatggtgaccggtaagcagttcaccattgcaaaacccaccacacacttccccctccacctttcccgttgtctctcttcaagcaaaaatactttaaaagactctttattcaaaaacggcaactcatgcgcctctcaaattattgggagcgacacgtcttcctcaggcagcgcttccattctgactaatcaggagcaactgagtcattccgtctactcactcagctcttatacacctgatgtggcctttgggtccaaagacagcgggaccctgcatcacccccaccatcatcatagtgtgcctcaccaaccagataacctggcagcatcgaacacgcagagtgaaggctctgattccgtgatcctcctaaaagtgaaggattcacagacacctactccttcctcgactttttttcaggccgagctgtggatcaaagaactgacatctgtatacgattctagggcacgcgagagactgcgacagattgaggagcagaaagctttagcattgcaacttcagaatcagagattacaagagcgtgaacacagcgtccatgattcggtagaactgcatttaagggtgcccttggaaaaggaaataccagtgaccgtcgtacaggagactcagaagaagggacataagctcactgacagcgaagacgagtttcctgaaataaccgaagaaatggaaaaggagattaaaaacgtgtttcgtaatggcaatcaggatgaggtcttatcagaggcattccgtcttacaattaccaggaaagacatccagaccctgaaccacctcaattggcttaacgatgagattatcaacttttacatgaacatgcttatggaaaggtcaaaggaaaagggcctgccgagcgtgcatgcatttaacacgttcttctttaccaaactgaagaccgccggttaccaagccgtgaagcggtggacaaagaaggtcgatgtgttctccgttgatattctgcttgtccccatccacctgggggtacactggtgtttggccgttgtggacttccgaaagaaaaatatcacatattacgacagtatgggagggataaacaatgaggcgtgccggattcttctccagtatctgaaacaggaaagtattgacaagaagcgcaaggaattcgataccaacggatggcagctcttctcaaagaagtcccaggaaatcccgcagcagatgaacggttccgattgcggaatgtttgcctgcaaatatgccgattgcatcacgaaagatagacccatcaatttcacccagcagcacatgccatattttagaaagagaatggtgtgggagattctccacagaaagttgctatag

SEQ ID NO: 334024 - DNA, 1932 bp, Artificial Sequence
  derived and/or modified sequence
atggatgacatcgccgacagaatgcgcatggacgcaggcgaagtgaccttggtgaaccataatagtgttttcaagacacatctgttaccccagacagggttcccagaggaccagctgtccttaagcgatcagcagatcctgtcgagccgacagggccacctcgatcgaagctttacttgctcgactaggtcagcagcctataacccctcctattactctgataatccaagcagtgattccttcctgggctctggggacttgagaaccttcggccaaagtgctaatggacagtggcggaacagtaccccgtcctcgagtagttctctgcagaagagtagaaactctcggagcctttaccttgagacgcgaaaaactagctcaggactgtctaattccttcgcagggaagagcaatcatcattgccacgtcagcgcctatgagaagagcttccccatcaagccggtgccttcaccttcttggagtggctcatgcagaagaagcttactgagcccaaagaaaacgcaacggcgacacgtgtctacggcagaagagaccgtgcaagaagaagagagggagatctaccgacagctgctgcagatggttaccggcaagcaatttacgatcgctaagccaacaacacactttcccctgcacctgtccaggtgtctaagctcttccaaaaacacacttaaagacagtctttttaaaaatggcaactcctgcgcgtcacaaataattggcagtgacacatcatcctctgggtccgcctcaatcctcaccaaccaggagcaattgtcccattccgtgtatagcctgtcctcctacaccccggacgtggctttcggatccaaggacagtggcaccctgcatcacccacatcaccatcacagtgtgccacaccaacccgacaatctggcggcttctaacacacagagtgaagggtcagatagcgtgattctactcaaagttaaggacagtcagacaccgacacccagttcaacctttttccaggccgagctttggattaaggagcttacttccgtgtatgattctcgggctagggagcgtctgcgacaaattgaagagcagaaggcgctggcgttgcagctgcaaaaccagcggttgcaagagagagaacacagcgttcacgattcggttgaattgcacttgagggtgcctctggagaaggagatcccagtcaccgttgtccaagagacccaaaagaaagggcacaaactgacagattctgaggatgaattccctgaaatcactgaagaaatggagaaggagatcaagaacgtgttccggaatggtaatcaggacgaggtcttgtcagaggcctttcggttgaccataacacgaaaggacattcagaccctcaatcaccttaactggttaaacgacgaaatcatcaatttttatatgaatatgctaatggagcgctctaaggaaaagggtctgccttccgtacatgccttcaacacttttttcttcactaaactgaagaccgcgggatatcaggctgtgaagcgctggactaagaaggtggatgtgttctctgtcgatattttactagtaccaatccacctcggcgtacattggtgtctggccgtagtggatttcaggaaaaaaaacattacttactacgactcgatggggggtatcaataatgaggcctgtcggatcctgttacagtacttgaaacaagaaagtatagataaaaaacggaaggaattcgacacgaatggttggcagctgttttcaaagaaaagtcaaatcccccagcaaatgaatgggtccgactgtgggatgtttgcttgtaagtacgcagattgtattacaaaagataggccaatcaactttactcagcagcacatgccctacttccgaaaaaggatggtgtgggagatcctacatagaaagctgctgtag

SEQ ID NO: 334025 - DNA, 1935 bp, Artificial Sequence
  derived and/or modified sequence
atggatgatatcgctgacagaatgaggatggatgccggagaggtcactctagtgaaccacaattccgttttcaagacccacttgttaccccagacaggctttccagaagatcagctctccctgtccgatcagcaaattctttcctccaggcagggacaccttgatcgttcctttacatgttccacccggtctgccgcatacaatccctcctactactctgacaatcccagttcggactcttttctgggctccggagacctgagaaccttcgggcagtctgctaacggccagtggcgaaattccacacctagcagcagtagctcactgcagaaaagcagaaactctagatcgttgtatcttgaaactagaaagaccagttctgggcttagcaactccttcgcgggaaagtctaatcaccattgccatgtgtctgcgtatgaaaagagctttccaatcaagccggtgccatccccctcctggtctggttcctgtcgtagaagtctgctgtctcccaaaaaaacacagagaagacatgtgagcacagccgaagagacagtccaggaagaagagcgtgaaatctaccggcaactacttcagatggtgacaggtaaacagttcaccattgctaaaccaaccacacattttcctttgcacctgagcagatgtctgagctcctccaagaacaccctgaaggacagcctcttcaagaatggcaactcttgcgctagccagattattggctcagataccagcagtagtggctcggcctcaatcctgacgaaccaggaacagttatcccactctgtctacagtctctccagctatacaccagatgttgctttcggtagtaaagattcagggactttgcaccacccacatcatcaccactccgtaccccatcagcccgacaacctggcagcatccaacacacagagtgaaggatccgactccgtgatcttactgaaagttaaggattctcagacacccactccatctagtacgtttttccaagctgagttgtggattaaggaactcaccagtgtctacgattctagagccagggagcggctgagacagatcgaggaacagaaggcactggccctccaactccaaaatcagaggttgcaagaaagggaacactctgttcacgattcagtcgaattacacctgcgagtgcccctggagaaggagatccccgtgacagtcgtccaggagacccaaaaaaaggggcataagctcaccgatagtgaggatgaattcccggaaatcacagaggaaatggagaaagaaatcaaaaacgtctttcggaacggtaaccaggatgaggtgctctccgaagctttcaggttaaccatcacaaggaaagatatacagacactgaaccacctgaactggctcaatgacgagatcatcaatttctacatgaacatgctaatggaacgttctaaagagaagggtctgccgagcgttcacgcatttaataccttcttctttacaaagttgaaaactgctgggtatcaggccgtcaagaggtggacgaaaaaagttgatgtgtttagtgttgacatacttttggttcccattcatctgggggttcactggtgccttgcagtcgtcgactttagaaagaaaaacatcacatactatgactccatgggcggaataaacaatgaggcttgtaggatcctgctgcagtatttgaaacaggaaagcattgataagaagagaaaagagtttgacacaaatggatggcagctgttctcaaaaaaatcacaggagatcccccaacaaatgaacgggtccgactgtgggatgttcgcttgtaagtatgcggactgcataactaaggatcggcctattaattttacgcagcagcacatgccatactttaggaagcgtatggtgtgggagattctgcaccggaaactcctgtag

SEQ ID NO: 334026 - DNA, 1932 bp, Artificial Sequence
  derived and/or modified sequence
atggatgatatcgcagaccgcatgaggatggatgccggagaggtcactctggtcaaccataactccgtctttaagactcacctgctaccccagacggggttccctgaagatcagcttagcctttccgaccagcagattctgtcttcccgtcaggggcacctcgacagatcttttacatgctccacacgatcggccgcatacaacccaagctactattccgacaacccatcaagcgattcattcctgggatccggggatttaagaacctttggtcagtccgcgaacggccagtggagaaacagtactcctagttcctcaagtagtctgcagaaaagccgcaatagccggtctttgtacctggaaacccgtaagacctcgtcaggtctgagtaactccttcgcaggcaagtcaaaccatcactgtcatgtgtcggcctacgaaaaatcctttcccataaagcctgtgccatcccctagttggagtgggtcctgccgcagaagcctgctgtcaccgaaaaagacccaacggcgacacgtctccacagcagaggaaactgtgcaggaggaggagcgggagatttatagacagctgctgcagatggtgaccggcaagcagttcaccatcgcgaagccaactacacactttccactgcatctgtctagatgtctgtcatcctccaaaaatacactcaaggacagcctgtttaaaaatggtaacagctgcgcctcccaaattatcggttccgacacctcatcatcaggcagcgctagtattctgaccaatcaagagcagctgagtcactccgtgtatagtctgagctcttacaccccagacgtggcttttggttctaaagatagtgggactctgcaccacccccaccaccatcatagtgtcccacatcagccggataatctggctgcttcaaatacacaatccgaagggagtgattcggtgattcttctgaaggtgaaggattctcagactccaacaccatcaagcactttttttcaggccgaactttggataaaggaactaaccagcgtttacgattcacgtgcccgagagcgattacgccagatcgaggagcagaaggccctcgcattacagctacaaaaccagagactgcaggagcgagagcactcagtgcacgactcagttgagcttcatctgagggtgcccttggagaaggagatccccgtcacagtcgttcaggaaacccagaagaagggacacaagctcactgactctgaagatgaattcccagagattacagaagagatggagaaagagattaaaaatgtattcaggaatggtaatcaggatgaggtcctatctgaggccttccgacttactattacccgcaaagacattcagaccttaaatcacttgaactggcttaatgatgagatcattaatttctacatgaacatgctgatggagaggtccaaggagaagggcttgccctctgtgcacgcttttaacacctttttttttactaaactgaaaaccgccggataccaggcagtcaaacgatggacaaaaaaagtagacgtcttcagcgtggacatccttctggttcccatacacctgggagtgcattggtgcttggccgttgtggatttcagaaagaaaaacataacctactatgatagcatgggcggtattaacaatgaagcgtgccgcatcctgctgcaatatctgaaacaggagtctatcgataaaaaacgtaaagagtttgatacaaacggctggcagttattttctaaaaagagccagatccctcagcagatgaatggatctgattgcggcatgtttgcctgtaaatatgctgactgtataacaaaggatcgccctattaactttactcagcagcacatgccgtattttcggaaacggatggtctgggaaatccttcacagaaaactcctatag

SEQ ID NO: 334027 - DNA, 1935 bp, Artificial Sequence
  derived and/or modified sequence
atggacgatatcgccgaccgcatgcgtatggacgcaggcgaagtcacactggtgaaccacaatagtgtcttcaagactcatctgttgccgcaaaccggtttccccgaagatcaattgtctctttctgaccagcagatcttatcctctcggcaaggacatctggatagatcgttcacctgcagcactcgctcagcagcctacaacccctcctattattcagataatccctcatccgattccttcctgggctctggggacctgaggacctttggacaatcagcaaatggccagtggagaaactccacaccatcgagtagttcttcccttcagaaatctcgcaactcacgatctttatacctggaaaccaggaagactagtagcggcttgagcaacagtttcgctggcaagtctaatcaccactgtcacgtctctgcatatgaaaagtctttccctatcaaacccgtgccctctccatcttggtcgggctcttgccgaaggtcactgttgtcacccaaaaagactcagaggagacatgtgtctacagcagaggagactgtgcaggaagaagagcgggaaatttatcgacagttgctgcagatggtgaccggcaaacagtttaccatcgcgaaacctaccacccactttcccctgcacctgtccagatgcctgagttcttccaaaaatactttaaaagacagcctcttcaaaaatggcaactcatgtgcctcgcagatcatcggcagcgataccagcagctctggttccgctagtatccttaccaaccaggagcaactgtcccacagtgtgtactcccttagctcctatacgcctgacgtagcctttggttccaaggattccggaactctgcaccacccacatcatcatcactctgtcccacatcagccagacaacttggcagcaagcaacacacaatctgaaggttcggattcagtgatattgctgaaagtgaaagacagccagacacctactccaagctccaccttcttccaggctgagctgtggatcaaggaactcaccagcgtttacgactcccgagcgcgagagaggttgcgccaaattgaggagcaaaaggctctggcactccaactgcagaaccagcgcctgcaggaacgggagcactctgtacacgacagtgtcgagttgcatctgagagtacctctggagaaggagataccggttacagtggtgcaggaaacccagaagaagggacacaagctgacagactcagaggatgaattcccagagatcaccgaagagatggaaaaagaaatcaaaaacgttttcaggaacgggaatcaggacgaagtgctgtccgaggcgttccggttgaccatcaccaggaaggacattcagacactcaatcacctaaactggctcaacgacgaaataatcaacttctatatgaacatgttaatggagaggagtaaagagaaggggcttccttcggtccatgcctttaacaccttcttttttacgaagctcaaaactgcaggttatcaggccgtgaagcggtggactaagaaggtcgatgtattctcggtggatatcctgctggtgcccatccaccttggggtccattggtgcctggccgttgttgatttccgaaaaaaaaatatcacgtactatgattccatgggtggcattaataatgaggcgtgtagaattctgcttcagtacctcaaacaggagagcatcgataagaaaagaaaggaattcgatacgaacggctggcagctgtttagcaagaagtcccaggagattcctcagcagatgaacggaagtgattgtggtatgttcgcctgcaagtatgctgattgcatcaccaaggaccgacccattaatttcacccagcagcacatgccttacttcaggaagcggatggtgtgggagattcttcataggaagctcctgtag

SEQ ID NO: 334028 - DNA, 1935 bp, Artificial Sequence
  derived and/or modified sequence
atggacgatatcgcggatcgcatgaggatggacgcaggcgaggttacactggtgaaccacaactctgtctttaagacccacttactcccgcagaccggattccctgaggatcagctgtccctctcagaccaacagattctttcttctcgacagggccacctcgaccggtcctttacctgcagcacccgcagtgctgcctacaatccttcttactatagcgacaatccttctagcgactcctttctgggaagcggggacctaagaacatttggacagagcgcaaatgggcagtggagaaactctacaccatcttcatctagttcccttcagaagtcccgcaattccagaagcctgtacctcgaaaccaggaaaacttccagcggattgagtaactcattcgcaggcaaaagcaatcaccattgccatgtaagtgcctatgagaagtcatttcctattaaaccagtaccctccccatcatggtccgggagctgcaggcgctcgctgctaagccccaagaagacccagagaagacacgtatcaactgcagaagaaacagtccaggaagaagagcgcgagatctaccggcagctcctgcagatggtgaccggaaaacaattcaccatcgccaaacccacaactcacttcccattgcacttgtctagatgcctctcatcctcaaagaatactctgaaggatagtctgtttaaaaatggaaactcctgcgccagccagatcatcgggagtgatacgagtagttcagggtcagcctcaattctcaccaaccaggaacagctttctcatagcgtctactccctgtcttcctacaccccagacgttgccttcggttctaaggattcagggacccttcaccatccccatcatcaccactccgtaccacatcagccagataatctcgcagcgtcgaatactcaatccgaaggctcagacagtgtcatcctcttaaaggtgaaagatagccaaactccgaccccatctagcacgttctttcaggcagagctttggattaaagagctcactagcgtatacgactccagggcaagagaacgactacgccagatagaggaacagaaggcccttgccctacagctccagaaccagaggctacaggagagggaacactctgtgcacgatagcgtggagctgcacctacgggtgcccttggagaaagagattcctgtcaccgtggtgcaagagacccagaaaaaaggccataaactgaccgacagcgaggacgagtttccagagatcactgaagagatggaaaaggagatcaagaacgtgttcagaaatggcaatcaggacgaagttctgagtgaggctttccgactgaccattacccgcaaagacatacagactttgaatcacttaaattggctgaacgacgagattattaacttttatatgaacatgctcatggagcgcagcaaagagaaaggcctgcccagcgttcacgcgtttaacacattctttttcaccaagctgaagactgctggttatcaggcggtcaagagatggaccaaaaaagtggatgtcttctctgtggatattcttctggtccccatacacctgggggtgcactggtgtctcgccgtcgtcgacttccggaagaaaaatataacatactatgattctatgggcggcatcaacaatgaggcctgtcggatcctcctgcagtatctgaaacaggagagcatcgacaaaaagagaaaagagttcgatacaaacggctggcagcttttctccaaaaagagtcaggaaattcctcagcagatgaacggttcagactgtggcatgtttgcctgtaagtacgctgattgtatcaccaaggatcgacctatcaacttcactcaacagcacatgccctatttcaggaaaaggatggtatgggagattcttcaccgaaagctgctatag

SEQ ID NO: 334029 - DNA, 1935 bp, Artificial Sequence
  derived and/or modified sequence
atggacgacatcgctgacagaatgagaatggatgccggtgaagttacactggtcaatcataatagcgtattcaaaacccatctgttgccacagaccggcttccctgaggatcaattaagcctgagcgaccagcagattctgtcttcccgccagggtcacctcgatcggtctttcacttgctctacacgcagcgcagcttacaaccccagttactattccgacaatccaagctccgactcgttcctcggatctggcgacttaaggacctttgggcagagcgctaatggtcaatggcgcaacagtaccccaagctctagctccagcttacaaaagagtcgaaacagcagatccctgtatctcgagacccgcaagacatcttctggattatctaactcctttgctggaaagagcaatcatcattgtcatgtatcagcttatgagaagagcttccccattaagccagtcccatcacctagctggagcggttcttgtagacgcagtctccttagccctaagaaaacacagcggcgtcacgtatccacagccgaagagaccgttcaggaagaggaaagagagatctatcgccaactgttgcagatggtaacgggcaaacagttcaccatcgccaaacccactacacatttcccccttcacctcagccgatgcctttcctcatctaagaacaccctgaaagatagcttatttaaaaacggaaactcctgtgctagtcagattatcggttcggatacgagttcatccggtagtgcttctattctgaccaaccaggagcagttatcgcacagtgtctacagcctgtcctcttataccccagacgtagccttcggctctaaggactcaggaacacttcatcacccccatcaccaccacagcgtccctcatcaaccagacaatctggccgccagcaacacacaaagtgagggctccgactctgtgatcctgctgaaagtgaaagactctcaaaccccaactccctcaagtaccttttttcaagccgagctgtggattaaagaacttacctcggtctacgattctcgagctcgggaacgactgcggcaaatcgaagagcaaaaggcactggccctccaactgcagaaccaacggctccaggaaagagaacatagcgtgcacgactctgtcgagctgcacttaagagttcctctcgagaaggagattccagtaactgtagtgcaagagacccagaagaaaggccacaaactgactgatagtgaggacgagttccccgaaatcaccgaggagatggaaaaggaaattaagaatgtgtttcgcaacggtaaccaagacgaagttttgagtgaagcgttccgcttaacgattacccggaaggatatacaaacccttaatcacttaaactggttgaacgatgaaattatcaatttttacatgaacatgcttatggagaggtccaaggaaaagggccttccctcagtgcacgccttcaacaccttctttttcaccaaactcaagaccgcgggctatcaggcagtgaaacgctggacaaagaaggtggatgtttttagcgtggatatccttctcgtgcctatccatctgggcgttcactggtgcctggcagtggttgattttaggaagaagaatattacctattatgactcgatgggaggcattaataacgaggcatgtagaatactactccagtatctgaaacaggagtccatcgacaagaaaagaaaggaattcgatactaacggctggcagctattttctaaaaaatcccaagaaattccccaacagatgaacggctccgactgcgggatgtttgcctgtaaatacgcagactgtataacaaaagaccgccctattaactttacccaacaacacatgccctatttccggaaacgaatggtgtgggaaattctgcacagaaaactgttatag

SEQ ID NO: 334030 - DNA, 4969 bp, Artificial Sequence
  derived and/or modified sequence
gtggccgccggtggccgttaggctacctgaggccgttccttctggtctctctctcctgggccgcggagagaccgtctccctgccgttacagcaggccccatcccagcgcccagccgtacttggggaaaggccggttgcgattccggggctttcccgccagagctgggtcttctctggggagagctgttttcaccgggaagctcggctttctgtggtaccggcttcatctcccgccttccttgagacccgagtgatatttcttgactacttctgcgtctcacgtaaacatttctccaactctcctactctgtggtatctccctgagatgtgatatcgctagtgccaccatcagaaagaaacgtctggaccctcctgctcaggttatgaaaatccccttaactgccacaatttgcttacctggctcatcgcctcctggactttgtatctttgctaaagtcagtgatgtgaaaagacttgaaatggatgatattgctgataggatgaggatggatgctggagaagtgactttagtgaaccacaactccgtattcaaaacccacctcctgccacaaacaggttttccagaggaccagctttcgctttctgaccagcagattttatcttccaggcaaggacatttggaccgatcttttacatgttccacaagaagtgcagcttataatccaagctattactcaggcccaggcctgggagtgcttgcaagatatagttggggtaaaatgttgacttttggtggacaccacggagtcacattgatgcagataaggcacatggctgtggcaggattcagctccttcatcaattttcagataatccttcctcagacagttttcttggctcaggcgatttaagaacctttggccagagtgcaaatggccaatggagaaattctaccccatcgtcaagctcatctttacaaaaatcaagaaacagccgaagtctttacctcgaaacccgaaagacctcaagtggattatcaaacagttttgcgggaaagtcaaaccatcactgccatgtatctgcatatgaaaaatcttttcctattaaacctgttccaagtccatcttggagtggttcatgtcgtcgaagtcttttgagccccaagaaaactcagaggcgacatgttagtacagcagaagagacagttcaagaagaagaaagagagatttacagacagctgctacagatggtcacagggaaacagtttactatagccaaacccaccacacattttcctttacacctgtctcgatgtcttagttccagtaaaaatactttgaaagactcactgtttaaaaatggaaactcttgtgcatctcagatcattggctctgatacttcatcatctggatctgccagcattttaactaaccaggaacagctgtcccacagtgtatattccctatcttcttataccccagatgttgcatttggatccaaagattctggtactcttcatcatccccatcatcaccactctgttccacatcagccagataacttagcagcttcaaatacacaatctgaaggatcagactctgtgattttactgaaagtgaaagattcccagactccaactcccagttctactttcttccaggcagagctgtggatcaaagaattaactagtgtttatgattctcgagcacgagaaagattgcgccagattgaagaacagaaggcattggccttacagcttcaaaaccagagattgcaggagcgggaacattcagtacatgattcagtagaactacatcttcgtgtacctcttgaaaaggagattcctgttactgttgtccaagaaacacaaaaaaaaggtcataaattaactgatagtgaagatgaatttcctgaaattacagaggaaatggagaaagaaataaagaatgtatttcgtaatgggaatcaggatgaagttctcagtgaagcatttcgcctgaccattacacgcaaagatattcaaactctaaaccatctgaattggctcaatgatgagatcatcaatttctacatgaatatgctgatggagcgaagtaaagagaagggcttgccaagtgtgcatgcatttaatacctttttcttcactaaattaaaaacggctggttatcaggcagtgaaacgttggacaaagaaagtagatgtattttctgttgacattcttttggtgcccattcacctgggagtacactggtgtctagctgttgtggactttagaaagaagaatattacctattacgactccatgggtgggataaacaatgaagcctgcagaatactcttgcaatacctaaagcaagaaagcattgacaagaaaaggaaagagtttgacaccaatggctggcagcttttcagcaagaaaagccaggagattcctcagcagatgaatggaagtgactgtgggatgtttgcctgcaaatatgctgactgtattaccaaagacagaccaatcaacttcacacagcaacacatgccatacttccggaagcggatggtctgggagatcctccaccgaaaactcttgtgaagactgtctcacttagcagaccttgaccatgtgggggaccagctctttgttgtctacagccagagaccttggaaacagctgctcccagccctctgctgttgtaacacccttgatcctggaccaggccctggcgagatgcattcacaagcacatctgcctttccttttgtatctcagatactatttttgcaaagaaactttggtgctgtgaaaggggtgagggacatccctaagctgaagagagagactgcttttcacttcttcagttctgccatcttgttttcaaagggctccagcctcactcagtccctaattatgggactgagaaaagcttggaaagaatcttggtttcatataaattcttgttgttaggccttactaagaagtaggaaagggcatgggcaaaaggtagggataaaaaccaccagcatatacatggacatacacacacacccacacacacaaacacacacacacacacaattttcacgatgtatggtcaggaatgtgactgtaaactggactttggggcccaggcataagtcccttcctccaggacctttcctatttatatgtccctatacaaaatccatctgcttttatacgtagctgttttatcatctgtagcttcatcctatccggaggcacagcacatgagccctggacaggtcccaaagttccaagcagtcctttccgtgaaagcaggggtttgcatgtgctaccaacacatgatacggggaagacccacccagggagcggtttcagtggcgcaacaaagcaccacttttactgttgcctacttctgaccaagaagaaaaaggaccttagtatttagcataaaattccagcgctggatgaatgcagatctagtttggtctgtggctagtttaaatatgtttctaaccacagagaatttcatatatatatacatatatatatacacatacatatatatatatatatatgtatgtataaaatttcacagggatatgcttttttttttaaagactgaatgtgttcaccatttagcctgtagatttatttccattttccaaattccagcacacagagatcccagcccctatgagtagggtgtttgtggactacctaatggaatatttttgaggcctggatgaactttgccatatgggtagaggttacagagggaggtgatattttcagctaaaaaaaaaaacgggtggagtttggactgatcaacttgagatttaaaaactgctattccttttgttctttctagcatctctccccaccctctgagagctcctcaggcttagatagtgaagtgatcaaatgccagtgtcattttgtacttaagttccaaagtaggaacattttatacttttttctgtattgtaataggtagttttgtatgaaatcttttctcctctcccgttgtaccgcattctttccagcattgtgctttttccctgggcttatttgaaaattttactgttttatacaagctcgtttagtacatttttctatgttttaccacaagttacaatttgaaaagaaaactattttttttaaatattccattgttaactgaatgttactgtttccactccagcaactacatgtcctcccttcaactgcctgccttttggggaaagaccaccttttgtgtgtttgttttttctctctctttctttccctttctctttctatctctctttatttttctttctttttctttgtttttgagttttctataggaaataaatagctttctatatatgagttgctggggaccttcacattctcttttagaaagctgtggcatgcagtctcattgcaggactcctggaatattgtctggttcttggtatttactgtatgtaagcaacaacttgaaaggtggcaatatggtgtcgatttggactatgaatcaaaagacctttttcaggttctttcactattgtctgggggactcagaacaagattgttctctgtatttattgtttgtccatttaggtaacatctgtcttaccttcctcacagactttgtacagaccaaagcaacaaatatttattgccatgtatagcagaaaatgaaacatgcaacaaaagcactttgaaaaatatataaggaattgttgagcctgtctgaatttgggccccctttctgactaatgcagttttgcacaaggtagaagttagtgaccctgagaccatcttaccaccctggacctggtccaaatacagacttacacagtggaccattctttcctgagctagccaacaagagcaggagtagtatctggaaactttcccctttgtttaggggtaggctttgatgaccaggaaaaaaaaaaaggtatttctgcattttatggcccaaaggcatgttattaatatcttatgtaatttactttaaactaaataagacttttttctcctgtgt

SEQ ID NO: 334031 - DNA, 1932 bp, Artificial Sequence
  derived and/or modified sequence
atggatgatattgctgataggatgaggatggatgctggagaagtgactttagtgaaccacaactccgtattcaaaacccacctcctgccacaaacaggttttccagaggaccagctttcgctttctgaccagcagattttatcttccaggcaaggacatttggaccgatcttttacatgttccacaagaagtgcagcttataatccaagctattactcagataatccttcctcagacagttttcttggctcaggcgatttaagaacctttggccagagtgcaaatggccaatggagaaattctaccccatcgtcaagctcatctttacaaaaatcaagaaacagccgaagtctttacctcgaaacccgaaagacctcaagtggattatcaaacagttttgcgggaaagtcaaaccatcactgccatgtatctgcatatgaaaaatcttttcctattaaacctgttccaagtccatcttggagtggttcatgtcgtcgaagtcttttgagccccaagaaaactcagaggcgacatgttagtacagcagaagagacagttcaagaagaagaaagagagatttacagacagctgctacagatggtcacagggaaacagtttactatagccaaacccaccacacattttcctttacacctgtctcgatgtcttagttccagtaaaaatactttgaaagactcactgtttaaaaatggaaactcttgtgcatctcagatcattggctctgatacttcatcatctggatctgccagcattttaactaaccaggaacagctgtcccacagtgtatattccctatcttcttataccccagatgttgcatttggatccaaagattctggtactcttcatcatccccatcatcaccactctgttccacatcagccagataacttagcagcttcaaatacacaatctgaaggatcagactctgtgattttactgaaagtgaaagattcccagactccaactcccagttctactttcttccaggcagagctgtggatcaaagaattaactagtgtttatgattctcgagcacgagaaagattgcgccagattgaagaacagaaggcattggccttacagcttcaaaaccagagattgcaggagcgggaacattcagtacatgattcagtagaactacatcttcgtgtacctcttgaaaaggagattcctgttactgttgtccaagaaacacaaaaaaaaggtcataaattaactgatagtgaagatgaatttcctgaaattacagaggaaatggagaaagaaataaagaatgtatttcgtaatgggaatcaggatgaagttctcagtgaagcatttcgcctgaccattacacgcaaagatattcaaactctaaaccatctgaattggctcaatgatgagatcatcaatttctacatgaatatgctgatggagcgaagtaaagagaagggcttgccaagtgtgcatgcatttaatacctttttcttcactaaattaaaaacggctggttatcaggcagtgaaacgttggacaaagaaagtagatgtattttctgttgacattcttttggtgcccattcacctgggagtacactggtgtctagctgttgtggactttagaaagaagaatattacctattacgactccatgggtgggataaacaatgaagcctgcagaatactcttgcaatacctaaagcaagaaagcattgacaagaaaaggaaagagtttgacaccaatggctggcagcttttcagcaagaaaagccagattcctcagcagatgaatggaagtgactgtgggatgtttgcctgcaaatatgctgactgtattaccaaagacagaccaatcaacttcacacagcaacacatgccatacttccggaagcggatggtctgggagatcctccaccgaaaactcttgtga

SEQ ID NO: 334032 - protein, 325 aa, Artificial Sequence
  derived and/or modified sequence
MPCIQAQYGTPAPSPGPRDHLASDPLTPEFIKPTMDLASPEAAPAAPTALPSFSTFMDGYTGEFDTFLYQLPGTVQPCSSASSSASSTSSSSATSPASASFKFEDFQVYGCYPGPLSGPVDEALSSSGSDYYGSPCSAPSPSTPSFQPPQLSPWDGSFGHFSPSQTYEGLRAWTEQLPKASGPPQPPAFFSFSPPTGPSPSLAQSPLKLFPSQATHQLGEGESYSMPTAFPGLAPTSPHLEGSGILDTPVTSTKARSGAPGGSEGRCAVCGDNASCQHYGVRTCEGCKGFFKVPRSPRWGLLLEMERGWPHPIGTCGLPLGSPPS

SEQ ID NO: 334033 - DNA, 978 bp, Artificial Sequence
  derived and/or modified sequence
atgccttgcattcaggctcagtatgggaccccagcgccatctcctggacctagagaccatcttgcctcagatccactgacaccagagtttatcaagccgacgatggatcttgcttcgcctgaagccgcacccgccgcacccactgcgctcccctctttctccactttcatggatggatacaccggcgaatttgatacctttctctaccaactgcctgggacagtgcagccttgttctagtgcaagttcgagtgcttcctcaacctcaagcagcagcgccacatcgcctgcatccgcatctttcaagttcgaagacttccaggtgtacggctgctatccaggtccactcagcggccctgttgatgaggctctgtcatcctccggatcggattattatggttcgccgtgttctgctccatcacctagcacaccctcgttccaacccccacaactgtcaccctgggatggtagcttcggccactttagcccttcacagacctatgagggtcttagagcttggacagagcagctgcctaaggcctcaggtccccctcagccaccggcttttttttctttctcgccccccactggcccatccccctcattagctcagagcccactcaagctcttcccctcccaggctacccatcagctcggggaaggagagagctactccatgcccactgcgttccccggtctggccccaacctctccacacttagagggctctggcatccttgacacgcccgtcactagtaccaaagctcgctctggagctccaggtggaagcgaggggcgctgcgcagtttgcggcgacaatgcctcctgccaacactatggggtcagaacttgtgaaggttgtaaagggtttttcaaggttccgcgtagcccccggtggggcctattactggaaatggagcgcggctggccgcatcctatcgggacttgtggccttccactggggtcccctccttcctag

SEQ ID NO: 334034 - DNA, 978 bp, Artificial Sequence
  derived and/or modified sequence
atgccctgcatccaggcccagtatggcaccccagcccccagccctggcccccgggaccacctggccagtgaccccctgaccccagagttcatcaagcccaccatggacctggccagccctgaggccgccccagctgcccccacagccctgcccagcttcagcaccttcatggatggctacacaggagaatttgacaccttcctgtaccagctgcccggcaccgtgcagccctgcagcagcgccagcagcagcgccagcagcaccagcagcagcagcgccaccagccctgccagcgccagcttcaagtttgaggacttccaggtgtatggctgctacccaggccccctgagcggccctgtggatgaggccctgagcagcagcggcagtgactactacggcagcccctgcagcgcccccagccccagcacccccagcttccagcccccccagctgagcccctgggatggcagctttggccacttcagccccagccagacctatgagggcctgcgggcctggacagagcagctgcccaaggccagcggccccccccagcccccagccttcttctccttcagcccccccaccggccccagccccagcctggcccagagccccctgaagctgttccccagccaggccacccaccagctgggggagggggagagctacagcatgcccacagccttccctggcctggcccccaccagcccccacctggagggcagcggcatcctggacacccctgtgaccagcaccaaggcccggagcggggcccctgggggcagcgagggccgctgtgctgtgtgtggggacaatgccagctgccagcactatggagtgaggacctgtgagggctgcaagggcttcttcaaggtgcccaggagcccccgctggggcctgctgctggagatggagcggggctggccccaccccatcggcacctgtggcctgcccctgggcagcccccccagctag

SEQ ID NO: 334035 - DNA, 978 bp, Artificial Sequence
  derived and/or modified sequence
atgccctgcatccaggcccagtacggcacccccgcccccagccccggcccccgggatcatcttgcatcagatccgctgacaccagagtttatcaaaccaactatggacctcgcttcaccagaagcagcccctgccgccccgaccgcccttcccagttttagtaccttcatggatggatacacgggggaatttgacacttttctctaccagttgcccggcacagttcaaccgtgttcatctgcaagcagttcagcctctagcacttccagttccagcgctaccagtcctgcctcggcttccttcaaatttgaagactttcaggtctatggatgctaccctggaccactgagtgggccagtcgacgaagcgctcagctcctctggcagcgactactacggaagcccctgcagcgcaccctcacccagtactcccagtttccagcctcctcaactgtcaccgtgggacgggagctttggacatttcagcccctcccaaacctatgagggattaagagcctggactgagcaactccccaaggcaagcggaccacctcagccacccgcatttttctctttcagtccacccacagggccctccccatctcttgctcagagccccctcaaactcttcccctcgcaagcaactcaccagctcggcgagggcgaatcttactcgatgcctactgcattccctgggctggccccaaccagcccccacctcgaaggttctgggattctcgacaccccagttacatctactaaggcaaggtcgggcgcgcccggagggagtgagggccggtgcgcagtatgtggagacaatgcatcctgtcaacactatggtgttcgcacgtgtgaaggctgcaagggcttcttcaaggtgcctagatccccgagatggggtctgctgctggagatggaacggggttggccccacccaatcggcacatgtggcttgccactggggtccccaccgtcatag

SEQ ID NO: 334036 - DNA, 1101 bp, Artificial Sequence
  derived and/or modified sequence
agtggcggaggctacgaaacttgggggagtgcacagaagaacttcgggagcgcacgcgggaccagggaccaggctgagactcggggcgccagtccgggcaggggcagcgggagccggccggagatgccctgtatccaagcccaatatgggacaccagcaccgagtccgggaccccgtgaccacctggcaagcgaccccctgacccctgagttcatcaagcccaccatggacctggccagccccgaggcagcccccgctgcccccactgccctgcccagcttcagcaccttcatggacggctacacaggagagtttgacaccttcctctaccagctgccaggaacagtccagccatgctcctcagcctcctcctcggcctcctccacatcctcgtcctcagccacctcccctgcctctgcctccttcaagttcgaggacttccaggtgtacggctgctaccccggccccctgagcggcccagtggatgaggccctgtcctccagtggctctgactactatggcagcccctgctcggccccgtcgccctccacgcccagcttccagccgccccagctctctccctgggatggctccttcggccacttctcgcccagccagacttacgaaggcctgcgggcatggacagagcagctgcccaaagcctctgggcccccacagcctccagccttcttttccttcagtcctcccaccggccccagccccagcctggcccagagccccctgaagttgttcccctcacaggccacccaccagctgggggagggagagagctattccatgcctacggccttcccaggtttggcacccacttctccacaccttgagggctcggggatactggatacacccgtgacctcaaccaaggcccggagcggggccccaggtggaagtgaaggccgctgtgctgtgtgtggggacaacgcttcatgccagcattatggtgtccgcacatgtgagggctgcaagggcttcttcaaggtaccgcgcagccccaggtggggccttttgttggaaatggagagaggctggcctcatcccattgggacctgtggtctccccctgggttctcctcctagctaa

SEQ ID NO: 334037 - DNA, 978 bp, Artificial Sequence
  derived and/or modified sequence
atgccttgcattcaagcccagtatggcacccccgcaccttctccaggtccccgtgaccatctggccagcgatcccctgaccccagaatttatcaagcctactatggaccttgccagtcccgaggctgccccagcggctcctacagcgctcccttctttttctactttcatggacggttacaccggggagttcgacacattcctttatcaacttcctggaacagtacagccttgctcttcagcatccagctccgcaagctcaaccagtagttccagcgccacctcacctgcttctgcttctttcaagtttgaggacttccaggtgtatggatgctacccaggtccactttctggaccggtcgacgaagccctaagcagcagcgggtccgattactacggaagcccctgttctgctcccagccccagcaccccttcatttcaacctccacagctctcaccgtgggacggaagttttgggcacttctcccccagccagacatatgagggcctaagagcttggactgaacagctgcctaaagctagcggcccaccccagccaccagccttcttcagttttagcccgcctacaggcccatcaccatccctcgcacagagtcctcttaaattgtttccttcgcaggcgacgcatcaactcggcgagggcgagtcctacagcatgccaactgcattcccgggactcgcacccacgtctccacacctggaggggagcgggatcttggatacccccgtgacgtcaaccaaagctcggagcggtgcccctggagggagcgaaggcagatgtgcggtgtgtggcgataacgcgagctgtcagcattacggcgtacgcacttgtgaggggtgtaaaggattctttaaggttcctcgatctccacgctggggccttctgctcgaaatggagaggggctggccccaccctattggcacctgtgggctccctctgggaagccctcctagctag

SEQ ID NO: 334038 - DNA, 978 bp, Artificial Sequence
  derived and/or modified sequence
atgccctgcatccaggcccagtacggcacccccgcccccagccccggccccagagaccacctggccagcgaccccctgacccccgagttcatcaagcccaccatggacctggccagccccgaggccgcccccgccgcccccaccgccctgcccagcttcagcaccttcatggacggctacaccggcgagttcgacaccttcctgtaccagctgcccggcaccgtgcagccctgcagcagcgccagcagcagcgccagcagcaccagcagcagcagcgccaccagccccgccagcgccagcttcaagttcgaggacttccaggtgtacggctgctaccccggccccctgagcggccccgtggacgaggccctgagcagcagcggcagcgactactacggcagcccctgcagcgcccccagccccagcacccccagcttccagcccccccagctgagcccctgggacggcagcttcggccacttcagccccagccagacctacgagggcctgagagcctggaccgagcagctgcccaaggccagcggccccccccagccccccgccttcttcagcttcagcccccccaccggccccagccccagcctggcccagagccccctgaagctgttccccagccaggccacccaccagctgggcgagggcgagagctacagcatgcccaccgccttccccggcctggcccccaccagcccccacctggagggcagcggcatcctggacacccccgtgaccagcaccaaggccagaagcggcgcccccggcggcagcgagggcagatgcgccgtgtgcggcgacaacgccagctgccagcactacggcgtgagaacctgcgagggctgcaagggcttcttcaaggtgcccagaagccccagatggggcctgctgctggagatggagagaggctggccccaccccatcggcacctgcggcctgcccctgggcagcccccccagctag

SEQ ID NO: 334039 - protein, 2458 aa, Artificial Sequence
  derived and/or modified sequence
MVLLLCLSCLIFSCLTFSWLKIWGKMTDSKPITKSKSEANLIPSQEPFPASDNSGETPQRNGEGHTLPKTPSQAEPASHKGPKDAGRRRNSLPPSHQKPPRNPLSSSDAAPSPELQANGTGTQGLEATDTNGLSSSARPQGQQAGSPSKEDKKQANIKRQLMTNFILGSFDDYSSDEDSVAGSSRESTRKGSRASLGALSLEAYLTTGEAETRVPTMRPSMSGLHLVKRGREHKKLDLHRDFTVASPAEFVTRFGGDRVIEKVLIANNGIAAVKCMRSIRRWAYEMFRNERAIRFVVMVTPEDLKANAEYIKMADHYVPVPGGPNNNNYANVELIVDIAKRIPVQAVWAGWGHASENPKLPELLCKNGVAFLGPPSEAMWALGDKIASTVVAQTLQVPTLPWSGSGLTVEWTEDDLQQGKRISVPEDVYDKGCVKDVDEGLEAAERIGFPLMIKASEGGGGKGIRKAESAEDFPILFRQVQSEIPGSPIFLMKLAQHARHLEVQILADQYGNAVSLFGRDCSIQRRHQKIVEEAPATIAPLAIFEFMEQCAIRLAKTVGYVSAGTVEYLYSQDGSFHFLELNPRLQVEHPCTEMIADVNLPAAQLQIAMGVPLHRLKDIRLLYGESPWGVTPISFETPSNPPLARGHVIAARITSENPDEGFKPSSGTVQELNFRSSKNVWGYFSVAATGGLHEFADSQFGHCFSWGENREEAISNMVVALKELSIRGDFRTTVEYLINLLETESFQNNDIDTGWLDYLIAEKVQAEKPDIMLGVVCGALNVADAMFRTCMTDFLHSLERGQVLPADSLLNLVDVELIYGGVKYILKVARQSLTMFVLIMNGCHIEIDAHRLNDGGLLLSYNGNSYTTYMKEEVDSYRITIGNKTCVFEKENDPTVLRSPSAGKLTQYTVEDGGHVEAGSSYAEMEVMKMIMTLNVQERGRVKYIKRPGAVLEAGCVVARLELDDPSKVHPAEPFTGELPAQQTLPILGEKLHQVFHSVLENLTNVMSGFCLPEPVFSIKLKEWVQKLMMTLRHPSLPLLELQEIMTSVAGRIPAPVEKSVRRVMAQYASNITSVLCQFPSQQIATILDCHAATLQRKADREVFFINTQSIVQLVQRYRSGIRGYMKTVVLDLLRRYLRVEHHFQQAHYDKCVINLREQFKPDMSQVLDCIFSHAQVAKKNQLVIMLIDELCGPDPSLSDELISILNELTQLSKSEHCKVALRARQILIASHLPSYELRHNQVESIFLSAIDMYGHQFCPENLKKLILSETTIFDVLPTFFYHANKVVCMASLEVYVRRGYIAYELNSLQHRQLPDGTCVVEFQFMLPSSHPNRMTVPISITNPDLLRHSTELFMDSGFSPLCQRMGAMVAFRRFEDFTRNFDEVISCFANVPKDTPLFSEARTSLYSEDDCKSLREEPIHILNVSIQCADHLEDEALVPILRTFVQSKKNILVDYGLRRITFLIAQEKEFPKFFTFRARDEFAEDRIYRHLEPALAFQLELNRMRNFDLTAVPCANHKMHLYLGAAKVKEGVEVTDHRFFIRAIIRHSDLITKEASFEYLQNEGERLLLEAMDELEVAFNNTSVRTDCNHIFLNFVPTVIMDPFKIEESVRYMVMRYGSRLWKLRVLQAEVKINIRQTTTGSAVPIRLFITNESGYYLDISLYKEVTDSRSGNIMFHSFGNKQGPQHGMLINTPYVTKDLLQAKRFQAQTLGTTYIYDFPEMFRQALFKLWGSPDKYPKDILTYTELVLDSQGQLVEMNRLPGGNEVGMVAFKMRFKTQEYPEGRDVIVIGNDITFRIGSFGPGEDLLYLRASEMARAEGIPKIYVAANSGARIGMAEEIKHMFHVAWVDPEDPHKGFKYLYLTPQDYTRISSLNSVHCKHIEEGGESRYMITDIIGKDDGLGVENLRGSGMIAGESSLAYEEIVTISLVTCRAIGIGAYLVRLGQRVIQVENSHIILTGASALNKVLGREVYTSNNQLGGVQIMHYNGVSHITVPDDFEGVYTILEWLSYMPKDNHSPVPIITPTDPIDREIEFLPSRAPYDPRWMLAGRPHPTLKGTWQSGFFDHGSFKEIMAPWAQTVVTGRARLGGIPVGVIAVETRTVEVAVPADPANLDSEAKIIQQAGQVWFPDSAYKTAQAVKDFNREKLPLMIFANWRGFSGGMKDMYDQVLKFGAYIVDGLRQYKQPILIYIPPYAELRGGSWVVIDATINPLCIEMYADKESRGGVLEPEGTVEIKFRKKDLIKSMRRIDPAYKKLMEQLGEPDLSDKDRKDLEGRLKAREDLLLPIYHQVAVQFADFHDTPGRMLEKGVISDILEWKTARTFLYWRLRRLLLEDQVKQEILQASGELSHVHIQSMLRRWFVETEGAVKAYLWDNNQVVVQWLEQHWQAGDGPRSTIRENITYLKHDSVLKTIRGLVEENPEVAVDCVIYLSQHISPAERAQVVHLLSTMDSPAST

SEQ ID NO: 334040 - protein, 1689 aa, Artificial Sequence
  derived and/or modified sequence
LPFLLKPPQTLPSPDAMFRTCMTDFLHSLERGQVLPADSLLNLVDVELIYGGVKYILKVARQSLTMFVLIMNGCHIEIDAHRLNDGGLLLSYNGNSYTTYMKEEVDSYRITIGNKTCVFEKENDPTVLRSPSAGKLTQYTVEDGGHVEAGSSYAEMEVMKMIMTLNVQERGRVKYIKRPGAVLEAGCVVARLELDDPSKVHPAEPFTGELPAQQTLPILGEKLHQVFHSVLENLTNVMSGFCLPEPVFSIKLKEWVQKLMMTLRHPSLPLLELQEIMTSVAGRIPAPVEKSVRRVMAQYASNITSVLCQFPSQQIATILDCHAATLQRKADREVFFINTQSIVQLVQRYRSGIRGYMKTVVLDLLRRYLRVEHHFQQAHYDKCVINLREQFKPDMSQVLDCIFSHAQVAKKNQLVIMLIDELCGPDPSLSDELISILNELTQLSKSEHCKVALRARQILIASHLPSYELRHNQVESIFLSAIDMYGHQFCPENLKKLILSETTIFDVLPTFFYHANKVVCMASLEVYVRRGYIAYELNSLQHRQLPDGTCVVEFQFMLPSSHPNRMTVPISITNPDLLRHSTELFMDSGFSPLCQRMGAMVAFRRFEDFTRNFDEVISCFANVPKDTPLFSEARTSLYSEDDCKSLREEPIHILNVSIQCADHLEDEALVPILRTFVQSKKNILVDYGLRRITFLIAQEKEFPKFFTFRARDEFAEDRIYRHLEPALAFQLELNRMRNFDLTAVPCANHKMHLYLGAAKVKEGVEVTDHRFFIRAIIRHSDLITKEASFEYLQNEGERLLLEAMDELEVAFNNTSVRTDCNHIFLNFVPTVIMDPFKIEESVRYMVMRYGSRLWKLRVLQAEVKINIRQTTTGSAVPIRLFITNESGYYLDISLYKEVTDSRSGNIMFHSFGNKQGPQHGMLINTPYVTKDLLQAKRFQAQTLGTTYIYDFPEMFRQALFKLWGSPDKYPKDILTYTELVLDSQGQLVEMNRLPGGNEVGMVAFKMRFKTQEYPEGRDVIVIGNDITFRIGSFGPGEDLLYLRASEMARAEGIPKIYVAANSGARIGMAEEIKHMFHVAWVDPEDPHKGFKYLYLTPQDYTRISSLNSVHCKHIEEGGESRYMITDIIGKDDGLGVENLRGSGMIAGESSLAYEEIVTISLVTCRAIGIGAYLVRLGQRVIQVENSHIILTGASALNKVLGREVYTSNNQLGGVQIMHYNGVSHITVPDDFEGVYTILEWLSYMPKDNHSPVPIITPTDPIDREIEFLPSRAPYDPRWMLAGRPHPTLKGTWQSGFFDHGSFKEIMAPWAQTVVTGRARLGGIPVGVIAVETRTVEVAVPADPANLDSEAKIIQQAGQVWFPDSAYKTAQAVKDFNREKLPLMIFANWRGFSGGMKDMYDQVLKFGAYIVDGLRQYKQPILIYIPPYAELRGGSWVVIDATINPLCIEMYADKESRGGVLEPEGTVEIKFRKKDLIKSMRRIDPAYKKLMEQLGEPDLSDKDRKDLEGRLKAREDLLLPIYHQVAVQFADFHDTPGRMLEKGVISDILEWKTARTFLYWRLRRLLLEDQVKQEILQASGELSHVHIQSMLRRWFVETEGAVKAYLWDNNQVVVQWLEQHWQAGDGPRSTIRENITYLKHDSVLKTIRGLVEENPEVAVDCVIYLSQHISPAERAQVVHLLSTMDSPAST

SEQ ID NO: 334041 - protein, 143 aa, Artificial Sequence
  derived and/or modified sequence
MTDSKPITKSKSEANLIPSQEPFPASDNSGETPQRNGEGHTLPKTPSQAEPASHKGPKDAGRRRNSLPPSHQKPPRNPLSSSDAAPSPELQANGTGTQGLEATDTNGLSSSARPQGQQAGSPSKEDKKQANIKRQLMTNFILG

SEQ ID NO: 334042 - DNA, 7377 bp, Artificial Sequence
  derived and/or modified sequence
atggttcttttactctgtctgtcctgcttaatctttagctgcctgacctttagttggctcaaaatctggggaaagatgaccgacagcaagcccataactaagtctaagtcggaagccaacctcatcccaagccaggaacccttcccagcatccgacaatagcggcgagacaccacagagaaatggcgaaggccacactctgccaaagactccctctcaagccgaacctgcttcccacaaaggtcccaaagacgccggcaggaggaggaactctcttcccccttcccaccagaagcccccccgcaacccattatcaagttctgacgccgcaccttctcctgagttgcaggccaatggcaccggcacccaggggctcgaagcaacagatacgaatggtctgtcctcgtctgctcgcccccagggccagcaggcaggaagcccgtccaaggaggataagaaacaggctaacattaagaggcagctgatgacgaacttcattctgggcagcttcgacgactactccagtgacgaagacagtgtggctggaagctcacgcgaaagcacgcggaaaggctcccgcgcctcactgggcgcccttagcctggaggcctacttgaccaccggtgaagccgagacgagggtcccaacaatgcgtccttccatgagcggccttcacttggtgaagagaggccgcgagcataaaaagctcgacttgcatcgggatttcaccgtggctagcccagcagaatttgtgacgcgattcgggggcgaccgcgtgatcgaaaaggtgctgattgccaataacggaatagcggctgtgaagtgcatgcggtccatccgccgatgggcctatgagatgttcaggaatgaacgtgccattcggtttgtggtaatggtaaccccagaagacctcaaggccaatgctgaatacattaagatggcagaccattacgtcccggtacccgggggaccaaacaataacaattacgcaaatgtggagttaatcgtggacatagccaagcggatacccgtacaagctgtgtgggcagggtggggtcatgcaagtgaaaaccctaaactccccgagcttttatgtaagaatggggttgcatttcttggtcctccatctgaggccatgtgggctttaggcgataaaattgcgtctactgtcgtcgcacaaacattgcaggtgcctacgctcccatggtcaggtagcggcttgactgtcgagtggaccgaggacgacctgcagcaagggaaaaggatttctgttcccgaagacgtgtacgataaagggtgtgtgaaggatgtcgacgaagggcttgaggctgcagagagaataggatttccactcatgatcaaagcgtctgaaggaggcggcgggaagggaataaggaaagctgaaagcgctgaagatttccccattctttttaggcaggtgcagagcgaaatccctggcagtcctatcttccttatgaagctggcgcagcatgccaggcatctggaagttcaaattctggccgaccagtacggcaatgccgtttccctgtttggccgggactgttctatccaacgccgccaccagaaaatcgtcgaagaggcccctgcaacgattgcacctttagcaatcttcgaatttatggagcagtgcgccatccgcttggcaaagacagtgggatacgtttcggcagggacagtggagtacctgtattcccaggatggtagttttcacttcctggagcttaatccacggcttcaggtggagcacccttgcacagagatgattgccgatgtgaacctcccagccgcacagcttcagatagccatgggcgtcccgctgcatcgcctgaaggatatccgactcctgtacggagaatcaccgtggggtgtgactccgatctcattcgagacaccttcgaatcccccacttgccagaggtcatgtgatagctgcacgcattacatccgagaacccagacgaaggctttaaaccaagttccggaacagtgcaagaattgaactttagatcctcaaaaaatgtctggggttacttttccgtggccgccacgggaggtttgcacgagttcgcagattctcagttcgggcactgcttctcctggggtgagaaccgggaggaggctatcagcaacatggtcgtggccctgaaggagctgagtatccggggggactttagaacgaccgtcgagtacctcattaatcttttggaaaccgagtcgttccagaacaatgacattgacaccggctggctggattacctcatcgccgaaaaggtgcaagctgaaaaacctgatataatgctcggggtggtttgtggagctcttaatgtggccgatgctatgtttcggacatgcatgactgacttcctccattctctggagaggggccaggtactgccggccgatagcctgctaaatctggtcgatgtggaactgatctatgggggcgtcaagtacatactgaaagtggctaggcagtcacttaccatgtttgtcctcatcatgaacggctgccacattgagatcgatgcccatcgcctgaatgatggtggcctgctgctgtcctacaatggaaattcttatactacatatatgaaggaggaagtggactcatacagaatcacaataggaaacaagacgtgcgtgttcgaaaaggagaatgatcccactgttctgaggtcgcccagcgctggtaagttaactcaatataccgtggaggatggagggcacgtggaagctgggtcatcttacgctgaaatggaggttatgaaaatgatcatgacactgaacgtacaagagagggggcgcgtgaagtatataaagcgccctggtgctgtattggaggccggctgtgtcgtggcccgcctagagctggacgatccatcaaaggtccaccctgcagaacccttcacgggggagttacctgcccagcagacactgcccatactgggggagaaactgcaccaggtgttccactccgtgctggagaacctcactaatgtgatgtcaggattttgcctacctgagcccgtcttctcaatcaagctgaaggagtgggtgcagaaactgatgatgaccttacggcacccctctcttcccctgctcgagctacaagagatcatgacctctgtggcgggcaggatccctgctcctgtcgaaaaatctgttcggagagtaatggcgcaatacgcttccaatatcacttcagtgctctgccagttcccttcccagcaaatcgccactattctggactgccatgccgctactcttcagagaaaagccgatcgtgaggtattctttatcaatacccagtctatcgttcagttggtgcagcgttacagatctggcatacgcggatatatgaagaccgtcgtgctggacttgctgaggcggtacctgcgcgtggagcaccatttccagcaagctcattacgacaaatgcgttatcaaccttagggagcaatttaagcctgacatgagtcaggtccttgattgcattttctctcatgcccaagtcgctaaaaaaaatcagttagtgatcatgctgatcgatgaactctgtgggccggacccttccctctccgatgaactgatcagcattctgaacgagttaacccagttatctaaaagtgagcattgtaaggtggccctgagagccagacaaatcctgatcgcctcccatctgccctcctatgaactgagacacaaccaggtcgagtcgatctttctgagtgccattgacatgtatgggcatcagttttgtcctgagaatttaaagaagctgatactttcagaaaccacaatatttgacgtccttccgactttcttctatcacgccaataaggtggtgtgcatggcttctctcgaggtttacgttagaagagggtatatagcctacgaactaaattccctccaacaccgccagttgcctgacggaacttgcgtggttgagttccaattcatgctgcctagctcacaccctaaccgcatgactgttccgatcagtataaccaaccctgacctgcttcggcattccactgaactgtttatggattccggcttttcacctctctgccagaggatgggcgcaatggtcgcattcaggcgttttgaagacttcacccggaattttgacgaggttatctcatgttttgctaatgtccctaaggacactccactcttttccgaggcacgaacctcgctttattccgaggacgattgcaagagtttgcgggaggagcccatccatatcttaaatgttagcattcagtgcgctgaccacctcgaggacgaagcactggtccctatcctgaggacttttgttcaaagtaagaagaacattttagtcgactatggacttcggaggatcacgttcctcatagcgcaggagaaggaatttcctaaattcttcacttttcgagctcgcgacgaattcgccgaagaccggatatacaggcacctcgaaccagccctggcatttcagctagagttgaaccgcatgcgaaatttcgacttgactgctgttccgtgtgctaatcacaagatgcacctctatctcggtgctgcaaaggtgaaagaaggcgtggaggtgacagatcacaggttcttcatacgtgccatcatccgccacagtgatttaataacaaaggaggcaagcttcgaatacctccagaacgagggagagagactgctgctcgaagcgatggacgagctcgaggtggccttcaacaatacatccgtgaggactgactgtaaccatatttttctgaatttcgtgcctacagtgatcatggacccttttaagatcgaagagagcgtgcggtacatggtaatgcggtacggttctaggctatggaaactgagggtgcttcaggcagaggtgaaaatcaacattaggcagacaaccacgggatccgcagtccccatccgcctgttcatcactaatgaaagcggctattacctcgatatcagcctctacaaggaagtgaccgactcacgatccggtaacattatgttccattcctttggtaataagcaaggacctcagcacggcatgcttattaatacaccatatgtaacgaaggaccttctgcaggccaaaagattccaagctcagacactcggtacaacctatatctacgattttcccgaaatgttccgacaagccctattcaagctatggggaagcccagataagtatcccaaggacattttaacttacactgagctggtgctcgatagccaggggcagttagtcgagatgaatagattgcctggtggaaatgaggtgggcatggtggcgttcaaaatgcggtttaaaactcaagagtacccagagggtcgagatgtaattgttatcggcaatgacatcacattccgtattgggagctttggacccggggaggatttactgtatttgagagcatctgagatggcccgagctgaagggatccccaaaatctacgtcgctgctaacagcggagccaggatcggcatggctgaagagataaaacacatgtttcatgtggcgtgggtagatccggaagaccctcacaaaggcttcaagtatctctatctcacacctcaggattacacgcgtatctcatccctaaactccgtgcattgcaagcacatagaagagggcggagagtctcgatacatgatcaccgatataatcggaaaggacgatgggctgggcgtggaaaatctgcgcggcagcggcatgatcgctggagagagtagcctggcttacgaagaaatcgtgacgatatcgctggttacctgccgcgccatcggcatcggcgcatacctcgttcgcctgggtcagagagtcatccaggtcgaaaattcccacatcatccttactggggcctcggcactgaataaagtgctaggacgtgaggtatacacgtccaacaatcagctcggtggggtgcagatcatgcactataacggagtgtcacatattactgtgcccgatgactttgagggggtatacacgattttggaatggttatcctacatgccaaaggacaaccactctccggtaccgatcatcacgcctacagatccaatcgatagggagatcgagtttctgccctcccgtgcaccatatgacccacggtggatgttagccggccgtcctcaccccacactgaagggtacttggcagtccgggttcttcgaccatggttcatttaaagagatcatggcaccttgggcccagaccgtagtcacgggccgggcccgcctaggcggaattccagtaggtgttatcgccgtagaaacacgaacggttgaagtggccgtccccgccgaccccgccaacttggatagcgaggccaaaatcatacagcaggccggccaggtatggttcccagactctgcttacaagaccgcacaggccgtgaaagacttcaatcgcgagaagttacccttgatgatcttcgccaattggcgaggcttctccggagggatgaaagatatgtatgatcaagtgctgaaatttggtgcttacatcgtggacggactacggcaatacaagcagccaattttgatatacatcccgccttatgccgagctgaggggcgggtcctgggtggtaatagacgccaccattaaccctctctgtatcgaaatgtatgcggacaaagagagccgggggggggttctcgaacccgagggcaccgtagagattaaatttagaaaaaaagacctgattaagtctatgagacgcattgaccccgcctataagaaacttatggagcagctcggagaacccgatctgtccgacaaggatcggaaggaccttgagggacgccttaaagcccgggaggacctgctgctgcccatttatcaccaggtagccgtccagttcgccgacttccacgatacgccaggcagaatgcttgaaaagggagtgatctcagatatcttggagtggaagactgctcgaaccttcctctactggcgcctcaggcggttactgctggaggatcaggtgaagcaagagatcctgcaagcaagtggtgaactctcacacgtacacatccagtccatgctcaggcggtggtttgtagaaaccgagggagctgtgaaggcttatctgtgggataataatcaggtagtcgtccagtggctggaacagcactggcaggcaggggacggaccaagaagcaccattcgggaaaacattacctatctcaagcacgacagcgtgctcaaaaccatccgcggtctggtggaagaaaatcctgaagtagccgtggactgcgtgatctacctgagccaacatatctcccccgccgagcgcgcccaagtggttcatctgcttagcaccatggactccccggcctcgacctag

SEQ ID NO: 334043 - DNA, 7377 bp, Artificial Sequence
  derived and/or modified sequence
atggtgctcctgttgtgcctgtcgtgcctaatcttctcttgtctcacctttagttggttgaaaatctgggggaagatgacggatagtaaacccattactaagtccaagtcggaggccaacctcattccatctcaagaaccattccctgctagtgacaattccggtgagaccccccaacgcaacggtgaaggtcacacgctcccaaaaactcccagccaggctgagccagcctctcataaggggcccaaggacgctggaagaagaaggaatagtctgccacccagtcaccagaagccacctcgaaaccccttgagcagctcggatgccgctccttcacccgagctgcaagcaaacgggacagggacacaggggctggaggctacagacacgaacgggctctctagttctgctagaccccaaggacagcaggcgggttcaccatccaaagaagataaaaaacaggcaaatattaaacgccagctgatgacgaacttcattctcggaagcttcgacgactactcgtccgatgaagatagcgtcgccgggtctagtagggaatcaacccgtaaggggagtagggctagcttgggagccctctcccttgaagcttacttaactaccggcgaggcagagactcgtgtgccgaccatgcgcccatccatgagcgggcttcacctggtcaaaaggggccgagagcataaaaagctggatttacaccgcgacttcactgtggcgtctcctgccgagtttgtcactaggttcgggggggacagagtgattgaaaaggtactgatcgccaacaacggcatcgccgctgtgaaatgtatgagatcaattagaagatgggcgtacgagatgtttaggaatgagcgcgcaataaggtttgtggtgatggtgactcccgaggacttgaaagccaatgcagagtacattaaaatggctgatcactatgtgcccgttcccggaggacctaacaacaacaactacgccaacgtggaactgatcgtcgatatagcaaagagaatcccagttcaggctgtgtgggcaggttggggccatgccagtgaaaaccccaagctaccggaactcctctgtaagaatggggtggcttttcttggacctcctagtgaagctatgtgggcgctcggcgataaaatcgcctccacagtggtcgctcagactttgcaggtaccaactctgccatggtctgggagcgggctcactgtcgaatggacagaggatgatctccaacagggcaaaagaattagcgtcccagaagacgtatacgataaagggtgtgttaaagacgttgacgaggggctggaggccgccgagcgcatcggatttcccttaatgatcaaggcgtccgagggggggggaggaaagggaatcaggaaggctgagagtgccgaagactttccaatcctgttcagacaagtacagagtgagattccgggaagccctatctttttgatgaagctggcacagcacgcacgacatctggaggttcagattctggcggaccagtacggcaatgccgtgtcgctctttggacgtgattgtagcatacagcgccgccaccagaagattgtggaagaggcaccagctactatcgccccattggcaatatttgagtttatggaacagtgcgcgatcagactggcaaagacagttggctacgtatcagcaggaactgtcgagtacctctattcccaggacggatcttttcatttcctggaactaaaccccagattgcaagtggaacatccttgcacggaaatgattgctgacgtgaatctcccagcagcccagctccagatcgcaatgggggtccccctccataggctaaaagatataagactcctatacggcgagagtccatggggcgtgactcccatttctttcgagactccatccaaccctcccttggcccgggggcatgtgattgcagctcgaatcactagcgaaaaccccgatgagggttttaaaccgtcctccggcaccgttcaggagctgaacttccgttcatcaaagaatgtgtggggatactttagtgtagcagcaactggaggattgcatgagttcgcggacagtcagttcggccactgcttctcctggggcgagaatcgcgaggaggccatatccaatatggtcgtcgctctaaaggagctcagcataaggggagattttcgaacaacggttgaatacctcattaatctgctagagacagagtccttccagaacaacgacatcgataccgggtggctggattatctcatcgctgagaaagtccaggcggagaagccagacattatgctgggagtggtctgtggggcgctgaacgtggcggacgccatgttccgcacctgtatgaccgacttcctccattcactcgaacgaggacaagtgcttccagcagattccctgttaaatctggttgatgtcgaactgatctacggcggtgtgaaatatatcctgaaagtggcgcggcaatcattgactatgttcgttctgatcatgaatggctgccatattgagattgatgcccatcgactcaacgatggcgggctgttgttgtcttacaacgggaatagttacacgacctatatgaaggaggaagtggacagttatcgtattaccatcggtaacaagacctgcgtgtttgaaaaggagaacgaccctactgtgcttagatccccctcagcagggaaactgacccagtacacagttgaagatggaggccacgtggaggccggcagcagctatgcggaaatggaagtaatgaaaatgatcatgaccctgaatgttcaggaacgtggaagggtcaagtacataaaaaggccaggagctgtgctggaggccggatgcgtggtggccaggttggagctcgatgatccctccaaagtgcatcccgcagaaccgtttacgggggagctgcccgcccagcaaactctcccgatcttaggcgaaaagctgcatcaagttttccactcagtactggaaaatttgacgaacgttatgtccggcttttgcctccccgaaccagtattttccattaagttgaaggaatgggtgcagaagttaatgatgaccttacgtcacccgtcactaccactactggagcttcaggagatcatgacctcagtggccggacgaatcccagctcctgtggagaagagtgtccggcgtgtgatggcacagtatgcaagcaatatcacctctgttctttgccaattccctagccagcagatcgccacaatccttgactgccatgcagccaccctgcaacgaaaggccgatcgagaggtcttttttatcaatacccagagcatagtgcagttggtgcaacggtaccgatcgggaattcggggctatatgaaaacggtggtgctggacctcctgcggagatatctgcgcgtggaacatcatttccagcaagctcactacgacaagtgtgtcatcaatctgcgcgagcaattcaaacctgacatgagccaagtgctggactgcatattctcccatgcccaggtcgccaaaaagaaccagttggttattatgctcatcgatgagctctgtggccctgacccttctctatctgacgagttgatatctatcctgaatgagctcactcaactgtccaaatccgagcattgcaaggttgccctgcgcgcgcgccagatcttgattgcctcccatctgccaagttatgagttgcgacacaaccaggtagaatcgatctttctgtctgctattgacatgtatggccaccagttttgtcccgaaaacttaaagaaattaatcctgtctgaaaccactatattcgacgtattgccaacattcttttaccacgccaacaaggtggtgtgcatggccagtctggaggtatacgttagaaggggctacatcgcgtatgagttgaatagtctgcaacaccgacaacttccggacggtacctgtgtcgtggagtttcagttcatgctgccctcaagtcatcctaatcgtatgaccgtccccatttctattactaacccagatctgctgcggcattccaccgaactctttatggattcaggcttctcaccactttgccagcggatgggtgctatggtagcatttaggcggttcgaagacttcacgaggaattttgatgaggttatctcttgcttcgctaatgttcctaaagacacaccacttttctctgaggctcgtaccagcctgtattctgaggacgactgcaaaagtttacgcgaggaacccatacacatcctgaacgtgtcaatccagtgtgccgaccacttggaggacgaagccctggttcccatcctccgaacttttgttcaatctaagaagaatatactcgtagattacggcttacgtcggatcacattcctcatcgctcaggagaaagagttccccaaattcttcaccttcagggccagggacgaattcgcggaggatcgaatttatcggcaccttgaaccagccctggccttccagcttgagctgaaccgtatgagaaatttcgatttaactgctgtcccatgcgccaaccacaaaatgcacctgtatttaggtgccgcgaaggtgaaagaaggcgtggaagtgacagaccaccgattctttatcagagccataatccggcatagcgatctgatcaccaaggaggccagcttcgaataccttcagaacgagggagagagacttctgctggaggctatggacgaactggaggtggctttcaacaatacctccgtgagaacagactgtaatcacatcttccttaactttgttcctaccgtcattatggacccgtttaagattgaggaatctgttcgctatatggtaatgagatatggttcacgcctctggaaactgagggttctccaggctgaagtgaagattaatatacggcagactaccaccgggtcagcagtcccaatccgactctttattacaaacgagtccggctactatcttgacatcagcctctacaaagaggttacggatagccgttcaggcaatattatgtttcattcctttggcaacaagcagggcccacaacacggcatgctaatcaatacgccctatgtgaccaaagatctgctgcaggcaaaacgctttcaggcacagaccctgggcaccacctacatatacgactttcctgaaatgttccggcaggccctgttcaaactgtgggggagccccgataaataccccaaggatattctcacctatactgagctggtgctggacagccagggacaactggtggaaatgaacagattgcctggcgggaatgaggttgggatggtggccttcaaaatgcggtttaagactcaggaatatccggaagggcgggatgtcatcgttattgggaatgacattaccttccggattggctccttcggacccggggaggacctgctctatctccgggcctcagaaatggctcgggcagaggggatccctaagatttacgtggctgctaacagcggggcccggatcggaatggctgaggagatcaagcacatgtttcacgtggcctgggttgaccctgaggatccccataaaggcttcaagtatctgtacctcaccccccaggactacacgcgcatctccagcctaaacagcgtccattgcaagcacatcgaagagggaggggaaagcaggtatatgattacagatataattgggaaagatgacgggctcggggttgagaatctgcgcgggtctggaatgattgcaggcgagtcatcgctcgcttacgaagaaatagtgacgatttcactggtgacctgtagagccattggaatcggtgcctatttggtcaggctgggtcaaagggtgatccaagtggaaaatagccacatcatactgaccggagcctccgcattaaataaggtgctggggcgcgaagtgtatacctctaacaatcagctagggggcgttcagataatgcactacaatggcgtaagccatattaccgttcctgatgactttgagggagtgtacacaatactggaatggctgtcgtacatgccaaaggataatcactcaccagtgcctattatcactcctactgacccaatagaccgcgagatcgagttccttccttctagggctccatacgatccacgctggatgctcgctgggcggcctcaccccactctaaaaggcacatggcagtccggcttcttcgaccacgggtcttttaaagaaattatggccccctgggcacagactgtggtaacaggacgcgctcgcttgggcgggattcctgtaggagtaattgcagttgagacacgtacagttgaggtagccgtgccagccgatccggcaaatcttgatagcgaggctaagataattcagcaggccggccaagtttggttcccagacagcgcatacaaaaccgcccaggccgtgaaggacttcaatcgtgaaaagctacccctgatgatttttgcaaattggcggggatttagcggcggaatgaaggatatgtatgaccaagtgttgaaattcggtgcctacatcgttgacggactacgtcagtacaagcaaccaattctgatctatataccaccctatgccgaactgaggggtgggtcctgggtggtgattgacgccactataaatccactttgcatcgagatgtatgccgacaaggagtctagagggggggttctagagcctgaaggaactgttgagattaagttccgtaaaaaggatctcattaagtccatgaggaggatcgatccagcctacaagaaactcatggaacagttgggagagcccgacctcagcgataaggatagaaaggacctcgagggacgccttaaagcaagagaggatctactgctgccaatctatcatcaggtggcagttcagtttgctgattttcatgatactccaggtcgcatgttagaaaagggggtcatttctgacatcctggagtggaaaactgcccgcaccttcctgtactggcggttacgacgtttgctcctcgaggaccaggtcaagcaggaaattttacaggccagtggcgagctgagtcatgtccacattcaatctatgctccgaagatggttcgtggaaaccgaaggggccgttaaggcttacttgtgggataataaccaggtagtcgttcaatggcttgagcagcactggcaagccggggatgggcctcggtcaaccatcagggagaatatcacttatcttaaacatgactctgtcttgaaaactattcgcgggcttgttgaagaaaatcctgaagtggctgtggattgtgtgatatacctctcccaacacatctccccagcagagagagcgcaagtggttcacctactttccaccatggattcgccagcgtccacctag

SEQ ID NO: 334044 - DNA, 7377 bp, Artificial Sequence
  derived and/or modified sequence
atggtgctgctgctgtgcctgagctgcctgatcttcagctgcctgaccttctcctggctgaagatctggggcaagatgacagacagcaagcccatcaccaagagcaagtctgaggccaacctgatccccagccaggagcccttccctgccagtgacaacagcggggagaccccccagagaaatggagagggccacaccctgcccaagacccccagccaggccgagcccgccagccacaagggccccaaggatgctggaagaagaagaaacagcctgccccccagccaccagaagcccccaagaaaccccctgagcagcagtgatgctgcccccagccctgagctgcaggccaacggcaccggcacccagggcctggaggccacagacaccaacggcctgagcagcagcgcccggccccagggccagcaggccggcagccccagcaaggaggacaagaagcaggccaacatcaagaggcagctgatgaccaacttcatcctgggcagctttgatgactacagcagtgatgaagattctgtggccggcagcagccgggagagcaccaggaagggcagccgggccagcctgggcgccctgagcctggaggcctacctgaccactggagaggccgagaccagggtgcccaccatgaggcccagcatgagcggcctgcacctggtgaagaggggccgggagcacaagaagctggacctgcaccgggacttcaccgtggccagccctgctgagtttgtgaccaggtttggaggagacagagtcatcgagaaggtgctgattgccaacaacggcattgctgctgtgaagtgcatgaggagcatccgccgctgggcctatgagatgttcagaaatgaaagagccatccgctttgtggtgatggtgaccccagaggacctgaaggccaatgctgagtacatcaagatggctgaccactacgtgcctgtgcctgggggccccaacaacaacaactatgccaacgtggagctgattgtggacatcgccaagagaattcctgtgcaggccgtgtgggccggctggggccacgccagcgagaaccccaagctgcctgagctgctgtgcaagaatggagtggccttcctgggcccccccagcgaggccatgtgggccctgggggacaagatcgccagcacagtggtggcccagaccctgcaggtgcccaccctgccctggagcggcagcggcctgactgtggagtggacagaagatgacctgcagcagggcaagaggatctctgtgcctgaagatgtgtatgacaagggctgtgtgaaggatgtggatgagggcctggaggccgctgagagaattggcttccccctgatgatcaaggccagcgagggcggcggcggcaagggcatcaggaaggccgagagcgctgaggacttccccatcctcttccggcaggtgcagagcgagatccctggcagccccatcttcctgatgaagctggcccagcacgcccggcacctggaggtgcagatcctggccgaccagtatggaaatgctgtgtccctgtttggccgggactgcagcatccagaggaggcaccagaagatcgtggaggaggccccagccaccatcgcccccctggccatctttgagttcatggagcagtgtgccatccggctggccaagacagtgggctacgtgtctgctggcaccgtggagtacctgtacagccaggacggcagcttccacttcctggagctgaacccccggctgcaggtggagcacccctgcacagagatgattgctgatgtgaacctgcctgctgcccagctgcagatcgccatgggcgtgcccctgcaccggctgaaggacatccggctgctgtatggagagagcccctggggcgtgacccccatcagctttgagacccccagcaacccccccctggcccggggccacgtgattgctgcccgcatcaccagcgagaacccagatgagggcttcaagcccagcagcggcaccgtgcaggagctgaacttccgcagcagcaagaatgtgtggggctacttctctgtggccgccactggaggcctgcatgaatttgctgacagccagtttggccactgcttctcctggggcgagaaccgggaggaggccatcagcaacatggtggtggccctgaaggagctgagcatccggggggacttccgcaccaccgtggagtacctgatcaacctgctggagacagagagcttccagaacaatgacatcgacaccggctggctggactacctgattgctgagaaggtgcaggccgagaagccagacatcatgctgggcgtggtgtgtggggccctgaatgtggctgatgccatgttccgcacctgcatgacagacttcctgcacagcctggagcggggccaggtgctgcctgctgacagcctgctgaacctggtggatgtggagctgatctatggaggagtgaagtacatcctgaaggtggcccggcagagcctgaccatgtttgtgctgatcatgaatggctgccacattgaaattgatgcccaccggctgaatgatggcggcctgctgctgagctacaacggcaacagctacaccacctacatgaaggaggaggtggacagctaccgcatcaccatcggcaacaagacctgtgtgtttgagaaggaaaatgaccccaccgtgctgcggagccccagcgctgggaagctgacccagtacacagtggaggatggcggccacgtggaggccggcagcagctatgcagagatggaggtgatgaagatgatcatgaccctgaatgtgcaggagcggggccgggtgaagtacatcaagaggcctggagctgtgctggaggccggctgtgtggtggcccggctggagctggatgaccccagcaaggtgcaccctgctgagcccttcaccggggagctgcctgcccagcagaccctgcccatcctgggggagaagctgcaccaggtgttccacagcgtgctggagaacctgaccaacgtgatgagcggcttctgcctgcctgagcctgtgttcagcatcaagctgaaggagtgggtgcagaagctgatgatgaccctgcggcaccccagcctgcccctgctggagctgcaggagatcatgacctctgtggccggccgcatcccagcccctgtggagaagtctgtgcggcgggtgatggcccagtatgccagcaacatcacctctgtgctgtgccagttccccagccagcagatcgccaccatcctggactgccacgccgccaccctgcagaggaaggctgaccgggaggtgttcttcatcaacacccagagcatcgtgcagctggtgcagcgctaccgcagcggcatccggggctacatgaagacagtggtgctggacctgctgcggcgctacctgcgggtggagcaccacttccagcaggcccactatgacaagtgtgtgatcaacctgcgggagcagttcaagccagacatgagccaggtgctggactgcatcttcagccacgcccaggtggccaagaagaaccagctggtgatcatgctgattgatgagctgtgtggccctgaccccagcctgagtgatgagctgatcagcatcctgaatgagctgacccagctgagcaagtctgagcactgcaaggtggccctgcgggcccggcagatcctgattgccagccacctgcccagctatgagctgcggcacaaccaggtggagagcatcttcctgagcgccatcgacatgtatggccaccagttctgcccagagaacctgaagaagctgatcctgtctgagaccaccatctttgatgtgctgcccaccttcttctaccacgccaacaaggtggtgtgcatggccagcctggaggtgtatgtgcggcggggctacatcgcctatgagctgaacagcctgcagcaccggcagctgcctgatggcacctgtgtggtggagttccagttcatgctgcccagcagccaccccaacaggatgacagtgcccatcagcatcaccaacccagacctgctgcggcacagcacagagctgttcatggattctggcttcagccccctgtgccagaggatgggcgccatggtggccttcagaagatttgaggacttcaccaggaactttgatgaagtcatcagctgctttgccaacgtgcccaaggacacccccctcttcagcgaggcccggaccagcctgtacagtgaagatgactgcaagagcctgcgggaggagcccatccacatcctgaatgtgtccatccagtgtgccgaccacctggaggatgaggccctggtgcccatcctgcggacctttgtgcagagcaagaagaacatcctggtggactatggcctgcggcgcatcaccttcctgattgcccaggagaaggagttccccaagttcttcaccttccgggccagagatgaatttgctgaagatcgcatctaccgccacctggagcccgccctggccttccagctggagctgaacaggatgaggaactttgacctgacagctgtgccctgtgccaaccacaagatgcacctgtacctgggcgccgccaaggtgaaggagggcgtggaggtgacagaccaccgcttcttcatccgggccatcatccgccacagcgacctgatcaccaaggaggccagctttgagtacctgcagaatgaaggagagcggctgctgctggaggccatggatgagctggaggtggccttcaacaacacctctgtgaggacagactgcaaccacatcttcctgaactttgtgcccaccgtcatcatggaccccttcaagattgaggagagcgtgcgctacatggtgatgagatatggcagccggctgtggaagctgcgggtgctgcaggccgaggtgaagatcaacatccggcagaccaccactggatctgctgtgcccatccgcctcttcatcaccaatgaaagtggctactacctggacatcagcctgtacaaggaggtgacagacagccgcagcggcaacatcatgttccacagctttggaaacaagcagggcccccagcacggcatgctgatcaacaccccctacgtgaccaaggacctgctgcaggccaagcgcttccaggcccagaccctgggcaccacctacatctatgacttccctgagatgttccggcaggccctcttcaagctgtggggcagcccagacaagtaccccaaggacatcctgacctacacagagctggtgctggacagccagggccagctggtggagatgaaccggctgcccggcggcaatgaggtgggcatggtggccttcaagatgaggttcaagacccaggagtacccagagggcagagatgtgattgtgattggaaatgacatcaccttcagaattggcagctttggacctggagaggacctgctgtacctgcgggccagcgagatggcccgggcagagggcatccccaagatctacgtggccgccaacagcggggccagaattggcatggccgaggagatcaagcacatgttccacgtggcctgggtggaccctgaggacccccacaagggcttcaagtacctgtacctgaccccccaggactacacccgcatcagcagcctgaacagcgtgcactgcaagcacatcgaggagggcggggagagccgctacatgatcacagacatcatcggcaaggatgatggcctgggcgtggagaacctgcggggcagcggcatgattgctggggagagcagcctggcctatgaggagatcgtgaccatcagcctggtgacctgccgggccatcggcatcggggcctacctggtgcggctgggccagagggtcatccaggtggagaacagccacatcatcctgaccggggccagcgccctgaacaaggtgctgggccgggaggtgtacaccagcaacaaccagctgggcggcgtgcagatcatgcactacaatggagtgagccacatcaccgtgcctgatgactttgagggcgtgtacaccatcctggagtggctgagctacatgcccaaggacaaccacagccctgtgcccatcatcacccccacagaccccatcgaccgggagattgagttcctgcccagccgggccccctatgacccccgctggatgctggccggccggccccaccccaccctgaagggcacctggcagagcggcttctttgaccacggcagcttcaaggagatcatggccccctgggcccagacagtggtgacaggccgggcccggctgggcggcatccctgtgggcgtgattgctgtggagaccaggacagtggaggtggccgtgcctgctgaccctgccaacctggacagcgaggccaagatcatccagcaggccggccaggtgtggttcccagattctgcctacaagacagcccaggccgtgaaggacttcaaccgggagaagctgcccctgatgatctttgccaactggaggggcttcagcggcggcatgaaggacatgtatgaccaggtgctgaagtttggagcctacatcgtggatggcctgcggcagtacaagcagcccatcctgatctacatccccccctatgcagagctgcggggcggctcctgggtggtgattgatgccaccatcaaccccctgtgcatcgagatgtatgctgacaaggagagccggggcggcgtgctggagcctgagggcaccgtggagatcaagttcaggaagaaggacctgatcaagtccatgagaagaattgatcctgcctacaagaagctgatggagcagctgggggagccagacctgagtgacaaggacaggaaggacctggagggccgcctgaaggcccgggaggacctgctgctgcccatctaccaccaggtggccgtgcagtttgctgacttccatgacaccccaggccgcatgctggagaagggcgtcatcagtgacatcctggagtggaagacagcccggaccttcctgtactggaggctgcggcggctgctgctggaggaccaggtgaagcaggagatcctgcaggccagcggggagctgagccacgtgcacatccagagcatgctgcggcgctggtttgtggagacagagggcgctgtgaaggcctacctgtgggacaacaaccaggtggtggtgcagtggctggagcagcactggcaggccggagatggccccaggagcaccatccgggagaacatcacctacctgaagcatgacagcgtgctgaagaccatccggggcctggtggaggagaaccctgaggtggccgtggactgtgtgatctacctgagccagcacatcagccctgctgagcgggcccaggtggtgcacctgctgagcaccatggacagccctgccagcacctag

SEQ ID NO: 334045 - DNA, 7377 bp, Artificial Sequence
  derived and/or modified sequence
atggtgctgctgctgtgcctgagctgcctgatcttcagctgcctgacttttagttggctgaagatctggggaaaaatgacagactccaagcccatcactaaatctaagtcagaagccaatctaataccctctcaagagccatttcccgcgtcagacaactccggagaaactccccagcggaacggagaagggcatacccttccaaagaccccatcccaagcagaaccagccagccacaaagggcccaaggacgctggaagacggcgaaactctctgccccctagccatcagaagccccctcgaaatccccttagcagttccgatgcagctccatcccctgaacttcaggctaacggcacaggaactcagggtttagaggcaactgatactaacgggctgtcttccagtgctcgcccgcaggggcagcaggccgggagtccttcaaaggaagacaagaaacaggcgaacatcaaacgtcaactaatgacaaactttatcctgggctcctttgacgattactctagtgatgaggattcggttgcgggcagctcgagggaatccactaggaagggctcccgtgcaagccttggagctttatccctcgaagcgtacctgaccacgggggaggctgagacacgggtaccgacaatgcgaccctccatgtctggactgcacctcgttaagcggggacgggaacacaagaagctggacttacatagagacttcaccgtagcctccccagccgaattcgtgactcgttttgggggggatcgcgtaatcgagaaggttctgattgctaacaatgggatcgctgccgttaaatgcatgaggtcaattaggcgctgggcatacgagatgtttcgaaatgaaagagccatcagatttgtcgttatggtcacacccgaagatttaaaggccaacgcagagtacatcaaaatggccgaccactacgtacctgtgccgggtggacctaacaacaacaattatgccaacgtggagctcattgtcgacatcgctaaacgaattccggtgcaggccgtttgggccgggtggggacatgcctctgagaatcctaagctgcctgaactgctgtgcaaaaacggtgtcgcatttcttggtcccccctcagaagccatgtgggctctgggcgacaagatcgcgagtacagtagtagcccagacgctgcaagtgcctactcttccatggtcaggctccggactgacagttgaatggaccgaagatgacctgcaacagggaaagcggatctccgtgccagaggacgtgtacgacaagggatgcgtcaaagatgtcgatgagggtttggaagctgccgagcgaatcggctttccattgatgatcaaggcgtccgagggcgggggaggcaaagggattagaaaggctgaatcagcagaggacttccccatcttgttcaggcaagtccagagcgagatcccgggtagccccatcttcctcatgaaacttgcccagcacgcccgtcacttggaggtgcaaattttggctgatcagtacggtaatgcagtgtccctcttcggtagagactgtagtatccagagacgtcatcagaaaatcgtggaggaggcccctgccacaattgccccactcgctatcttcgaatttatggagcaatgcgctatacgactggccaaaactgtcgggtacgtgtcagccggaacagtggagtatctgtacagccaagacggcagtttccatttccttgagcttaaccctaggctgcaggtggaacacccatgcaccgagatgatcgcggacgtgaatctaccagccgctcaacttcagattgcaatgggggtaccactgcacagacttaaagacatcagacttttgtacggagaatcaccgtggggcgtgactccaatcagtttcgagaccccctccaaccctcccctggccaggggtcatgttatcgccgctaggatcacctcagagaatcccgatgagggtttcaagccctcctccggtaccgtccaagagctgaatttccgctcttctaaaaatgtctggggatattttagcgtagccgcaaccggtggcctgcacgagtttgccgattctcaattcggtcattgcttttcgtggggggagaatcgcgaggaggctatctccaacatggtggtggccctgaaagagcttagcatccgcggcgactttcgcacaactgtggagtatctgattaatctgctggagaccgaatcctttcagaacaatgacatcgataccggctggctggattatctaattgctgaaaaggtgcaagccgagaagccagacattatgctgggtgtggtgtgtggcgccctgaacgttgctgacgcgatgttcagaacatgcatgaccgatttcttacactcgttagagcggggacaagtattgcctgcggacagcctattaaatctcgtggacgtcgagctgatctatgggggagtaaagtatatactaaaagtggcgcgccaaagtctcacaatgtttgttctcatcatgaatggctgtcacatagagatcgacgcacatagactgaatgatgggggacttcttctgagctacaacggaaactcatacacaacttacatgaaggaagaagttgacagttatcgaattaccattggcaataagacctgcgtatttgaaaaggaaaacgaccccacagtccttagatctccgtccgccggcaaacttacgcagtatactgtggaagacggcggacacgtggaggcagggagcagctacgccgagatggaagtgatgaagatgattatgaccctcaacgtccaggagagaggtagagttaaatacatcaaacgcccaggtgccgtgttggaggctgggtgcgttgtagcaaggctcgaattggacgacccaagcaaagtgcatccagccgaaccatttaccggagagctgcctgcgcagcagacacttcccatcctgggggaaaagctccaccaggtgtttcacagtgtcctggaaaacctgaccaatgtgatgtcaggcttctgcctccctgagccggtattctcgattaaactcaaagaatgggtgcagaagttgatgatgaccctccgacatccttcgttgcccttgctagagctgcaggaaatcatgaccagtgtggccggacgaattcctgctcctgtcgagaagtcagtgagacgggtgatggctcagtatgcgagcaatattacaagcgtcttgtgccagttccctagccaacaaatcgccactatactggattgccatgctgctacgcttcaacggaaggctgaccgcgaggtctttttcataaacacccaaagcattgtccagttagtgcagagatacaggagtggcattcgggggtacatgaagacagtagtgttggacctcctgaggcgctacttacgagtggagcaccactttcaacaagcccactatgacaaatgtgtgatcaatctgcgggaacagttcaagcccgacatgtctcaggtactggattgcattttcagccacgcgcaagtcgctaaaaagaatcagttggttatcatgctgatcgatgaactttgcggacccgacccctcactctccgatgaattgatttccattctcaatgagctgacccagctcagcaaatccgagcactgtaaggtagcattgagggctaggcagattctgattgcaagccacctcccctcttacgaactgagacacaatcaggtcgagtcaatcttcctcagcgccattgacatgtatggacaccagttctgcccggagaacctgaagaaactgattctgtccgagacgacaatcttcgatgtactgcccaccttcttttatcatgccaacaaggtagtgtgcatggcatcactggaagtgtacgtacggcgcggctatattgcttatgagctgaatagtttgcagcaccgacagctccctgacgggacgtgcgtagtggaatttcagttcatgctgccttcatctcaccctaataggatgaccgtccccatcagcatcactaaccctgacctgctcagacatagcacagaactctttatggacagtggcttctctccactgtgccagaggatgggagctatggtagccttcagacggttcgaagacttcacacggaactttgacgaggtgatttcgtgctttgctaacgtgccgaaggacacccccttattttcagaggcaaggacctccctttacagcgaggatgattgcaaatcactccgcgaagagccgatccatatattgaatgtgtccattcagtgtgcagaccacctggaagacgaggcgctcgtgccaatcctgcgtacttttgtgcaatcaaaaaaaaatattctggtcgattacggactccggaggatcacgtttttgatcgcccaggaaaaggagttcccaaaattttttacctttagggcccgcgatgagtttgccgaagacagaatctataggcacctggaacccgcgcttgcatttcagctcgaacttaacagaatgagaaatttcgacctgaccgcggtgccgtgtgcaaatcacaagatgcacctgtacttgggagcagcaaaagtgaaagagggcgtggaagtaaccgaccatcggttcttcattcgggccatcattcgccatagtgacctcatcacgaaagaggcaagcttcgagtaccttcaaaatgagggagaaagactgttactggaggcaatggacgaactggaagttgcattcaacaacacttcagttcggacggattgtaaccacattttcctcaatttcgtgccaacagtgatcatggaccctttcaagatcgaggagagtgtacgctacatggtgatgcggtatggtagccggttgtggaagctgagagttctccaggccgaggtgaaaatcaatatcagacaaactacaactggctcagcggtccccataagactctttataactaatgagtctggatactacctggatatcagcttgtacaaagaggtgacagatagtagatccggaaatattatgtttcactcttttggaaataagcagggaccacagcatggtatgcttattaatactccctacgtaacaaaagatttgttacaagccaagcgcttccaggctcagactttaggaacaacatacatctacgattttcctgagatgttcagacaggcattgttcaaattgtggggctcccctgacaagtatcctaaagacatactgacatacaccgaactggtgctagactctcagggccagttggtcgagatgaatcgcctgccagggggtaacgaggtgggcatggtggcctttaaaatgaggtttaagactcaggagtacccagaaggccgtgatgtaattgtcataggtaacgatatcacatttaggataggatcatttgggcccggggaggatctgttgtacctgagggcttcagagatggcgcgggctgagggaatcccgaagatttatgtcgccgctaattcgggcgcaaggatcggaatggcggaggagatcaaacacatgttccacgtcgcctgggtcgacccagaagacccgcacaagggttttaaatacctatatctgacgccacaggactatacaaggatctcgtctctgaattcggtgcattgcaagcatatcgaggagggaggtgagtcacgctacatgatcactgatatcattggcaaggatgatgggttaggggtggagaacctgagaggcagcgggatgattgcaggagagtcgtcactggcttatgaggaaatagtgacaatctctttagtcacctgccgcgccatcggcataggtgcttatcttgtaaggctgggccagcgcgtaattcaggtagaaaatagtcatatcattttgactggtgcctctgcgctgaacaaggtgctggggagggaggtctacacgtcaaacaatcagcttgggggagttcagatcatgcattataatggggtgtctcacattacagtgccggacgattttgagggagtatacaccatcctggaatggttatcctatatgcccaaagacaaccattctccagtgcctattattacccctactgatcctattgacagagaaattgagtttctcccaagtagagccccctacgaccctaggtggatgctggccggcaggccacatcccacactgaagggaacttggcagtccggttttttcgaccacggcagttttaaagaaatcatggccccgtgggcacaaacagtcgttactggccgggcccgcctgggcggcattcctgtcggggttattgctgtagaaacaagaacagtggaggtggcggtccctgcagatccagctaacttggattcggaggcaaagatcattcagcaggccggacaggtctggtttcctgactcagcatacaagacggcccaggctgttaaggacttcaaccgggagaagcttccactgatgatattcgcgaattggagagggttctccggaggcatgaaggatatgtatgaccaggtcctgaagttcggcgcttacattgtggacggcctgaggcagtacaaacagcctatcttaatttacatacccccctacgctgagcttcgggggggtagctgggtggtgatagatgctaccatcaaccccctatgtatcgagatgtacgcagataaagagagtcgaggtggtgtgttagaaccagagggtaccgtggaaattaagttcagaaagaaagacctgatcaaatccatgcgcaggattgatccagcatataagaaactcatggaacagctcggtgaaccggacctctcggataaagaccggaaggatctggaagggcggctgaaagcacgtgaggatctgttgttgccaatctatcaccaagtggccgttcagttcgccgacttccacgatacgcctggcaggatgcttgagaaaggcgttattagtgacattctcgaatggaagacagcacgcacattcctgtactggcgactgcgcagactcctgttggaagatcaggtgaagcaagagatcctgcaggcctccggagaactttcacacgtccacattcagtcaatgcttaggcgatggtttgtggagacagaaggagcggttaaagcctacctctgggataataaccaagtcgtcgtacagtggctcgaacaacactggcaggccggtgacgggccgcgcagtacaatccgcgagaatattacatatctgaagcatgattccgtactgaaaacaatccgcggcttggtggaagagaatcccgaggtagctgtagattgcgtgatttatctctcacagcatatttccccggccgagcgcgctcaggtggtgcacctgttgtccaccatggattctcccgccagcacatag

SEQ ID NO: 334046 - DNA, 7377 bp, Artificial Sequence
  derived and/or modified sequence
atggtgctgctgctgtgcctgagctgcctgatcttcagctgcctgactttctcctggctgaaaatctggggaaagatgaccgactccaaaccaatcacaaagtcaaagagtgaagcgaacctgatcccaagccaggagccctttccagcatccgataattccggagagaccccccagcgtaatggcgagggtcacactctgcccaagaccccaagccaggctgaacccgcttcacataagggacccaaagacgccggccgcagacgcaactccctgcccccgtcccaccagaaacccccccggaaccccctgtcatcttcagatgccgccccctcccccgaactgcaggcgaatggcaccggaacccagggcttggaggcaactgataccaacggactgtcctcatcggctcgcccccagggccaacaggcaggatctccgagcaaggaggataaaaaacaggcaaatattaaacgccagctgatgactaattttatcctgggtagctttgacgattattcgtccgatgaggatagcgtggccggatctagcagggagtcaacaaggaaaggctctagagctagcctgggagctctcagtctggaggcatacttgactacaggagaggctgagacccgcgtgcccaccatgcgaccatcgatgtcgggattgcacctcgtgaagagaggaagggagcataagaagcttgatctgcaccgagatttcacagtcgcatcgcctgccgagtttgtgactcggttcggcggcgaccgcgtcatcgaaaaagtgttaatagcgaacaacggcattgcggccgtcaagtgcatgcggtccatccgccgctgggcatacgagatgttccgcaacgaaagggcaatcagattcgtagtcatggtgacccccgaagacctgaaggccaacgcagaatatattaagatggcagatcactatgtacccgtgcccggtggccccaacaacaacaattacgcaaacgtggaactcatcgtggacatagccaagaggatccctgtacaggctgtttgggccggatgggggcacgcgtctgaaaaccctaagttgcccgagcttttatgcaagaatggtgttgcctttttggggcctccaagtgaggctatgtgggctctcggggacaagattgccagcaccgtggtggcacagacactgcaagttcccactttaccgtggtccggtagcggcctgaccgtggaatggacagaagatgaccttcagcaggggaaacggatatccgtccctgaggatgtttacgacaaaggctgcgtgaaagacgtggacgaagggttagaggccgccgagagaatcggctttccacttatgatcaaggccagtgagggcggaggtgggaagggcattcgaaaggccgaatctgccgaagatttcccaatactttttcgacaagtccaatcagaaatcccaggcagcccaattttcctcatgaaactcgcgcagcacgctaggcatctagaggttcagatcctggctgaccagtatggaaacgcagttagtctgttcggtagggattgtagtatacaaagacgtcaccagaagattgttgaggaggcccctgcgaccatcgccccactggcaattttcgagttcatggagcagtgtgcgataaggctggcgaagactgtgggctacgtgtctgccggtactgtggaatatctctattcacaggatggaagttttcattttctcgaattgaatccaaggctccaggtggagcatccctgtactgagatgattgccgatgtcaatctacccgcagcccaactgcagatcgctatgggggtgccactgcacagactcaaggacatccgcctcctttacggagaatctccgtggggagtcacacctatttcgtttgagactccatcaaacccccctctggctcgcgggcacgtcattgccgcacgaattacctcggaaaaccctgacgaggggttcaagccatccagtggaaccgttcaggaactgaattttagaagctccaaaaacgtgtggggatatttcagcgtggcagccaccggcggcttacacgagtttgccgatagccagtttggtcattgtttcagctggggcgagaacagggaggaggcaatcagtaatatggtcgttgcactgaaggagttgtccatcaggggtgactttcgcacaaccgtcgaatacctgattaacttgcttgagacagagagcttccagaacaatgatattgacactggctggctcgattaccttattgccgagaaagttcaggctgaaaaacctgacattatgttgggtgtcgtttgtggcgcattgaacgtggcagatgccatgtttcgaacatgcatgaccgactttcttcatagtttggagcggggtcaggtcctaccagcggactccctgctcaatttggtcgatgtggaactgatttacggcggagttaagtacatcttgaaggtggctagacagtcccttaccatgttcgtcttgataatgaacggttgccacatagagattgatgcccatagactgaatgacggagggctcttacttagttacaatggaaactcctacacgacttacatgaaagaggaggtcgatagctatagaatcacaattggtaacaaaacatgtgttttcgaaaaggaaaatgatcctactgtactccggagccccagtgctggaaaacttacacagtatactgtcgaggacggaggacacgtagaagcaggcagttcctacgccgaaatggaggttatgaagatgatcatgacccttaatgtccaggaacgcggacgagttaagtatattaaacgtcctggggcagtgttggaagctggatgcgtcgtcgcgaggcttgaattggacgacccgtcaaaggtgcatcctgccgagccttttacgggggaactgcctgcgcagcagacccttcccattcttggcgaaaagctccaccaagtttttcactccgtgctggagaatctgactaatgtgatgtcagggttctgtctgcccgaacccgtcttttccatcaagctgaaagagtgggtgcaaaagcttatgatgaccctgagacacccaagtcttccactgctggaactgcaggaaatcatgactagtgtggcaggaagaatacccgcgcctgtcgagaagagcgtgaggcgcgtgatggcccagtacgcctcaaacatcactagtgtgctgtgtcaatttccttcccaacagatcgccactatcctggactgccacgccgctaccttgcaaagaaaggccgatcgggaggtattcttcatcaatacacagtcaattgtgcagctggttcaaaggtatcgatccggcattcgagggtatatgaagacagttgtgctcgatctgctgcgccgctacctgcgagtcgagcatcacttccaacaggcgcattatgataagtgcgtgatcaatctccgggagcagttcaaaccggatatgtcccaggtcttagactgcatcttttcccacgctcaggtggccaagaagaatcaacttgtgattatgctcattgacgaactctgtggccccgatccttctctgtcagatgagctgattagcattctcaacgagctcacccagctgtctaaaagcgagcactgcaaagtggccttgagggcaagacaaatcctgatcgcatctcacctcccaagctatgaactgcggcacaaccaggtcgagagcatattcctctcagcaattgacatgtacggtcatcagttttgccctgagaacttgaaaaaactcattctgtcagaaaccacaattttcgatgtgctgcctacattcttttaccatgcaaacaaggtggtttgtatggcctcactggaagtttacgtccggaggggatatattgcttacgagctcaactcgctccaacaccggcagttgccggacggtacctgtgtcgtggaatttcagttcatgcttccaagcagtcatccaaaccggatgactgtgcctatatcaattaccaatcccgacctccttagacactccaccgagctgttcatggacagtggcttctccccactgtgtcaaaggatgggagctatggtcgcctttcggaggttcgaggacttcacccgcaatttcgacgaagtcatctcttgcttcgcaaacgtgccgaaagatactccgttgttcagtgaggcccgcacaagcctgtattccgaggatgattgtaaatccttgcgcgaggagccaattcacatcttaaacgtctccatccaatgcgctgaccatttggaggacgaggcgctggtgcctattctccggactttcgtgcaatccaaaaagaatatactggtcgattacggactgaggaggataactttcctgatagctcaggagaaagaattccctaagttctttacgttccgcgcaagggacgaattcgctgaagaccggatatataggcacctggaacctgccttagcttttcagctggagctgaaccgcatgagaaatttcgatttaaccgccgtcccctgtgcgaaccacaagatgcacctttacctcggcgcggcaaaggttaaggagggcgtggaagtcactgaccacaggttttttatcagagctatcatccggcattcggacctcatcaccaaggaggccagctttgagtacctacagaatgaaggagaacggcttctactggaggcaatggatgagctggaggtcgccttcaacaacacatcggtgagaacagactgcaatcacattttcctgaacttcgtgccaacagttatcatggaccccttcaagatcgaagaatctgtgcgatacatggtcatgaggtacggttctcggctctggaaactgagagtgctgcaggcagaggttaaaatcaatattcggcaaaccacaaccggaagtgctgtgccaatacggctctttattactaatgagagcggctactacctagacatctcactgtacaaagaagttactgattcaaggagtggaaatatcatgttccattccttcggtaataagcagggcccccagcacgggatgttaatcaataccccttacgtgactaaggaccttcttcaagctaaaagattccaggcacaaacactcggtaccacctatatctacgacttccccgaaatgttccgccaggccttgtttaagctatgggggtcacctgataaatatcccaaagatattcttacatacactgaacttgtactggactctcaagggcagttagtcgaaatgaacaggcttcccggaggtaatgaggtggggatggtagcattcaagatgcggttcaagacacaagaatacccagaaggccgcgatgtgatcgtgattggaaacgatatcaccttccgcataggttccttcggtccaggagaggatttgctttacttgagagcctccgagatggcccgtgctgagggtatcccaaaaatatatgtcgccgccaattcgggggctcggatcggtatggcagaggaaatcaagcatatgttccacgtcgcttgggtggatcctgaggacccacacaagggcttcaagtacttgtacctcaccccacaagactatactaggatttcctctctgaactctgtgcactgtaagcatattgaagaggggggcgaaagtaggtatatgattacagatatcataggaaaagacgacggcctcggagtggaaaacctacggggcagtggcatgatagctggggagagcagccttgcttatgaggaaatcgtgactattagtttggtcacgtgtcgcgcaatcggtataggagcgtacctagtgagactgggccaacgggtcatccaggtcgaaaactcccacatcatactgactggagctagcgctctcaacaaagtcctcgggagagaggtgtacaccagtaacaaccagttgggtggagttcagattatgcattacaacggagtcagccatattactgtaccggatgacttcgaaggagtatatactatcctcgagtggctctcctatatgcctaaagataatcactcccctgttcctatcattacccctactgatcccatcgaccgcgagatcgagttcctcccgtcaagagccccttatgatccgcgatggatgttggcaggccgcccccatcccactctgaagggcacatggcagagtggcttcttcgaccacggttcgtttaaagagattatggctccatgggcccagacagtagtgacaggccgggcgcgcctgggagggatccctgtcggtgtgattgctgtcgaaacacggaccgttgaggttgctgtgccagcggaccctgctaacctggatagcgaggcgaaaattattcagcaggcagggcaagtgtggttcccagacagtgcctacaagacagcccaggcagtaaaggatttcaaccgggagaagttgcctctcatgatctttgccaactggagggggttctctggaggtatgaaggatatgtacgatcaggtgttaaaatttggagcctacattgtagacgggttacgccaatataaacagcccattctgatctacatcccaccatatgctgaactgcgcggtggctcctgggtcgtgatcgatgccaccatcaatcccttgtgcattgaaatgtatgccgataaagagtccagaggaggtgttctcgaaccagaaggcaccgtggagattaaattccggaagaaagacctgattaaatctatgcgccgaatagaccctgcttacaagaaactcatggagcaactgggtgaaccagacttatctgacaaagatagaaaggatttggagggccgcctgaaagctagagaggatctgttgttgcccatttaccaccaagtggccgttcagtttgccgactttcacgatacacccggccgtatgctggagaagggtgtgattagtgatatactggagtggaagacagcaagaacgtttctgtattggcggctcagaaggcttctgcttgaagatcaggtcaagcaggagatccttcaagcatcaggagagctctcgcacgttcacatacaaagcatgttacgtcgatggtttgtcgagaccgagggagcagtcaaggcttacttatgggataacaaccaagtggtggtgcagtggctggagcaacactggcaagcaggcgatggaccgcgctctacaattcgggagaacatcacatatctgaagcacgacagcgtgctaaagactatacgcggattggtggaagagaatcctgaagtggcagtggattgtgtaatatacctgtcgcagcatattagcccggccgaaagagcacaagtagtacacttgctgagcaccatggattcacctgctagcacatag

SEQ ID NO: 334047 - DNA, 7376 bp, Artificial Sequence
  derived and/or modified sequence
atggttttactcctgtgtttgagctgcctgatcttcagttgccttacattttcttggctcaaaatttggggtaaaatgaccgacagtaaaccgataacgaagagcaaatccgaggccaacctcatacccagccaggagccttttcccgctagtgacaactctggtgagaccccccagcggaacggtgagggacacacgttacctaagacgccgagccaggccgagcctgcatcccacaaaggtccgaaggacgctggtagaaggcgcaactcattgccaccctcacatcagaagcctcctcgcaatcccctgagcagcagtgatgccgctccttctcctgaactgcaggcaaatggaaccggaacacaaggtcttgaagccacagacacaaatggcctaagcagctcagcccgaccccaggggcagcaggcaggcagtccatccaaagaagataagaagcaagcgaacataaagcgacagctcatgacaaatttcatactgggctctttcgacgactatagcagcgatgaggactcagttgctggtagctcccgagagtccacacgaaagggttccagagcttctcttggcgcactttccttggaagcctatctcacaaccggggaggcagagaccagggtcccaactatgagaccatcaatgagcggattacacctcgtgaaacgcggaagggagcataaaaaactagatctgcacagggatttcactgtagccagccccgcagaatttgtgacacggtttggcggagaccgcgttatcgagaaagtcctgatagcgaataatggcatcgctgcagtgaagtgtatgcgcagcattaggagatgggcttacgagatgttccggaacgaaagagccattaggtttgtggtgatggtgacccccgaagatctaaaagcgaacgccgagtacataaagatggcggatcattatgtgcctgtgcccggtggcccaaacaataacaattatgccaacgtcgaattaatcgttgacatcgcgaagaggatccccgttcaggcagtgtgggcgggatggggtcatgcatccgagaatcctaaactccctgagcttctgtgtaagaatggggtcgccttcctgggtcccccaagcgaggccatgtgggcactgggagataaaattgcgtctaccgtcgtggcccagacactgcaggttccgaccctgccctggtctggtagcggacttaccgtggagtggaccgaggacgatctgcagcaggggaaacgcatctccgtgccagaagatgtttatgacaagggatgcgttaaggacgtggacgaagggcttgaggccgctgaacgcatcggttttcccttgatgatcaaggccagcgaaggcggtggcggaaaggggatacgcaaagccgaaagcgccgaggactttccaatactgtttaggcaggtccaatcagaaatcccagggagtcccatatttttaatgaaactggcacaacacgccagacatctggaggttcagatactcgcagaccagtacggaaacgcagtgtcgctcttcggtagagactgttccatccagcgcaggcatcaaaagattgtcgaggaggcccctgctacgatagcgccattggcaatcttcgaattcatggagcagtgcgccatacggctggcaaagacggtgggttacgtctctgctggaaccgtagaatatctgtattcgcaggacggctctttccactttttggagctgaatcctcgcctacaggtcgaacatccatgtactgagatgattgctgacgtaaacctgccggcagcgcagctgcaaatagcgatgggggtgcccctgcacagactgaaagatatccggcttctgtacggcgagtcaccgtggggggtcacacccatcagctttgaaaccccaagtaatccacctctagcacggggacacgttattgccgctcgtatcacctccgagaacccagacgagggcttcaaaccgagctcaggaactgtacaggaactgaactttagaagttccaagaatgtgtgggggtatttttccgtggctgctactggcggtctgcatgagtttgccgacagtcaattcggacattgttttagctggggggaaaatagggaggaggcaatcagtaatatggtggtggccctgaaggaactgtcaatcaggggcgacttccgaactaccgttgaatacctcatcaacctgctggagaccgagagcttccagaataatgacatagacaccggttggctggattacctcattgctgagaaggttcaggcagaaaagcctgatataatgttgggcgttgtgtgtggcgctctcaacgtcgcagacgccatgtttaggacctgcatgaccgattttttacattctcttgaacggggacaggttttaccagccgactccctgctgaacctggtggatgtggagcttatttacggtggagttaagtatatcctgaaggtggcaaggcagtcacttacaatgtttgtcttgatcatgaatggttgccacatcgaaatcgacgcccaccgcctgaatgatggcggactgctcctgtcctacaatggaaattcctataccacctacatgaaggaggaggtggacagttatagaatcaccatcgggaataaaacatgcgttttcgaaaaagaaaatgaccctacagttctgcgttccccatcagcaggaaagctaacccagtacactgtcgaggatggagggcacgttgaagccggatcttcctatgcggagatggaggttatgaaaatgatcatgactctgaatgttcaggagcgcggaagggtgaagtatattaagcgcccaggcgcagtgctagaagccggatgtgttgtggccagactcgagttggacgatccctccaaggtgcaccctgccgaaccatttaccggcgaattgcccgctcaacagaccttaccgattcttggcgaaaagttgcatcaggtgtttcacagtgtactggaaaacctaacgaatgtgatgtccggcttttgcctgcccgagccagtctttagtattaaactgaaagagtgggttcagaaacttatgatgactctccggcatcctagccttccactgctggaactgcaggaaatcatgacgtcagttgccggaaggatacctgccccagtggaaaaatctgtgaggagggtgatggctcagtacgcctctaatattacttcagtgctgtgccagttcccgagccagcagattgctactatcctcgactgccatgctgcgactttgcaacgtaaagccgacagggaggtcttctttatcaatacccagagtattgtccaactcgtgcagcggtaccgatcagggattagaggttatatgaagacggtcgttcttgacctgctgagaaggtatctgcgagtggagcaccattttcaacaggcccactacgacaagtgtgtgattaacctgagagaacaattcaagccagacatgtcacaggtgctggactgtatcttctcacacgcccaagtcgccaaaaaaaaccagcttgtgattatgttgattgacgagttatgcggacccgatcccagtctgtccgacgagctcatctctatactgaacgagctgacacagctttctaagtccgagcactgtaaggtggctctccgggcacgtcagatcctcatcgcatcacacctgccttcttacgaactaagacataaccaggtggagtcaatcttcttatccgctatcgacatgtacgggcatcagttttgccccgaaaatctgaagaagttgatcctatcagagaccacaatttttgacgtcctgccaacttttttttaccatgcaaataaggtggtatgcatggcttctctggaagtgtatgtgcgcagggggtacatagcctacgagctaaactccctgcagcaccggcagcttcccgacggtacctgtgtggtggagttccagtttatgctaccttcatctcatcctaatcgcatgactgttccaataagtattactaacccagatctcctccgacactcaactgaattgtttatggatagtggctttagccctctgtgccagcgcatgggtgccatggtcgcctttcgacgcttcgaagactttacacggaactttgacgaagttatttcatgttttgccaatgttcctaaagatactcctttgtttagcgaggcgagaacttctttatacagcgaagacgactgtaaatcactcagggaggagcctatccacattttgaacgtgagcatccagtgcgcggaccacctcgaggacgaagccctggtgcctattctgcgcactttcgtgcaaagcaagaagaatattcttgtggattatggactgagacggatcacctttctgatcgcccaggagaaggaattccctaaattcttcacattccgcgctagggatgagtttgcagaggacaggatctatcgacatttggaacccgctctggcctttcagctcgaattgaacagaatgcgtaatttcgacctgaccgcggtgccttgcgcaaatcacaaaatgcacttatatctgggcgcagcaaaggtgaaggaaggggtggaagtcactgaccatcgtttttttatccgcgcaatcatcaggcatagcgacttgatcacgaaggaagccagctttgaatatttgcaaaacgaaggcgagcgtctccttctcgaggcaatggatgaactggaagtggcatttaacaatacttcggtccgaaccgactgcaatcacattttcttaaactttgtgcccaccgtgattatggatccctttaagattgaggagagtgtacggtatatggtgatgcgatacggttctaggctgtggaagctgagagtactgcaagcggaagtgaagattaacatccggcagacaacaactgggagcgccgtgcctatccgccttttcatcactaatgagagtggatactatctggatatatcactgtacaaagaggtgaccgactcccggagtggcaatatcatgttccactcctttggaaacaaacaggggccacagcacgggatgctgatcaacaccccctacgtcactaaggatctcctccaagcaaagaggtttcaggcacagacattgggaactacctatatctatgactttcctgaaatgttccgtcaagccctgtttaaactgtggggctctccagataagtacccaaaagatattctcacctacacggagttagtactggacagccaaggccaactagtagaaatgaatcgtctccctggcggaaacgaagtaggtatggttgcctttaagatgagatttaaaacacaagagtatccggaagggagggacgtgattgtcattggcaacgatatcaccttcaggattgggtcctttgggcctggggaggatctactctacttaagagcctcagaaatggccagggccgaggggatccctaagatttatgtagccgcaaacagtggtgctagaatagggatggctgaggagattaaacatatgtttcacgtggcatgggtcgaccccgaggacccacataaaggttttaagtacctgtacctgacaccccaggattatactaggatttcctcactcaacagtgtccactgcaagcacattgaagaaggcggtgagtcgcggtatatgattactgatatcatcggcaaggacgacgggcttggggtagaaaaccttcgtggcagtggtatgatcgccggagaaagttcgctggcctacgaagagattgtgacgatctctttggttacatgtagagctataggcattggagcttacctggtgaggctgggacagcgcgttatccaggtcgagaatagccacattattctgactggggcttcagccctgaacaaagtgctcggccgtgaagtctatacatccaacaatcaactagggggagtgcagattatgcactacaacggggtgagccacattactgtgcccgacgactttgagggcgtgtacacaatcctggaatggttgtcatacatgccgaaggataatcattctcctgtccctattattactccaacggatccaatcgaccgagagattgagttcctgccctctcgggcaccctatgatccgaggtggatgctggccggacgacctcatcccaccctgaaggggacctggcagagtggcttctttgatcacggctctttcaaagagatcatggccccatgggcccaaactgtggtcacaggcagggctcggctgggcggtatccctgtaggcgtgattgccgtggaaacgcgtactgtggaagtcgctgtccccgcagacccagctaatcttgattctgaagccaagattatccagcaggctgggcaggtatggtttcctgactcagcatataagacggcccaggccgtgaaggacttcaaccgagagaaacttccactcatgatctttgctaattggagagggttcagcgggggaatgaaagacatgtatgatcaggtcttaaagtttggggcttatatagtcgacggtctcagacagtacaagcagcccatcctgatatacattccgccttacgccgaattacgcggtgggtcctgggtggtgatcgacgcaaccatcaacccactttgcattgaaatgtacgccgataaggaaagccggggaggggtgttggagcccgaaggaacagtggagatcaaatttcgaaagaaggacctgataaagagtatgcgtcgcatcgatcctgcctataagaagctgatggaacagttgggcgaacctgacctatccgataaggacaggaaagatctggaagggaggcttaaagctcgggaggatttgctgctcccaatctaccatcaggtggctgtccagttcgcggatttccacgacactcccggacgcatgctggagaagggcgtgattagcgacattcttgagtggaaaacagcccgtacttttctctactggcgcttacgacgcctactgttggaagatcaagtgaaacaggaaatactccaggcgagtggggaacttagccacgtacatattcagtccatgctgaggcgttggtttgtggagaccgaaggcgcagtgaaagcatatttgtgggacaacaaccaggtcgtggtgcagtggttggaacaacattggcaggcaggcgatggccctcgtagcacaattcgcgagaacatcacatatttgaagcatgattctgttttaaaaactatccgcggtcttgtagaggaaaatcctgaagttgcagtcgactgcgttatatatttatcccagcatatttcccctgccgaaagggcccaggtggtgcaccttctcagtacaatggacagtcctgcatcgacata

SEQ ID NO: 334048 - DNA, 7376 bp, Artificial Sequence
  derived and/or modified sequence
atggtcttgctcctgtgcctgtcatgtctcatatttagctgcctcaccttcagctggctgaagatctgggggaaaatgactgactccaagcccatcactaagtcaaagtctgaggccaatttgattccgtcccaggagccatttcctgcgagcgacaattccggggaaactccccagagaaatggggaggggcacacgttacctaaaaccccctctcaggcggaacccgctagtcacaagggccctaaggacgccggaagacgacgcaattccctcccacccagtcatcagaagccaccacggaaccctctgagctcttctgacgccgctcctagcccggaacttcaggcaaacggtaccgggactcaggggttggaggccaccgacactaacggcctttcctcctctgctcgtccccagggacagcaagcagggtcccccagcaaagaggacaaaaagcaggccaatatcaaacgccagttgatgaccaattttattctgggcagctttgacgattatagctcagacgaggattccgtggccggatcctctcgagagtcaacgcgaaaggggagtcgcgcaagcctaggggcactgtccttagaggcatacttaaccaccggagaggctgaaaccagagtaccaaccatgcggccatccatgagtgggcttcatctcgtcaagaggggtcgggagcataagaagttagatctccaccgagacttcaccgtggcaagtcccgctgagtttgttaccagatttggcggtgaccgagtaattgagaaggttcttattgcaaataatggcatcgcagccgtgaaatgcatgagaagtataagaaggtgggcatacgagatgtttaggaacgagagggctataagattcgtcgtcatggtgacgcctgaggaccttaaggcaaacgcagaatatattaagatggccgaccactacgtcccggtgccagggggtcctaacaacaacaattacgccaacgtggagctcattgtcgatattgcgaaacgtatccctgtccaagctgtttgggccggatggggccatgcctctgagaaccccaagttgcccgagctcctgtgcaagaacggggtggcgtttttggggccaccctccgaagctatgtgggccctgggtgataaaatcgcttctaccgttgtggcacaaactctgcaagttcctacactcccatggtccggatctggcttgactgttgagtggactgaagatgacctgcagcaaggcaagcgtatctccgtacccgaagacgtttacgacaaaggctgtgtaaaagatgtggacgaaggactcgaggccgctgagcggataggtttcccactaatgatcaaggcatctgaggggggtggtggcaagggaattcggaaagctgaaagcgccgaggattttcctattctgtttaggcaagtgcagtcggaaatccctggtagcccaatttttctgatgaagttagcacaacacgcccgacatctggaggtgcagatactcgcagaccagtatggaaacgcggtgagtctgttcggacgagactgctcgattcagaggcgccatcagaaaatcgtggaggaagcaccagctacaatagcccctttagccatcttcgaatttatggagcagtgtgctatccgtctcgccaaaaccgtgggttacgtctctgcgggtactgtggaatatctgtactcccaggatgggtcttttcatttcctggaactaaacccccgacttcaagtggaacacccgtgtactgaaatgattgcagacgttaatctgccggctgcccaactccaaatagcaatgggagttcctctgcatcgactgaaggatataagactcctctacggcgaatcaccatggggggtgacccccatcagcttcgagacgcccagcaacccccctctggcaagggggcacgtgatcgcagcccgaattacctccgagaatcccgacgaaggcttcaagccatctagcggcaccgtgcaggaattgaattttaggtcgtctaagaatgtctggggatacttttcagtggctgccacgggaggccttcacgagttcgcagacagccagtttgggcattgctttagttggggggaaaaccgggaagaggccatatcaaatatggtagtggccctgaaggagctgtctatccgcggagacttccgcacaactgtggaatacttgatcaacctcctcgagactgagtccttccagaataatgacattgacacagggtggcttgactacttaatagccgaaaaagtgcaggccgagaagcctgacatcatgctaggcgtcgtctgcggggcactaaacgtggccgacgctatgttcaggacatgtatgactgatttccttcacagcttagagcgcggacaagtcctgcccgcagacagccttctcaacctggtggatgtcgagttgatttacggaggcgttaagtatattctcaaggtggccaggcagagcctgacaatgttcgtgctgattatgaacggatgtcacatcgagatcgatgcacaccgactgaatgacggagggctcttactgtcatacaacggcaactcctacactacttatatgaaagaggaagttgatagctacagaatcactatcggtaacaagacatgcgtgttcgagaaagaaaacgatcccacggttctgagatcaccttctgctgggaagctgacacagtatactgtcgaggatggcggacatgtcgaagcaggatcctcctatgctgaaatggaggttatgaagatgataatgacactgaacgtgcaggagagagggagggtgaagtacataaagaggcctggggctgtgttggaggcgggttgtgtcgttgccaggctcgagctggacgatccatcaaaggttcatcctgctgaacctttcacaggggagttgcccgctcaacagaccttgccaattctcggcgagaagctgcatcaagtgttccatagtgtgctggagaacctcaccaacgtgatgtccggcttctgtctccctgaaccagtattcagtattaagttgaaggagtgggttcaaaagttaatgatgacactaaggcatccctccctgcccctgctggaactccaggagatcatgacatccgtggctggtaggatacccgcaccagtggaaaaaagcgtgagacgggtgatggcgcagtacgcgagcaatatcacttcggtcttgtgtcagttccctagccagcagattgcaactattctggactgccacgccgctacgttgcagaggaaggctgatagagaagtcttcttcatcaatacccagtccatcgtgcagttagtgcagcggtaccgctcaggaatccgaggttacatgaaaaccgtggtgctggaccttctccgcagatatctgcgggtggagcatcatttccagcaggcccattatgataagtgtgtgattaatctgagagaacagtttaaacctgatatgagtcaagttctcgattgcatattcagccacgcacaggtcgctaaaaagaaccagctggttatcatgctgatcgacgaactgtgcgggccagatccatcgctcagtgatgagttaatctctatcctcaatgaattgacgcagctgagtaaatctgagcattgtaaggtcgccttaagggcacgacagatcttgatcgcatctcacctgccctcctacgagctacgccacaatcaggttgagtccattttcctctccgccattgacatgtatggacaccaattttgcccagagaatctgaaaaaactgattctgagtgaaaccaccatctttgatgttctccccacctttttctaccatgccaataaggtggtgtgcatggcaagcctcgaagtctacgtgaggcggggatacatagcctacgagctcaattctcttcaacatcggcagttgcccgatggcacgtgcgtggtcgagtttcagtttatgctgccttcttcccatcccaatcgaatgacggtgccaataagcattaccaacccagatctgctcaggcatagcactgagctgtttatggatagtggtttcagtccactctgccaaaggatgggcgcaatggtggcatttagacgctttgaggacttcacacgcaacttcgacgaggtaattagctgcttcgccaacgtaccaaaggatactcccctattttctgaggccaggacttccctgtattccgaggacgactgcaagagcttgagagaggagccaatccacattttgaatgtgtcgatccagtgtgccgatcatctcgaggacgaggccttggtgcccatcctgagaacctttgtccagagcaaaaagaacattctggttgactatggacttcgcagaattaccttcctgattgcccaagagaaagaatttccaaaattttttaccttcagagccagggatgagttcgcggaagacaggatatatagacatctggagccagccctcgccttccagctcgaattgaaccgcatgagaaatttcgacctgactgcagtaccctgcgcgaaccataagatgcacctttacctgggagcagccaaggttaaggagggcgtggaggtgactgatcaccggttttttatcagagcgataatccgacattctgacctgatcaccaaagaggctagcttcgaatacctgcaaaatgagggggaacgcctgctacttgaggccatggacgaactcgaggtcgcctttaacaataccagcgtgaggaccgactgcaaccacatattcctgaacttcgtccctacagtcattatggatccctttaagatcgaagagtctgttagatatatggttatgcggtatggttctcgactttggaagcttcgggtgctacaagcagaggttaagattaatatcagacaaactaccacaggttccgcagtgccaatccgtctgtttattacaaacgagtcaggctattacctagacatctcgctctataaagaggtcaccgattcacggtctggcaacattatgtttcactcctttggaaacaaacaaggcccacagcatggcatgctcatcaatactccttatgtgacaaaggatttacttcaagctaagcggtttcaagcccagacactgggcaccacctacatctatgattttccagagatgtttaggcaagcattgttcaaactgtggggcagccccgataaatatccaaaggacatactgacatacactgaactggtgctagatagccaaggtcaattagtggagatgaaccgtctgccgggaggcaacgaggtggggatggtcgcttttaagatgaggttcaagacacaggaatacccagaaggcagggatgttatagtgatcgggaatgatatcacatttcgcatcgggagttttggccctggcgaggacttactctacttgagagcaagtgagatggcacgcgctgagggcataccgaaaatctatgtggccgctaactccggtgcacgtatcggaatggcagaggagatcaagcacatgttccatgtggcttgggtcgaccctgaggatccacacaaagggtttaagtatctgtacctcactcctcaggactacactaggatcagcagcctgaatagcgtccactgcaagcacatcgaagagggaggggaatcacgatacatgatcacagacattatcggaaaagatgatggtttaggcgtggaaaacctaaggggttccggaatgattgctggcgagagtagcctggcctacgaagagattgtcaccatctctctggtcacgtgtcgggctatcggcattggcgcatacctcgtgcgcctcggccagcgtgtgattcaggtcgagaactcgcatattattctcactggtgcctctgccctaaacaaggtcctgggccgagaggtgtacacctccaataaccaattagggggagtgcagataatgcattacaatggcgtgagtcatattacagttccagacgatttcgagggcgtttacacaatcctcgaatggctgagctacatgccgaaggataatcactcccctgtcccaatcattacgccgacagacccaatagatcgggagattgagtttttgcccagccgtgctccctacgatccacgatggatgctggccggtaggccacatcccacgttgaaaggcacttggcagagcggcttttttgatcacgggagctttaaggagataatggccccatgggctcagactgttgtcacaggcagggccaggctcggcggtattcccgtgggtgtcattgccgtggagacacggactgtggaggtggcagtacctgccgatccagcaaatctggatagcgaagctaaaatcatccagcaggccggacaggtctggttccctgacagcgcatacaagactgctcaggccgttaaggatttcaaccgtgagaaactgccgctgatgatatttgctaactggcgaggattctctggcggaatgaaggatatgtatgaccaagttctgaagtttggagcatacatcgtggacggactgcggcagtataaacagcctatccttatatacatcccaccgtacgctgagttgagaggcggatcctgggtggtgatcgatgctactatcaatcccttgtgcatcgagatgtatgcagacaaagagtccagggggggagttctcgagcctgaaggcactgttgaaatcaaatttaggaaaaaagatctcatcaaaagtatgcggaggattgatccagcttataagaaattgatggagcagctcggggaacccgacttgagtgataaggaccgcaaagacctggagggaagactcaaagcacgggaggacctgcttttacccatctaccaccaagtagccgtccagtttgccgactttcacgacaccccaggacgaatgcttgagaagggtgttatctcagatatcctggagtggaagacagcacgcactttcctgtactggaggctgaggcggctacttctcgaggaccaggtcaaacaggagatcttgcaggcatcaggggagctgtcacacgtgcatattcagtccatgctgaggcggtggttcgtggagacagaaggcgcagtcaaagcctatctgtgggacaataatcaggtggtggtacagtggttggagcaacactggcaagccggtgacgggccacgaagtacaatcagggaaaatattacctatctcaaacacgatagtgtattgaagaccatacggggtcttgtcgaggaaaaccccgaagtcgccgtggactgcgtgatctacctgtcgcagcacatatcccccgcagaaagggctcaggtggtccatctgctgtctactatggacagcccggcatcaacata

SEQ ID NO: 334049 - DNA, 9360 bp, Artificial Sequence
  derived and/or modified sequence
cagctagcaggcttagattcaggccctcagcaaacaaggaacctggaaaatgtaaccctgaatgcacggtggggaggacatggcaagagaaaagcggcaggaataaagtgattttctgaatggtcttgcttctttgtctatcttgtctgattttctcctgtctgaccttttcctggttaaaaatctgggggaaaatgacggactccaagccgatcaccaagagtaaatcagaagcaaacctcatcccgagccaggagccctttccagcctctgataactcaggggagacaccgcagagaaatggggagggccacactctgcccaagacacccagccaggccgagccagcctcccacaaaggccccaaagatgccggtcggcggagaaactccctaccaccctcccaccagaagcccccaagaaaccccctttcttccagtgacgcagcaccctccccagagcttcaagccaacgggactgggacacaaggtctggaggccacagataccaatggcctgtcctcctcagccaggccccagggccagcaagctggctccccctccaaagaagacaagaagcaggcaaacatcaagaggcagctgatgaccaacttcatcctgggctcttttgatgactactcctccgacgaggactctgttgctggctcatctcgtgagtctacccggaagggcagccgggccagcttgggggccctgtccctggaggcttatctgaccacaggtgaagctgagacccgcgtccccactatgaggccgagcatgtcgggactccacctggtgaagaggggacgggaacacaagaagctggacctgcacagagactttaccgtggcttctcccgctgagtttgtcacacgctttgggggggatcgggtcatcgagaaggtgcttattgccaacaacgggattgccgccgtgaagtgcatgcgctccatccgcaggtgggcctatgagatgttccgcaacgagcgggccatccggtttgttgtgatggtgacccccgaggaccttaaggccaacgcagagtacatcaagatggcggatcattacgtccccgtcccaggagggcccaataacaacaactatgccaacgtggagctgattgtggacattgccaagagaatccccgtgcaggcggtgtgggctggctggggccatgcttcagaaaaccctaaacttccggagctgctgtgcaagaatggagttgctttcttaggccctcccagtgaggccatgtgggccttaggagataagatcgcctccaccgttgtcgcccagacgctacaggtcccaaccctgccctggagtggaagcggcctgacagtggagtggacagaagatgatctgcagcagggaaaaagaatcagtgtcccagaagatgtttatgacaagggttgcgtgaaagacgtagatgagggcttggaggcagcagaaagaattggttttccattgatgatcaaagcttctgaaggtggcggagggaagggaatccggaaggctgagagtgcggaggacttcccgatccttttcagacaagtacagagtgagatcccaggctcgcccatctttctcatgaagctggcccagcacgcccgtcacctggaagttcagatcctcgctgaccagtatgggaatgctgtgtctctgtttggtcgcgactgctccatccagcggcggcatcagaagatcgttgaggaagcaccggccaccatcgccccgctggccatattcgagttcatggagcagtgtgccatccgcctggccaagaccgtgggctatgtgagtgcagggacagtggaatacctctatagtcaggatggcagcttccacttcttggagctgaatcctcgcttgcaggtggaacatccctgcacagaaatgattgctgatgttaatctgccggccgcccagctacagatcgccatgggcgtgccactgcaccggctgaaggatatccggcttctgtatggagagtcaccatggggagtgactcccatttcttttgaaaccccctcaaaccctcccctcgcccgaggccacgtcattgccgccagaatcaccagcgaaaacccagacgagggttttaagccgagctccgggactgtccaggaactgaatttccggagcagcaagaacgtgtggggttacttcagcgtggccgctactggaggcctgcacgagtttgcggattcccaatttgggcactgcttctcctggggagagaaccgggaagaggccatttcgaacatggtggtggctttgaaggaactgtccatccgaggcgactttaggactaccgtggaatacctcattaacctcctggagaccgagagcttccagaacaacgacatcgacaccgggtggttggactacctcattgctgagaaagtgcaggcggagaaaccggatatcatgcttggggtggtatgcggggccttgaacgtggccgatgcgatgttcagaacgtgcatgacagatttcttacactccctggaaaggggccaggtcctcccagcggattcactactgaacctcgtagatgtggaattaatttacggaggtgttaagtacattctcaaggtggcccggcagtctctgaccatgttcgttctcatcatgaatggctgccacatcgagattgatgcccaccggctgaatgatggggggctcctgctctcctacaatgggaacagctacaccacctacatgaaggaagaggttgacagttaccgaattaccatcggcaataagacgtgtgtgtttgagaaggagaacgatcctacagtcctgagatccccctcggctgggaagctgacacagtacacagtggaggatgggggccacgttgaggctgggagcagctacgctgagatggaggtgatgaagatgatcatgaccctgaacgttcaggaaagaggccgggtgaagtacatcaagcgtccaggtgccgtgctggaagcaggctgcgtggtggccaggctggagctcgatgacccttctaaagtccacccggctgaaccgttcacaggagaactccctgcccagcagacactgcccatcctcggagagaaactgcaccaggtcttccacagcgtcctggaaaacctcaccaacgtcatgagtggcttttgtctgccagagcccgtttttagcataaagctgaaggagtgggtgcagaagctcatgatgaccctccggcacccgtcactgccgctgctggagctgcaggagatcatgaccagcgtggcaggccgcatccccgcccctgtggagaagtctgtccgcagggtgatggcccagtatgccagcaacatcacctcggtgctgtgccagttccccagccagcagatagccaccatcctggactgccatgcagccaccctgcagcggaaggctgatcgagaggtcttcttcatcaacacccagagcatcgtgcagttggtccagagataccgcagcgggatccgcggctatatgaaaacagtggtgttggatctcctgagaagatacttgcgtgttgagcaccattttcagcaagcccactacgacaagtgtgtgataaacctcagggagcagttcaagccagacatgtcccaggtgctggactgcatcttctcccacgcacaggtggccaagaagaaccagctggtgatcatgttgatcgatgagctgtgtggcccagacccttccctgtcggacgagctgatctccatcctcaacgagctcactcagctgagcaaaagcgagcactgcaaagtggccctcagagcccggcagatcctgattgcctcccacctcccctcctacgagctgcggcataaccaggtggagtccattttcctgtctgccattgacatgtacggccaccagttctgccccgagaacctcaagaaattaatactttcggaaacaaccatcttcgacgtcctgcctactttcttctatcacgcaaacaaagtcgtgtgcatggcgtccttggaggtttacgtgcggaggggctacatcgcctatgagttaaacagcctgcagcaccggcagctcccggacggcacctgcgtggtagaattccagttcatgctgccgtcctcccacccaaaccggatgaccgtgcccatcagcatcaccaaccctgacctgctgaggcacagcacagagctcttcatggacagcggcttctccccactgtgccagcgcatgggagccatggtagccttcaggagattcgaggacttcaccagaaattttgatgaagtcatctcttgcttcgccaacgtgcccaaagacacccccctcttcagcgaggcccgcacctccctatactccgaggatgactgcaagagcctcagagaagagcccatccacattctgaatgtgtccatccagtgtgcagaccacctggaggatgaggcactggtgccgattttacggacattcgtacagtccaagaaaaatatccttgtggattatggactccgacgaatcacattcttgattgcccaagagaaagaatttcccaagtttttcacattcagagcaagagatgagtttgcagaagatcgcatttaccgtcacttggaacctgccctggccttccagctggaacttaaccggatgcgtaacttcgatctgaccgccgtgccctgtgccaaccacaagatgcacctttacctgggtgctgccaaggtgaaggaaggtgtggaagtgacggaccataggttcttcatccgcgccatcatcaggcactctgacctgatcacaaaggaagcctccttcgaatacctgcagaacgagggtgagcggctgctcctggaggccatggacgagctggaggtggcgttcaataacaccagcgtgcgcaccgactgcaaccacatcttcctcaacttcgtgcccactgtcatcatggaccccttcaagatcgaggagtccgtgcgctacatggttatgcgctacggcagccggctgtggaaactccgtgtgctacaggctgaggtcaagatcaacatccgccagaccaccaccggcagtgccgttcccatccgcctgttcatcaccaatgagtcgggctactacctggacatcagcctctacaaagaagtgactgactccagatctggaaatatcatgtttcactccttcggcaacaagcaagggccccagcacgggatgctgatcaatactccctacgtcaccaaggatctgctccaggccaagcgattccaggcccagaccctgggaaccacctacatctatgacttcccggaaatgttcaggcaggctctctttaaactgtggggctccccagacaagtatcccaaagacatcctgacatacactgaattagtgttggactctcagggccagctggtggagatgaaccgacttcctggtggaaatgaggtgggcatggtggccttcaaaatgaggtttaagacccaggagtacccggaaggacgggatgtgatcgtcatcggcaatgacatcacctttcgcattggatcctttggccctggagaggaccttctgtacctgcgggcatccgagatggcccgggcagagggcattcccaaaatttacgtggcagccaacagtggcgcccgtattggcatggcagaggagatcaaacacatgttccacgtggcttgggtggacccagaagacccccacaaaggatttaaatacctgtacctgactccccaagactacaccagaatcagctccctgaactccgtccactgtaaacacatcgaggaaggaggagagtccagatacatgatcacggatatcatcgggaaggatgatggcttgggcgtggagaatctgaggggctcaggcatgattgctggggagtcctctctggcttacgaagagatcgtcaccattagcttggtgacctgccgagccattgggattggggcctacttggtgaggctgggccagcgagtgatccaggtggagaattcccacatcatcctcacaggagcaagtgctctcaacaaggtcctgggaagagaggtctacacatccaacaaccagctgggtggcgttcagatcatgcattacaatggtgtctcccacatcaccgtgccagatgactttgagggggtttataccatcctggagtggctgtcctatatgccaaaggataatcacagccctgtccctatcatcacacccactgaccccattgacagagaaattgaattcctcccatccagagctccctacgacccccggtggatgcttgcaggaaggcctcacccaactctgaagggaacgtggcagagcggattctttgaccacggcagtttcaaggaaatcatggcaccctgggcgcagaccgtggtgacaggacgagcaaggcttggggggattcccgtgggagtgattgctgtggagacacggactgtggaggtggcagtccctgcagaccctgccaacctggattctgaggccaagataattcagcaggcaggacaggtgtggttcccagactcagcctacaaaaccgcccaggccgtcaaggacttcaaccgggagaagttgcccctgatgatctttgccaactggagggggttctccggtggcatgaaagacatgtatgaccaggtgctgaagtttggagcctacatcgtggacggccttagacaatacaaacagcccatcctgatctatatcccgccctatgcggagctccggggaggctcctgggtggtcatagatgccaccatcaacccgctgtgcatagaaatgtatgcagacaaagagagcaggggtggtgttctggaaccagaggggacagtggagattaagttccgaaagaaagatctgataaagtccatgagaaggatcgatccagcttacaagaagctcatggaacagctaggggaacctgatctctccgacaaggaccgaaaggacctggagggccggctaaaggctcgcgaggacctgctgctccccatctaccaccaggtggcggtgcagttcgccgacttccatgacacacccggccggatgctggagaagggcgtcatatctgacatcctggagtggaagaccgcacgcaccttcctgtattggcgtctgcgccgcctcctcctggaggaccaggtcaagcaggagatcctgcaggccagcggggagctgagtcacgtgcatatccagtccatgctgcgtcgctggttcgtggagacggagggggctgtcaaggcctacttgtgggacaacaaccaggtggttgtgcagtggctggaacagcactggcaggcaggggatggcccgcgctccaccatccgtgagaacatcacgtacctgaagcacgactctgtcctcaagaccatccgaggcctggttgaagaaaaccccgaggtggccgtggactgtgtgatatacctgagccagcacatcagcccagctgagcgggcgcaggtcgttcacctgctgtctaccatggacagcccggcctccacctgaccgtggcccgcccagccactcccgggaccacggcaaaaggaaccacccagacccaccacccgtacaccctcagcagaccctgaagacttgcttttaaacaaagaaaatcctgggcacttctgcagggctgctggttccgagctgacacccgtcttaacaaaaggcccaggagtgcctcttccaaacaaaaacagcctcctctccatagctgggaagtttattttgttttgtctctgaagacagcagttttattgcatcactaaatctaatcaagctaaaacatccctgtttccttttgcaaaacagtgcctggcatgtgggatccaggcgttctttaggatccttggataccacatcgtgaaatcttttatttttttactctgagaccagcaccagatgtaagtaagcatctcatatatttcagccaaataaatgggccaagggaaaaaaatatatatatatagacaggactagagaaaacctatttttgtaatgatgtttctttggatactgtctagtcacccagaaaaatgtatggatgaatttttttttttttttttgagacaaagtctcactgtgtcatgcaggctggagtgcagtggcatgatctcactgcaacctccatctcctgtctcagcctcctagataactgggattacaggtgcccaccaccatgcccggctaatttttgtatttttggtagagacagagtttcaccaggttggtcaggctggtctcaaactcttgacttcaggtaatccacccaccttggcctcccaaagtgctgggattacaggcatgagccaccatcttcagccagatgatttttttattgagagagtgaaatgctattttgttccccaaatggcgctagtgaatcactaggagggtcccactgataggccatgtttagcactggttgccagggattctctttttgagagagggaaagcaaaatgaatggaagtacccagctggaggtttcagggcttctggaggatgctctcgcatagctcgaggtcctctgcccacctcttctctccaaggaaaatgaggactgccccttccccctgcaggattggcccccagcctgcgcatgcaccctcctcttgcccaagtggggagcacagaggcggagaggaatcccttaccacacccacggcccagcttgctcacgagtgtcacctctgtgacggtcaccactgctcccttggagggccacttgagttactgttgcttcctcgcctgctggcttgatgagcaccgatggtgggatctgaccccgaggggcagagctgtcggtgactgaggactggactgtggtgaccatgccgatttgctcagggagaacgttgcaatgcacccagcagctcctggctctgcaggcggcacagcctggggccctgtgatcctctggtttcttccattggggcggagtcggggatggagggagctggccacaacccactgctctgatgggtggtttgtccaaggatgctgaatgtaatgcctggtcaatgtggaagcccatgaggttgcccagggaagcctccaaaagctgggatgcttgagggtatccaagttgaaaaagacaaaatctgaccatcagccagtgacagtcctggcaaatgaaggtggggcggggcagtgaggggtgggagaaggtgaatgattcattattccaccccgaggtttgctggggtgaggggaagaatcgatgctgctttgggaactgaaggtttttctgttgggaaggccctcttggttttggagagaaagacaagttatgagtagctgctaccctggaacggtgggcagagagcctactaggaaatgtgcagaataaactattttttgaaggaaa

SEQ ID NO: 334050 - DNA, 9247 bp, Artificial Sequence
  derived and/or modified sequence
attttctgaatggtcttgcttctttgtctatcttgtctgattttctcctgtctgaccttttcctggttaaaaatctgggggaaaatgacggactccaagccgatcaccaagagtaaatcagaagcaaacctcatcccgagccaggagccctttccagcctctgataactcaggggagacaccgcagagaaatggggagggccacactctgcccaagacacccagccaggccgagccagcctcccacaaaggccccaaagatgccggtcggcggagaaactccctaccaccctcccaccagaagcccccaagaaaccccctttcttccagtgacgcagcaccctccccagagcttcaagccaacgggactgggacacaaggtctggaggccacagataccaatggcctgtcctcctcagccaggccccagggccagcaagctggctccccctccaaagaagacaagaagcaggcaaacatcaagaggcagctgatgaccaacttcatcctgggctcttttgatgactactcctccgacgaggactctgttgctggctcatctcgtgagtctacccggaagggcagccgggccagcttgggggccctgtccctggaggcttatctgaccacaggtgaagctgagacccgcgtccccactatgaggccgagcatgtcgggactccacctggtgaagaggggacgggaacacaagaagctggacctgcacagagactttaccgtggcttctcccgctgagtttgtcacacgctttgggggggatcgggtcatcgagaaggtgcttattgccaacaacgggattgccgccgtgaagtgcatgcgctccatccgcaggtgggcctatgagatgttccgcaacgagcgggccatccggtttgttgtgatggtgacccccgaggaccttaaggccaacgcagagtacatcaagatggcggatcattacgtccccgtcccaggagggcccaataacaacaactatgccaacgtggagctgattgtggacattgccaagagaatccccgtgcaggcggtgtgggctggctggggccatgcttcagaaaaccctaaacttccggagctgctgtgcaagaatggagttgctttcttaggccctcccagtgaggccatgtgggccttaggagataagatcgcctccaccgttgtcgcccagacgctacaggtcccaaccctgccctggagtggaagcggcctgacagtggagtggacagaagatgatctgcagcagggaaaaagaatcagtgtcccagaagatgtttatgacaagggttgcgtgaaagacgtagatgagggcttggaggcagcagaaagaattggttttccattgatgatcaaagcttctgaaggtggcggagggaagggaatccggaaggctgagagtgcggaggacttcccgatccttttcagacaagtacagagtgagatcccaggctcgcccatctttctcatgaagctggcccagcacgcccgtcacctggaagttcagatcctcgctgaccagtatgggaatgctgtgtctctgtttggtcgcgactgctccatccagcggcggcatcagaagatcgttgaggaagcaccggccaccatcgccccgctggccatattcgagttcatggagcagtgtgccatccgcctggccaagaccgtgggctatgtgagtgcagggacagtggaatacctctatagtcaggatggcagcttccacttcttggagctgaatcctcgcttgcaggtggaacatccctgcacagaaatgattgctgatgttaatctgccggccgcccagctacagatcgccatgggcgtgccactgcaccggctgaaggatatccggcttctgtatggagagtcaccatggggagtgactcccatttcttttgaaaccccctcaaaccctcccctcgcccgaggccacgtcattgccgccagaatcaccagcgaaaacccagacgagggttttaagccgagctccgggactgtccaggaactgaatttccggagcagcaagaacgtgtggggttacttcagcgtggccgctactggaggcctgcacgagtttgcggattcccaatttgggcactgcttctcctggggagagaaccgggaagaggccatttcgaacatggtggtggctttgaaggaactgtccatccgaggcgactttaggactaccgtggaatacctcattaacctcctggagaccgagagcttccagaacaacgacatcgacaccgggtggttggactacctcattgctgagaaagtgcaggcggagaaaccggatatcatgcttggggtggtatgcggggccttgaacgtggccgatgcgatgttcagaacgtgcatgacagatttcttacactccctggaaaggggccaggtcctcccagcggattcactactgaacctcgtagatgtggaattaatttacggaggtgttaagtacattctcaaggtggcccggcagtctctgaccatgttcgttctcatcatgaatggctgccacatcgagattgatgcccaccggctgaatgatggggggctcctgctctcctacaatgggaacagctacaccacctacatgaaggaagaggttgacagttaccgaattaccatcggcaataagacgtgtgtgtttgagaaggagaacgatcctacagtcctgagatccccctcggctgggaagctgacacagtacacagtggaggatgggggccacgttgaggctgggagcagctacgctgagatggaggtgatgaagatgatcatgaccctgaacgttcaggaaagaggccgggtgaagtacatcaagcgtccaggtgccgtgctggaagcaggctgcgtggtggccaggctggagctcgatgacccttctaaagtccacccggctgaaccgttcacaggagaactccctgcccagcagacactgcccatcctcggagagaaactgcaccaggtcttccacagcgtcctggaaaacctcaccaacgtcatgagtggcttttgtctgccagagcccgtttttagcataaagctgaaggagtgggtgcagaagctcatgatgaccctccggcacccgtcactgccgctgctggagctgcaggagatcatgaccagcgtggcaggccgcatccccgcccctgtggagaagtctgtccgcagggtgatggcccagtatgccagcaacatcacctcggtgctgtgccagttccccagccagcagatagccaccatcctggactgccatgcagccaccctgcagcggaaggctgatcgagaggtcttcttcatcaacacccagagcatcgtgcagttggtccagagataccgcagcgggatccgcggctatatgaaaacagtggtgttggatctcctgagaagatacttgcgtgttgagcaccattttcagcaagcccactacgacaagtgtgtgataaacctcagggagcagttcaagccagacatgtcccaggtgctggactgcatcttctcccacgcacaggtggccaagaagaaccagctggtgatcatgttgatcgatgagctgtgtggcccagacccttccctgtcggacgagctgatctccatcctcaacgagctcactcagctgagcaaaagcgagcactgcaaagtggccctcagagcccggcagatcctgattgcctcccacctcccctcctacgagctgcggcataaccaggtggagtccattttcctgtctgccattgacatgtacggccaccagttctgccccgagaacctcaagaaattaatactttcggaaacaaccatcttcgacgtcctgcctactttcttctatcacgcaaacaaagtcgtgtgcatggcgtccttggaggtttacgtgcggaggggctacatcgcctatgagttaaacagcctgcagcaccggcagctcccggacggcacctgcgtggtagaattccagttcatgctgccgtcctcccacccaaaccggatgaccgtgcccatcagcatcaccaaccctgacctgctgaggcacagcacagagctcttcatggacagcggcttctccccactgtgccagcgcatgggagccatggtagccttcaggagattcgaggacttcaccagaaattttgatgaagtcatctcttgcttcgccaacgtgcccaaagacacccccctcttcagcgaggcccgcacctccctatactccgaggatgactgcaagagcctcagagaagagcccatccacattctgaatgtgtccatccagtgtgcagaccacctggaggatgaggcactggtgccgattttacggacattcgtacagtccaagaaaaatatccttgtggattatggactccgacgaatcacattcttgattgcccaagagaaagaatttcccaagtttttcacattcagagcaagagatgagtttgcagaagatcgcatttaccgtcacttggaacctgccctggccttccagctggaacttaaccggatgcgtaacttcgatctgaccgccgtgccctgtgccaaccacaagatgcacctttacctgggtgctgccaaggtgaaggaaggtgtggaagtgacggaccataggttcttcatccgcgccatcatcaggcactctgacctgatcacaaaggaagcctccttcgaatacctgcagaacgagggtgagcggctgctcctggaggccatggacgagctggaggtggcgttcaataacaccagcgtgcgcaccgactgcaaccacatcttcctcaacttcgtgcccactgtcatcatggaccccttcaagatcgaggagtccgtgcgctacatggttatgcgctacggcagccggctgtggaaactccgtgtgctacaggctgaggtcaagatcaacatccgccagaccaccaccggcagtgccgttcccatccgcctgttcatcaccaatgagtcgggctactacctggacatcagcctctacaaagaagtgactgactccagatctggaaatatcatgtttcactccttcggcaacaagcaagggccccagcacgggatgctgatcaatactccctacgtcaccaaggatctgctccaggccaagcgattccaggcccagaccctgggaaccacctacatctatgacttcccggaaatgttcaggcaggctctctttaaactgtggggctccccagacaagtatcccaaagacatcctgacatacactgaattagtgttggactctcagggccagctggtggagatgaaccgacttcctggtggaaatgaggtgggcatggtggccttcaaaatgaggtttaagacccaggagtacccggaaggacgggatgtgatcgtcatcggcaatgacatcacctttcgcattggatcctttggccctggagaggaccttctgtacctgcgggcatccgagatggcccgggcagagggcattcccaaaatttacgtggcagccaacagtggcgcccgtattggcatggcagaggagatcaaacacatgttccacgtggcttgggtggacccagaagacccccacaaaggatttaaatacctgtacctgactccccaagactacaccagaatcagctccctgaactccgtccactgtaaacacatcgaggaaggaggagagtccagatacatgatcacggatatcatcgggaaggatgatggcttgggcgtggagaatctgaggggctcaggcatgattgctggggagtcctctctggcttacgaagagatcgtcaccattagcttggtgacctgccgagccattgggattggggcctacttggtgaggctgggccagcgagtgatccaggtggagaattcccacatcatcctcacaggagcaagtgctctcaacaaggtcctgggaagagaggtctacacatccaacaaccagctgggtggcgttcagatcatgcattacaatggtgtctcccacatcaccgtgccagatgactttgagggggtttataccatcctggagtggctgtcctatatgccaaaggataatcacagccctgtccctatcatcacacccactgaccccattgacagagaaattgaattcctcccatccagagctccctacgacccccggtggatgcttgcaggaaggcctcacccaactctgaagggaacgtggcagagcggattctttgaccacggcagtttcaaggaaatcatggcaccctgggcgcagaccgtggtgacaggacgagcaaggcttggggggattcccgtgggagtgattgctgtggagacacggactgtggaggtggcagtccctgcagaccctgccaacctggattctgaggccaagataattcagcaggcaggacaggtgtggttcccagactcagcctacaaaaccgcccaggccgtcaaggacttcaaccgggagaagttgcccctgatgatctttgccaactggagggggttctccggtggcatgaaagacatgtatgaccaggtgctgaagtttggagcctacatcgtggacggccttagacaatacaaacagcccatcctgatctatatcccgccctatgcggagctccggggaggctcctgggtggtcatagatgccaccatcaacccgctgtgcatagaaatgtatgcagacaaagagagcaggggtggtgttctggaaccagaggggacagtggagattaagttccgaaagaaagatctgataaagtccatgagaaggatcgatccagcttacaagaagctcatggaacagctaggggaacctgatctctccgacaaggaccgaaaggacctggagggccggctaaaggctcgcgaggacctgctgctccccatctaccaccaggtggcggtgcagttcgccgacttccatgacacacccggccggatgctggagaagggcgtcatatctgacatcctggagtggaagaccgcacgcaccttcctgtattggcgtctgcgccgcctcctcctggaggaccaggtcaagcaggagatcctgcaggccagcggggagctgagtcacgtgcatatccagtccatgctgcgtcgctggttcgtggagacggagggggctgtcaaggcctacttgtgggacaacaaccaggtggttgtgcagtggctggaacagcactggcaggcaggggatggcccgcgctccaccatccgtgagaacatcacgtacctgaagcacgactctgtcctcaagaccatccgaggcctggttgaagaaaaccccgaggtggccgtggactgtgtgatatacctgagccagcacatcagcccagctgagcgggcgcaggtcgttcacctgctgtctaccatggacagcccggcctccacctgaccgtggcccgcccagccactcccgggaccacggcaaaaggaaccacccagacccaccacccgtacaccctcagcagaccctgaagacttgcttttaaacaaagaaaatcctgggcacttctgcagggctgctggttccgagctgacacccgtcttaacaaaaggcccaggagtgcctcttccaaacaaaaacagcctcctctccatagctgggaagtttattttgttttgtctctgaagacagcagttttattgcatcactaaatctaatcaagctaaaacatccctgtttccttttgcaaaacagtgcctggcatgtgggatccaggcgttctttaggatccttggataccacatcgtgaaatcttttatttttttactctgagaccagcaccagatgtaagtaagcatctcatatatttcagccaaataaatgggccaagggaaaaaaatatatatatatagacaggactagagaaaacctatttttgtaatgatgtttctttggatactgtctagtcacccagaaaaatgtatggatgaatttttttttttttttttgagacaaagtctcactgtgtcatgcaggctggagtgcagtggcatgatctcactgcaacctccatctcctgtctcagcctcctagataactgggattacaggtgcccaccaccatgcccggctaatttttgtatttttggtagagacagagtttcaccaggttggtcaggctggtctcaaactcttgacttcaggtaatccacccaccttggcctcccaaagtgctgggattacaggcatgagccaccatcttcagccagatgatttttttattgagagagtgaaatgctattttgttccccaaatggcgctagtgaatcactaggagggtcccactgataggccatgtttagcactggttgccagggattctctttttgagagagggaaagcaaaatgaatggaagtacccagctggaggtttcagggcttctggaggatgctctcgcatagctcgaggtcctctgcccacctcttctctccaaggaaaatgaggactgccccttccccctgcaggattggcccccagcctgcgcatgcaccctcctcttgcccaagtggggagcacagaggcggagaggaatcccttaccacacccacggcccagcttgctcacgagtgtcacctctgtgacggtcaccactgctcccttggagggccacttgagttactgttgcttcctcgcctgctggcttgatgagcaccgatggtgggatctgaccccgaggggcagagctgtcggtgactgaggactggactgtggtgaccatgccgatttgctcagggagaacgttgcaatgcacccagcagctcctggctctgcaggcggcacagcctggggccctgtgatcctctggtttcttccattggggcggagtcggggatggagggagctggccacaacccactgctctgatgggtggtttgtccaaggatgctgaatgtaatgcctggtcaatgtggaagcccatgaggttgcccagggaagcctccaaaagctgggatgcttgagggtatccaagttgaaaaagacaaaatctgaccatcagccagtgacagtcctggcaaatgaaggtggggcggggcagtgaggggtgggagaaggtgaatgattcattattccaccccgaggtttgctggggtgaggggaagaatcgatgctgctttgggaactgaaggtttttctgttgggaaggccctcttggttttggagagaaagacaagttatgagtagctgctaccctggaacggtgggcagagagcctactaggaaatgtgcagaataaactattttttgaagg

SEQ ID NO: 334051 - DNA, 7377 bp, Artificial Sequence
  derived and/or modified sequence
atggtgctgctgctgtgcctgagctgcctgatcttcagctgcctgaccttcagctggctgaagatctggggcaagatgaccgacagcaagcccatcaccaagagcaagagcgaggccaacctgatccccagccaggagcccttccccgccagcgacaacagcggcgagaccccccagagaaacggcgagggccacaccctgcccaagacccccagccaggccgagcccgccagccacaagggccccaaggacgccggcagaagaagaaacagcctgccccccagccaccagaagccccccagaaaccccctgagcagcagcgacgccgcccccagccccgagctgcaggccaacggcaccggcacccagggcctggaggccaccgacaccaacggcctgagcagcagcgccagaccccagggccagcaggccggcagccccagcaaggaggacaagaagcaggccaacatcaagagacagctgatgaccaacttcatcctgggcagcttcgacgactacagcagcgacgaggacagcgtggccggcagcagcagagagagcaccagaaagggcagcagagccagcctgggcgccctgagcctggaggcctacctgaccaccggcgaggccgagaccagagtgcccaccatgagacccagcatgagcggcctgcacctggtgaagagaggcagagagcacaagaagctggacctgcacagagacttcaccgtggccagccccgccgagttcgtgaccagattcggcggcgacagagtgatcgagaaggtgctgatcgccaacaacggcatcgccgccgtgaagtgcatgagaagcatcagaagatgggcctacgagatgttcagaaacgagagagccatcagattcgtggtgatggtgacccccgaggacctgaaggccaacgccgagtacatcaagatggccgaccactacgtgcccgtgcccggcggccccaacaacaacaactacgccaacgtggagctgatcgtggacatcgccaagagaatccccgtgcaggccgtgtgggccggctggggccacgccagcgagaaccccaagctgcccgagctgctgtgcaagaacggcgtggccttcctgggcccccccagcgaggccatgtgggccctgggcgacaagatcgccagcaccgtggtggcccagaccctgcaggtgcccaccctgccctggagcggcagcggcctgaccgtggagtggaccgaggacgacctgcagcagggcaagagaatcagcgtgcccgaggacgtgtacgacaagggctgcgtgaaggacgtggacgagggcctggaggccgccgagagaatcggcttccccctgatgatcaaggccagcgagggcggcggcggcaagggcatcagaaaggccgagagcgccgaggacttccccatcctgttcagacaggtgcagagcgagatccccggcagccccatcttcctgatgaagctggcccagcacgccagacacctggaggtgcagatcctggccgaccagtacggcaacgccgtgagcctgttcggcagagactgcagcatccagagaagacaccagaagatcgtggaggaggcccccgccaccatcgcccccctggccatcttcgagttcatggagcagtgcgccatcagactggccaagaccgtgggctacgtgagcgccggcaccgtggagtacctgtacagccaggacggcagcttccacttcctggagctgaaccccagactgcaggtggagcacccctgcaccgagatgatcgccgacgtgaacctgcccgccgcccagctgcagatcgccatgggcgtgcccctgcacagactgaaggacatcagactgctgtacggcgagagcccctggggcgtgacccccatcagcttcgagacccccagcaacccccccctggccagaggccacgtgatcgccgccagaatcaccagcgagaaccccgacgagggcttcaagcccagcagcggcaccgtgcaggagctgaacttcagaagcagcaagaacgtgtggggctacttcagcgtggccgccaccggcggcctgcacgagttcgccgacagccagttcggccactgcttcagctggggcgagaacagagaggaggccatcagcaacatggtggtggccctgaaggagctgagcatcagaggcgacttcagaaccaccgtggagtacctgatcaacctgctggagaccgagagcttccagaacaacgacatcgacaccggctggctggactacctgatcgccgagaaggtgcaggccgagaagcccgacatcatgctgggcgtggtgtgcggcgccctgaacgtggccgacgccatgttcagaacctgcatgaccgacttcctgcacagcctggagagaggccaggtgctgcccgccgacagcctgctgaacctggtggacgtggagctgatctacggcggcgtgaagtacatcctgaaggtggccagacagagcctgaccatgttcgtgctgatcatgaacggctgccacatcgagatcgacgcccacagactgaacgacggcggcctgctgctgagctacaacggcaacagctacaccacctacatgaaggaggaggtggacagctacagaatcaccatcggcaacaagacctgcgtgttcgagaaggagaacgaccccaccgtgctgagaagccccagcgccggcaagctgacccagtacaccgtggaggacggcggccacgtggaggccggcagcagctacgccgagatggaggtgatgaagatgatcatgaccctgaacgtgcaggagagaggcagagtgaagtacatcaagagacccggcgccgtgctggaggccggctgcgtggtggccagactggagctggacgaccccagcaaggtgcaccccgccgagcccttcaccggcgagctgcccgcccagcagaccctgcccatcctgggcgagaagctgcaccaggtgttccacagcgtgctggagaacctgaccaacgtgatgagcggcttctgcctgcccgagcccgtgttcagcatcaagctgaaggagtgggtgcagaagctgatgatgaccctgagacaccccagcctgcccctgctggagctgcaggagatcatgaccagcgtggccggcagaatccccgcccccgtggagaagagcgtgagaagagtgatggcccagtacgccagcaacatcaccagcgtgctgtgccagttccccagccagcagatcgccaccatcctggactgccacgccgccaccctgcagagaaaggccgacagagaggtgttcttcatcaacacccagagcatcgtgcagctggtgcagagatacagaagcggcatcagaggctacatgaagaccgtggtgctggacctgctgagaagatacctgagagtggagcaccacttccagcaggcccactacgacaagtgcgtgatcaacctgagagagcagttcaagcccgacatgagccaggtgctggactgcatcttcagccacgcccaggtggccaagaagaaccagctggtgatcatgctgatcgacgagctgtgcggccccgaccccagcctgagcgacgagctgatcagcatcctgaacgagctgacccagctgagcaagagcgagcactgcaaggtggccctgagagccagacagatcctgatcgccagccacctgcccagctacgagctgagacacaaccaggtggagagcatcttcctgagcgccatcgacatgtacggccaccagttctgccccgagaacctgaagaagctgatcctgagcgagaccaccatcttcgacgtgctgcccaccttcttctaccacgccaacaaggtggtgtgcatggccagcctggaggtgtacgtgagaagaggctacatcgcctacgagctgaacagcctgcagcacagacagctgcccgacggcacctgcgtggtggagttccagttcatgctgcccagcagccaccccaacagaatgaccgtgcccatcagcatcaccaaccccgacctgctgagacacagcaccgagctgttcatggacagcggcttcagccccctgtgccagagaatgggcgccatggtggccttcagaagattcgaggacttcaccagaaacttcgacgaggtgatcagctgcttcgccaacgtgcccaaggacacccccctgttcagcgaggccagaaccagcctgtacagcgaggacgactgcaagagcctgagagaggagcccatccacatcctgaacgtgagcatccagtgcgccgaccacctggaggacgaggccctggtgcccatcctgagaaccttcgtgcagagcaagaagaacatcctggtggactacggcctgagaagaatcaccttcctgatcgcccaggagaaggagttccccaagttcttcaccttcagagccagagacgagttcgccgaggacagaatctacagacacctggagcccgccctggccttccagctggagctgaacagaatgagaaacttcgacctgaccgccgtgccctgcgccaaccacaagatgcacctgtacctgggcgccgccaaggtgaaggagggcgtggaggtgaccgaccacagattcttcatcagagccatcatcagacacagcgacctgatcaccaaggaggccagcttcgagtacctgcagaacgagggcgagagactgctgctggaggccatggacgagctggaggtggccttcaacaacaccagcgtgagaaccgactgcaaccacatcttcctgaacttcgtgcccaccgtgatcatggaccccttcaagatcgaggagagcgtgagatacatggtgatgagatacggcagcagactgtggaagctgagagtgctgcaggccgaggtgaagatcaacatcagacagaccaccaccggcagcgccgtgcccatcagactgttcatcaccaacgagagcggctactacctggacatcagcctgtacaaggaggtgaccgacagcagaagcggcaacatcatgttccacagcttcggcaacaagcagggcccccagcacggcatgctgatcaacaccccctacgtgaccaaggacctgctgcaggccaagagattccaggcccagaccctgggcaccacctacatctacgacttccccgagatgttcagacaggccctgttcaagctgtggggcagccccgacaagtaccccaaggacatcctgacctacaccgagctggtgctggacagccagggccagctggtggagatgaacagactgcccggcggcaacgaggtgggcatggtggccttcaagatgagattcaagacccaggagtaccccgagggcagagacgtgatcgtgatcggcaacgacatcaccttcagaatcggcagcttcggccccggcgaggacctgctgtacctgagagccagcgagatggccagagccgagggcatccccaagatctacgtggccgccaacagcggcgccagaatcggcatggccgaggagatcaagcacatgttccacgtggcctgggtggaccccgaggacccccacaagggcttcaagtacctgtacctgaccccccaggactacaccagaatcagcagcctgaacagcgtgcactgcaagcacatcgaggagggcggcgagagcagatacatgatcaccgacatcatcggcaaggacgacggcctgggcgtggagaacctgagaggcagcggcatgatcgccggcgagagcagcctggcctacgaggagatcgtgaccatcagcctggtgacctgcagagccatcggcatcggcgcctacctggtgagactgggccagagagtgatccaggtggagaacagccacatcatcctgaccggcgccagcgccctgaacaaggtgctgggcagagaggtgtacaccagcaacaaccagctgggcggcgtgcagatcatgcactacaacggcgtgagccacatcaccgtgcccgacgacttcgagggcgtgtacaccatcctggagtggctgagctacatgcccaaggacaaccacagccccgtgcccatcatcacccccaccgaccccatcgacagagagatcgagttcctgcccagcagagccccctacgaccccagatggatgctggccggcagaccccaccccaccctgaagggcacctggcagagcggcttcttcgaccacggcagcttcaaggagatcatggccccctgggcccagaccgtggtgaccggcagagccagactgggcggcatccccgtgggcgtgatcgccgtggagaccagaaccgtggaggtggccgtgcccgccgaccccgccaacctggacagcgaggccaagatcatccagcaggccggccaggtgtggttccccgacagcgcctacaagaccgcccaggccgtgaaggacttcaacagagagaagctgcccctgatgatcttcgccaactggagaggcttcagcggcggcatgaaggacatgtacgaccaggtgctgaagttcggcgcctacatcgtggacggcctgagacagtacaagcagcccatcctgatctacatccccccctacgccgagctgagaggcggcagctgggtggtgatcgacgccaccatcaaccccctgtgcatcgagatgtacgccgacaaggagagcagaggcggcgtgctggagcccgagggcaccgtggagatcaagttcagaaagaaggacctgatcaagagcatgagaagaatcgaccccgcctacaagaagctgatggagcagctgggcgagcccgacctgagcgacaaggacagaaaggacctggagggcagactgaaggccagagaggacctgctgctgcccatctaccaccaggtggccgtgcagttcgccgacttccacgacacccccggcagaatgctggagaagggcgtgatcagcgacatcctggagtggaagaccgccagaaccttcctgtactggagactgagaagactgctgctggaggaccaggtgaagcaggagatcctgcaggccagcggcgagctgagccacgtgcacatccagagcatgctgagaagatggttcgtggagaccgagggcgccgtgaaggcctacctgtgggacaacaaccaggtggtggtgcagtggctggagcagcactggcaggccggcgacggccccagaagcaccatcagagagaacatcacctacctgaagcacgacagcgtgctgaagaccatcagaggcctggtggaggagaaccccgaggtggccgtggactgcgtgatctacctgagccagcacatcagccccgccgagagagcccaggtggtgcacctgctgagcaccatggacagccccgccagcacctag

SEQ ID NO: 334052 - protein, 2388 aa, Artificial Sequence
  derived and/or modified sequence
MVLLLCLSCLIFSCLTFSWLKIWGKMTDSKPITKSKSEANLIPSQEPFPASDNSGETPQRNGEGHTLPKTPSQAEPASHKGPKDAGRRRNSLPPSHQKPPRNPLSSSDAAPSPELQANGTGTQGLEATDTNGLSSSARPQGQQAGSPSKEDKKQANIKRQLMTNFILGSFDDYSSDEDSVAGSSRESTRKGSRASLGALSLEAYLTTGEAETRVPTMRPSMSGLHLVKRGREHKKLDLHRDFTVASPAEFVTRFGGDRVIEKVLIANNGIAAVKCMRSIRRWAYEMFRNERAIRFVVMVTPEDLKANAEYIKMADHYVPVPGGPNNNNYANVELIVDIAKRIPVQAVWAGWGHASENPKLPELLCKNGVAFLGPPSEAMWALGDKIASTVVAQTLQVPTLPWSGSGLTVEWTEDDLQQGKRISVPEDVYDKGCVKDVDEGLEAAERIGFPLMIKASEGGGGKGIRKAESAEDFPILFRQVQSEIPGSPIFLMKLAQHARHLEVQILADQYGNAVSLFGRDCSIQRRHQKIVEEAPATIAPLAIFEFMEQCAIRLAKTVGYVSAGTVEYLYSQDGSFHFLELNPRLQVEHPCTEMIADVNLPAAQLQIAMGVPLHRLKDIRLLYGESPWGVTPISFETPSNPPLARGHVIAARITSENPDEGFKPSSGTVQELNFRSSKNVWGYFSVAATGGLHEFADSQFGHCFSWGENREEAISNMVVALKELSIRGDFRTTVEYLINLLETESFQNNDIDTGWLDYLIAEKVQAEKPDIMLGVVCGALNVADAMFRTCMTDFLHSLERGQVLPADSLLNLVDVELIYGGVKYILKVARQSLTMFVLIMNGCHIEIDAHRLNDGGLLLSYNGNSYTTYMKEEVDSYRITIGNKTCVFEKENDPTVLRSPSAGKLTQYTVEDGGHVEAGSSYAEMEVMKMIMTLNVQERGRVKYIKRPGAVLEAGCVVARLELDDPSKVHPAEPFTGELPAQQTLPILGEKLHQVFHSVLENLTNVMSGFCLPEPVFSIKLKEWVQKLMMTLRHPSLPLLELQEIMTSVAGRIPAPVEKSVRRVMAQYASNITSVLCQFPSQQIATILDCHAATLQRKADREVFFINTQSIVQLVQSKDELCGPDPSLSDELISILNELTQLSKSEHCKVALRARQILIASHLPSYELRHNQVESIFLSAIDMYGHQFCPENLKKLILSETTIFDVLPTFFYHANKVVCMASLEVYVRRGYIAYELNSLQHRQLPDGTCVVEFQFMLPSSHPNRMTVPISITNPDLLRHSTELFMDSGFSPLCQRMGAMVAFRRFEDFTRNFDEVISCFANVPKDTPLFSEARTSLYSEDDCKSLREEPIHILNVSIQCADHLEDEALVPILRTFVQSKKNILVDYGLRRITFLIAQEKEFPKFFTFRARDEFAEDRIYRHLEPALAFQLELNRMRNFDLTAVPCANHKMHLYLGAAKVKEGVEVTDHRFFIRAIIRHSDLITKEASFEYLQNEGERLLLEAMDELEVAFNNTSVRTDCNHIFLNFVPTVIMDPFKIEESVRYMVMRYGSRLWKLRVLQAEVKINIRQTTTGSAVPIRLFITNESGYYLDISLYKEVTDSRSGNIMFHSFGNKQGPQHGMLINTPYVTKDLLQAKRFQAQTLGTTYIYDFPEMFRQALFKLWGSPDKYPKDILTYTELVLDSQGQLVEMNRLPGGNEVGMVAFKMRFKTQEYPEGRDVIVIGNDITFRIGSFGPGEDLLYLRASEMARAEGIPKIYVAANSGARIGMAEEIKHMFHVAWVDPEDPHKGFKYLYLTPQDYTRISSLNSVHCKHIEEGGESRYMITDIIGKDDGLGVENLRGSGMIAGESSLAYEEIVTISLVTCRAIGIGAYLVRLGQRVIQVENSHIILTGASALNKVLGREVYTSNNQLGGVQIMHYNGVSHITVPDDFEGVYTILEWLSYMPKDNHSPVPIITPTDPIDREIEFLPSRAPYDPRWMLAGRPHPTLKGTWQSGFFDHGSFKEIMAPWAQTVVTGRARLGGIPVGVIAVETRTVEVAVPADPANLDSEAKIIQQAGQVWFPDSAYKTAQAVKDFNREKLPLMIFANWRGFSGGMKDMYDQVLKFGAYIVDGLRQYKQPILIYIPPYAELRGGSWVVIDATINPLCIEMYADKESRGGVLEPEGTVEIKFRKKDLIKSMRRIDPAYKKLMEQLGEPDLSDKDRKDLEGRLKAREDLLLPIYHQVAVQFADFHDTPGRMLEKGVISDILEWKTARTFLYWRLRRLLLEDQVKQEILQASGELSHVHIQSMLRRWFVETEGAVKAYLWDNNQVVVQWLEQHWQAGDGPRSTIRENITYLKHDSVLKTIRGLVEENPEVAVDCVIYLSQHISPAERAQVVHLLSTMDSPAST

SEQ ID NO: 334053 - protein, 858 aa, Artificial Sequence
  derived and/or modified sequence
MTVPISITNPDLLRHSTELFMDSGFSPLCQRMGAMVAFRRFEDFTRNFDEVISCFANVPKDTPLFSEARTSLYSEDDCKSLREEPIHILNVSIQCADHLEDEALVPILRTFVQSKKNILVDYGLRRITFLIAQEKEFPKFFTFRARDEFAEDRIYRHLEPALAFQLELNRMRNFDLTAVPCANHKMHLYLGAAKVKEGVEVTDHRFFIRAIIRHSDLITKEASFEYLQNEGERLLLEAMDELEVAFNNTSVRTDCNHIFLNFVPTVIMDPFKIEESVRYMVMRYGSRLWKLRVLQAEVKINIRQTTTGSAVPIRLFITNESGYYLDISLYKEVTDSRSGNIMFHSFGNKQGPQHGMLINTPYVTKDLLQAKRFQAQTLGTTYIYDFPEMFRQALFKLWGSPDKYPKDILTYTELVLDSQGQLVEMNRLPGGNEVGMVAFKMRFKTQEYPEGRDVIVIGNDITFRIGSFGPGEDLLYLRASEMARAEGIPKIYVAANSGARIGMAEEIKHMFHVAWVDPEDPHKGFKYLYLTPQDYTRISSLNSVHCKHIEEGGESRYMITDIIGKDDGLGVENLRGSGMIAGESSLAYEEIVTISLVTCRAIGIGAYLVRLGQRVIQVENSHIILTGASALNKVLGREVYTSNNQLGGVQIMHYNGVSHITVPDDFEGVYTILEWLSYMPKDNHSPVPIITPTDPIDREIEFLPSRAPYDPRWMLAGRPHPTLKGTWQSGFFDHGSFKEIMAPWAQTVVTGRARLGGIPVGVIAVETRTVEVAVPADPANLDSEAKIIQQAGQVWFPDSAYKTAQAVKDFNREKLPLMIFANWRGFSGGMKGCLGTWRDVSWWKIRAMLPMHIGEGSV

SEQ ID NO: 334054 - DNA, 7167 bp, Artificial Sequence
  derived and/or modified sequence
atggtccttttactctgtctgtcttgcctcatcttttcttgcttaactttttcttggctgaagatttggggtaagatgaccgactcgaagcccattacaaaatcgaagtctgaagcaaatctgattcctagtcaagagccgtttcccgcttctgacaactcaggcgagacccctcaacgcaacggagaggggcatacactgcctaagacaccatcccaggccgaacccgcttctcataagggccctaaggacgctggcaggcggagaaactcattgcctccatctcatcaaaagccccctcgtaacccgctctcctcctccgacgcagctcctagcccggaactccaggcaaatggcaccggtacccaagggctcgaagcgacggacaccaacggactctccagctctgcgcggccacagggccagcaggctggtagtccatcgaaagaggacaagaagcaggctaatatcaaaaggcaactcatgactaatttcatcctgggcagtttcgatgactactcctccgatgaggatagtgtcgctggatcttcccgcgagtctacccgtaagggatcaagagcctctctgggcgctctatccctagaagcctacttgaccaccggagaagcagagacaagagtgccgactatgagaccttctatgagtggcttacacctcgttaaacgcgggcgggaacacaagaaactcgacttgcatcgtgatttcacagtggcctcccccgctgaattcgttacccgtttcggcggggatcgtgtgattgaaaaagtactgatcgcgaacaatggaatcgcggccgtgaaatgcatgaggtctatccgccgctgggcttacgagatgttcagaaacgaacgggccattagattcgtcgtgatggtgaccccggaagaccttaaagctaacgcagaatacatcaagatggcggatcattacgttccagtacccggggggccaaacaataacaattatgcaaacgtagagcttatagtggatatcgcaaagcggattcccgtccaagccgtctgggctggctggggacacgctagcgaaaatcctaagctgcctgaactattgtgcaaaaatggggtcgcgttcctgggcccgcccagcgaagctatgtgggccctcggagacaagattgcttctactgtggtcgctcagacactgcaggtacccactctgccctggagcgggagcggtcttaccgtagaatggacagaggacgatttacagcagggtaagcggatttctgtgcctgaagacgtgtatgacaaaggctgtgttaaggatgttgacgaaggcctcgaggccgcagagaggatcgggtttcctctaatgataaaagctagtgagggaggtggcgggaagggaatccgcaaggcagaaagtgctgaggacttcccaattctgttccgccaagtccagtccgagatccccggctcccccattttcctaatgaagctggcccagcacgcccgccaccttgaggttcaaatccttgcagaccagtatggaaacgccgtatcactcttcgggagagattgttccatccagagaagacaccagaagatcgtggaggaggcacctgccactattgcccctctggcaatttttgagttcatggagcagtgtgcgatcagactcgccaaaaccgtggggtacgtgtcagccggaactgtcgagtatctgtacagccaggatggctctttccatttcctggaactcaaccctcgtctccaagtcgaacatccctgtacagaaatgatcgcagacgtaaatttgccagccgcacaacttcaaatcgcaatgggagtgcccctccacaggctgaaggatatccgactgctgtacggcgagagcccttggggtgttacccctatctctttcgaaacaccatcaaaccccccactggctaggggacacgtgatagctgcaaggatcacaagcgagaatcccgacgagggattcaagcccagtagcggaaccgtccaggagctcaactttcgatctagtaagaacgtttggggctacttctccgtcgccgctactggaggcttgcatgagtttgctgatagccagttcggacactgcttcagttggggtgaaaacagagaggaagccatttccaatatggtggtagctctcaaggagctgtcgatccgaggggactttcgcactactgtggaatatctcattaacctgctggagacagagtctttccaaaacaatgatatagacactggctggctggattatctcatcgctgagaaggtccaggcagagaagcctgacattatgctcggcgtggtttgcggagccctgaatgtggctgatgccatgtttagaacctgcatgacggatttcctccactccctggagcgaggacaggtgctgcctgcagactcacttctgaacctagtcgacgtggagcttatatatggaggcgtcaagtatatactgaaggtggcgcgccagtcgctcacaatgtttgtgctgattatgaatggctgtcatatcgagatcgatgctcacaggcttaatgatggcgggcttcttctttcctacaatgggaacagttacacgacatatatgaaagaggaggtggactcataccgcattaccatcgggaacaaaacctgcgtatttgaaaaggaaaacgacccaacagtgctacgttccccttcggcaggaaaacttactcaatatactgtcgaggacggtggtcacgtagaggctgggtcctcttacgctgagatggaagtgatgaagatgattatgacattaaatgttcaggagagggggagagtgaaatacatcaaacggcctggcgccgtgctcgaggccgggtgtgtggttgctagactggagttggacgacccatccaaagttcacccggctgagccgtttactggggaattgcctgctcagcagactctccctatcctcggcgagaagttacaccaagtgtttcactctgtgctcgaaaatctgactaatgtgatgtcaggtttctgtctgcctgaaccagtgttcagcataaagctgaaggagtgggtgcagaaactgatgatgaccttgaggcaccccagtctgcctcttcttgaactgcaggagatcatgacctccgttgccggtagaattccagcccccgttgagaagagcgtgcggcgggtgatggctcagtacgcatctaacattactagcgtgctctgccagttccccagccagcagattgcgacgatcttagattgccatgcagcaaccctacagaggaaggcagaccgtgaagtgttcttcattaatacacagtcaattgtgcagctcgttcaatccaaggatgaactgtgcggtcccgatccttccttatctgacgaactcatcagcatactgaacgaacttacacaactctctaagagtgagcactgcaaggtagcactcagggcaagacaaatccttatagcaagtcaccttccttcctacgaactacgccacaatcaggttgaatctatttttctctcagccatagatatgtacgggcaccagttctgccctgagaatctgaaaaaactgattctatccgaaacaaccatcttcgacgtcctgcccaccttcttttaccatgccaacaaagtggtgtgcatggcaagcttagaagtgtatgttagacgcgggtatatagcatatgagctcaatagtctgcagcatagacagctgcccgatggaacctgtgtggttgagttccaattcatgctaccaagcagtcatccaaatcgtatgaccgtacccatcagcatcacgaaccccgatctgctgcgccactcgacggagctctttatggatagcggattcagccctttgtgccagcgcatgggcgcgatggtcgccttccgacgtttcgaagattttactaggaattttgacgaggtgatttcctgcttcgccaatgtccccaaagatacacccctcttctctgaagctcgaacatcgctgtactccgaggatgactgcaagagcctaagggaagagcctatccatatactgaatgtgtccatccaatgtgccgatcacttagaggacgaggcactggtccctatacttagaacatttgtccagagtaagaaaaatatactcgtggattacgggctgagacgcatcactttcctgattgcccaggagaaagagtttcccaaattctttacctttagagcccgagacgaatttgccgaggatcgcatttaccggcacttggaaccagccctggcatttcagctggaactgaaccgaatgcgtaattttgatcttaccgccgtgccttgtgctaaccacaagatgcacctatacctaggcgctgctaaagtgaaggagggcgtggaagttaccgatcatcgtttcttcatccgcgccatcatacggcactcggatctgattacgaaggaagcgtcctttgaatacctgcagaacgagggggaaaggctgctgttggaggccatggatgagttggaggtcgctttcaacaatacatccgtgagaaccgactgcaaccacattttcctgaatttcgtgcctacggtcattatggacccttttaagattgaggaaagcgtgaggtacatggtaatgagatacgggagcagactgtggaagctgagagtcctccaagcggaagtaaagatcaatatccgccagaccaccaccggctcggcggtgccgattaggctgttcatcactaatgagagcggatactacttggacatctctctgtataaagaggtcaccgatagtcgttcgggtaatatcatgtttcatagtttcggcaacaagcaaggcccacagcatggcatgctgatcaacaccccatatgtcactaaagacctcctacaagcaaaaagattccaggcccaaaccctggggactacctatatctacgacttccctgagatgtttcggcaggcactgtttaagctatggggctctccagacaagtatcccaaggatattttgacttatacagaattggtgcttgatagtcagggacagttggtggaaatgaatcgcttaccggggggtaacgaggtggggatggttgccttcaagatgcgcttcaaaacacaggagtaccctgaggggcgcgacgtaattgtgattggtaacgacatcacatttcgcataggaagcttcggaccaggcgaggacttgctctacctgcgggccagcgagatggcaagggcagagggaattcctaaaatctacgtcgctgctaacagtggagcacgcattggaatggcggaagagataaaacatatgttccatgtggcctgggtcgatccagaggatccacataaggggttcaagtatttgtacttgacccctcaggactacacacgtatttccagcttgaactccgtgcactgcaaacacatcgaagagggcggcgagtcccggtacatgattaccgacatcatcggcaaagacgatgggctgggcgttgagaatcttcgggggtcaggaatgatagcgggagagtcctccttggcttacgaggaaatagtcaccatctccctcgtgacctgcagggcaatcgggatcggcgcctatctcgtgcggcttggccagcgggtgatccaagtagaaaacagtcatatcatcctcacaggagccagtgcgcttaataaggttctgggacgggaagtctatacctccaataatcaattgggtggagtccagatcatgcactataatggggtcagtcacatcacagtgcccgatgacttcgagggggtatatacaatactggagtggctgtcctatatgcccaaggacaatcacagccccgttcctattatcaccccaacagaccctattgatcgcgaaatcgaatttctgccttctcgcgcaccctatgacccccggtggatgcttgcaggacgcccacacccaaccctcaagggaacttggcagtccggattctttgaccatggctcctttaaagaaataatggccccctgggctcaaacggtagtgactggacgggccagattagggggaataccggtgggggtcatcgcggtcgaaacccgaacagtggaagtggcagtgccggctgatccagccaatcttgatagtgaggcaaaaattatccagcaggccggccaggtttggtttcccgactctgcatacaagaccgctcaggcagtcaaggatttcaacagagagaaacttccactgatgatctttgctaattggcgcggattttcagggggaatgaaggatatgtatgaccaggtcctcaagttcggggcctacatcgttgacggcctgcgacagtacaagcagcctattctgatttatatacccccttacgctgagttgcgtggggggagttgggtggtgatcgatgccacaataaacccgctgtgcattgagatgtacgctgacaaggagagtaggggaggtgttctggaacccgagggaaccgtcgagattaaattccgcaagaaagacctgataaaatctatgagaaggattgatcccgcctacaaaaagctgatggagcagcttggcgaacctgatctgagcgacaaggataggaaagacctcgagggcaggctaaaagcccgcgaagatctgttgctccctatttaccatcaggtagctgtccagtttgctgattttcacgacacccccggccgtatgctggagaagggagttatctcagatatcctggagtggaaaacagcccgaacatttctgtattggcggctcaggaggctgttgcttgaagatcaggtgaagcaggaaattttgcaagcaagcggagagctttcacacgtgcatattcagtcaatgcttcgccgctggttcgttgaaaccgagggtgctgttaaggcctatctgtgggacaataaccaggtggtggtgcagtggctggagcagcactggcaggctggtgacggtcccaggtctacgattagggagaacataacttacctaaaacacgatagcgtgcttaaaacaatcaggggcctggtggaggagaatccagaggtggccgttgattgcgtcatctacttgtcgcagcacatctccccagccgagagagcgcaggtggtgcaccttctcagtactatggactctccagctagtacgtag

SEQ ID NO: 334055 - DNA, 7167 bp, Artificial Sequence
  derived and/or modified sequence
atggtgctgctgctgtgcctgagctgcctgatcttcagctgcctgaccttctcctggctgaagatctggggcaagatgacagacagcaagcccatcaccaagagcaagtctgaggccaacctgatccccagccaggagcccttccctgccagtgacaacagcggggagaccccccagagaaatggagagggccacaccctgcccaagacccccagccaggccgagcccgccagccacaagggccccaaggatgctggaagaagaagaaacagcctgccccccagccaccagaagcccccaagaaaccccctgagcagcagtgatgctgcccccagccctgagctgcaggccaacggcaccggcacccagggcctggaggccacagacaccaacggcctgagcagcagcgcccggccccagggccagcaggccggcagccccagcaaggaggacaagaagcaggccaacatcaagaggcagctgatgaccaacttcatcctgggcagctttgatgactacagcagtgatgaagattctgtggccggcagcagccgggagagcaccaggaagggcagccgggccagcctgggcgccctgagcctggaggcctacctgaccactggagaggccgagaccagggtgcccaccatgaggcccagcatgagcggcctgcacctggtgaagaggggccgggagcacaagaagctggacctgcaccgggacttcaccgtggccagccctgctgagtttgtgaccaggtttggaggagacagagtcatcgagaaggtgctgattgccaacaacggcattgctgctgtgaagtgcatgaggagcatccgccgctgggcctatgagatgttcagaaatgaaagagccatccgctttgtggtgatggtgaccccagaggacctgaaggccaatgctgagtacatcaagatggctgaccactacgtgcctgtgcctgggggccccaacaacaacaactatgccaacgtggagctgattgtggacatcgccaagagaattcctgtgcaggccgtgtgggccggctggggccacgccagcgagaaccccaagctgcctgagctgctgtgcaagaatggagtggccttcctgggcccccccagcgaggccatgtgggccctgggggacaagatcgccagcacagtggtggcccagaccctgcaggtgcccaccctgccctggagcggcagcggcctgactgtggagtggacagaagatgacctgcagcagggcaagaggatctctgtgcctgaagatgtgtatgacaagggctgtgtgaaggatgtggatgagggcctggaggccgctgagagaattggcttccccctgatgatcaaggccagcgagggcggcggcggcaagggcatcaggaaggccgagagcgctgaggacttccccatcctcttccggcaggtgcagagcgagatccctggcagccccatcttcctgatgaagctggcccagcacgcccggcacctggaggtgcagatcctggccgaccagtatggaaatgctgtgtccctgtttggccgggactgcagcatccagaggaggcaccagaagatcgtggaggaggccccagccaccatcgcccccctggccatctttgagttcatggagcagtgtgccatccggctggccaagacagtgggctacgtgtctgctggcaccgtggagtacctgtacagccaggacggcagcttccacttcctggagctgaacccccggctgcaggtggagcacccctgcacagagatgattgctgatgtgaacctgcctgctgcccagctgcagatcgccatgggcgtgcccctgcaccggctgaaggacatccggctgctgtatggagagagcccctggggcgtgacccccatcagctttgagacccccagcaacccccccctggcccggggccacgtgattgctgcccgcatcaccagcgagaacccagatgagggcttcaagcccagcagcggcaccgtgcaggagctgaacttccgcagcagcaagaatgtgtggggctacttctctgtggccgccactggaggcctgcatgaatttgctgacagccagtttggccactgcttctcctggggcgagaaccgggaggaggccatcagcaacatggtggtggccctgaaggagctgagcatccggggggacttccgcaccaccgtggagtacctgatcaacctgctggagacagagagcttccagaacaatgacatcgacaccggctggctggactacctgattgctgagaaggtgcaggccgagaagccagacatcatgctgggcgtggtgtgtggggccctgaatgtggctgatgccatgttccgcacctgcatgacagacttcctgcacagcctggagcggggccaggtgctgcctgctgacagcctgctgaacctggtggatgtggagctgatctatggaggagtgaagtacatcctgaaggtggcccggcagagcctgaccatgtttgtgctgatcatgaatggctgccacattgaaattgatgcccaccggctgaatgatggcggcctgctgctgagctacaacggcaacagctacaccacctacatgaaggaggaggtggacagctaccgcatcaccatcggcaacaagacctgtgtgtttgagaaggaaaatgaccccaccgtgctgcggagccccagcgctgggaagctgacccagtacacagtggaggatggcggccacgtggaggccggcagcagctatgcagagatggaggtgatgaagatgatcatgaccctgaatgtgcaggagcggggccgggtgaagtacatcaagaggcctggagctgtgctggaggccggctgtgtggtggcccggctggagctggatgaccccagcaaggtgcaccctgctgagcccttcaccggggagctgcctgcccagcagaccctgcccatcctgggggagaagctgcaccaggtgttccacagcgtgctggagaacctgaccaacgtgatgagcggcttctgcctgcctgagcctgtgttcagcatcaagctgaaggagtgggtgcagaagctgatgatgaccctgcggcaccccagcctgcccctgctggagctgcaggagatcatgacctctgtggccggccgcatcccagcccctgtggagaagtctgtgcggcgggtgatggcccagtatgccagcaacatcacctctgtgctgtgccagttccccagccagcagatcgccaccatcctggactgccacgccgccaccctgcagaggaaggctgaccgggaggtgttcttcatcaacacccagagcatcgtgcagctggtgcagagcaaggatgagctgtgtggccctgaccccagcctgagtgatgagctgatcagcatcctgaatgagctgacccagctgagcaagtctgagcactgcaaggtggccctgcgggcccggcagatcctgattgccagccacctgcccagctatgagctgcggcacaaccaggtggagagcatcttcctgagcgccatcgacatgtatggccaccagttctgcccagagaacctgaagaagctgatcctgtctgagaccaccatctttgatgtgctgcccaccttcttctaccacgccaacaaggtggtgtgcatggccagcctggaggtgtatgtgcggcggggctacatcgcctatgagctgaacagcctgcagcaccggcagctgcctgatggcacctgtgtggtggagttccagttcatgctgcccagcagccaccccaacaggatgacagtgcccatcagcatcaccaacccagacctgctgcggcacagcacagagctgttcatggattctggcttcagccccctgtgccagaggatgggcgccatggtggccttcagaagatttgaggacttcaccaggaactttgatgaagtcatcagctgctttgccaacgtgcccaaggacacccccctcttcagcgaggcccggaccagcctgtacagtgaagatgactgcaagagcctgcgggaggagcccatccacatcctgaatgtgtccatccagtgtgccgaccacctggaggatgaggccctggtgcccatcctgcggacctttgtgcagagcaagaagaacatcctggtggactatggcctgcggcgcatcaccttcctgattgcccaggagaaggagttccccaagttcttcaccttccgggccagagatgaatttgctgaagatcgcatctaccgccacctggagcccgccctggccttccagctggagctgaacaggatgaggaactttgacctgacagctgtgccctgtgccaaccacaagatgcacctgtacctgggcgccgccaaggtgaaggagggcgtggaggtgacagaccaccgcttcttcatccgggccatcatccgccacagcgacctgatcaccaaggaggccagctttgagtacctgcagaatgaaggagagcggctgctgctggaggccatggatgagctggaggtggccttcaacaacacctctgtgaggacagactgcaaccacatcttcctgaactttgtgcccaccgtcatcatggaccccttcaagattgaggagagcgtgcgctacatggtgatgagatatggcagccggctgtggaagctgcgggtgctgcaggccgaggtgaagatcaacatccggcagaccaccactggatctgctgtgcccatccgcctcttcatcaccaatgaaagtggctactacctggacatcagcctgtacaaggaggtgacagacagccgcagcggcaacatcatgttccacagctttggaaacaagcagggcccccagcacggcatgctgatcaacaccccctacgtgaccaaggacctgctgcaggccaagcgcttccaggcccagaccctgggcaccacctacatctatgacttccctgagatgttccggcaggccctcttcaagctgtggggcagcccagacaagtaccccaaggacatcctgacctacacagagctggtgctggacagccagggccagctggtggagatgaaccggctgcccggcggcaatgaggtgggcatggtggccttcaagatgaggttcaagacccaggagtacccagagggcagagatgtgattgtgattggaaatgacatcaccttcagaattggcagctttggacctggagaggacctgctgtacctgcgggccagcgagatggcccgggcagagggcatccccaagatctacgtggccgccaacagcggggccagaattggcatggccgaggagatcaagcacatgttccacgtggcctgggtggaccctgaggacccccacaagggcttcaagtacctgtacctgaccccccaggactacacccgcatcagcagcctgaacagcgtgcactgcaagcacatcgaggagggcggggagagccgctacatgatcacagacatcatcggcaaggatgatggcctgggcgtggagaacctgcggggcagcggcatgattgctggggagagcagcctggcctatgaggagatcgtgaccatcagcctggtgacctgccgggccatcggcatcggggcctacctggtgcggctgggccagagggtcatccaggtggagaacagccacatcatcctgaccggggccagcgccctgaacaaggtgctgggccgggaggtgtacaccagcaacaaccagctgggcggcgtgcagatcatgcactacaatggagtgagccacatcaccgtgcctgatgactttgagggcgtgtacaccatcctggagtggctgagctacatgcccaaggacaaccacagccctgtgcccatcatcacccccacagaccccatcgaccgggagattgagttcctgcccagccgggccccctatgacccccgctggatgctggccggccggccccaccccaccctgaagggcacctggcagagcggcttctttgaccacggcagcttcaaggagatcatggccccctgggcccagacagtggtgacaggccgggcccggctgggcggcatccctgtgggcgtgattgctgtggagaccaggacagtggaggtggccgtgcctgctgaccctgccaacctggacagcgaggccaagatcatccagcaggccggccaggtgtggttcccagattctgcctacaagacagcccaggccgtgaaggacttcaaccgggagaagctgcccctgatgatctttgccaactggaggggcttcagcggcggcatgaaggacatgtatgaccaggtgctgaagtttggagcctacatcgtggatggcctgcggcagtacaagcagcccatcctgatctacatccccccctatgcagagctgcggggcggctcctgggtggtgattgatgccaccatcaaccccctgtgcatcgagatgtatgctgacaaggagagccggggcggcgtgctggagcctgagggcaccgtggagatcaagttcaggaagaaggacctgatcaagtccatgagaagaattgatcctgcctacaagaagctgatggagcagctgggggagccagacctgagtgacaaggacaggaaggacctggagggccgcctgaaggcccgggaggacctgctgctgcccatctaccaccaggtggccgtgcagtttgctgacttccatgacaccccaggccgcatgctggagaagggcgtcatcagtgacatcctggagtggaagacagcccggaccttcctgtactggaggctgcggcggctgctgctggaggaccaggtgaagcaggagatcctgcaggccagcggggagctgagccacgtgcacatccagagcatgctgcggcgctggtttgtggagacagagggcgctgtgaaggcctacctgtgggacaacaaccaggtggtggtgcagtggctggagcagcactggcaggccggagatggccccaggagcaccatccgggagaacatcacctacctgaagcatgacagcgtgctgaagaccatccggggcctggtggaggagaaccctgaggtggccgtggactgtgtgatctacctgagccagcacatcagccctgctgagcgggcccaggtggtgcacctgctgagcaccatggacagccctgccagcacctag

SEQ ID NO: 334056 - DNA, 7167 bp, Artificial Sequence
  derived and/or modified sequence
atggtgctgctgctgtgcctgagctgcctgatcttcagctgcctgacattctcttggttgaagatttggggcaaaatgactgactcaaagcctattacaaagagcaagtcagaggccaatttaattccctctcaggaacccttcccagcatcagacaatagcggcgaaacccctcagcgaaacggtgagggccatacactcccaaagacgccatctcaagcagaacccgcatctcacaaaggtccaaaagacgctggccgacggagaaattctttacccccctctcatcagaagcccccgcggaatcctctctcaagtagcgacgctgccccatctccagagctccaagctaacggcacaggaacccagggtctagaagccaccgataccaacgggttgtcctctagtgcaagacctcagggtcagcaagctggctctcccagcaaggaagacaagaaacaggctaatataaaaagacagcttatgacaaacttcatccttggtagttttgacgactacagcagcgatgaggatagcgttgccgggagctctcgggagagcacgcggaaaggttcccgggctagtctgggagccctgagcctagaagcctatctgaccaccggagaagctgaaacacgagtgccaaccatgcgtccttccatgtctggccttcatctcgtgaaacggggtagggagcataaaaagctggatctacacagagattttaccgttgcaagtccagccgaatttgtgacacgcttcggaggggaccgagttatcgagaaagttctaatcgccaataacggtatcgccgccgtgaaatgcatgagaagcattcgcagatgggcttatgagatgttccgtaacgagagagcgatcaggtttgttgtgatggtgactcccgaagacctgaaagcaaacgcagagtacataaaaatggcagaccattacgtccccgttcccgggggccccaacaacaacaactatgcaaacgtcgaattgatcgtcgacatcgcaaagagaatccctgtccaggcggtgtgggcagggtggggacacgcctccgaaaaccctaaactgccagagctgctgtgcaagaatggagttgcctttctgggtccaccaagtgaagcaatgtgggcacttggagacaagattgcgagtaccgtcgtcgcacagaccctccaagtcccgaccctgccttggagtggaagcggcctgaccgtggagtggaccgaggacgacctccagcagggcaaacggatcagtgtacccgaagatgtctacgataaaggttgcgtgaaagatgtggacgagggcctggaggctgccgaacgaatcggatttccattaatgatcaaagccagcgagggtggcggcggaaagggcatccggaaagctgagtccgccgaggacttcccaattctgttcagacaggtgcagtcggagattcccggtagcccaatttttctgatgaagctggctcagcatgcccgtcatcttgaggtccagatcttggccgaccagtatggcaacgcggtctccctgtttggtagggactgctccatccagcggagacaccagaaaatcgtcgaggaggcgccagctacaatcgcccccttagccattttcgagtttatggaacagtgtgctataaggctggccaagactgtcggatacgtcagtgcgggcacggttgaatacttgtactcacaggatgggtcttttcacttccttgaactgaacccacgcctgcaggtcgagcatccatgcactgagatgatagccgatgtgaatctgcccgcagcccagctgcaaattgcaatgggcgtgcctcttcatcgccttaaggacattagacttctatacggggaatctccttggggcgtaacccctattagctttgagaccccatccaatcccccactcgcccgaggacacgtgatcgccgcccgtattacctcagagaaccccgacgagggatttaagccctcctccggcaccgtgcaggaactgaacttccgcagctctaagaacgtatggggatactttagtgtggccgcgactggaggtcttcacgaatttgcagactcacagttcgggcactgctttagctggggtgagaaccgtgaggaggccatttccaatatggtcgtggctttaaaagaactgtccatccgaggggacttccggaccacagtcgaatatctcatcaaccttttggaaaccgagagctttcaaaacaatgacatagacacagggtggctggactacttgatcgctgaaaaagtgcaggctgagaagcctgatatcatgctcggagttgtttgcggcgccctgaatgtcgcggacgccatgttccgaacatgtatgacggattttctccactcactggagcgcggacaggtgcttcccgccgatagcctgctgaacctcgtggacgtggagctgatttacgggggggttaagtacatcctgaaagtggcaagacaaagtctgacaatgttcgttctgataatgaacggatgccatatcgaaattgacgcccatagactgaacgacggcggccttctgctgagctataacggtaatagctacaccacttacatgaaggaggaagtcgattcttaccgtattaccatcggtaataaaacctgtgtctttgagaaggagaacgatcccaccgtgttacgtagccctagtgccggaaagctaactcagtatacagtcgaggatgggggccacgttgaggccggcagttcctacgcggaaatggaggtgatgaaaatgatcatgacactcaatgttcaggaaaggggcagggttaaatatattaaacgacccggtgccgtgttagaggccggctgcgtagtggcccgtctggagctcgatgaccccagtaaagttcatcccgcagagccttttacgggtgagctgcccgcccagcagaccctgcctattctgggcgagaagctgcatcaagtgtttcacagcgtgctcgagaacctgaccaacgtcatgagtggattttgtcttcctgagcctgtgttctccatcaagctgaaggagtgggtgcagaagctgatgatgactctcagacatcctagtctgcctctgttggaacttcaagaaatcatgacttcggtcgccggccggatcccagcccccgttgaaaaaagcgttcgacgggtcatggcccagtacgccagcaacattaccagcgttctgtgccagtttccctctcagcaaatcgctacaatccttgactgtcatgcggcgacactacaacgtaaggccgatcgcgaggtgttctttatcaacacccagagcatcgtgcaactggtgcagtccaaggatgaactctgtggcccagacccttcactgtcagatgaattgatatctatcttgaacgaactaacccagctgagtaaatctgaacattgcaaggtggccctgagggccaggcaaatactgattgcaagtcatctgccctcctatgaactcaggcataatcaggtggagtctatcttcttgtccgcgatcgatatgtatggacaccagttctgccccgaaaatctgaagaagctcatactgagtgagacaacaatttttgacgtactgcccaccttcttctaccacgccaacaaagtagtttgcatggcatcattagaagtgtacgtgcggcgcggctacatagcatacgaactcaactctctgcagcaccgacagttacctgacggaacttgcgtcgtggaattccagtttatgttaccttcttcacatcccaataggatgacggtccccattagcataacaaatcctgatttattaagacactctaccgaactgttcatggactccgggttctcgccattgtgccagcggatgggcgcaatggtcgccttccgtcggttcgaggactttacccggaattttgacgaagtgatttcctgcttcgctaacgtgccaaaggatactccactgttttccgaggccagaacaagcctgtactcagaagatgactgcaagtctttacgggaagaacctatacatatcctgaacgtgagcattcaatgcgccgatcatctggaagacgaggcactcgtgccgatcctaagaacgtttgtccagtcaaagaagaacattctggtggactacggtcttagacgaattaccttcctcatagcacaggagaaggagttccccaaattttttacttttcgagcccgggatgaattcgctgaggatcgaatctataggcatctagaacctgcgttggcgtttcagctcgagttaaacagaatgcggaactttgatctcacggccgtgccttgcgctaaccacaagatgcacctgtatcttggcgctgccaaagtaaaggagggcgtagaggtcaccgaccaccgcttctttattcgtgccatcattcgccattccgatctgatcaccaaggaagcatcttttgaatacttgcaaaacgagggcgagcgactgctccttgaagctatggatgaactggaagttgcctttaacaacactagcgtccgtaccgactgcaaccacatattcctgaactttgtgcccaccgttatcatggatcccttcaaaatcgaagagtccgtaagatacatggttatgagatacggcagcaggctctggaagctcagggtgctgcaggcggaggtgaagatcaatatccgacagaccaccacaggttccgccgtgccaatccgcctttttatcacaaatgaatcgggatattatcttgatatctccctctataaagaagtcaccgatagcaggtccgggaatataatgtttcacagttttggcaacaaacaggggccccagcacggaatgctcattaataccccatatgtgacaaaggacttgctccaggccaaacgctttcaggcccagacgcttggcactacatatatctacgattttcctgagatgttccgtcaagctctgttcaagctctgggggagcccagataagtatccaaaagacatcctaacatacaccgaattggtccttgattctcagggtcaactggtggagatgaatcggctccctggcggaaacgaggtggggatggttgctttcaaaatgagattcaagactcaggaatacccagaagggagggacgtaatcgttatcggaaacgacattacttttagaatagggtcttttgggccgggagaggacttactatacttacgcgcttcggagatggccagggccgagggcattccaaagatttacgtggcagctaactcaggagcgcgtatcgggatggctgaagaaattaaacatatgttccacgtggcctgggttgacccggaggacccccacaagggattcaaatacctgtacctcactcctcaggactatactaggatctcctctctgaactctgtgcactgcaagcatatagaggagggcggagagagtcgttatatgatcaccgacataatcgggaaagatgatggcttgggtgttgaaaacctgcggggaagcggaatgatcgccggggagtcctccctggcctatgaggagattgtcactatttccctcgtaacgtgtagggcaatcggcatcggggcttacttggttagactcggccagcgcgtgattcaagtcgagaacagccacattattctgactggagcatccgctctgaacaaagttctgggccgggaggtgtatacttcgaataaccagttgggaggcgtccaaatcatgcactacaatggtgtgtcccacattaccgtgccagatgattttgagggggtatatacaatattagaatggttaagctacatgcccaaggacaaccactcacctgtgcccataataacaccaactgaccccattgacagggagatcgaatttctgcccagccgcgcaccttatgaccccagatggatgctagccggccgcccccacccaaccctgaaggggacatggcaaagcggctttttcgatcacggctctttcaaagagatcatggccccttgggcacagaccgtcgttacagggcgcgcgcgcctggggggcatccctgtgggtgttattgccgtcgagaccaggacagttgaggtggccgtccccgccgacccagccaacctggactcggaggcaaaaatcatccaacaggctggccaggtctggtttccagattctgcctacaagactgcgcaggctgtgaaagacttcaacagagagaagctacccctcatgatctttgcaaactggagaggtttttctggagggatgaaggatatgtacgaccaggtcctgaaattcggtgcctatatcgtggatggattacggcaatacaagcagcctatcctaatctacatccctccatacgccgaactgaggggaggtagttgggtagtaatcgatgccaccatcaaccctctgtgtatagaaatgtacgctgacaaggaatctcgaggtggagtcctggagcccgaggggactgtggaaatcaaattccggaaaaaggacctgatcaaatcgatgcggagaatcgaccccgcttacaagaaactgatggagcagctgggagagccagatctctccgacaaggacagaaaagatttagagggccggctgaaagctcgagaggacctgctcctgccgatttatcaccaggttgccgttcagttcgctgactttcatgatacacctggaagaatgcttgagaagggggttatctctgatatcctagagtggaagacggcccgaactttcctgtactggaggctgcggcgactcctattggaggaccaagtgaagcaagagatcctgcaagccagtggcgagctgtcccatgtacatattcaatcaatgctacgccggtggtttgtggagactgaaggagccgttaaggcctatttatgggataataatcaagtggttgtccaatggctcgagcagcactggcaagcaggtgacggccctcgcagcaccatccgcgagaatatcacctacctgaagcacgatagcgttcttaaaaccattaggggcttagttgaggagaatcccgaggtagctgttgattgtgtgatttacctgtcccagcatattagtcccgccgagcgtgcccaggtggtgcatctgcttagcacaatggactcaccagcatccacctag

SEQ ID NO: 334057 - DNA, 7166 bp, Artificial Sequence
  derived and/or modified sequence
atggtgctgctactgtgcctaagttgtcttattttctcatgcttgaccttttcatggctcaagatatggggcaaaatgaccgatagtaagcccatcaccaagtctaaaagcgaggccaatctgatcccatctcaggagccgtttcctgctagtgacaacagcggggagactcctcagcgcaatggggaaggacacacattaccgaaaacccctagccaagcagagcctgcctcacataaggggcctaaagacgccggaagacggagaaactccctcccaccaagtcatcagaaaccaccaaggaaccctctgtcatcctcagatgctgctccctccccggaacttcaagccaatgggactgggacacagggcctggaagccacagataccaacggactgtcctccagtgcaagacctcaggggcaacaggccggttcaccaagcaaagaggataaaaagcaggccaacattaagaggcagctgatgactaacttcatcttgggctcctttgacgattactcaagtgatgaggacagcgtcgccggatcgagcagggagtcaaccagaaagggttctagggccagtttaggcgctttgtctctggaggcctatctcaccaccggcgaggcagaaacccgggtgcctacaatgcggccaagcatgagcgggctgcacctcgtcaagcgaggtagggaacacaagaaattggacttacatagagacttcacggtggcttccccagctgaatttgttacacggtttggtggcgaccgcgtcatagagaaggttctgatcgctaacaatggcatagcggcagtcaaatgcatgcgaagcatcaggaggtgggcatacgaaatgttccggaatgagagggccataagatttgtggttatggtgacacctgaggatctgaaggccaatgcagagtatattaagatggccgatcactacgtgccagtgcctggcggaccgaacaacaacaattacgccaacgtggaactcatagtggatattgctaaacggatcccagtgcaggccgtgtgggccggatggggccacgcctctgaaaaccccaagctgcctgaactgctctgcaaaaatggcgtggcattcctgggcccaccatcagaggccatgtgggcacttggcgataaaatcgcatctacggtggttgcccagacattgcaggtaccgacattgccctggtcaggcagtggcctgaccgtcgaatggacagaagacgatctgcagcaggggaagaggatttccgtccctgaggatgtgtacgataaaggatgcgtgaaggacgtggacgaaggtctcgaggccgctgagcgtatcgggtttcctttaatgatcaaggcatcggagggaggaggtggtaaaggaatcaggaaggccgagtccgcagaagatttcccaatcttgttccgtcaggtccagtctgagatccctggaagtcccattttcctgatgaaattagcccagcatgcgagacatctggaagtgcagatcttggcggaccaatacggcaacgccgtctcactcttcggccgagactgctctattcaaagaagacaccagaagattgttgaggaagcacccgctacaatcgctccccttgcaattttcgagttcatggagcagtgtgctattagacttgccaagaccgtcggctatgtttccgcgggaaccgtggagtacctctactcgcaggatgggagcttccactttctcgaattgaatcctagattgcaggtcgagcatccgtgcaccgaaatgatcgcagacgtgaacctgcccgcagcccagctgcagatagcaatgggcgttcccctgcatagactcaaggatatacggctgctgtatggcgaaagtccgtggggggtgacaccgattagtttcgagacaccaagtaatcccccactggcgaggggtcacgtgatcgccgcacggatcaccagcgaaaaccctgatgaggggtttaagccatctagtgggaccgtgcaggagttgaacttccggtctagcaagaatgtttgggggtatttcagtgtagcagccaccggaggtctgcacgagttcgcagattcgcagttcggccattgcttcagttggggagagaatcgtgaggaagctatcagcaacatggtcgtcgctcttaaagagctgtccattaggggagatttcaggacaacagtggaatacctgatcaacctgcttgagacagagtcatttcagaataacgatattgacaccgggtggcttgactatttgattgcagaaaaggtgcaggctgagaagcccgatatcatgctgggcgttgtatgtggggcacttaatgttgccgacgcaatgttcagaacatgtatgacggactttttgcacagcctggagagggggcaggtgcttcccgctgacagtctgcttaacctggtcgacgttgaacttatatatggcggtgtcaaatatattctgaaggtagccagacagtcattgactatgttcgtcctgatcatgaacgggtgccacatcgaaattgacgcccacagactcaacgatggagggcttctgttgtcttacaatggtaattcatacacaacctacatgaaagaggaggtggattcttaccggatcaccatcggcaataaaacgtgcgtttttgagaaggagaacgatcccacagtgctgagatccccttctgcaggtaaacttacccagtatacagtagaagacggcggtcacgtcgaggcgggatcctcctatgccgaaatggaagttatgaaaatgattatgacactcaatgtgcaggagcgtggaagggtgaagtatattaaaagaccaggcgctgtgttggaagcaggatgcgttgttgccagactggagctggacgacccttcaaaggttcatcccgcagagcctttcacaggcgagctgcctgctcagcagacactgcctatcctcggtgaaaaactgcaccaggtcttccacagtgttctggaaaacttgacaaatgtgatgtccggtttttgcctgccggagccagtgttttccattaaactcaaggagtgggttcagaaactgatgatgaccttgcggcacccttcgcttcctctgctggagctgcaggaaatcatgacaagtgtggctggcagaattccagccccagttgaaaaatcagtcaggcgagtgatggcacagtatgccagcaacatcactagcgtgctgtgccagtttcctagtcaacagatcgcgacaattttggactgccacgccgctactctgcaacggaaggccgaccgagaggtgttttttataaacacgcagtctattgtccagcttgtccagagtaaagacgaattgtgtggcccagacccttcactcagcgacgaacttattagtattttaaatgaattgactcagctttccaagtccgagcactgcaaggtggcactccgagctagacaaatcctgattgctagccacttaccatcctacgaacttcgccataatcaagtagaatcgattttcctctctgccattgatatgtatgggcaccagttctgccccgagaacctaaagaaacttattctgtctgaaacgacaatcttcgacgtgctcccaactttcttttaccacgctaacaaggtggtgtgtatggcatctctcgaagtgtatgtccgtagaggatacatcgcttacgagctcaacagtctccaacatcgccagctgcccgacggaacgtgtgtcgtcgaattccagtttatgctacctagctctcacccaaacagaatgactgttcctatatctatcactaaccctgacctactgcggcactcaacagagctatttatggactcgggcttctccccactctgccagcggatgggggcaatggtggcatttcgccgatttgaggatttcacacgaaatttcgacgaggtgatcagctgctttgcgaacgtcccgaaagataccccccttttttcagaagccaggacatcactctacagcgaagacgactgcaagagcctgagagaagagccgattcatatcttaaacgtgagcattcaatgcgcggatcatctcgaggacgaggccctggtccccatcctgcgaacgtttgtgcagagcaagaaaaacattctggttgactatgggttgaggagaatcacattcctcatcgcacaggagaaggaatttccaaaattcttcactttccgggctagggacgaattcgccgaggacagaatttatcggcatctggaacccgctcttgcgttccagctggagctgaacaggatgcgcaacttcgacctcaccgctgtcccatgcgccaatcacaaaatgcacctttacctgggagcagcaaaagtgaaagagggcgtggaggttaccgatcatcgattcttcattagagccattattaggcatagcgacttaattactaaggaagcgtctttcgaataccttcagaacgagggtgagcgcctccttcttgaagccatggacgagcttgaagtggccttcaataataccagtgtgagaaccgactgcaatcatatctttctcaattttgtccccactgtcattatggaccctttcaaaatcgaggagagtgtacgttacatggtcatgagatatggttcgcggctgtggaaacttcgggtgctacaggctgaggttaagatcaatataagacaaacaaccacaggatcggcggtaccaattcgcttattcattactaacgagagcgggtactatctggatatctcactctacaaggaggtgacagactcacgcagcggtaacataatgttccactctttcggaaacaaacaggggccacagcatggaatgctaataaataccccgtatgttacaaaggacttgttacaagcaaagagattccaggcacagactctcggaacaacatacatttacgatttccctgagatgttccggcaggctttgtttaagctctgggggagtccagacaagtatccaaaggatattcttacatataccgagctggtgctggactcccaaggtcagcttgtggagatgaaccggctccccggaggaaatgaagtagggatggttgcctttaagatgcggttcaagacacaggagtacccagagggaagagacgtcatagtcatcggaaacgacatcacatttcggatcgggtcgtttggacccggagaggaccttttgtatctgagagctagcgaaatggctcgggctgaaggcattcctaaaatatacgtcgctgcaaattcaggcgctagaataggcatggccgaggagattaagcacatgttccatgttgcttgggttgatcctgaagacccacataaaggtttcaaatacctttaccttacacctcaggactacacaagaatttcgtctttaaacagcgtccattgcaagcacatcgaagaaggtggcgagtcacggtatatgatcaccgatatcatcggaaaggatgatggtctgggtgtggagaatttgcgaggctcgggcatgattgccggtgagtcctccctcgcctatgaagagattgtgactatctctctggtgacctgtcgggctatcgggattggggcttatttagttcgactcgggcagcgtgtgatccaggtcgagaactcccacatcatcctgactggtgctagcgcgctgaataaggtcctaggacgcgaggtgtacacctcaaacaaccagctggggggtgtacagattatgcattataacggtgtgtctcacattactgtgcctgatgacttcgaaggcgtgtacactatcctggagtggctatcttatatgccaaaggataatcacagtcccgtgccgatcattacacccactgacccaattgaccgagagattgaattcctaccaagccgcgctccttacgatcccagatggatgctggctggcaggccacaccctaccttgaaaggaacctggcaaagcggattctttgatcacggtagcttcaaagagattatggcgccatgggctcagacagttgtgaccggtagggcccgactcggaggcatccccgtcggagtcattgccgtcgaaactaggacagtggaagtggcagttccggcagaccccgcaaatctggattctgaggcaaaaatcatacagcaagcagggcaggtgtggttccccgacagcgcttacaaaaccgctcaggccgtgaaggactttaacagggaaaagctgcccctgatgatcttcgccaactggcggggttttagcgggggtatgaaagacatgtatgaccaggtactcaaatttggagcctatattgtggatggcctgcggcagtacaaacagcctatcctcatttatatcccgccatacgctgagcttaggggcggatcttgggtggtgatagatgccaccattaaccctctttgcatcgaaatgtatgccgataaagagagtcgcggtggcgtgctggagcccgaagggactgtggagattaaatttaggaaaaaagatcttattaagagcatgcgtcgcattgatcccgcttataagaagttaatggagcagctgggagagcccgatctctctgataaggatagaaaagatcttgagggtcggttgaaagcacgcgaagatctactgctgcctatataccatcaggttgccgtgcagtttgctgatttccacgacacaccgggtcgcatgctcgagaagggggttatctccgacatccttgaatggaaaacagcaagaaccttcctttactggagactccgacgactccttctcgaggaccaggtgaagcaggagatcttgcaggctagcggggagctgagccatgtccatattcaaagtatgttgagacgttggttcgttgagacagagggagcggtaaaagcctacctgtgggacaacaaccaggtggtggttcaatggctggaacagcactggcaagcaggcgatggcccaaggagtactatccgcgagaacataacttacctgaagcacgacagtgttcttaagacaatccgtgggctggtcgaggagaatcctgaggttgcagtagactgtgtcatttacctgtcacagcatatctcccccgcagagagggctcaggtggtccacctgttgtctaccatggacagtcctgcttcaactta

SEQ ID NO: 334058 - DNA, 9037 bp, Artificial Sequence
  derived and/or modified sequence
attttctgaatggtcttgcttctttgtctatcttgtctgattttctcctgtctgaccttttcctggttaaaaatctgggggaaaatgacggactccaagccgatcaccaagagtaaatcagaagcaaacctcatcccgagccaggagccctttccagcctctgataactcaggggagacaccgcagagaaatggggagggccacactctgcccaagacacccagccaggccgagccagcctcccacaaaggccccaaagatgccggtcggcggagaaactccctaccaccctcccaccagaagcccccaagaaaccccctttcttccagtgacgcagcaccctccccagagcttcaagccaacgggactgggacacaaggtctggaggccacagataccaatggcctgtcctcctcagccaggccccagggccagcaagctggctccccctccaaagaagacaagaagcaggcaaacatcaagaggcagctgatgaccaacttcatcctgggctcttttgatgactactcctccgacgaggactctgttgctggctcatctcgtgagtctacccggaagggcagccgggccagcttgggggccctgtccctggaggcttatctgaccacaggtgaagctgagacccgcgtccccactatgaggccgagcatgtcgggactccacctggtgaagaggggacgggaacacaagaagctggacctgcacagagactttaccgtggcttctcccgctgagtttgtcacacgctttgggggggatcgggtcatcgagaaggtgcttattgccaacaacgggattgccgccgtgaagtgcatgcgctccatccgcaggtgggcctatgagatgttccgcaacgagcgggccatccggtttgttgtgatggtgacccccgaggaccttaaggccaacgcagagtacatcaagatggcggatcattacgtccccgtcccaggagggcccaataacaacaactatgccaacgtggagctgattgtggacattgccaagagaatccccgtgcaggcggtgtgggctggctggggccatgcttcagaaaaccctaaacttccggagctgctgtgcaagaatggagttgctttcttaggccctcccagtgaggccatgtgggccttaggagataagatcgcctccaccgttgtcgcccagacgctacaggtcccaaccctgccctggagtggaagcggcctgacagtggagtggacagaagatgatctgcagcagggaaaaagaatcagtgtcccagaagatgtttatgacaagggttgcgtgaaagacgtagatgagggcttggaggcagcagaaagaattggttttccattgatgatcaaagcttctgaaggtggcggagggaagggaatccggaaggctgagagtgcggaggacttcccgatccttttcagacaagtacagagtgagatcccaggctcgcccatctttctcatgaagctggcccagcacgcccgtcacctggaagttcagatcctcgctgaccagtatgggaatgctgtgtctctgtttggtcgcgactgctccatccagcggcggcatcagaagatcgttgaggaagcaccggccaccatcgccccgctggccatattcgagttcatggagcagtgtgccatccgcctggccaagaccgtgggctatgtgagtgcagggacagtggaatacctctatagtcaggatggcagcttccacttcttggagctgaatcctcgcttgcaggtggaacatccctgcacagaaatgattgctgatgttaatctgccggccgcccagctacagatcgccatgggcgtgccactgcaccggctgaaggatatccggcttctgtatggagagtcaccatggggagtgactcccatttcttttgaaaccccctcaaaccctcccctcgcccgaggccacgtcattgccgccagaatcaccagcgaaaacccagacgagggttttaagccgagctccgggactgtccaggaactgaatttccggagcagcaagaacgtgtggggttacttcagcgtggccgctactggaggcctgcacgagtttgcggattcccaatttgggcactgcttctcctggggagagaaccgggaagaggccatttcgaacatggtggtggctttgaaggaactgtccatccgaggcgactttaggactaccgtggaatacctcattaacctcctggagaccgagagcttccagaacaacgacatcgacaccgggtggttggactacctcattgctgagaaagtgcaggcggagaaaccggatatcatgcttggggtggtatgcggggccttgaacgtggccgatgcgatgttcagaacgtgcatgacagatttcttacactccctggaaaggggccaggtcctcccagcggattcactactgaacctcgtagatgtggaattaatttacggaggtgttaagtacattctcaaggtggcccggcagtctctgaccatgttcgttctcatcatgaatggctgccacatcgagattgatgcccaccggctgaatgatggggggctcctgctctcctacaatgggaacagctacaccacctacatgaaggaagaggttgacagttaccgaattaccatcggcaataagacgtgtgtgtttgagaaggagaacgatcctacagtcctgagatccccctcggctgggaagctgacacagtacacagtggaggatgggggccacgttgaggctgggagcagctacgctgagatggaggtgatgaagatgatcatgaccctgaacgttcaggaaagaggccgggtgaagtacatcaagcgtccaggtgccgtgctggaagcaggctgcgtggtggccaggctggagctcgatgacccttctaaagtccacccggctgaaccgttcacaggagaactccctgcccagcagacactgcccatcctcggagagaaactgcaccaggtcttccacagcgtcctggaaaacctcaccaacgtcatgagtggcttttgtctgccagagcccgtttttagcataaagctgaaggagtgggtgcagaagctcatgatgaccctccggcacccgtcactgccgctgctggagctgcaggagatcatgaccagcgtggcaggccgcatccccgcccctgtggagaagtctgtccgcagggtgatggcccagtatgccagcaacatcacctcggtgctgtgccagttccccagccagcagatagccaccatcctggactgccatgcagccaccctgcagcggaaggctgatcgagaggtcttcttcatcaacacccagagcatcgtgcagttggtccagagcaaggatgagctgtgtggcccagacccttccctgtcggacgagctgatctccatcctcaacgagctcactcagctgagcaaaagcgagcactgcaaagtggccctcagagcccggcagatcctgattgcctcccacctcccctcctacgagctgcggcataaccaggtggagtccattttcctgtctgccattgacatgtacggccaccagttctgccccgagaacctcaagaaattaatactttcggaaacaaccatcttcgacgtcctgcctactttcttctatcacgcaaacaaagtcgtgtgcatggcgtccttggaggtttacgtgcggaggggctacatcgcctatgagttaaacagcctgcagcaccggcagctcccggacggcacctgcgtggtagaattccagttcatgctgccgtcctcccacccaaaccggatgaccgtgcccatcagcatcaccaaccctgacctgctgaggcacagcacagagctcttcatggacagcggcttctccccactgtgccagcgcatgggagccatggtagccttcaggagattcgaggacttcaccagaaattttgatgaagtcatctcttgcttcgccaacgtgcccaaagacacccccctcttcagcgaggcccgcacctccctatactccgaggatgactgcaagagcctcagagaagagcccatccacattctgaatgtgtccatccagtgtgcagaccacctggaggatgaggcactggtgccgattttacggacattcgtacagtccaagaaaaatatccttgtggattatggactccgacgaatcacattcttgattgcccaagagaaagaatttcccaagtttttcacattcagagcaagagatgagtttgcagaagatcgcatttaccgtcacttggaacctgccctggccttccagctggaacttaaccggatgcgtaacttcgatctgaccgccgtgccctgtgccaaccacaagatgcacctttacctgggtgctgccaaggtgaaggaaggtgtggaagtgacggaccataggttcttcatccgcgccatcatcaggcactctgacctgatcacaaaggaagcctccttcgaatacctgcagaacgagggtgagcggctgctcctggaggccatggacgagctggaggtggcgttcaataacaccagcgtgcgcaccgactgcaaccacatcttcctcaacttcgtgcccactgtcatcatggaccccttcaagatcgaggagtccgtgcgctacatggttatgcgctacggcagccggctgtggaaactccgtgtgctacaggctgaggtcaagatcaacatccgccagaccaccaccggcagtgccgttcccatccgcctgttcatcaccaatgagtcgggctactacctggacatcagcctctacaaagaagtgactgactccagatctggaaatatcatgtttcactccttcggcaacaagcaagggccccagcacgggatgctgatcaatactccctacgtcaccaaggatctgctccaggccaagcgattccaggcccagaccctgggaaccacctacatctatgacttcccggaaatgttcaggcaggctctctttaaactgtggggctccccagacaagtatcccaaagacatcctgacatacactgaattagtgttggactctcagggccagctggtggagatgaaccgacttcctggtggaaatgaggtgggcatggtggccttcaaaatgaggtttaagacccaggagtacccggaaggacgggatgtgatcgtcatcggcaatgacatcacctttcgcattggatcctttggccctggagaggaccttctgtacctgcgggcatccgagatggcccgggcagagggcattcccaaaatttacgtggcagccaacagtggcgcccgtattggcatggcagaggagatcaaacacatgttccacgtggcttgggtggacccagaagacccccacaaaggatttaaatacctgtacctgactccccaagactacaccagaatcagctccctgaactccgtccactgtaaacacatcgaggaaggaggagagtccagatacatgatcacggatatcatcgggaaggatgatggcttgggcgtggagaatctgaggggctcaggcatgattgctggggagtcctctctggcttacgaagagatcgtcaccattagcttggtgacctgccgagccattgggattggggcctacttggtgaggctgggccagcgagtgatccaggtggagaattcccacatcatcctcacaggagcaagtgctctcaacaaggtcctgggaagagaggtctacacatccaacaaccagctgggtggcgttcagatcatgcattacaatggtgtctcccacatcaccgtgccagatgactttgagggggtttataccatcctggagtggctgtcctatatgccaaaggataatcacagccctgtccctatcatcacacccactgaccccattgacagagaaattgaattcctcccatccagagctccctacgacccccggtggatgcttgcaggaaggcctcacccaactctgaagggaacgtggcagagcggattctttgaccacggcagtttcaaggaaatcatggcaccctgggcgcagaccgtggtgacaggacgagcaaggcttggggggattcccgtgggagtgattgctgtggagacacggactgtggaggtggcagtccctgcagaccctgccaacctggattctgaggccaagataattcagcaggcaggacaggtgtggttcccagactcagcctacaaaaccgcccaggccgtcaaggacttcaaccgggagaagttgcccctgatgatctttgccaactggagggggttctccggtggcatgaaagacatgtatgaccaggtgctgaagtttggagcctacatcgtggacggccttagacaatacaaacagcccatcctgatctatatcccgccctatgcggagctccggggaggctcctgggtggtcatagatgccaccatcaacccgctgtgcatagaaatgtatgcagacaaagagagcaggggtggtgttctggaaccagaggggacagtggagattaagttccgaaagaaagatctgataaagtccatgagaaggatcgatccagcttacaagaagctcatggaacagctaggggaacctgatctctccgacaaggaccgaaaggacctggagggccggctaaaggctcgcgaggacctgctgctccccatctaccaccaggtggcggtgcagttcgccgacttccatgacacacccggccggatgctggagaagggcgtcatatctgacatcctggagtggaagaccgcacgcaccttcctgtattggcgtctgcgccgcctcctcctggaggaccaggtcaagcaggagatcctgcaggccagcggggagctgagtcacgtgcatatccagtccatgctgcgtcgctggttcgtggagacggagggggctgtcaaggcctacttgtgggacaacaaccaggtggttgtgcagtggctggaacagcactggcaggcaggggatggcccgcgctccaccatccgtgagaacatcacgtacctgaagcacgactctgtcctcaagaccatccgaggcctggttgaagaaaaccccgaggtggccgtggactgtgtgatatacctgagccagcacatcagcccagctgagcgggcgcaggtcgttcacctgctgtctaccatggacagcccggcctccacctgaccgtggcccgcccagccactcccgggaccacggcaaaaggaaccacccagacccaccacccgtacaccctcagcagaccctgaagacttgcttttaaacaaagaaaatcctgggcacttctgcagggctgctggttccgagctgacacccgtcttaacaaaaggcccaggagtgcctcttccaaacaaaaacagcctcctctccatagctgggaagtttattttgttttgtctctgaagacagcagttttattgcatcactaaatctaatcaagctaaaacatccctgtttccttttgcaaaacagtgcctggcatgtgggatccaggcgttctttaggatccttggataccacatcgtgaaatcttttatttttttactctgagaccagcaccagatgtaagtaagcatctcatatatttcagccaaataaatgggccaagggaaaaaaatatatatatatagacaggactagagaaaacctatttttgtaatgatgtttctttggatactgtctagtcacccagaaaaatgtatggatgaatttttttttttttttttgagacaaagtctcactgtgtcatgcaggctggagtgcagtggcatgatctcactgcaacctccatctcctgtctcagcctcctagataactgggattacaggtgcccaccaccatgcccggctaatttttgtatttttggtagagacagagtttcaccaggttggtcaggctggtctcaaactcttgacttcaggtaatccacccaccttggcctcccaaagtgctgggattacaggcatgagccaccatcttcagccagatgatttttttattgagagagtgaaatgctattttgttccccaaatggcgctagtgaatcactaggagggtcccactgataggccatgtttagcactggttgccagggattctctttttgagagagggaaagcaaaatgaatggaagtacccagctggaggtttcagggcttctggaggatgctctcgcatagctcgaggtcctctgcccacctcttctctccaaggaaaatgaggactgccccttccccctgcaggattggcccccagcctgcgcatgcaccctcctcttgcccaagtggggagcacagaggcggagaggaatcccttaccacacccacggcccagcttgctcacgagtgtcacctctgtgacggtcaccactgctcccttggagggccacttgagttactgttgcttcctcgcctgctggcttgatgagcaccgatggtgggatctgaccccgaggggcagagctgtcggtgactgaggactggactgtggtgaccatgccgatttgctcagggagaacgttgcaatgcacccagcagctcctggctctgcaggcggcacagcctggggccctgtgatcctctggtttcttccattggggcggagtcggggatggagggagctggccacaacccactgctctgatgggtggtttgtccaaggatgctgaatgtaatgcctggtcaatgtggaagcccatgaggttgcccagggaagcctccaaaagctgggatgcttgagggtatccaagttgaaaaagacaaaatctgaccatcagccagtgacagtcctggcaaatgaaggtggggcggggcagtgaggggtgggagaaggtgaatgattcattattccaccccgaggtttgctggggtgaggggaagaatcgatgctgctttgggaactgaaggtttttctgttgggaaggccctcttggttttggagagaaagacaagttatgagtagctgctaccctggaacggtgggcagagagcctactaggaaatgtgcagaataaactattttttgaagg

SEQ ID NO: 334059 - DNA, 7167 bp, Artificial Sequence
  derived and/or modified sequence
atggtgctgctgctgtgcctgagctgcctgatcttcagctgcctgaccttcagctggctgaagatctggggcaagatgaccgacagcaagcccatcaccaagagcaagagcgaggccaacctgatccccagccaggagcccttccccgccagcgacaacagcggcgagaccccccagagaaacggcgagggccacaccctgcccaagacccccagccaggccgagcccgccagccacaagggccccaaggacgccggcagaagaagaaacagcctgccccccagccaccagaagccccccagaaaccccctgagcagcagcgacgccgcccccagccccgagctgcaggccaacggcaccggcacccagggcctggaggccaccgacaccaacggcctgagcagcagcgccagaccccagggccagcaggccggcagccccagcaaggaggacaagaagcaggccaacatcaagagacagctgatgaccaacttcatcctgggcagcttcgacgactacagcagcgacgaggacagcgtggccggcagcagcagagagagcaccagaaagggcagcagagccagcctgggcgccctgagcctggaggcctacctgaccaccggcgaggccgagaccagagtgcccaccatgagacccagcatgagcggcctgcacctggtgaagagaggcagagagcacaagaagctggacctgcacagagacttcaccgtggccagccccgccgagttcgtgaccagattcggcggcgacagagtgatcgagaaggtgctgatcgccaacaacggcatcgccgccgtgaagtgcatgagaagcatcagaagatgggcctacgagatgttcagaaacgagagagccatcagattcgtggtgatggtgacccccgaggacctgaaggccaacgccgagtacatcaagatggccgaccactacgtgcccgtgcccggcggccccaacaacaacaactacgccaacgtggagctgatcgtggacatcgccaagagaatccccgtgcaggccgtgtgggccggctggggccacgccagcgagaaccccaagctgcccgagctgctgtgcaagaacggcgtggccttcctgggcccccccagcgaggccatgtgggccctgggcgacaagatcgccagcaccgtggtggcccagaccctgcaggtgcccaccctgccctggagcggcagcggcctgaccgtggagtggaccgaggacgacctgcagcagggcaagagaatcagcgtgcccgaggacgtgtacgacaagggctgcgtgaaggacgtggacgagggcctggaggccgccgagagaatcggcttccccctgatgatcaaggccagcgagggcggcggcggcaagggcatcagaaaggccgagagcgccgaggacttccccatcctgttcagacaggtgcagagcgagatccccggcagccccatcttcctgatgaagctggcccagcacgccagacacctggaggtgcagatcctggccgaccagtacggcaacgccgtgagcctgttcggcagagactgcagcatccagagaagacaccagaagatcgtggaggaggcccccgccaccatcgcccccctggccatcttcgagttcatggagcagtgcgccatcagactggccaagaccgtgggctacgtgagcgccggcaccgtggagtacctgtacagccaggacggcagcttccacttcctggagctgaaccccagactgcaggtggagcacccctgcaccgagatgatcgccgacgtgaacctgcccgccgcccagctgcagatcgccatgggcgtgcccctgcacagactgaaggacatcagactgctgtacggcgagagcccctggggcgtgacccccatcagcttcgagacccccagcaacccccccctggccagaggccacgtgatcgccgccagaatcaccagcgagaaccccgacgagggcttcaagcccagcagcggcaccgtgcaggagctgaacttcagaagcagcaagaacgtgtggggctacttcagcgtggccgccaccggcggcctgcacgagttcgccgacagccagttcggccactgcttcagctggggcgagaacagagaggaggccatcagcaacatggtggtggccctgaaggagctgagcatcagaggcgacttcagaaccaccgtggagtacctgatcaacctgctggagaccgagagcttccagaacaacgacatcgacaccggctggctggactacctgatcgccgagaaggtgcaggccgagaagcccgacatcatgctgggcgtggtgtgcggcgccctgaacgtggccgacgccatgttcagaacctgcatgaccgacttcctgcacagcctggagagaggccaggtgctgcccgccgacagcctgctgaacctggtggacgtggagctgatctacggcggcgtgaagtacatcctgaaggtggccagacagagcctgaccatgttcgtgctgatcatgaacggctgccacatcgagatcgacgcccacagactgaacgacggcggcctgctgctgagctacaacggcaacagctacaccacctacatgaaggaggaggtggacagctacagaatcaccatcggcaacaagacctgcgtgttcgagaaggagaacgaccccaccgtgctgagaagccccagcgccggcaagctgacccagtacaccgtggaggacggcggccacgtggaggccggcagcagctacgccgagatggaggtgatgaagatgatcatgaccctgaacgtgcaggagagaggcagagtgaagtacatcaagagacccggcgccgtgctggaggccggctgcgtggtggccagactggagctggacgaccccagcaaggtgcaccccgccgagcccttcaccggcgagctgcccgcccagcagaccctgcccatcctgggcgagaagctgcaccaggtgttccacagcgtgctggagaacctgaccaacgtgatgagcggcttctgcctgcccgagcccgtgttcagcatcaagctgaaggagtgggtgcagaagctgatgatgaccctgagacaccccagcctgcccctgctggagctgcaggagatcatgaccagcgtggccggcagaatccccgcccccgtggagaagagcgtgagaagagtgatggcccagtacgccagcaacatcaccagcgtgctgtgccagttccccagccagcagatcgccaccatcctggactgccacgccgccaccctgcagagaaaggccgacagagaggtgttcttcatcaacacccagagcatcgtgcagctggtgcagagcaaggacgagctgtgcggccccgaccccagcctgagcgacgagctgatcagcatcctgaacgagctgacccagctgagcaagagcgagcactgcaaggtggccctgagagccagacagatcctgatcgccagccacctgcccagctacgagctgagacacaaccaggtggagagcatcttcctgagcgccatcgacatgtacggccaccagttctgccccgagaacctgaagaagctgatcctgagcgagaccaccatcttcgacgtgctgcccaccttcttctaccacgccaacaaggtggtgtgcatggccagcctggaggtgtacgtgagaagaggctacatcgcctacgagctgaacagcctgcagcacagacagctgcccgacggcacctgcgtggtggagttccagttcatgctgcccagcagccaccccaacagaatgaccgtgcccatcagcatcaccaaccccgacctgctgagacacagcaccgagctgttcatggacagcggcttcagccccctgtgccagagaatgggcgccatggtggccttcagaagattcgaggacttcaccagaaacttcgacgaggtgatcagctgcttcgccaacgtgcccaaggacacccccctgttcagcgaggccagaaccagcctgtacagcgaggacgactgcaagagcctgagagaggagcccatccacatcctgaacgtgagcatccagtgcgccgaccacctggaggacgaggccctggtgcccatcctgagaaccttcgtgcagagcaagaagaacatcctggtggactacggcctgagaagaatcaccttcctgatcgcccaggagaaggagttccccaagttcttcaccttcagagccagagacgagttcgccgaggacagaatctacagacacctggagcccgccctggccttccagctggagctgaacagaatgagaaacttcgacctgaccgccgtgccctgcgccaaccacaagatgcacctgtacctgggcgccgccaaggtgaaggagggcgtggaggtgaccgaccacagattcttcatcagagccatcatcagacacagcgacctgatcaccaaggaggccagcttcgagtacctgcagaacgagggcgagagactgctgctggaggccatggacgagctggaggtggccttcaacaacaccagcgtgagaaccgactgcaaccacatcttcctgaacttcgtgcccaccgtgatcatggaccccttcaagatcgaggagagcgtgagatacatggtgatgagatacggcagcagactgtggaagctgagagtgctgcaggccgaggtgaagatcaacatcagacagaccaccaccggcagcgccgtgcccatcagactgttcatcaccaacgagagcggctactacctggacatcagcctgtacaaggaggtgaccgacagcagaagcggcaacatcatgttccacagcttcggcaacaagcagggcccccagcacggcatgctgatcaacaccccctacgtgaccaaggacctgctgcaggccaagagattccaggcccagaccctgggcaccacctacatctacgacttccccgagatgttcagacaggccctgttcaagctgtggggcagccccgacaagtaccccaaggacatcctgacctacaccgagctggtgctggacagccagggccagctggtggagatgaacagactgcccggcggcaacgaggtgggcatggtggccttcaagatgagattcaagacccaggagtaccccgagggcagagacgtgatcgtgatcggcaacgacatcaccttcagaatcggcagcttcggccccggcgaggacctgctgtacctgagagccagcgagatggccagagccgagggcatccccaagatctacgtggccgccaacagcggcgccagaatcggcatggccgaggagatcaagcacatgttccacgtggcctgggtggaccccgaggacccccacaagggcttcaagtacctgtacctgaccccccaggactacaccagaatcagcagcctgaacagcgtgcactgcaagcacatcgaggagggcggcgagagcagatacatgatcaccgacatcatcggcaaggacgacggcctgggcgtggagaacctgagaggcagcggcatgatcgccggcgagagcagcctggcctacgaggagatcgtgaccatcagcctggtgacctgcagagccatcggcatcggcgcctacctggtgagactgggccagagagtgatccaggtggagaacagccacatcatcctgaccggcgccagcgccctgaacaaggtgctgggcagagaggtgtacaccagcaacaaccagctgggcggcgtgcagatcatgcactacaacggcgtgagccacatcaccgtgcccgacgacttcgagggcgtgtacaccatcctggagtggctgagctacatgcccaaggacaaccacagccccgtgcccatcatcacccccaccgaccccatcgacagagagatcgagttcctgcccagcagagccccctacgaccccagatggatgctggccggcagaccccaccccaccctgaagggcacctggcagagcggcttcttcgaccacggcagcttcaaggagatcatggccccctgggcccagaccgtggtgaccggcagagccagactgggcggcatccccgtgggcgtgatcgccgtggagaccagaaccgtggaggtggccgtgcccgccgaccccgccaacctggacagcgaggccaagatcatccagcaggccggccaggtgtggttccccgacagcgcctacaagaccgcccaggccgtgaaggacttcaacagagagaagctgcccctgatgatcttcgccaactggagaggcttcagcggcggcatgaaggacatgtacgaccaggtgctgaagttcggcgcctacatcgtggacggcctgagacagtacaagcagcccatcctgatctacatccccccctacgccgagctgagaggcggcagctgggtggtgatcgacgccaccatcaaccccctgtgcatcgagatgtacgccgacaaggagagcagaggcggcgtgctggagcccgagggcaccgtggagatcaagttcagaaagaaggacctgatcaagagcatgagaagaatcgaccccgcctacaagaagctgatggagcagctgggcgagcccgacctgagcgacaaggacagaaaggacctggagggcagactgaaggccagagaggacctgctgctgcccatctaccaccaggtggccgtgcagttcgccgacttccacgacacccccggcagaatgctggagaagggcgtgatcagcgacatcctggagtggaagaccgccagaaccttcctgtactggagactgagaagactgctgctggaggaccaggtgaagcaggagatcctgcaggccagcggcgagctgagccacgtgcacatccagagcatgctgagaagatggttcgtggagaccgagggcgccgtgaaggcctacctgtgggacaacaaccaggtggtggtgcagtggctggagcagcactggcaggccggcgacggccccagaagcaccatcagagagaacatcacctacctgaagcacgacagcgtgctgaagaccatcagaggcctggtggaggagaaccccgaggtggccgtggactgcgtgatctacctgagccagcacatcagccccgccgagagagcccaggtggtgcacctgctgagcaccatggacagccccgccagcacctag

SEQ ID NO: 334060 - DNA, 5070 bp, Artificial Sequence
  derived and/or modified sequence
cttccattcctcctcaagccaccacagacactgccaagtcccgacgcgatgtttaggacgtgtatgaccgattttctgcactctctagagaggggtcaagtcctccctgccgatagcttgctcaatctcgtggatgtggagcttatttacggaggtgtaaaatatattctcaaagtcgcaagacaaagcctgactatgtttgtgctcatcatgaatgggtgccacatagaaattgatgcgcaccggttgaatgacgggggcctgctgctatcttacaatggaaacagttatactacgtatatgaaggaggaagtggacagttacagaattactatcgggaacaagacttgcgtgtttgagaaggagaatgaccctacagtgctgaggtcccccagcgcaggcaaacttacacagtacaccgtagaggatgggggacacgtggaggcaggttcttcctatgcagaaatggaagtgatgaaaatgattatgacattaaatgttcaggagcggggccgggtgaagtacatcaagcggccaggggccgtgctagaggctggatgcgtggtggcccggctggagctagatgaccctagtaaggtccaccccgctgaacccttcactggtgaactgccagcccagcaaacactcccaattctcggggagaaattacaccaggtgttccactccgtccttgagaacctgacaaacgtgatgtcagggttttgcttgcccgagcctgtatttagtattaagctgaaggagtgggtgcaaaaacttatgatgaccctgaggcaccctagcctgcctttgctggaactgcaggaaatcatgacatccgtcgcgggaagaatcccagctccggtggagaaatcagtgcgcagagtgatggcccagtacgctagcaacatcacctctgtcctctgtcagttcccctcccaacagattgcaacaatattagactgccacgctgccacattgcaacgcaaggccgaccgagaagtgtttttcatcaacacccagtccatcgtccagctggtgcagagatataggagcgggatccgcggatatatgaagactgtcgtgctggatttgctgcgacgatatctgcgtgtcgaacaccattttcagcaagctcattatgataaatgcgtgatcaatctccgagaacagttcaaaccagacatgtctcaggttctggactgtattttttctcacgcacaggtggcaaagaagaatcaactggtcatcatgttgatcgacgagctgtgcgggccggacccttcgttaagtgacgagctgattagcatcctgaacgaactgactcagctgagtaaatccgagcactgtaaagttgctctgcgggcgaggcagatcttaatcgcctcccacttgccgagttacgagctacggcataaccaagttgagtctatttttctctccgccatcgacatgtatggccaccaattctgtcctgaaaatctgaagaagcttatcctgagtgaaacgactatcttcgacgtgttgcccactttcttttaccatgccaacaaagttgtctgtatggcttccctcgaagtgtacgtgagacgtggctacatcgcttacgaactgaacagtctgcagcaccgccagctccccgatgggacatgcgttgtggaattccagttcatgctccctagctcacatccaaatcggatgaccgtgcccatatcaataaccaacccagatctcctgcgccactctaccgaactctttatggactccggctttagccccctgtgccagcgaatgggagctatggtggccttccggcgatttgaggactttaccagaaatttcgatgaggttatttcttgcttcgctaatgtgccaaaggatacaccactgttttcagaagcccgcacctccctttacagtgaggatgattgcaaaagtctaagagaagagccaatccacattctgaacgttagcattcaatgtgccgatcacttggaagatgaggcactagtccccatcctgcgcacctttgtacagagtaaaaaaaatatcctagtcgattacgggctacggaggattacctttctgatagcgcaagagaaagagttccctaagttctttacgttccgcgcacgagacgaatttgcggaagataggatatatcgtcacctggagccagccctggccttccaattagagcttaataggatgcggaattttgatttaaccgctgtgccttgcgccaaccacaaaatgcacctctacttgggtgctgccaaggtcaaagagggtgttgaggtaactgaccatcgcttcttcattcgggccatcatccgccacagtgacctcattaccaaggaggcaagcttcgaatacctccagaatgagggcgagcggctcctcctagaggcaatggatgagctggaagtggcatttaacaatacctccgtccgcacagattgcaaccatatctttttaaacttcgtgccaaccgtaatcatggacccattcaagatcgaagaatctgttcggtacatggtcatgcgttatgggagccggttgtggaaattgcgagtgctgcaagccgaagttaaaataaacattagacagacaacaaccgggagtgccgtcccaatacggctgtttattaccaatgagtccggctactatcttgacatttccctgtataaggaggtgactgattctcgtagcggcaatattatgtttcatagctttggcaataagcagggccctcagcatgggatgcttataaacacgccatacgtcacgaaagatctgttacaggccaagaggtttcaggctcagacattaggcactacatatatatatgacttcccagaaatgtttcggcaggccttgttcaagttgtggggttcaccagataagtaccctaaagacatcttaacctacaccgagctggtcctcgacagtcaaggacagcttgtggagatgaaccggctccccgggggtaatgaagtcggaatggtagccttcaaaatgcgctttaagactcaggagtacccagaggggcgtgatgtaatagtgattggtaatgatattacctttcgcattggcagttttggcccgggagaagatctgctctatttgcgtgcaagtgaaatggcgcgagctgaaggcatcccaaagatctacgtggcggcaaattcaggtgctagaatcggaatggctgaagagattaaacacatgtttcatgttgcatgggtcgatcccgaggacccacataaagggttcaaatacctgtatctgacaccacaagattatactcgcatcagcagtctgaactctgtacattgtaagcatatcgaggagggaggagagtcacggtacatgattacggatattataggcaaggatgacggacttggggtcgagaacctgagaggcagcgggatgatcgcgggcgagagtagcttagcttacgaagagattgtgaccatctctcttgtaacctgtcgtgccatcggcatcggcgcatatcttgtccgcctgggccagagggtaattcaagtggaaaactcccatatcatcttgactggagcaagcgctctgaacaaggtgctcggtcgcgaggtgtatactagcaataatcagctgggcggcgtgcagatcatgcactataatggggtcagtcatatcaccgtgccggatgactttgagggtgtctatacaatactggagtggctctcctatatgcccaaggacaaccactcaccagtacccatcatcacaccaaccgaccccatcgacagagaaattgaatttttaccttcaagagccccatatgatcctaggtggatgcttgcgggcagaccccatcctacgctgaagggcacctggcagtcgggctttttcgatcatggctcattcaaggaaataatggcaccatgggctcagaccgtcgttactggcagagcccggttgggggggatacccgtgggagtgatcgcagttgaaaccagaaccgtggaggttgctgtgcctgctgatcccgcaaacttggactctgaggctaaaattattcagcaggccggccaggtttggttccccgatagcgcttacaagacggcccaggccgtgaaggattttaatcgagaaaaattgccattgatgatattcgctaactggaggggcttttctggcggcatgaaagacatgtatgatcaggtgctgaagttcggggcttatattgttgatggactgcgacagtacaagcagccaatcttgatctacatccctccttatgccgagctaaggggaggatcctgggtagtaattgacgcaacgatcaatcctctttgcattgagatgtatgctgacaaggagtccagagggggtgtcttagagcccgagggcacagtggaaataaagttcagaaagaaagacctgattaagtccatgagaagaatagatcccgcatataaaaaactaatggaacagctcggggagcctgacctgtcagataaggaccggaaggatctggaggggagacttaaggcccgggaagatctgttgctacccatttatcaccaggtcgcagttcagtttgctgacttccacgacacacccggccgcatgctcgaaaagggcgtgattagcgatattcttgagtggaagacggctcgaaccttcctctactggagactgagaaggttgctgctagaagatcaagtgaagcaagaaatcctccaggcttctggcgaactaagtcatgtccatatccagagtatgctgcggagatggttcgtggagacagagggcgcagtaaaggcttacctgtgggacaataatcaggtggtggttcaatggcttgaacagcactggcaagcgggagacgggccgcgtagtaccatcagggaaaacattacctatttgaagcacgactccgttctgaaaacaatccgtggcctggtagaagagaaccccgaagtggccgtggattgcgtgatttacctgtctcagcatatctcaccagcagagcgcgcccaggtcgtgcatctgctgagcacaatggattcaccagcgagcacttag

SEQ ID NO: 334061 - DNA, 2577 bp, Artificial Sequence
  derived and/or modified sequence
atgacagttcccatatctatcactaatccggatctgctcaggcattctactgaattgttcatggattcaggatttagccctctgtgccagcgaatgggggccatggtcgccttccggagattcgaagactttacgcgcaatttcgacgaggtcattagctgtttcgcgaatgtgcccaaggatactccgttgttttctgaggctcgtacttcactctacagcgaggacgactgtaaatccctacgcgaagaacccattcacattctgaatgtgagcattcagtgcgcagatcacctagaagatgaagcattagtgcccatactgcgcacgttcgtgcagtctaaaaaaaatatcctagtcgactacgggctcaggagaattacctttctgatagcacaggagaaggaatttcctaaattttttacattccgcgctcgggatgagtttgcagaagatcgcatttataggcacctggaacccgcccttgcgtttcagctggaactcaaccggatgaggaattttgatctcactgccgtgccttgtgccaaccacaagatgcacctctacttaggtgctgctaaagtcaaggaaggcgtcgaggtcactgatcacaggtttttcatccgggcgataattagacattccgaccttatcactaaagaggcatccttcgagtacctacagaacgagggcgaaaggctgctccttgaagccatggacgagctcgaagtcgctttcaacaacacctccgtccgaacagattgcaatcacatcttcctgaatttcgtgcccactgttattatggacccattcaaaatcgaggaatccgttcgatacatggtcatgcggtacggctcgcggctgtggaaactcagggtgctccaagcggaggtcaaaatcaacattagacagacaacaacaggctcagccgtgccaattcgtctctttatcacaaatgaatctggctattatctggacatctccctgtacaaggaggtgacggacagtcgctctgggaatataatgtttcactcatttgggaacaagcaggggcctcaacacggcatgctaattaataccccttatgtcacgaaggacctgctgcaagcgaaaagattccaggcgcagaccttaggtaccacatacatctatgactttcccgagatgttccgacaagcgctatttaagctatgggggtctcctgacaagtacccaaaggatatactgacttatactgagttagtcctggattcccagggtcaactggtggaaatgaataggctgcccggcggaaatgaggttggcatggttgcgttcaaaatgcggtttaagacccaagaatatccagagggccgggacgtaattgtgatcggcaatgatattacatttcggatcgggtcatttggtcccggagaagatctgctgtacctccgagcctcagaaatggcccgggcagagggcatacctaagatctacgtggcagcaaattccggtgcccgaatcggcatggcggaagagatcaagcacatgttccacgttgcatgggtcgacccggaagacccccacaagggatttaagtatttatacctcaccccacaggactacacaagaatcagtagcctgaattcagtacactgcaaacatatagaagagggcggagaatctagatacatgatcacagatataattggtaaggatgacgggctcggagttgagaatctccggggaagcgggatgatcgctggcgaaagcagcctcgcatatgaagagatcgttactatttcgctggttacctgcagagccatcggtataggcgcctacctggtgaggctaggccagcgggtgatccaggtagagaattcccatataattctgacaggagcgagtgctctcaataaagtgcttggccgggaagtatacacaagcaataatcaactcgggggagtacaaattatgcactacaacggagtgagccacattacggtcccagatgacttcgaaggggtctatacaatactcgaatggctgagttatatgcccaaggacaaccacagtccagtgccaattatcacacctactgatcccatagatcgcgaaatagaattcctcccttccagagccccttatgatcctcgttggatgctggcaggccggccccatccaaccctgaaaggcacatggcaatctgggtttttcgatcacgggagtttcaaggagatcatggccccttgggcccagactgtggtcaccggccgcgctagactgggcgggatcccagtcggtgtgatcgctgtggagacacggacggtagaagtggctgtccccgctgatcccgccaacttggatagcgaagccaagattatccaacaggcagggcaggtgtggttccccgattccgcttataagaccgcccaggccgtgaaggattttaaccgggagaagttaccactgatgatctttgctaactggagaggattttcaggtggcatgaaaggttgcctcgggacgtggcgcgatgtctcctggtggaagatcagagcaatgctgccaatgcatataggggagggtagtgtctag

SEQ ID NO: 334062 - DNA, 5070 bp, Artificial Sequence
  derived and/or modified sequence
ctgcccttcctgctgaagccaccccagaccctgcccagcccagatgccatgttccgcacctgcatgacagacttcctgcacagcctggagcggggccaggtgctgcctgctgacagcctgctgaacctggtggatgtggagctgatctacggcggcgtgaagtacatcctgaaggtggcccggcagagcctgaccatgtttgtgctgatcatgaatggctgccacatcgagattgatgcccaccggctgaatgatggcggcctgctgctgagctacaatggaaacagctacaccacctacatgaaggaggaggtggacagctaccgcatcaccatcggcaacaagacctgtgtgtttgagaaggaaaatgaccccaccgtgctgcggagccccagcgctgggaagctgacccagtacacagtggaggatggcggccacgtggaggccggcagcagctatgcagagatggaggtgatgaagatgatcatgaccctgaatgtgcaggagcggggccgggtgaagtacatcaagaggcctggagctgtgctggaggccggctgtgtggtggcccggctggagctggatgaccccagcaaggtgcaccctgctgagcccttcaccggggagctgcctgcccagcagaccctgcccatcctgggggagaagctgcaccaggtgttccacagcgtgctggagaacctgaccaacgtgatgagcggcttctgcctgcctgagcccgtcttcagcatcaagctgaaggagtgggtgcagaagctgatgatgaccctgcggcaccccagcctgcccctgctggagctgcaggagatcatgacctctgtggccggccgcatcccagcccctgtggagaagtctgtgagaagagtgatggcccagtatgccagcaacatcacctctgtgctgtgccagttccccagccagcagatcgccaccatcctggactgccacgccgccaccctgcagaggaaggctgaccgggaggtgttcttcatcaacacccagagcatcgtgcagctggtgcagcgctacagaagtggcatccggggctacatgaagacagtggtgctggacctgctgcggcgctacctgcgggtggagcaccacttccagcaggcccactatgacaagtgtgtgatcaacctgcgggagcagttcaagccagacatgagccaggtgctggactgcatcttcagccacgcccaggtggccaagaagaaccagctggtgatcatgctgattgatgagctgtgtggccctgaccccagcctgagtgatgagctgatcagcatcctgaatgagctgacccagctgagcaagtctgagcactgcaaggtggccctgcgggcccggcagatcctgattgccagccacctgcccagctatgagctgcggcacaaccaggtggagagcatcttcctgagcgccatcgacatgtatggccaccagttctgcccagagaacctgaagaagctgatcctgtctgagaccaccatctttgatgtgctgcccaccttcttctaccacgccaacaaggtggtgtgcatggccagcctggaggtgtatgtgagaagaggctacatcgcctatgagctgaacagcctgcagcaccggcagctgcctgatggcacctgtgtggtggagttccagttcatgctgcccagcagccaccccaacaggatgacagtgcccatcagcatcaccaacccagacctgctgcggcacagcacagagctgttcatggacagcggcttcagccccctgtgccagaggatgggcgccatggtggccttccgccgctttgaggacttcaccaggaactttgatgaggtgatcagctgctttgccaacgtgcccaaggacacccccctcttcagcgaggcccggaccagcctgtacagtgaagatgactgcaagagcctgcgggaggagcccatccacatcctgaatgtgtccatccagtgtgccgaccacctggaggatgaggccctggtgcccatcctgcggacctttgtgcagagcaagaagaacatcctggtggactatggcctgcggcgcatcaccttcctgattgcccaggagaaggagttccccaagttcttcaccttccgggccagagatgaatttgctgaggaccgcatctaccgccacctggagcccgccctggccttccagctggagctgaacaggatgaggaactttgacctgacagctgtgccctgtgccaaccacaagatgcacctgtacctgggcgccgccaaggtgaaggagggcgtggaggtgacagaccaccgcttcttcatccgggccatcatccgccacagcgacctgatcaccaaggaggccagctttgagtacctgcagaatgaaggagagcggctgctgctggaggccatggatgagctggaggtggccttcaacaacacctctgtgaggacagactgcaaccacatcttcctgaactttgtgcccaccgtcatcatggaccccttcaagattgaggagagcgtgcgctacatggtgatgagatatggcagccggctgtggaagctgcgggtgctgcaggccgaggtgaagatcaacatccggcagaccaccaccggcagcgctgtgcccatccgcctcttcatcaccaatgaaagtggctactacctggacatcagcctgtacaaggaggtgacagacagccgcagcggcaacatcatgttccacagctttggaaacaagcagggcccccagcacggcatgctgatcaacaccccctacgtgaccaaggacctgctgcaggccaagcgcttccaggcccagaccctgggcaccacctacatctatgacttccctgagatgttccggcaggccctcttcaagctgtggggcagcccagacaagtaccccaaggacatcctgacctacacagagctggtgctggacagccagggccagctggtggagatgaaccggctgcccggcggcaatgaggtgggcatggtggccttcaagatgaggttcaagacccaggagtacccagagggcagagatgtgattgtgattggaaatgacatcaccttccgcatcggcagctttggacctggagaggacctgctgtacctgcgggccagcgagatggcccgggcagagggcatccccaagatctacgtggccgccaacagcggggcccgcatcggcatggccgaggagatcaagcacatgtttcatgtggcctgggtggaccctgaggacccccacaagggcttcaagtacctgtacctgaccccccaggactacacccgcatcagcagcctgaacagcgtgcactgcaagcacatcgaggagggcggggagagccgctacatgatcacagacatcatcggcaaggatgatggcctgggcgtggagaacctgcggggcagcggcatgattgctggggagagcagcctggcctatgaggagatcgtgaccatcagcctggtgacctgccgggccatcggcattggagcctacctggtgcggctgggccagagggtcatccaggtggagaacagccacatcatcctgactggagccagcgccctgaacaaggtgctgggccgggaggtgtacaccagcaacaaccagctgggcggcgtgcagatcatgcactacaacggggtgagccacatcaccgtgcctgatgactttgaaggagtgtacaccatcctggagtggctgagctacatgcccaaggacaaccacagccctgtgcccatcatcacccccacagaccccatcgaccgggagattgagttcctgcccagccgggccccctatgacccccgctggatgctggccggccggccccaccccaccctgaagggcacctggcagagcggcttctttgaccacggcagcttcaaggagatcatggccccctgggcccagacagtggtgacaggccgggcccggctgggcggcatccctgtgggcgtgattgctgtggagaccaggacagtggaggtggccgtgcctgctgaccctgccaacctggacagcgaggccaagatcatccagcaggccggccaggtgtggttcccagacagcgcctacaagacagcccaggccgtgaaggacttcaaccgggagaagctgcccctgatgatctttgccaactggaggggcttcagcggcggcatgaaggacatgtatgaccaggtgctgaagtttggagcctacatcgtggatggcctgcggcagtacaagcagcccatcctgatctacatccccccctatgcagagctgcggggcggctcctgggtggtgattgatgccaccatcaaccccctgtgcatcgagatgtatgctgacaaggagagcagaggaggagtgctggagcctgagggcaccgtggagatcaagttcaggaagaaggacctgatcaagtccatgagaagaattgatcctgcctacaagaagctgatggagcagctgggggagccagacctgagtgacaaggacaggaaggacctggagggccgcctgaaggcccgggaggacctgctgctgcccatctaccaccaggtggccgtgcagtttgctgacttccatgacaccccaggccgcatgctggagaagggcgtcatcagtgacatcctggagtggaagacagcccggaccttcctgtactggaggctgcggcggctgctgctggaggaccaggtgaagcaggagatcctgcaggccagcggggagctgagccacgtgcacatccagagcatgctgcggcgctggtttgtggagacagaaggagctgtgaaggcctacctgtgggacaacaaccaggtggtggtgcagtggctggagcagcactggcaggccggagatggccccaggagcaccatccgggagaacatcacctacctgaagcatgattctgtgctgaagaccatccggggcctggtggaggagaaccctgaggtggccgtggactgtgtgatctacctgagccagcacatcagccctgctgagcgggcccaggtggtgcacctgctgagcaccatggacagccctgccagcacctag

SEQ ID NO: 334063 - DNA, 2577 bp, Artificial Sequence
  derived and/or modified sequence
atgacagtgcccatcagcatcaccaacccagacctgctgcggcacagcacagagctgttcatggattctggcttcagccccctgtgccagaggatgggcgccatggtggccttcagaagatttgaggacttcaccaggaactttgatgaagtcatcagctgctttgccaacgtgcccaaggacacccccctcttcagcgaggcccggaccagcctgtacagtgaagatgactgcaagagcctgcgggaggagcccatccacatcctgaatgtgtccatccagtgtgccgaccacctggaggatgaggccctggtgcccatcctgcggacctttgtgcagagcaagaagaacatcctggtggactatggcctgcggcgcatcaccttcctgattgcccaggagaaggagttccccaagttcttcaccttccgggccagagatgaatttgctgaagatcgcatctaccgccacctggagcccgccctggccttccagctggagctgaacaggatgaggaactttgacctgacagctgtgccctgtgccaaccacaagatgcacctgtacctgggcgccgccaaggtgaaggagggcgtggaggtgacagaccaccgcttcttcatccgggccatcatccgccacagcgacctgatcaccaaggaggccagctttgagtacctgcagaatgaaggagagcggctgctgctggaggccatggatgagctggaggtggccttcaacaacacctctgtgaggacagactgcaaccacatcttcctgaactttgtgcccaccgtcatcatggaccccttcaagattgaggagagcgtgcgctacatggtgatgagatatggcagccggctgtggaagctgcgggtgctgcaggccgaggtgaagatcaacatccggcagaccaccactggatctgctgtgcccatccgcctcttcatcaccaatgaaagtggctactacctggacatcagcctgtacaaggaggtgacagacagccgcagcggcaacatcatgttccacagctttggaaacaagcagggcccccagcacggcatgctgatcaacaccccctacgtgaccaaggacctgctgcaggccaagcgcttccaggcccagaccctgggcaccacctacatctatgacttccctgagatgttccggcaggccctcttcaagctgtggggcagcccagacaagtaccccaaggacatcctgacctacacagagctggtgctggacagccagggccagctggtggagatgaaccggctgcccggcggcaatgaggtgggcatggtggccttcaagatgaggttcaagacccaggagtacccagagggcagagatgtgattgtgattggaaatgacatcaccttcagaattggcagctttggacctggagaggacctgctgtacctgcgggccagcgagatggcccgggcagagggcatccccaagatctacgtggccgccaacagcggggccagaattggcatggccgaggagatcaagcacatgttccacgtggcctgggtggaccctgaggacccccacaagggcttcaagtacctgtacctgaccccccaggactacacccgcatcagcagcctgaacagcgtgcactgcaagcacatcgaggagggcggggagagccgctacatgatcacagacatcatcggcaaggatgatggcctgggcgtggagaacctgcggggcagcggcatgattgctggggagagcagcctggcctatgaggagatcgtgaccatcagcctggtgacctgccgggccatcggcatcggggcctacctggtgcggctgggccagagggtcatccaggtggagaacagccacatcatcctgaccggggccagcgccctgaacaaggtgctgggccgggaggtgtacaccagcaacaaccagctgggcggcgtgcagatcatgcactacaatggagtgagccacatcaccgtgcctgatgactttgagggcgtgtacaccatcctggagtggctgagctacatgcccaaggacaaccacagccctgtgcccatcatcacccccacagaccccatcgaccgggagattgagttcctgcccagccgggccccctatgacccccgctggatgctggccggccggccccaccccaccctgaagggcacctggcagagcggcttctttgaccacggcagcttcaaggagatcatggccccctgggcccagacagtggtgacaggccgggcccggctgggcggcatccctgtgggcgtgattgctgtggagaccaggacagtggaggtggccgtgcctgctgaccctgccaacctggacagcgaggccaagatcatccagcaggccggccaggtgtggttcccagattctgcctacaagacagcccaggccgtgaaggacttcaaccgggagaagctgcccctgatgatctttgccaactggaggggcttcagcggcggcatgaagggctgcctgggcacctggagagatgtgtcctggtggaagatccgggccatgctgcccatgcacatcggggagggctctgtgtag

SEQ ID NO: 334064 - DNA, 5070 bp, Artificial Sequence
  derived and/or modified sequence
ctgcccttcctgctgaagcccccccagaccctgcccagccccgacgcaatgttccgtacctgcatgaccgactttctgcattccctcgaaaggggccaggtgcttcctgcagacagcctcttgaacctggtggatgttgagctcatctacggcggagtgaagtatatcctgaaggtggcgagacagtcactgactatgtttgtacttattatgaatgggtgccacatcgagatagatgctcataggttgaatgacggtggccttctgctgtcttacaatgggaattcttacaccacatatatgaaggaggaagtcgatagctacaggataaccatagggaataaaacctgcgtgtttgagaaggagaacgatccaacagtgctgagaagcccatctgccggaaagcttacacagtatacagtcgaagacggcggccacgtcgaggctggctcctcatacgcagaaatggaagtaatgaaaatgatcatgacattgaatgttcaagaacgaggccgcgtgaagtatattaagagacccggagcggtgttagaggctggttgcgtagtcgccaggctcgaattggacgaccccagcaaggtccaccctgccgagcccttcacaggagaattaccggcccagcaaactctccctattttaggcgagaaactccatcaggtgttccatagtgtgctggagaatctcacaaacgtaatgtcaggcttctgtttacctgagccggtattttcaatcaagctcaaagagtgggttcagaaattgatgatgactttacgccacccttccttaccactgttggaactccaggaaatcatgacatccgtggcaggacgcatcccagcccccgtcgagaaatccgtccggagggtcatggcccagtacgcctccaatatcacttcagtgctttgtcaattcccctcccagcagattgcaacaatccttgactgccacgcagcaacattacagagaaaggccgatagagaggtctttttcataaatacccaatcaatcgtacagttggttcaaagatacagatccgggattaggggctacatgaaaacagtcgtcctggacctcctgagaaggtatttgcgtgttgaacaccatttccagcaagcccactatgacaagtgcgtcattaacctccgagagcaattcaaacctgacatgtcacaggtcctggattgcatcttcagtcatgctcaagtggccaagaagaatcagctcgtcattatgttgattgacgaactgtgcggcccggacccctcgctgagcgatgaattgatcagcattcttaatgaactgactcagttgtcaaagtctgagcactgcaaggtggctcttagagcacggcagatcctgatagcttcacacctccccagctacgagcttcggcacaatcaggttgaaagcatcttcttaagcgcaatcgatatgtatgggcatcagttttgcccagagaacctgaaaaagttgatccttagcgaaaccactatcttcgatgtgctgccaacattcttctaccatgccaataaagttgtgtgcatggcttcgctggaggtctatgtgagacgggggtatattgcgtacgagctgaattcgctgcagcaccgccagttacctgacgggacctgcgtagtagagtttcagttcatgctgccttctagtcatcctaatcgtatgaccgtgcccatttcgataactaacccagacctgttacggcattcaacagaactgtttatggatagcggtttcagcccactgtgccagaggatgggcgcaatggttgcatttcggcggtttgaggattttacccgcaacttcgacgaggtgatctcctgttttgcaaatgtacccaaagatacgccgctgttctctgaagcacgcacctccctgtatagtgaggatgactgtaagtctctgcgcgaggagccaatccatatactaaacgtaagtattcagtgtgcagaccacctcgaagatgaggcgctcgtccccattctgcggaccttcgttcagagcaagaagaacattctcgtcgattacggtctgaggcgcatcaccttcctgatagctcaagaaaaagagtttcccaaattttttacctttagagcaagggacgagttcgcagaagaccggatatacaggcaccttgagcctgccctcgctttccagttggagctgaacagaatgcgcaactttgatcttacagcagtgccctgcgctaatcacaagatgcatctgtatctcggtgccgccaaagtcaaggaaggggtcgaggttacggaccaccgtttttttatacgggctattatccgtcattccgacttaattacaaaggaggcctctttcgagtatcttcagaatgaaggcgaaagactcctcttggaggcaatggatgaactcgaggtagccttcaacaacacatccgttcgaactgattgtaaccacatcttcctcaactttgtcccaaccgtgatcatggacccatttaagattgaagaatctgtgcgttatatggtgatgaggtacgggtcacggctctggaagctccgcgtgctgcaggctgaagtaaaaatcaatattcggcaaaccaccactgggtcggctgttccaatacggctcttcattactaatgagagcggatactacctagacatcagcctgtataaagaggttacagacagccgcagcggcaacatcatgttccactcgttcggaaataaacaagggcctcagcatggcatgctaattaatacgccctatgtgacgaaagacctgcttcaggctaaacgattccaggcacagacactcgggacgacctatatctatgactttcccgagatgttccgccaggccctcttcaaactgtggggctctcctgacaagtatcccaaagacatcctgacttacaccgagctggttctagactcacaggggcagttggtggagatgaatcggctgcccggcggtaatgaagtgggtatggtggcattcaaaatgagatttaaaacacaggaatatccagagggcagagacgtcatagtgatcggcaatgacatcactttcaggattgggtcttttgggcctggagaggacctactgtatctgcgagcaagtgagatggcccgggcggagggcatacccaaaatttacgtagcagctaacagtggagccagaatcgggatggcagaagagatcaagcacatgtttcacgtagcttgggtggaccccgaagacccacacaagggttttaagtacctgtacttaacaccccaggactacactcggatttcttctctcaatagtgtccattgtaagcacatagaagaaggcggagaatcaaggtacatgattactgacattataggcaaggatgatggcctgggcgtggagaatctaaggggaagcggcatgatcgctggcgaatcctccctcgcttacgaggaaattgtaacaatttcactagttacatgtagagcgatcggcatcggggcctacctagtcagactgggacagcgtgtcattcaagtggagaattcccatatcatcttaaccggagcgtccgccttgaataaggtgctcggtagagaggtttatacctcaaataaccagctaggcggcgtccagatcatgcattataatggagtgtcccatatcacggtgcccgacgacttcgaaggcgtctataccatactggaatggctgtcctacatgcctaaggacaatcacagtcccgtgccaattattacccccaccgaccccattgatagggagatcgagttcctgccctctagggcaccttatgacccgcggtggatgctcgccggacgcccccatccaactttaaaagggacctggcagagcggatttttcgaccacggatctttcaaggaaatcatggccccctgggctcagactgtagttactggcagagctagactcggaggcattcccgtgggggtaatcgctgtggagacaagaaccgtcgaggttgctgtaccggctgaccccgcaaacctggattcagaagctaaaatcattcagcaagcgggacaggtctggttcccggattctgcttacaaaacggcccaggcggttaaggatttcaacagggaaaagttaccacttatgatatttgcaaattggcgggggttttctggggggatgaaagatatgtacgaccaggtgttgaagtttggagcctatatcgttgatgggctcaggcagtataaacaacccattctgatctatatcccaccctacgccgaactcagaggcggatcatgggtagtgatcgacgcaacaatcaaccctctctgcatcgaaatgtatgcagacaaggagtcacgggggggagtcttggaacctgaggggaccgttgagatcaagtttcggaaaaaggatcttatcaaatcgatgcgccgcatagacccagcctacaagaagctgatggagcagcttggcgaaccagatctgtcggacaaggaccgcaaggacctggagggacgcctcaaagctcgggaggatctcttgctgccaatctatcaccaagtggcagtccaatttgccgactttcatgatacaccgggccggatgctggaaaagggtgtgatctcagacatcctcgagtggaagacagcacgcacttttctttattggcgattacgccgcctcctcctggaagaccaagtgaaacaggagatcttgcaggccagtggcgaactgtctcatgtgcatatccagtcgatgctgcgcagatggtttgttgagactgagggggctgtgaaggcctatctctgggacaacaaccaagtggtggtgcagtggcttgaacagcattggcaggctggcgacggacccaggtctaccattcgtgagaacatcacctacttgaaacacgacagcgtgctcaagaccatcaggggcctcgtggaggagaatccagaagttgcagtcgattgcgtaatctacctttctcagcatataagtcccgccgaaagggcccaggtcgttcatctgttgagcaccatggacagtcccgcttcaacctag

SEQ ID NO: 334065 - DNA, 2577 bp, Artificial Sequence
  derived and/or modified sequence
atgaccgtgcccatcagcatcaccaaccccgacctgctgcggcacagtacggagctattcatggatagcggctttagcccattgtgccaacggatgggagctatggttgcatttcgccgcttcgaagattttactaggaacttcgacgaggttattagctgctttgccaatgttccaaaagacacacccctgtttagcgaggctcggacaagcctgtatagcgaggacgattgcaagtcgttgagggaggagcccattcacatcctgaatgtctctattcagtgcgccgatcacctggaggatgaggctcttgtgcccattctgcgaacattcgtccagtctaaaaagaatattttagtagactacgggctgaggcgaattacttttctcattgcacaggagaaggaattcccaaagtttttcacgtttcgagcacgcgatgagttcgccgaggatcgcatctatcggcatttggagcccgcactcgcattccagctggaactgaaccggatgcggaatttcgaccttactgcagtgccatgcgccaaccataaaatgcatctctatctgggtgctgccaaggtgaaagaaggagtggaggtgacagaccatcggttcttcatacgcgctatcataaggcactctgacctgatcactaaggaggctagctttgagtatctacaaaacgagggggagcggctcctcttagaggctatggatgagctggaagtggctttcaacaataccagcgtcaggacagactgtaaccatatattcctgaatttcgtccctacagttattatggatccctttaagatcgaggaatctgtacgatacatggttatgaggtacgggtcccggctctggaagctacgagtgttacaagcggaagttaagatcaacattcggcaaactacaaccggtagtgcagttcccatcagactctttatcaccaatgaatctgggtactaccttgacatttcactatacaaggaggtgaccgactctcgcagtggaaatataatgtttcacagcttcggtaacaagcagggccctcagcacggcatgctcatcaataccccctatgtgaccaaggatcttttgcaagccaaacgttttcaggcccagacactggggacaacctacatctacgattttcctgaaatgttcaggcaagctctgttcaagctgtgggggtctcctgacaagtaccccaaggacatccttacatacacagaactcgtgctggactctcagggtcagcttgtggagatgaatcggctgcccggaggaaacgaggtcggtatggtggccttcaaaatgcgattcaaaacccaggaatatccagagggacgcgacgtcatagtaattggcaatgatataaccttcaggatcggatccttcggacccggcgaggacctgctgtacctccgcgccagcgagatggccagagctgaagggatccccaaaatatacgttgctgccaactcaggcgctcgcatcgggatggcggaagaaatcaaacacatgtttcacgtggcctgggttgatccggaagatccacacaaaggatttaaatatctttatctcacccctcaagattatacccgcatctctagcctgaacagcgtgcactgtaagcacatcgaggaagggggcgagagtaggtatatgattactgatattataggcaaggatgacggcctaggcgtggagaaccttagggggagtggcatgatcgctggtgaatcttctctagcatatgaggaaatagtaaccatctccttggtgacctgccgagcgattgggattggcgcctacctggttaggctgggtcagagagtgatccaggtggaaaattcacacattatcctaaccggagcctctgctctcaataaggttctcggccgagaggtatacacctctaataaccagctggggggggtccagattatgcattataacggggtgagtcatataactgtccccgacgactttgaaggcgtctatacaatccttgaatggctttcttatatgccaaaagataaccactcccctgttcctatcatcacccctacggatccaattgacagagaaattgagttcctgccctccagagctccatacgatcctagatggatgctcgccgggcggccccacccaactctcaagggcacatggcagagcgggttctttgaccacggatctttcaaggagattatggccccctgggcccagacagtagttacaggtagggccagactgggcggcatcccggttggcgtgatcgccgttgaaacccgtacagtcgaggtggccgtgccagccgatcctgccaatctcgacagtgaagctaaaatcatccagcaggccggccaagtttggttcccggactctgcttataaaaccgcgcaagccgttaaggatttcaatcgagaaaagctgccattaatgatttttgcaaactggcgtggtttttccggtggtatgaagggctgcttggggacatggagggacgtgagttggtggaagattagggccatgctgcctatgcacattggagaggggtccgtctag

SEQ ID NO: 334066 - DNA, 5069 bp, Artificial Sequence
  derived and/or modified sequence
ctgccctttctcctcaaacctccccaaacactgccttctccggacgctatgttcaggacctgcatgaccgactttctacactcccttgagcgtggacaggtgctgccagccgacagcctgctgaacctcgtcgatgtggaattgatttatggaggcgttaagtatatcctcaaggtggcaagacagagccttacaatgtttgtgctgattatgaacgggtgtcacattgagatagacgcgcaccgactcaacgacggaggcttactgctgagctacaacggcaattcttacacaacgtacatgaaagaagaggtagattcatatcggatcactatcggaaacaagacatgtgtgtttgagaaagagaatgatccaacggtgctgcgatctccttctgctggaaagctcacacagtacaccgtcgaagatggaggtcacgtagaagcgggaagtagctatgcagagatggaggtgatgaagatgatcatgaccctcaacgtgcaagagcgcggacgagtgaaatacattaagaggcccggagcagtgctcgaagcaggatgcgttgtagccagacttgaacttgacgacccatcaaaggtgcaccctgccgaaccattcacaggggagttgccagcccaacagaccctgccaatcctgggggagaagcttcaccaggtctttcacagtgtgctggagaaccttactaacgtcatgagcgggttctgccttccggagccagtattttcgatcaagctgaaggagtgggtccagaagctgatgatgacgctacggcacccttccctgcccttactcgaactccaagagattatgacctcggttgccggtagaattccagcgcctgtggaaaaatccgtacgacgcgtgatggcccaatacgcttccaacatcacatccgtcctatgtcaatttccgtcccagcagattgcaacgattttagactgccatgctgcaacactacagcggaaggctgatcgcgaggttttcttcatcaatactcagtccatagttcagctcgtgcagcgctaccgctcaggcatccggggttatatgaagacggtggtgctcgacctacttcggcgttaccttcgtgtggagcaccacttccagcaggcccactatgacaaatgtgtgataaatctccgcgaacaatttaagcctgatatgtcacaagtcctagactgtattttctcacatgcgcaggtggccaagaagaatcaactggtcatcatgctcatagatgaattgtgtggaccagacccctccctcagcgatgaattaatcagcatcctcaacgagctcacacagctgtcaaaatcggagcactgtaaggtcgcactgagggccaggcagattctcatcgccagccatctcccgagctatgaactgcggcataatcaagtcgaaagcattttcctgtccgctatcgacatgtatggtcatcagttctgcccggagaacctgaagaaactgatcctcagtgaaactacaatctttgacgtgttgcctacgtttttctaccacgctaacaaggtagtctgcatggcctctctggaggtgtacgtgcgcagaggctatatcgcctacgagctaaacagcctccagcatagacagttaccagatgggacatgcgtggtggagttccagtttatgttacctagctcacatccaaatcgcatgaccgtgccaattagcataacgaaccctgacctgctgcgacacagtacggagctattcatggatagcggtttttctccactttgccagagaatgggggctatggtggcctttaggaggtttgaggactttacccgaaacttcgatgaagtcattagttgttttgctaatgtgcctaaagacacccccctgttctcagaggccaggacatccctgtacagcgaggatgactgcaagagtctccgcgaggaaccaattcatattctcaacgtctcaatccagtgtgccgaccacctggaagacgaggcattagtcccaatcctcaggaccttcgttcaaagcaaaaagaacatcctggtggactacggcctgcgaaggattacatttctgatcgcccaggagaaagaattccctaagttctttacctttagggccagagacgagtttgccgaggataggatatatcgccacctcgagcctgcactagcttttcagttggaactgaatagaatgcggaattttgacctgacagccgtgccttgcgccaatcacaaaatgcacctgtatctaggcgctgccaaagttaaagagggcgtcgaggtaacggaccacagattctttattcgggctattataagacactcagatcttatcacaaaagaggcctcgttcgaatacctacagaacgagggagagcggctgctgctggaggccatggacgaactggaagtcgcttttaacaatacttcagtccgaaccgattgtaatcacattttcttaaatttcgtgcccacagttattatggatccgttcaagattgaggagtcggtgcgatacatggtcatgcgttatggtagtcgtttatggaaactgagggttctgcaggcagaagtgaagattaacattcgacagaccaccactggcagcgccgtgccaattagactctttatcaccaacgaatcgggctattaccttgacatttccctctacaaggaagtgactgactctagatctggtaacatcatgttccattcctttgggaacaagcagggccctcagcacgggatgctcatcaatactccttatgttaccaaagatctgctccaggccaagaggttccaggcacagacgttgggaacaacctatatctatgactttccagagatgttccggcaagccctgtttaaactgtggggcagcccagacaagtatccaaaggacatcctgacgtacaccgaattagtgctggattcacagggtcagctggttgagatgaataggcttcctggaggtaatgaggtgggaatggttgcttttaaaatgcggtttaaaacgcaggaataccctgagggcagggacgtgatcgtaattggcaatgacatcacctttagaataggatcctttgggccaggcgaggaccttttatacctccgagcttctgaaatggccagagccgaggggattcctaaaatctatgtggcggcaaactcgggtgcaaggattggtatggctgaggaaatcaagcacatgttccacgtcgcatgggtcgatcccgaggatcctcataagggattcaagtatctttacctcaccccacaagactacacgcgcatcagcagccttaattctgtgcattgcaagcatatcgaggaaggcggtgagagccggtatatgataacagatattataggaaaggacgacggcctaggcgtagaaaatctccgcggttctggcatgatagcaggggagtcgagtctcgcctatgaagagatcgttacaatatcactggtcacttgcagggctattgggatcggggcttacctggtgagacttggccaaagagtgattcaggtggagaactctcacatcatccttaccggtgccagcgccctgaacaaagtgctcggacgagaggtgtacacctccaacaaccagttgggaggggttcaaatcatgcactacaacggcgtcagccacattaccgttccggatgacttcgaaggcgtctacacaattctggagtggctctcatatatgcccaaggacaatcattccccagtccccattatcacccccaccgacccaatcgacagggaaatcgagtttctccccagcagggcgccatatgatccccgatggatgctggcaggcaggcctcaccctaccctgaaaggaacatggcaatcaggattttttgaccacggaagttttaaggaaataatggcaccttgggctcaaaccgtggtgaccggcagagccagattggggggtatcccagttggtgtgatcgctgtcgaaacccgtacggtcgaagtggcggttccagccgatcctgcgaacttagacagtgaagcaaagattatacagcaggctggacaagtttggttccccgatagcgcatacaagaccgctcaggcggttaaagatttcaacagagagaaactgccacttatgatattcgctaattggagaggctttagtggaggaatgaaggatatgtacgaccaggtgttgaagtttggcgcttatatcgtggacgggctgcggcagtataagcagccgatcctgatttacatcccaccctacgcggaacttcgcggtgggtcatgggtggtaattgacgctacgattaacccgttgtgtatcgagatgtatgccgataaggagtcccgtggaggcgtgctggaaccagagggaacagtggagatcaaattccggaaaaaggacttaattaagtcgatgcggaggattgatccagcctacaaaaaactcatggagcagttaggagaacctgaccttagcgacaaagatagaaaagacctggaaggacggctgaaagcacgagaagatcttctgctgccaatctatcatcaggtggctgtccaatttgccgactttcatgacacacccggtagaatgctagagaaaggtgtaatctccgatatactggagtggaagactgcccgaacatttctgtattggcggctcagacgccttttgctcgaggatcaggtgaaacaggaaattctgcaggctagtggcgaactgtcccatgtgcacatccagagcatgctgcggcgatggtttgtggaaacagagggagctgtgaaggcttacctgtgggataataaccaggtcgttgttcagtggctggagcagcactggcaggcaggcgatggtccgagaagcacaattagagagaacattacctatttgaaacacgactccgtactgaagaccatccgaggactcgtggaggagaaccccgaggtcgctgtcgattgtgtcatctacctgtcacaacatatctctccagcagagagagcacaggtggtgcaccttttatcaaccatggattcacctgcctccaccta

SEQ ID NO: 334067 - DNA, 2577 bp, Artificial Sequence
  derived and/or modified sequence
atgacagtgccgatttctatcaccaaccccgatttactgcgccactccaccgagctctttatggattccgggttctcaccattatgccagcgaatgggcgctatggtcgctttccggcgatttgaagacttcacaaggaattttgacgaagtcatttcttgttttgctaatgtcccaaaagacacgcccctgttctccgaggctagaaccagtctctatagtgaggatgattgcaagtccctccgcgaggaacctatccatatcctcaacgtgagcattcagtgcgccgaccatcttgaagatgaggccttggtgccaattttacggaccttcgttcaatcaaagaaaaacatcttggtggattatggacttcggagaattacattcctgattgcgcaggagaaagagtttccgaagtttttcacattccgtgccagagatgagtttgcagaagatcgaatctaccgccaccttgagccagctctagcattccagctcgagttgaatcgtatgcgcaacttcgacctgactgccgtgccctgcgctaaccacaagatgcatctttacctgggcgctgctaaggttaaagaaggtgtggaggtgacagatcacagattctttataagggctatcattcggcactctgacctcatcacaaaggaggcctcatttgagtatttacagaacgaaggtgagagacttcttctggaggctatggatgagttggaggtggcattcaataacacgagtgtcaggacagactgcaaccatatttttctgaattttgtgccaaccgttatcatggatcccttcaaaatagaggaatctgtgagatatatggtgatgaggtacggatcccggttatggaagctcagagtgctgcaagcagaggttaaaattaacatccgccaaacaaccacaggcagtgctgtacctatacggctctttatcaccaacgagtccggttactatctcgacataagcctctacaaagaggtgactgacagcagatccggaaacatcatgtttcattcttttggtaacaaacagggcccacagcatggaatgctgatcaacacaccttacgtgactaaggatcttttacaggctaagcggtttcaggctcagactttgggaactacctatatctacgactttcccgagatgtttagacaagccctattcaaactgtggggatcccccgacaaataccccaaggatatcttaacatataccgaactggtgctggacagtcaggggcagctcgttgagatgaaccggcttccaggcggaaacgaagttggaatggtggcgttcaaaatgaggtttaaaacgcaggagtacccagagggcagagatgttattgtgataggcaacgacattacctttcgtattggctcctttgggccaggcgaggacctgctgtacttgcgtgcgtcggagatggccagggcggaaggtatccccaagatttatgtggccgcaaattccggggctcgaatagggatggctgaggaaattaaacatatgttccacgttgcgtgggtagaccctgaggatcctcataagggtttcaagtatctttacctgaccccccaggactatactcggatcagctcattaaattccgtgcactgtaagcacatcgaagagggaggagaaagccgatacatgataaccgacattatcggtaaagatgatgggctgggcgtggagaaccttcggggaagtggcatgattgccggagaaagttctttagcatatgaagagatcgttacgataagcctggtcacctgccgggcaatagggatcggtgcatatctggttcgtctggggcagcgcgtaatccaagtggaaaattcacatatcattctgactggagcatcagcactgaataaggtgctgggacgggaggtgtacaccagcaacaaccaactcgggggagtgcaaatcatgcactataacggagtaagccatatcaccgttcccgacgatttcgaaggagtctacaccattctggaatggttgtcctacatgccaaaggataaccatagcccagtgcccatcattacccccacagatcccatcgatagagagatcgagttcctccccagtcgcgctccttacgatccgaggtggatgctggctgggagacctcaccccacgctgaagggtacatggcaatctggcttttttgaccatggcagcttcaaggagattatggctccctgggcacagactgtggtcactggacgagcgaggctggggggtattcccgtcggcgtgattgccgtggagacaaggaccgtcgaggttgcggtgcccgcagacccagcaaatttagactctgaggctaagataatacaacaggcgggacaggtgtggtttcccgacagtgcatacaagactgcgcaggctgtcaaagatttcaacagagagaaactccccctgatgatttttgccaattggcgcggttttagcggcggaatgaaaggatgtctcggtacttggagagacgtctcttggtggaagataagggccatgctgcctatgcacatcggcgaagggagcgtgtag

SEQ ID NO: 334068 - DNA, 6931 bp, Artificial Sequence
  derived and/or modified sequence
ctcccatttcttttgaaaccccctcaaaccctcccctcgcccgatgcgatgttcagaacgtgcatgacagatttcttacactccctggaaaggggccaggtcctcccagcggattcactactgaacctcgtagatgtggaattaatttacggaggtgttaagtacattctcaaggtggcccggcagtctctgaccatgttcgttctcatcatgaatggctgccacatcgagattgatgcccaccggctgaatgatggggggctcctgctctcctacaatgggaacagctacaccacctacatgaaggaagaggttgacagttaccgaattaccatcggcaataagacgtgtgtgtttgagaaggagaacgatcctacagtcctgagatccccctcggctgggaagctgacacagtacacagtggaggatgggggccacgttgaggctgggagcagctacgctgagatggaggtgatgaagatgatcatgaccctgaacgttcaggaaagaggccgggtgaagtacatcaagcgtccaggtgccgtgctggaagcaggctgcgtggtggccaggctggagctcgatgacccttctaaagtccacccggctgaaccgttcacaggagaactccctgcccagcagacactgcccatcctcggagagaaactgcaccaggtcttccacagcgtcctggaaaacctcaccaacgtcatgagtggcttttgtctgccagagcccgtttttagcataaagctgaaggagtgggtgcagaagctcatgatgaccctccggcacccgtcactgccgctgctggagctgcaggagatcatgaccagcgtggcaggccgcatccccgcccctgtggagaagtctgtccgcagggtgatggcccagtatgccagcaacatcacctcggtgctgtgccagttccccagccagcagatagccaccatcctggactgccatgcagccaccctgcagcggaaggctgatcgagaggtcttcttcatcaacacccagagcatcgtgcagttggtccagagataccgcagcgggatccgcggctatatgaaaacagtggtgttggatctcctgagaagatacttgcgtgttgagcaccattttcagcaagcccactacgacaagtgtgtgataaacctcagggagcagttcaagccagacatgtcccaggtgctggactgcatcttctcccacgcacaggtggccaagaagaaccagctggtgatcatgttgatcgatgagctgtgtggcccagacccttccctgtcggacgagctgatctccatcctcaacgagctcactcagctgagcaaaagcgagcactgcaaagtggccctcagagcccggcagatcctgattgcctcccacctcccctcctacgagctgcggcataaccaggtggagtccattttcctgtctgccattgacatgtacggccaccagttctgccccgagaacctcaagaaattaatactttcggaaacaaccatcttcgacgtcctgcctactttcttctatcacgcaaacaaagtcgtgtgcatggcgtccttggaggtttacgtgcggaggggctacatcgcctatgagttaaacagcctgcagcaccggcagctcccggacggcacctgcgtggtagaattccagttcatgctgccgtcctcccacccaaaccggatgaccgtgcccatcagcatcaccaaccctgacctgctgaggcacagcacagagctcttcatggacagcggcttctccccactgtgccagcgcatgggagccatggtagccttcaggagattcgaggacttcaccagaaattttgatgaagtcatctcttgcttcgccaacgtgcccaaagacacccccctcttcagcgaggcccgcacctccctatactccgaggatgactgcaagagcctcagagaagagcccatccacattctgaatgtgtccatccagtgtgcagaccacctggaggatgaggcactggtgccgattttacggacattcgtacagtccaagaaaaatatccttgtggattatggactccgacgaatcacattcttgattgcccaagagaaagaatttcccaagtttttcacattcagagcaagagatgagtttgcagaagatcgcatttaccgtcacttggaacctgccctggccttccagctggaacttaaccggatgcgtaacttcgatctgaccgccgtgccctgtgccaaccacaagatgcacctttacctgggtgctgccaaggtgaaggaaggtgtggaagtgacggaccataggttcttcatccgcgccatcatcaggcactctgacctgatcacaaaggaagcctccttcgaatacctgcagaacgagggtgagcggctgctcctggaggccatggacgagctggaggtggcgttcaataacaccagcgtgcgcaccgactgcaaccacatcttcctcaacttcgtgcccactgtcatcatggaccccttcaagatcgaggagtccgtgcgctacatggttatgcgctacggcagccggctgtggaaactccgtgtgctacaggctgaggtcaagatcaacatccgccagaccaccaccggcagtgccgttcccatccgcctgttcatcaccaatgagtcgggctactacctggacatcagcctctacaaagaagtgactgactccagatctggaaatatcatgtttcactccttcggcaacaagcaagggccccagcacgggatgctgatcaatactccctacgtcaccaaggatctgctccaggccaagcgattccaggcccagaccctgggaaccacctacatctatgacttcccggaaatgttcaggcaggctctctttaaactgtggggctccccagacaagtatcccaaagacatcctgacatacactgaattagtgttggactctcagggccagctggtggagatgaaccgacttcctggtggaaatgaggtgggcatggtggccttcaaaatgaggtttaagacccaggagtacccggaaggacgggatgtgatcgtcatcggcaatgacatcacctttcgcattggatcctttggccctggagaggaccttctgtacctgcgggcatccgagatggcccgggcagagggcattcccaaaatttacgtggcagccaacagtggcgcccgtattggcatggcagaggagatcaaacacatgttccacgtggcttgggtggacccagaagacccccacaaaggatttaaatacctgtacctgactccccaagactacaccagaatcagctccctgaactccgtccactgtaaacacatcgaggaaggaggagagtccagatacatgatcacggatatcatcgggaaggatgatggcttgggcgtggagaatctgaggggctcaggcatgattgctggggagtcctctctggcttacgaagagatcgtcaccattagcttggtgacctgccgagccattgggattggggcctacttggtgaggctgggccagcgagtgatccaggtggagaattcccacatcatcctcacaggagcaagtgctctcaacaaggtcctgggaagagaggtctacacatccaacaaccagctgggtggcgttcagatcatgcattacaatggtgtctcccacatcaccgtgccagatgactttgagggggtttataccatcctggagtggctgtcctatatgccaaaggataatcacagccctgtccctatcatcacacccactgaccccattgacagagaaattgaattcctcccatccagagctccctacgacccccggtggatgcttgcaggaaggcctcacccaactctgaagggaacgtggcagagcggattctttgaccacggcagtttcaaggaaatcatggcaccctgggcgcagaccgtggtgacaggacgagcaaggcttggggggattcccgtgggagtgattgctgtggagacacggactgtggaggtggcagtccctgcagaccctgccaacctggattctgaggccaagataattcagcaggcaggacaggtgtggttcccagactcagcctacaaaaccgcccaggccgtcaaggacttcaaccgggagaagttgcccctgatgatctttgccaactggagggggttctccggtggcatgaaagacatgtatgaccaggtgctgaagtttggagcctacatcgtggacggccttagacaatacaaacagcccatcctgatctatatcccgccctatgcggagctccggggaggctcctgggtggtcatagatgccaccatcaacccgctgtgcatagaaatgtatgcagacaaagagagcaggggtggtgttctggaaccagaggggacagtggagattaagttccgaaagaaagatctgataaagtccatgagaaggatcgatccagcttacaagaagctcatggaacagctaggggaacctgatctctccgacaaggaccgaaaggacctggagggccggctaaaggctcgcgaggacctgctgctccccatctaccaccaggtggcggtgcagttcgccgacttccatgacacacccggccggatgctggagaagggcgtcatatctgacatcctggagtggaagaccgcacgcaccttcctgtattggcgtctgcgccgcctcctcctggaggaccaggtcaagcaggagatcctgcaggccagcggggagctgagtcacgtgcatatccagtccatgctgcgtcgctggttcgtggagacggagggggctgtcaaggcctacttgtgggacaacaaccaggtggttgtgcagtggctggaacagcactggcaggcaggggatggcccgcgctccaccatccgtgagaacatcacgtacctgaagcacgactctgtcctcaagaccatccgaggcctggttgaagaaaaccccgaggtggccgtggactgtgtgatatacctgagccagcacatcagcccagctgagcgggcgcaggtcgttcacctgctgtctaccatggacagcccggcctccacctgaccgtggcccgcccagccactcccgggaccacggcaaaaggaaccacccagacccaccacccgtacaccctcagcagaccctgaagacttgcttttaaacaaagaaaatcctgggcacttctgcagggctgctggttccgagctgacacccgtcttaacaaaaggcccaggagtgcctcttccaaacaaaaacagcctcctctccatagctgggaagtttattttgttttgtctctgaagacagcagttttattgcatcactaaatctaatcaagctaaaacatccctgtttccttttgcaaaacagtgcctggcatgtgggatccaggcgttctttaggatccttggataccacatcgtgaaatcttttatttttttactctgagaccagcaccagatgtaagtaagcatctcatatatttcagccaaataaatgggccaagggaaaaaaatatatatatatagacaggactagagaaaacctatttttgtaatgatgtttctttggatactgtctagtcacccagaaaaatgtatggatgaatttttttttttttttttgagacaaagtctcactgtgtcatgcaggctggagtgcagtggcatgatctcactgcaacctccatctcctgtctcagcctcctagataactgggattacaggtgcccaccaccatgcccggctaatttttgtatttttggtagagacagagtttcaccaggttggtcaggctggtctcaaactcttgacttcaggtaatccacccaccttggcctcccaaagtgctgggattacaggcatgagccaccatcttcagccagatgatttttttattgagagagtgaaatgctattttgttccccaaatggcgctagtgaatcactaggagggtcccactgataggccatgtttagcactggttgccagggattctctttttgagagagggaaagcaaaatgaatggaagtacccagctggaggtttcagggcttctggaggatgctctcgcatagctcgaggtcctctgcccacctcttctctccaaggaaaatgaggactgccccttccccctgcaggattggcccccagcctgcgcatgcaccctcctcttgcccaagtggggagcacagaggcggagaggaatcccttaccacacccacggcccagcttgctcacgagtgtcacctctgtgacggtcaccactgctcccttggagggccacttgagttactgttgcttcctcgcctgctggcttgatgagcaccgatggtgggatctgaccccgaggggcagagctgtcggtgactgaggactggactgtggtgaccatgccgatttgctcagggagaacgttgcaatgcacccagcagctcctggctctgcaggcggcacagcctggggccctgtgatcctctggtttcttccattggggcggagtcggggatggagggagctggccacaacccactgctctgatgggtggtttgtccaaggatgctgaatgtaatgcctggtcaatgtggaagcccatgaggttgcccagggaagcctccaaaagctgggatgcttgagggtatccaagttgaaaaagacaaaatctgaccatcagccagtgacagtcctggcaaatgaaggtggggcggggcagtgaggggtgggagaaggtgaatgattcattattccaccccgaggtttgctggggtgaggggaagaatcgatgctgctttgggaactgaaggtttttctgttgggaaggccctcttggttttggagagaaagacaagttatgagtagctgctaccctggaacggtgggcagagagcctactaggaaatgtgcagaataaactattttttgaagg
